United States Patent Application Publication US 2012/0017292 A1 - sequence listing, part 9

SEQ ID NO: 33669 - DNA, 1542 bp, Zea mays
  Peptide Sequence Number=SeqID_77044
atggcggaaggattgcgggtgttccccatccgggggctcggaagccgtcgcgggctgagtcttctccaacacgctccaaggtcctccccctacggcgcggggctgggtcccacgcgtcatgcaggctggcccagagcagaagaagccaaaccgccgcgcgcggtgcatgcaactgcccagcggttacgagcattcctccacttttgcccagaccggcgggtgaaagggcggacagccatgcagtcggcatgcaaccgcgccaagtgggcgcaccccttcgactccaacgcgcccagcatggaggcccaggcccacacgtcacgcaaccggcgcgccagttgcgtggtgcgagcagccgcgccgccccttgcgccactaccgcgcctcctcgactgcagaaccagtaccgcgactcgaggcaaccctgcgtatgacccaacagtgccagccaggcgcatcgatcacgggccagtcagccgcgggagaaggcgcgacggtcgatgcggccagaaatgggccgacagtaatggcggtggcaggcgggcagaagcagcggtcacgtcgtcagccatgctcacgccccgagcctccctactgatcagaggttcaaaggctagcccctcggaggggtttaacagtcgcctcagagcgcttgggcttcgcgcccactactggtcagaggttcgaaggccggcccctcggaagggttcaacggccgcctcaggccacacgggctccacgcccactactgatcagggcgggaacgatcttgtaacggaatcccatcaaagggaggcatcaagccctcggaccccgtcaaaaggggaccagctccggcagatcacccgcagaggctcgggggctgctctcgcaaacccggctccggccaaaccgttgacagcgtcaacataccagcccgagaacttgggacccgaccccgaccccgaagggtttacgtctcgcccgaggaccccctacggcgacgaacgcaccttcggctcgcccgaggcccagtcttcaccaagaagcaaccttggccaaatcgccacgccaaccgaccaaatcataggagcatttaatgcaaagggctcggactcgggctcagccccggaagacgacgaactccgcttcgcccgaccccagggctcggactcgggctcagccccagaagacgacgaactccgcttcgcccgaccccagggctcggacttgggctcagcctcggaagacgatgaactccgcttcgcccgaccccagggctcggactcgggctcagccccgaaagatgacgaactccgcttcgcccgaccccagggctcggactcgggctcagccccggaagacgacgaactccgcttcgcccgaccccagggctcggactcgggctcagccccggaagacgacgaactccgcttcgcccgaccccagggctcggactcgggctcagccccgaaagacgacgaactccgctacgcccgaccacagggcttggactcgggctcagccccggaagacgacgaactccgctttgcccgaccctag

SEQ ID NO: 33670 - DNA, 375 bp, Zea mays
  Peptide Sequence Number=SeqID_77045
atggcaatgaatgctgtgtgctgcaggtgggaagatgaaccgccaggtcgcccgcactcgctgaacggtggaccactcaacgctcggaatattataatcgtttctcggcaacgagctcagggaaggtgttttttggaccttcggcattctgaagccttcgagtttttcgcggatcgagcttgttacgaaaaacgatctagcaccactaaggggctagtgttgggggccttcttctccgctgaaggtcctctaagaaaaaacaccttcggcaaggccatatgcaagcaggcacaacacgaaggtatatgccaaagctgtaatcaagggagcgtcggcatgatgacacgtctgagacgaagggcagcaccgacttaa

SEQ ID NO: 33671 - DNA, 576 bp, Zea mays
  Peptide Sequence Number=SeqID_77046
atggctcgtacaaggaaaacaacacgcaaacctactagaccttttggcctgcctcgtcatcagttagcccccagacatgaaggaagtagtagtggcagcaatgacccaattggagacctagaagccaaggtggaacaacttcggtcagagctatgtcaccggaatagggcatgggtgcaggacaaccaatgtatagttgaattgtcagctgacgtcggccgcttgcaatatgagatttcagaatgggattcggcaattgatttggccgtcaactcgcgttcgatcgcttgggaccgcgaagcaaaagctcgagctcgtgtggcagagcttagtgcggccctcgacagcctacaagtgtactgtaatactttacatgaagaagtacatacactgtatgctcgactgcacccgaacgtgccttccgacgctgctgcaatgggagccggaccatcgggaacaacaagtgaaggacctaatggggagttggacctttttagggctcttccttccatgaaccttgctgacgaacgatctcctgcagcaggaagtgaagcaacaaaggatgacgaagactag

SEQ ID NO: 33672 - DNA, 489 bp, Zea mays
  Peptide Sequence Number=SeqID_77047
atggtggcggcgccctccctccccaacgccggtgtgggcacggccccacacccgctccaccgcgtcggctccctcctcctgctcgccgacgcagcccccggcgcgcctgccgccggcagatggccatggctcccccacggcagtggcagtcacgacaacgcgcatgcgggtccagcagccggcccagatccgccgccgaccgccaacgctgccgcctgcctagccgcgggcgtgaccaaccttccccatctaggcacgggcgcgggtctccgccccgccgtcctggtcgccatgggctctctccccctcttcaccgttcgtccccagcctggagcagctggtgcggcggcccctcctccagctccttctgcccccgtgcttccccacggcggctccgtcccctgtcatcgccggcggccgctcctccacgcgaccatcttccccggcgtagcgctcaagcctctagggcaccgctcgggctcgccctaa

SEQ ID NO: 33673 - DNA, 450 bp, Zea mays
  Peptide Sequence Number=SeqID_77048
atgggccagcatcccaacagtggtgccggcccccacacacacggtctaacatcccctcttagtcgcaacgggggcaccgcacacgatgagactggagtagaagccaaaggtaggagccgacgggctcaaatcccccgcagtagcagcgtcgtgagggagacaggcagcagtagcctgttcttcgagaggggtcgacgttcgagcatcaacggtcggcaaggtgacacaacaaaagagcaccagcaggccgaccttcttgcttcttcgattgtcctaatgtcgaggagccccgccagggaggccggcggcagcgcacgcgtctgcgcaggtcatggtggccacgcccgcagaagaatagatggggtaacggcggacccggccgggaaggccacgacagcgacgaatccagcctggaagacggcgatccggccaaagggacaacgaatatag

SEQ ID NO: 33674 - DNA, 1032 bp, Zea mays
  Peptide Sequence Number=SeqID_77049
atgcctggttcaggaaaattgtggcctgatagggatcttcacattattgaacctgggctgaatacacttggaaagagatgtctgacatacaaaatcaatggcagtggcgatcaagagacccaggatccccgggcccggcgtccgagtggctctcaagaccgacaaagacctgttcaccttcgtctggggccgcagcagattgtgggaagtgcaagggtcgcgcatgcgtctgtggcgagggctttgacaccgccatgcatattgaaaaaagtgccagagtcggctggagctgcaccaggaaccgaagcgacaattgatgaggtcggggggaatattgatggggatcttccgtcttctgagccatgcaacttgaatacaggggcattaactctggcgcagcaaatggcaccttcacttccttcggctggaactgcaccaggaaacgaggcggccattgatgacggcgtgggggcaggaaccgaagcgaccattgatgaggccgaggggaatattgatggggatattccatcttctgagccatgcaacttgaatacaggggcatcaactctcgcgcagcaaatggcaccttcactcccttcggtcgaaactgcaccaggaaacgaggcggccattgatgacggcgtgggggaattcaatgggccgctggacccacccaggctgttctcgccccagcctttgttgtctgggctgttgggaacggcggcgcagggttcgccccatctgttttgcacggaagaacatctgtccttgccccaatttttggatgggccgcctgagttggcccagctggcacacgtctcgccccagcatacacctgggtcaccagagacgatgcccctggtgcctgtctcgccccatctggaagttgggtggcttgagaggaccccgcctatgcatgtcttgcctcagcctacttctgagccgcctgagacaggaatttgcgacgtcccacctcctgattcacacaatctaaaggtctactcacgcaggaaggcaatgatagatgcatga

SEQ ID NO: 33675 - DNA, 783 bp, Zea mays
  Peptide Sequence Number=SeqID_77050
atggcggccccctcctcgcctgcgggtgacctccaccctaacgacacgggcgcgctcggcgtcaatgctctccttcctggcgttcacggccttggcccaggcgccttcctccacggcacccacggcaccgcctcggacctccccagcgcaggcgtcctcaccgacgcagccaactccggcacgggcttgctaaccgcagcagcagccgtcctccttcccgcagcgctcggcacggagcccaccaccaccactgcgccctttggagtcctctcccccgctcgcctccccaccacatggttgaagctcagcgcctcattcttggtcgcgtcaatacgcccctctccgttggccaagtggcccaccccacctctaggctcgacacctccaccaccgtcgctcttcacgctcagacgaccgaacctgaaggcacgtgctgatctccgtagacgggggcccctgtgcgccctcctaccgcccccaccaccggggcccctcatcagcctcccagcactaatggcggtcaccggccccacaagggcaccacatgggcgttggctccatcgagcgtggcagcgttccagcgtggcagtcgttctacaacctctggaccgggaccatctccatgtggtcgggcccggccacgggtaccccctcgccgtgtcctcgccagctggctcgcctggcgacgccaccctaaggcattcccccttcgacgacttcggctccgccccttctcctgcctctaaagactgctaccctgacaccttggtccctactagctag

SEQ ID NO: 33676 - DNA, 828 bp, Zea mays
  Peptide Sequence Number=SeqID_77051
atggcggccccaattgtagtgttcgcagcttccctgctcatagtgctcgtagtggccttgccagcgatactcgtgatagccatgcttgaagatatagagggaggaaacgggaggaaaaaacatggaatgggctgggccgtcagatgctccacctttagtaaagaagaagagaaggagaagacgaccgtttggcagcgtctgggaaagaagagtgtgcgggtcccggtgtggcaacgtctgttcttgttcaaggaagctctgccggctgcaggagcaggctcaggcctccagagcaagaaggtgtgggcgcggatcaactcaccaagggaagatatgaagaaagggaatctgcccttgatggcaaatgaggtagtcgctcagagaagcacttgcaacaagagaaaaaggagatccaagaaaggaaaaggtcttatggagactggccatggcgcaagacaagtttctccggttccttcagatgaggatgtcgccactcagtcccagaagttgatcagctcgtcagactccatactggcactaagaccttcttgcgttatggaattcacccctgagatggcgagggaagatgtattacttcgacgtgccctgcttgtcacaattgttgggacccgacctgaggtgatgagcgctaaggtgctggaggaagtcgctcatagttttgacgtcaacgttcaagccatgtcaattcatcacaccaggccagaggacttcctcctgttattacctgatgaagaatctgcatctaaagtgttcaatggtggaaatattctcagagggcctcttttcagtttgttgttcaaacgttag

SEQ ID NO: 33677 - DNA, 915 bp, Zea mays
  Peptide Sequence Number=SeqID_77052
atgacaattctactaatggatgtccatataaccattttcaagaggttatgtacaaacattgcaattacccccaattttctgatttatttgcagagtgtcccccctcccagaggaagtgaaccaattgttacacttggtggaattgacttgaataacagtgcaagtatgatagtcaaagaagaaaggaaagttataacagtcatctttcctgatggccgtgatggacgcacttttacccttaaggcagaaactatagaggacctaaatgaatggagaagtgcattggagaatgctctggctcaggcacccagtgttgcgaatacagcggggcaacatctggcagtcagcactgatataacagaacctgttgaagctgctgttgaacaattggacgcactaaccagttcaatccaaaagcttaagatattaggagaagatattgagactggatcggaactcggtgaatacactggacggaagccccttggtgaagatgtcgacaaactgcgaagtggtcgggaagcggagaacacgaacatcattgacggcgacacgttggcgaacgaagtgaaggtcgatctccgcgtgcttcgtgcgctgatgatgcacgagattagtggagaggtagaccgcgttgatgttaacgcagtagacgagggtggagcgctcgagggggttgtggagctcctgaaggtggcggagccaggaggcctcgacaacgctattggccacaacacgatactcggcctcagcgctggagcgggagatgacgcgttgccgcttcgaggcccaggaaacgaggttggcgcccagaaacatagtgtggtcggatatggactggtgcatgttagggcatccagcccagtcggcatcgatgtagaccaccaactcatcagtcagggagggtcaaagtag

SEQ ID NO: 33678 - DNA, 1089 bp, Zea mays
  Peptide Sequence Number=SeqID_77053
atgagggagacgggtgtggtggcgcccgacgactggtgtggcagagggggagaactggcggcgggaagaagatggggtgggagggccggcggctgggtggaggataagtctgtaattggcagaccagcagaatttgcacttgtcgatgctgatggcactacagcattcctggagaaggccttaaagttcatcgaagactatgggaagaatgagttctccccagaagaggatgcacatgttatcggtgactgtattaagtgcattcttcgagagatgccatcttccccaattccggcaccatgttgcactgccctggttagagcttaccgaactgacaagacaagaagacttgatgctatgaatagagtgatatatgaagtattcccagaaccaaatcgtcaattgttacagaggattctcaaaatgatgcagattgttggatcacacaaagctgaaaataggatgtctccgtctgctttggcagcttgcatggcaccgcttcttcttcgtcctcttcttcttggtgaatgtgaaattgatagtgaattcaatatggctggggatggttcattccagttgcttcaagctgctgctgctgccaaccatgctcaagctattgttattattatgcttgaggaatatgatcagatatttgatgatattgaagacggttcgtactcttcagatgcttatactgagtctgacattgacaaggaatattcgacagacaatgacatccctgaagacgatggttcctatggttgtggtgaagatgttgaagaagatttaaatgatgatactgaacactcttctggcattaggattgataatgcagatgataagcattcagaacttatcttcctaaaagaaaccattcagaaaaaatgtaaccattcagtgttcacaggcctgattgtgcttgttaaattttcaaaagaagcggtaatttcgttatggaggaacaaaaattgctgttctggatatgtccttatcctactccttccttatctaaatcgcctgggtctcagttattctccatcattcctgaaacagtcacttctattcctggactcaggttatgcagcctga

SEQ ID NO: 33679 - DNA, 435 bp, Zea mays
  Peptide Sequence Number=SeqID_77054
atggaggtggtggcggcgcttgctgctgcggcggcggtgctcggcgtctcatcagaggcaaaggagcaggaggatgatcggcgaggccgaccgagatgggtcgtaaaagtcagaggtttgggacttacgggtaggttccgacgcgagcggcgtcgagaaggcggagcggaaggctaccggagcgagagctgcggagggagccatcagggcgacggggagagggaggttgcggttgggcgcgtggcggagctgccggaggagccgcggcaggcgcggatggggaaggaggtgcgggcgcggcaacagagagaggcgcgcgagctgctgcgcacggatgagagggcgagctgtgcgagcgggctgggaacggagcggctccgtcccattgattttttggagtttgatggttccggatttgaggagaatatttcctaa

SEQ ID NO: 33680 - DNA, 1023 bp, Zea mays
  Peptide Sequence Number=SeqID_77055
atggcggcgatgaagggggagggcgacggggcgggtccagccgagcaggggcctgcgccggacctgacaaggggtcctgcgcagcaccagcgacaggagaagctcgaagtgggaggcgctgctgaggcgttagcatggacagcacgtgcgaggacacaacgaagaggagggtgcacgtgcggggtactcagcgaagaggaggacgccgaccaagggaggccgggcagtcacgcccgcgccgagctgcgaggggccgcgcggtcggtgttgggcggctgcggctcggcctggtcagggcgcgcgcgtccaggctggtgcagggcgccggtcgatgcagcggcagaggccgcgggcgtgcgcgctgccgtggacgtcgggcgcgcggggagctcggttgcgcgcgggcgctgggcgcggctcctgggcgcggcatcgcgcggtgagagttggggaggggcgctcggtggagagaggagcagtcagaggtggaagaagggcgccgagcacagggagctttggacgccatggaacagggagggcgcggctggaggagcttcggcggccctagacaaatggagcccgcgccatggctggagagcgcctgctccaggggagctcggccatggaggccgctgggagatgggagccgctgctcgcctgcaggggacgcgcccatggggaggaggattagggtttttctcccttcccactgcagcagccgccaggagcagccgcctcccacctgagccgccgccgcccccgggaggctcctccctcccggggcggccccttccattggcgcggctgtgcacgggcgcggcccctcgcagctcggcgcaggcgtggctgcccagcctcggcgcggcagcccccagctccgacggcgcgcggcgcgggtgcgcgtggaagcggacgaccctcttctccctggatccgcgccgccggtggcggatccgccagcacctcccatggccgccgtgctcctacaccgagcaccacaacagcagccatgtagaaagatga

SEQ ID NO: 33681 - DNA, 1356 bp, Zea mays
  Peptide Sequence Number=SeqID_77056
atgggcgggacgaggggtctgacgggcgggcccagactgccagcggaagagcgacgagagagggagaggggaggggtagctgacaggtggggccgaggtgtcaggcgcaggcgtgcgatgctgggctgcttgggccgcgagagggagagggggaggggcgggcgcgcggcgcggcttatccgcaataaatgtcgaggccgcgcagcccagaggccttacgtcaggctccgcccgctggcttacgtcacgggcagtaggccacgtggcagcatcgggtctccgcctgagcggggagcagaagcgaacacggtatggtccggacacgtgtcggctccggacccccgcctggccttgattaaggcctgggtatcctttgtcccagagtcccgggaccctgctatgagtggcccagaccccacacagagggatccaggacccgtcccaggggtccggtttgcgcccgtgggggtcctagaccttacccggaggttcggtctgtatatgcaggggtccggcactttcccatgggggttcggacccagtgttgataccttggaggatattgtcttctctggccacgtggtggccccggagccgtccacgtggcggggtcaagcgcggtttagagatagtcgcgtgggcactgcgtcttcatactgtagtaaggggtacccctatttcaaggaactgacacccaaggagtatgactcgtgggcccgggcccccacgtcaaagactgggttgttgtttcttgcagtggaggtgaagaggcgcactaccacgggcggtggtttgctcctcgcatggcggttcgccttctcaacactcggagacccgcacaccagctgtatgacttgtgggcccgggcccccgtgtcagaggctgggttgctttggtgcgcgttgggcgagattttttgcggcgtctcggggcgcgggcgggagagtcttccttgaaaagggattcaccccgtgtgcaactgttacgctttcgcattttctccactcgctgctccctttcgccttcgagctctccgcgcccctttgcattcgcgctctcctgctccacacatatgccaccgccgacgccatgacttcgcttagccaacccgaccgcttccagaccgaggcgatgctcaatgtggtgcgccacctgcttggatggagcgcgccggtgctcgccaggaggatccgcgctggcaccgtccccctcggtgacctcgccgccggggagttcgttttgttcacctcctacatctcctgcgggttggcgttgccgatctcgcctttcttactgctgttgttggaggagttcggcctccagcttcagcacctcacgccccactccatcctctag

SEQ ID NO: 33682 - DNA, 1729 bp, Zea mays
  Peptide Sequence Number=SeqID_77057
aattggtgagtttgcaattggtagactcacttcacttcgggagctgcacaaatatcgggtacagggagatgcaggtaacaaaatcagtgatatcaagaacctgggtgctattcgcgacctagatgttttcagcattgagaatgttgaaagtcttgaagaagctgataatgccaagttaaaagaaaaaccatatctcaactatctatctctcatgtggtcagcacgtgctgatacgaaaaatgggaaagatgatttgattcttgatcatcttgagccacatgcccacattcgaaacctgaatatttctggttattgtggtgcaaggcctcctatttggattgaaaatctccatgtgaagaacctggtgtcacttgagttagcaagatgcatgtattgggaacagctgccttcactcggagaattagaatgtcttaagaaacttttgttggagtgccttcctagcctacaacagattggtcaaccatctcaactttccaacattagctgtattggttcataccttcctccacatcttgacacattgattataagacattgcaaagaactgaagcagatccctatcctaccaccctgcttggttcatttggaaatatgtagggttgggttgaccgaattcccaagtataggcaatatacatggtgagagtatcgaaagcaggccatctaaaatgcagtttgtcagtgttgaagaatgtgaaagtctgaccttacctaaaggaagccctctgttgcaaatacactacatcagaacaatccatgtcctacacattagtgactgtaaagaactggaatctgctcccctgttcgatgaaatgagaaaccttagagagctcagcatcataaattgccctaagctgagggcatcaagcgaaactgaaggcaagaacctgtcaccatcactaaagaatcttataatcaagcagtgtggtgatctagtgcattttcttattaagtcactacatggtctcgttaacctttcagagctggtactagaaaattgccccggccttctatcccttccgtcagctgatgtgttcaagagtctcaagtcgctgaagttcttggaggtaattgggtgtgagaatctttcgtcatttggtggactcagttccctttgttcccttgttacactgaagattagctcctgcagtaagcttgcagctccacctgtactgggtggtgctgcgtctggtcctgctaattatgatgatgatgttatagaagaagagaatatggtgttgcctgttaattccttgcagatcgactatcttgaagttgatctcccatgtgtattgaacattgaacctctcagtagactttgccacaccaaaggattggtaattggaggcgggacacagatggtgagcttgccagagcaatggcttctacagaaccacaaagaactgcagtcactaaaggtgttatgtgccagttcattggagtctctgccaccaagtatgcgagccctgagagcgctcaacttcttcttgttgtcaggagctgggaaacttacatcacttccagacatgccctcctccctacaatggctccatgtcataggctgctgtccagagctggtgacccagattagagtgaaggacaaccctgaatggagaaagatctccacagttcccaaggtgcacatagctgctgccaagactgtccactcttctcctcatacttttcatggtatttatgcacctctctga

SEQ ID NO: 33683 - DNA, 591 bp, Zea mays
  Peptide Sequence Number=SeqID_77058
gtcagccagtggaggggcgaagatgtggggacgagtgaggactgccaacagctgaatgaccttcagaacaagatggttaagacagagcagagatctaaagcagtagaagaaacattgggtattattacccagaagctacgggagactatggaagagaacggatttgtcaggaggaaagcaaaagagaagcacttggagtatgaggaagagatgaagcaccaggaggaattttttcatagtcaaattgagggtattcacaaggccacagaggataaagaaaaacgatttgagaagttgctgcaggaggagcgctcaaaggctagacgctttgatgttgattctggaactaccgaagaagatcgtaagctaaggaaggaacatgtacagaagttcattgattgccaggtcaagaatgtggcagagtttgaagctgagcgggatgagctgatcaaaggccacgaggagaagaagatgaagctcaagaaacaatacatggagaaggagctggagctggagagggatcacgacgcagccctgacggccctgatggagaagcataagccagatacttttgaggcctccagctcgtga

SEQ ID NO: 33684 - DNA, 954 bp, Zea mays
  Peptide Sequence Number=SeqID_77059
atgagcatcagtggttctggatttggtagtggttctggattaggtggactgagcactgatatggactcatttgccagcaagcccaaagcaatacttctacaggtcgtccatctacagcagctactgcacctggtaaaggttttgtctttgaaagctgaaggagaagtcattttggaggatgtacaaccaagtgcagtttctacaagatcatctgctcttccaccaagtgaccctgtcacagtgaacatagaagagaagctcaatgttgttgttaaaagagatggtggtattagtaactttgatgttcaaggaacacttgctcttcaggttcttaatgatactgatgggttcatccatttgcagattgaaagccaagatatgcctgggcttagcttcaaaacacacccaaatatcaataaggatttgtttaacagtcagcaaattttgggagcaaaagatccaaacaggccctttccgagtggtcaaaatgaaactcctctggtgaaatggagaatccaggggatggatgagtcatctttacctctgtcagtcaattgctggccgtcagtatctggaaatgaaacctatgtgaacattgaatatgaagcttctgagatgtttgatctgcacaacgttgtcatatctatacctctgccagcacttcgggaggctccgagtgttagacagatcgatggagagtggaagttcgactcaagaaactctgtgttggaatggtctattctccttatcgatcagtcgaatcgcagtggttccatggaatttgttgttcccccagctgacccatcatcgtttttccccatctccgttggattttctgcatcgagtactttcagtgatctgaaggttactggaattcttcctctgaaggaaggcaaccctcccaagttttctcagcgggctcgtttgctcactgctaactaccaagttgtttaa

SEQ ID NO: 33685 - DNA, 831 bp, Zea mays
  Peptide Sequence Number=SeqID_77060
atgcatcgcgtccttccaccttccgagcccccggatggggagcgcctgtgttgctttcgtcttgctgtcgttggaggagtgcaacttcgcggaagttggtacctttcagccatctctcggcttcaaggattttcatcaggcagtccggctgcatcccctcgccgatggtcacccaagacggtgaccaccagtttgatggtggggagaagcaagccaggctatgacctctgccccaccctcagcttcaaggatcttcatcatccttgctggggcggagggcgagctgagccggagctctacctcccgtacgggccggcgggccacctcctccttcagcattcaggggagagggcgctcgccggcttagaggaaggggcgaacttcgacaatgcggggccgatcggctgcaagcgttgtcagctccaacatgcctggttcgctggctcagctggctctggcgcagcttccggtgccacctcccaccgctgggcggagtgcggctatctgcccgccgtacgggcggctgttgcgccgcgcgcaccgggggaccgcccaagacgttgcgcgctgctagggcggcgttcgtgttcttgggctgtcctgcccttgctccggtacgatgcctccgcgcgaaggtcggtgctcgcctgtctgggaggacccgagtggggatctgccggtgggcagatggctgccgttgtcggtgctgtggtggtggcggctgaagaagtcctcgtcgccgacgagatcgccaccgccatctgcgcttcgggcctccggctctttggctttgatagctcgtcctcgccccttgagtggggtcgtgggtga

SEQ ID NO: 33686 - DNA, 210 bp, Zea mays
  Peptide Sequence Number=SeqID_77061
atgagcaagaacacaagagacacaagatttatcctgaggttcggtcacaccaccaaggtgccctacttcctcgttgaggcgcccacaaagagccgggttgggaatgaagttttgtgcgtgctctactgtggggaagagtgtgggaggactgactggcagactggcagtgacagaggggaacagtgcagaaaccggttgaaccggttttag

SEQ ID NO: 33687 - DNA, 441 bp, Zea mays
  Peptide Sequence Number=SeqID_77062
atgggcaagaacaacaagtgcaagcgtgagccaactcctccatcggaggagtttggtgactcggagtactcagaggaggagttctcctctgagtctgaggggtctccggctcccatccccctgcgtgagtcgtctgatgactcagacgactcccaggggctcgcagcggaggtctggacgtacatccgggtcgtcgagcgctccgggctcgagggctcggatgagtcggagtactcctcggatgaggaggactcggacggcggcggcgaggacgaggacgacgacgacgacgacgatggcgacggtgacggtgacggcagcggtaggagcggcagcggcggcagcaagggcggtgacggcggcggcaccaggggcagcaaccggggcggcagcagcaggggcagcaccagaggcggcggcagcaacaaggccagtggctag

SEQ ID NO: 33688 - DNA, 585 bp, Zea mays
  Peptide Sequence Number=SeqID_77063
atggtgtcgtactcttctctaagcgggactagctcttgtatctccaaggtgacctcggagggcggtggtgttggtggggtgcttgtagcttcttccttgatctcaagtgagggtgctagaatcttattcatgggctctacgttgattatgggtgaccaagtaggtatcaatcaacttctagacgtgctcatccttgccttccttcaaggcttcaacagtaataacttcatgactttccaaggaaattgcatgggcttgagctgtggtgagatccacatggagctgacggttgcgcctttctacatcttctgctcgggtgatcatctgacggtggtaccgagccaagagatcatattgtgcatccagggtaagcagggtagctcatgcgagggccaagcacctcagtcgagtaactttgtagagtcgcgggccatctccatgcgtaagtggtgcttcgcttccggctcctatcggacgctgcccgccgtctccactatggagcttccggtcgaaacatcgtgggcctcgttcgcttcgatacacggtggtggccgtgacataaactcgattttcacgatctcgtaa

SEQ ID NO: 33689 - DNA, 252 bp, Zea mays
  Peptide Sequence Number=SeqID_77064
atgtggcatttgagatgctacgatagatgggtgaagaaaaagctgcttagtctgggacatgctttcacatgtgaagagcataaaaagatgaagggcaagaaaaatgtggaaaactcaagttttaaagtgaagaatagaaatctaaagaagaagatgatgaagatgatcaactcgcttcatcatccttcaaggacgaagatacaatataatgggttagaaagttcgacgctattatctttaacattgacatga

SEQ ID NO: 33690 - DNA, 1734 bp, Zea mays
  Peptide Sequence Number=SeqID_77065
atggaggtcgttgagttggttccttgcgcccacaataaatggggcaactggtatgagttttggttctacgttgcggagggcacagtcgaggaccatccggggctccccgtggccgagatgtgctcgcattattactcagcatacccgcagtttgaagtggcgaaggaggatgcagacagaggggccctgcggtgcgcggccggcctgagtagcaggcgcgatttggttgaggagtttgtggtgtatggggtgtggcctttggcgcatggttgggcgctgggcgaagatggggcagtgcggattgttggttggtacgtgccgaagacggagggccagcgtagctgggatatacgcgggtccaacgaccgcttgaacagggtcttcgagttgaaccgtctgccgtatggcggttatcccgggcaagacgatgtggatcgtcgcgggaagaagccggcggcagagactggagacgaccccgcgccggcggccgccccatcctctaagaagaggaatctaggtactgctacgggaggactgggggtttccgatggttttgctagggaattgatgaggacatgcgcggcccccggggggaggatgtcttcgcccgagctccaggagtcttcgacgcggatgctgaaggttaccgggggttggtggcctaagaatgttcctatcccccgcacggccggcgaagacttttttacatctcgcatgtttcgtgactggagagtgatttcttatggacggaatattgctgctgttgtgtcggcagtgatggacaaggatcgtcagggagctgcgcagaagcatcaggcggtcgtcaggctgcctgaggctaggccgaagaggtcacgggggactgcgaaggctgctgcccccggcggtagccaaccgacgctggcggcgaagtctgccgcccctgggtccagcagggtgccggaggccgtgaaggcggaaccaagcctgccccggtcggagctgcgaaggcccgagaattgcctccgccgggcaagcgcgttgccgacttcgccaccgagattagcgtggacgattatctcgttggtaagtcggtcgggcgaagggcaacttgttgttgttccgcctgcggtggcgaccgtggcggctgtcgtggtgcctagggcgaggggtagcgctctcagcgccggtggtgagattccggcgctcactgccgtcaaggacgaggcgggcgctgtgtcccgccggctgaaggaggcattgagtcaggcggctgacttcgctgaccgcgtggcatcgggggcccttacggcggttttgtctgccaaagtcgagagacttcgggcgcaacatgctgacgccgtccgggaaaagtcggtcgccgacagcaagtgccgcaagctggtggagaaggtggccgtgctggagggcgagaggactgacctccggcgccaattggcggaggagagaagggaggctaatgaggccctcgccaaggcgcagtctgcgcaggcggaggccaatttggcgcgggtggagggtagccttgccagacagcgcgccgaggaatgggaggagcggttcaacgctctgcagacccgtgtgaagagggccgaggcttcgacgcgctcggaggctgagcggacgcgcaaacagcttatggattcataccacgagctgggcgcgcagaccgctgacttcgaagtgccagaccaagagcccggacttcgctgccttgagtggctgcaggagtag

SEQ ID NO: 33691 - DNA, 885 bp, Zea mays
  Peptide Sequence Number=SeqID_77066
atggccaagagcactcccctcctcagcttcgtctacctgctgtgtattgcccatgtcacctcgattagcttcgactacaacttctccatccccggcgttctcactagcgcaaacatcaagtacatgtctaacggcagtcgaggcaccgatcggatcgacctgaccaaggacgcgatctggagcaccggccgggtggcgtacgggcagcctttgcagctctgggacgataccgccaaggtcgccagcttcacctccaacttcaccttcgctatcaagccacacaacagcaccaatcaggcaacttacccaaaaaaacttctctttaagctttctccgtgttcccagcttggtaagctccgagcactcgttggaatgaaggactccaacggcggcttcctcggtctcttcaacaaccccatcggcacgaacattgacttcccgccgaccatcgcagtggagttcgacgcgttcaggaacgactgggaccccaacaacaccatgaaccatattggcgtggacgtcaaaagcatcacgtcccgtgcgtacacgccgctgccggacgggagcttcaacgggaccatgtcggcgtgggtcagatacgacgccaacgtgagcacgctgtcggcgacccttcggttcgacgatctgccgcagctgggcctctacaacgtcagcgcgatcgtggacttcaaggacgccgggctgccgccatacgccgcggtcggtttctcgggagccaccggtgatttcatcgaacgacaccagatcctttcttggtcgttcgagtctactctcaccggcgtcgtcgtcaacgtcaacaacaccggcaagtgcctctccctgtctttattatctttagctattttattgcaaaaagaaaattaa

SEQ ID NO: 33692 - DNA, 375 bp, Zea mays
  Peptide Sequence Number=SeqID_77067
atggccggaccaaccgcgccatccgcgggcagcgggtcgaacacagcaacacggctcaccaggctagacgccacacgcggcacggctgcgcctgacgcgctcaacggggcggggcttggccggcgtcgacgcggtctgcagggctacgatgggtgcggactgcggcgctgcggcaaggcgagttgtggctgggtgaagctgtcgggatgcaaccaccacaacacagcacaaagagctcgccaacgttcattagattacaagcggtgggaggctaggggcacagcgcaggtcgactcggtgaaggtccggcgcgcgacgcaaggtgacttcgggtggttgctgtgcgtggagtggcttggcatgggcgttgggtag

SEQ ID NO: 33693 - DNA, 522 bp, Zea mays
  Peptide Sequence Number=SeqID_77068
atgggttcaaaaacgctgactacgaaatgtactttcgcaagtcttaaccgtctaaagaaaaagactctcaaggatatgctggccttttgggaatcaaggtatggttcaacaagaatcaaagactctatttgcagaaaagctttctatgagtggatccttaaaaatccatttttacttgtcagcaaggctaagcatcataaaaatccttttcaaaaagggtatcaaggaaggatagcgcgcaagctacttggaggacgcgagttcgccaaggacgcgacaggaacaactctgcacgcaggacgcggccaagcatcatggcatgacagagaaaacaccggcgaggtgatggcgctggcgagctccaaggacaggggaggcgcggccaagattgggatgccgagagcagagagtagggcgcaggccgagctggaaaccaagcgccggcgagctggagcagagagaaggggcggtcggcgaacaggagcgagattcgagctgggtccgggattaccggcgagctag

SEQ ID NO: 33694 - DNA, 300 bp, Zea mays
  Peptide Sequence Number=SeqID_77069
atggagctagtcggtggtcccacctattcaccccctctagacgactatcaattggtatcagagctcgacacttcatttagagtcttacaacctaaagtgatgtcggaacaatccgagaagtacaagatggccacctcggaggacaaggggaaggacaaagaattcgtccactcgaggtcaaagaagacccatgaaaagaagggtacaaggaagcccaaaaagaagatcataatctccgatgacgacgacacatccatatcaagctcaagtagcgatgacgagatcgtctacaccaagtga

SEQ ID NO: 33695 - DNA, 285 bp, Zea mays
  Peptide Sequence Number=SeqID_77070
atggccatgatgggttcaacatcagaaaagatgtacctctgccacgtgaagaagcagccaatttttgttgcttctgttccaaggtggtgcccaaagaagaaaaccaagactgaagccacaggaggaataattgctgcccaggccggtgctgttacacccccacggccagcgccgatggccggtgtggctaccgaggacgggccccacgagctgttccgccagcgtgtgcatcccctcgagcgggagcacagctgtcggcatggcgccaacggtggtccttgttag

SEQ ID NO: 33696 - DNA, 333 bp, Zea mays
  Peptide Sequence Number=SeqID_77071
atgtgctcgagtgatctggtgaagggagtcgatcgtggagagataacttcggacgtggcaccatcccgcgaacccagccaaaacgaggaggaaatagaagttgaagaagcgaggactacaccatcacctgaagaacctcaggcaggaaactgcttttactttgatatctgtggagcagagcctgattcacctatcatacaaggtggtgggatgttttcaaaaacaaaacttgatggtggatccatcgtggccatgatgggttcaacatcggaaaagctgtacctctgccaggtgaagaagcagcaaatttttgttgcttctgttccaaggtga

SEQ ID NO: 33697 - DNA, 396 bp, Zea mays
  Peptide Sequence Number=SeqID_77072
atggcgaacaaggcaagatgcttctcaagctgggaggaggacctcatcatgaccgaagagcgccttgacaagatgacaaatgaacatgaggagctaaagtgctctcatggtgatttggtccaacgaatcaagaggcttaataagaaagcaaaacaacccaggagaagacgtcatgctcaacctcctcaagatatccatggacgcatggtgaagatgcttaagaagggagaaaccatagcatacgccaggctccatcaaacacacgttcctggagcaacaaaggaaacaagcaacttgaacaatgataaaggtaacaaatcaagtgttcatgttgtttgcactaacaatgtctccatgaccttcaagaacagaaagaggatgagaaaagggaagtga

SEQ ID NO: 33698 - DNA, 1356 bp, Zea mays
  Peptide Sequence Number=SeqID_77073
atggcgcttcctgttgacgtggcgcccgagtccgagccctggggtcgggcggagcggagtttcgtcgtcttccgggtcttagcccgagtccgagccctggggtcgggtggagcggagttcgccgtcttccgggtcttagcccgagtccgagccctggggtcgggcggagcggagttcgccgtcttccggcccgagtccgaaaccaaggggtcgggcggagcggagttcgccgtcttccgggtcttagcccgagtccgagccctggggtcgggcggagcggagttcgccgtcttctgggtcttagcccgagtccgagccctggggtcgggcggagcggagttcgccgtcttccgggtcttagcccgagtccgagccctggggtcgggcggggcggagttcgccgtggcggcgctgtccttctgtcagactggccagtggagtggtggagtgacggcggtcacttcggctctgccgggggcgcgtgtcaggatggagctttatgctgatgggggttaccagctgagaattaggcgtcttgaggcccccgagcctctgcacagggcgagagggcgatcagggacagactcgactttttacatatgcccctacgtcacctttccgcaaggaggagggggggagtgcgccatgctaccctcgatgggcaccgaacatggtgtctccggtgagctgcaagcggacccggtcccctggcgacggggtccgagggctcgatgcctccctccgatgggattctgttacaagatcgttcccgctggtctcggaaatgtcctagggcagcaactggcgcgccggttgctcgacgcgtgggcctgggttcccaagctggcgtgtcagaagttggagaagcgcgtccatctggcgcggttgcatgccgcctgcatggctgcccgccccttctgcccgttggtctgggcggaaatggggggtcgcttcccgtggcgcctgggggcgcacgtagggagagttgcctttaaaaggagggagactccttttcggaaggcaaccatgtcttctcctcccttaagcgccgtgtcttcccatctttcaagcccccggatggggggtatccgccgcctctccgcctcctcgttggaggaacgcaactccatgggagttggtacctctcagccatcgttcggcttcaaggattttcatcacgcagcctggccacgctccgccaccggtggccacccaagatggccaagatggaagatgaggcgagtcggggggccgcccccgcgtgggtcggctgcccttttcttccccccgcgcccgggggtgaagggcgtccttgagccccacggagacttcctccagccatgccgggatatgtag

SEQ ID NO: 33699 - DNA, 2100 bp, Zea mays
  Peptide Sequence Number=SeqID_77074
atggacgcctacgaggccaccaaggtggtgttctcccggatccaagcgctagacccggaccacgccgccaagatcatgggtctcctcctcatccaggaccacggcgagaaggagatgattcgtctcgccttcggccccgaatctctgctccacgctgtcatggccaaggcgcgcaaggacctcggcctgctcctcccggcctcgccgacctccgtcgcggccgccggccacgcgccgttcctgcagctcccacgccaaaactccgggcgcgccggcgccccatcgccgctctcggtgtcctcgccgtcgtcatgggggcacgcgccggcgttctccaggagcaatagcacgagtaatggtactggcaccgcggaggaggcggcgggggctggggaggagctgcccagtcccgtgaacggcggcgcagcgccgttcttccctcatcagtccggggacgcgctcctggacgacttgcagctgcaggagcagcttgcgttcctcaacgagggcagcgcgaacccggcccaccagctcccgggtttcgtcggcggggagtgccggagccccggtccgggtgatgcctctgggatgttcgcgttcggcctcgggtggcccaacggcggcccagcgcaccgccggagctcgtcagtcaacgagttctgccttggcggcggcggcggcggcgatggtttcgggtggaagccctgtctctactacgcgcgcgggttctgcaagaacggcggcagctgcaggttcgtacatggcggtctctcagacgacgctgctgccttcgctggcgccaagatggaggcagctgccgatcagcagcagcagcagcagtgccaggacttcctcatccgttccaagagccagcgcctcggctccgccgccttcccctactcctccaccggctccctcccaggctcgccctccgccgctagcaagtgcctcagctttctgctgcagcaacagcaacagcagcacgacagagccgcggcggccgcgtctctgatgctgggcggcggcgacgaggcgcacaagttcatgggccggccgcgcctggaccgtgctgacttcgcgaacatgatgaacccgggctcgcggcagatttacctgacattcccggccgacagcacgttccgcgaggaggacgtctccaactacttcagcatctacggtccagttcacgacgtgcgcattccctaccagcagaagcgcatgttcgggttcgtcaccttcgtgtacccagagacggtgaagctcatcctggccaagggcaacccgcacttcatctgcgacgcacgcgtgctcgtcaagccctacaaggagaagggcaaggtccccgacaagtgcaggcatgcactgcgagttcatcctttgcttgctcccagcgaccgcaatggcggccgccctacgtgcatgcagttgctccggggattgactgatttgctgttctcgctccgcaggaagccgcagcaaggggacttctccggctgcacgacgcccactggcgggctggacggcgggtacccctttgatctgcaccagctcggcggcaggatgctgcagcactcgagcagcgccaacgagctgctcctacgccgaaagctggaggaacagcagcaggccattgagctccagagccgtcgcctcatgggtcttcagcttctcgaccttaaggctcgcgctgctgctgcagcagcatcgccactgccgacaccaattggcgatgccttcgcgtccagccaacctgtgagcaccaccgcagtcgagtcgccatcgccgccagagtccgggcagcagctgctcaagctgaggagcggatttgctctggaggggaaggtcaacggtggtgataaggaggaatctgctcgcgaggcgagcccagacgccgctgatagcgaccaaagtttcactgccacggagaccgagagcaccgccgcgtcccgtgttggcgtggatgccggtgtcgggagcaagatcgacggtggaagcaaccatctccgcccccccgcgttggaaatcccttcgcccagctcctacttcttccccatgcacaggaatactagaagccaagaaaagcgatggtggaatatatag

SEQ ID NO: 33700 - DNA, 495 bp, Zea mays
  Peptide Sequence Number=SeqID_77075
atggcggcacatgcgcacgcccagagccaacgccggagccggaccgagccgagaggggtacgggtacggccaccgcctcttccttctccgtcgcttgctgttgctttgaccacgagcgcgaacgcggcaggggctcggttcctggctccctctcctgccctagcacgctacgccgcgtacgtggacgctgtgggcatgggggcatggctgcgttcccacgcgcggcccgggcgggtgagcaggagccccagcagcggccgcctcctcgcctcgtcctcgttgagcacaccacaggcgcagcggcgtgcatgggtggcagtgtcccgtggccgtgggtgcgagattctgccaaacaggcagcttctgcagcagcttagcagttcagctgcttctcagaatacactaaaagcagccaacaagcagaagctgcttttcaccagcttctcagataagctgctttttcaacaagcaccagctgtgccaaacagggcctaa

SEQ ID NO: 33701 - DNA, 2347 bp, Zea mays
  Peptide Sequence Number=SeqID_77076
cctgttggaagggggcgagatgagcatgtacgggagggatccctggggcggcccgctggagatatgccacgactcggccacggacgacgaccgcagccgcaacctggacatcgaccgggccgcgctgtcgcggacgctcgacgagacgcagcagagctggctgctggcggggaccgccgaccagccccgcaagaagaacaagtacgtcgacatcggctgcctcctcgtcagccgcaagctcttcgtctggacgctcggcgtgctcctcgccgccgccgtgttcgcgggggccgtggccgggatcgccaaggccatccccaggcggcaccgcccgctgccaccgcccgacgactacaccgtcgcgctgcacaaggcgctcatgttcttccatgcccagagatctgggaagcttccgaagcacaacaatatacattggcgcggtaactcttgcatgaaggacgggctttctgaccctgcagtcaggcgaagcctggttggcgggtattatgatgccggcgacgccgtcaagttcaatttcccagctgccttctccatgaccctcctcagctggagcgtcattgagtacagtgccaagtacgacgctgttggggaacttggccatgtccgtgacattatcaagtgggggtcagactacttcttgaagacctttaattccacagccgatagcattgatcgtgtcattgcgcaggtgggaggtggtgcgacgtcgcctggttcgacacagcccaatgatcggtattgttggatgaggccagaggacattgactacccacgtccagtggttgagtgccacacttgttcagatcttgctgctgaaatggctgcagcattagctgcagcgtcgattgtattcaaggacaacaaggcttactcacagaagcttgtacatggtgctaccactctcttccagttcgcaagggaccggcgtgggaggtatagcgcaggtggatcgtatgctgcaaagttctacaattcaactagttactgggatgagtttctgtggggtagctcatggatgtaccttgcaactggcaattcatcatacttgactctagccacaaaccctaaacttgcgaagcatgctggcgctttctggggtggaccggattatggtgtgttcagctgggataataagctcactggtgcacagtcagtgtactatactgtcacttctgctttaactgtacagttcactgaacttccttccattacaggtggtctgatccagctaaatcacgggaaaccacggcccctccagtatgtggtcaacgctgcattccttgcttctgtgttcagtgactatcttgaggctgcggatactcctgggtggtattgtggcccccatttctactctgttgaggttcttcgcagttttgcaaggactcagatcgattacatcttaggaaagaatcctttgaagatgagctacgtggttgggttcggaaagcgttaccccaggcatgttcaccaccggggcgcctcgatccctaagaacggtgttcactatggctgcaaaggagggtggaagtggagggacgccaagaagccaaaccctaataccatagcaggtgccatggttgctggccccgaccgccatgacgggttcaaagatgcccgcaggaactacaactacactgaagcaacgctggcgggcaacgctggtctagtcgccgcattggtagctttgtcgggtgacggccacggcggggtggacaagaacaccatgttctctgcagtcggccagcccgagcctagacaccacctaggatctctactccccgacggggtccctcccgggagcgagatccaggcgccgtcggcgatcttccgccgtccctgcgtacgcgcggaccgtccggccccagggcgcggaccgtccggtcgtcaggcaggagccctagccgcgcaccaggccgcggaccgtccggccccaggccgcggacagtccgcccttgcgcagagagcaccaccgcgcctcgcaccaggccgcggatcgtccggcccctgcgcgcagaccgtccgcccctatgcagagggcaccgccacggttcttgattgggtgtttggcgctccgaaaaggcgtcaacatactttttggcgactccgctggggacatacatatctaagctcatcaaatcggccctcaatggccggttcaagggatagctctgatatttctccaagcaacatcatagagccgacttgggaaaccttgccggctgacgaacagctccagttcgaggagcacaaggagcggatgatccaggaggcgaaaacaaagttcttggccaacttcaaagtggacaggaacaacaaggtcgtctga

SEQ ID NO: 33702 - DNA, 579 bp, Zea mays
  Peptide Sequence Number=SeqID_77077
atgaacttcaatgcctctaatcggcaacgagttggagtccggccagtcggaagagagaggtctcactgcttcagaaaatctcggagaatccgaacgagaggtgttcttcttcttccctgcttcttctccttccgagtgagccatggtcggagggaaaaacggcaagaaagggcgccgccccgccgatgggaagagcaagcacccccgagtcctccctcggaggattctagggactcggagtactcggaggaagtctcctccgagtatgatcattcccccgctccagcgtcccttgtggcgtcgtctgatgattcagacgactccatggggctgtccaccgtggagcgggcgtacatccagtccgtcgagcgtgcggggctcggtgggtcggatgactcagaggaggtctcctcagaggatgtggaggactcctcagactccgaggagggcagtgatagcgacgacgatgagggcgaaggcggcagcagcgatggctgcgacgacagcaggaggggcggtgacgacagtggtgatggcgatggcgagagcagcggtgaaggcagcaaaaggggcagctag

SEQ ID NO: 33703 - DNA, 144 bp, Zea mays
  Peptide Sequence Number=SeqID_77078
atgtggctcctcctgaaccacctgctcttctcctgtggggggggtgtgagacagcaagggatcctcagcaacgggctcttctactcgccacaatacaaacaagcacaggatatagggaaaattaacattacaccaagcatgtaa

SEQ ID NO: 33704 - DNA, 531 bp, Zea mays
  Peptide Sequence Number=SeqID_77079
atgggtgcaaggaattgggcggagactcaccggttagctctgtccacgcgcggcggtggaagaccgaagtccggtgaggtcgatctcggacctccggtgaagtccggcctagtccgagggcttgggaagcttcacgggccactggcggagctagccgaagcgctggctcgactcgggggtggctggagtgggctggccacggtggccgaagctctggcggcaatggcgggcggaattgagctcgccggagctaaggagagggggctggccggtgaagctttgtcttttgtgtatgggacgtcacgcggttttaggctagggacagggagttgtagcgtcaccaaggtgccagtgtcagaatgtctggtcccgaggtcaaactgcgccaaaaccgtgtcaaatgaatttggtttgagttcaaacttttccaggacgtgttcaagggaatttggcacaactttgatatttggatcttctagttttgagtttcgaaaaatcgagaacgcagttgatctttggaaagaggtctga

SEQ ID NO: 33705 - DNA, 237 bp, Zea mays
  Peptide Sequence Number=SeqID_77080
atgggagacccagtctcaggtcgcatgagggataaagtccgcgcctggcttcactcagaaattacaactttaaaggtgtatgatctacttgagttaaacaaggtaaacattacttatgtaagacccttgggtggtatacttggtaaattgggtcaaacttatctaagtggcttggtactggtgtatgtttctttgtctcaaaaattggggatcagaaagtgttataacatgacttga

SEQ ID NO: 33706 - DNA, 225 bp, Zea mays
  Peptide Sequence Number=SeqID_77081
atgaccctattggagatctggaagcccaggtggagcagctttgaatggagctacgtcacaaaaatagtgtgtgggtcgaggatggacaacaacttcctcaacaaggcgggagggcttatccgcaaggaccccacgtacttggatttctcagaaacccgtcccccactattcgtcaaagctgaggatcctcttgaagcagacgaatgggtttgggtcattgagtag

SEQ ID NO: 33707 - DNA, 465 bp, Zea mays
  Peptide Sequence Number=SeqID_77082
atgtcgcggtcagctgaggaacgacgcagggagctccacggcgagagagagagagaggcaccgcgggctgaagagggcgccgtagggaagacgaacagagagagcaggcgcggtacagacttcagagaaggaaaaactcagcgacgggaggataaaatcccaagagatgaagacgaccgcgggaaatatcagaccggagataaggcagaggagggagcaggaaatatcccacgacgggatgagaccgacggctggaactcggctgggagcttctgccggcgagcagggagagcagaggatgaacttggcggcgggatattcttcccggagcttgagcggcgtaggagaaaacaccgactgaaaaaaaaatcaaagaaggagactgctaaaaacatctgctggggtggcgcatctgattcagttgattttagacgaagtccatctgttatccgaacactcggttag

SEQ ID NO: 33708 - DNA, 297 bp, Zea mays
  Peptide Sequence Number=SeqID_77083
atggcggagtccacaggacttataagctcacgcccccgtggatctcggtgtgtcggtgccccaatccatgagctgcacgcgcacgcggtctccgccacgatcccgccaggtgcggtgttcgttggaggagagatagctgcgaatcccgggcccactagtcagtcaacgagcgcgagctacgcggaggaagtatttgcttcgataccagctgtggcagaaccacccgaattattccagcttaagtgcccaagtcacgtcttagaggtcgcgacacacttaaatcggaataacccgtga

SEQ ID NO: 33709 - DNA, 384 bp, Zea mays
  Peptide Sequence Number=SeqID_77084
atgaggaatagggcaagccctagcccactactcctcctgctcctctcctgctggagcagcatcccactcgaccgtccaacccggtggcagggtggtaggccaagtcacaccatcaaccatatcctgaagcgtacctgcaaaaattatgccacaagcaaggctgagtatactaatactcagctagacttacccggttacaaggggtcaagcagtctcattagctgcgagaagcagacgattcaaatcgagtttttaaaccttgcaaggttatgcataagaatcggggcttgccttcaactgctggggctgtggggagatcctcgatggcaggctcgggagctggatcctgatcttcctcgtggacagctccttgctcaagaatga

SEQ ID NO: 33710 - DNA, 600 bp, Zea mays
  Peptide Sequence Number=SeqID_77085
atgggctgggcgcaggggccaggctcgcgcgtccatgagagacggaaaggaaaagcagggaaagcaagcagcggacacagggaggaagacgccgacgaactagagccgggcaccgagcgagcagggatcaccggcaaggctctagatgcaaaagtagccaccagggttgggggcgcgacgagcagagcacaagggaggattctgcggcgcgcagggacgcggcttggggagatgggcgcgccagagagcatgcgatgccgcggtcagctgaggaacgacgcagggagctccacggcgagagagagagaggcaccgcgggctgaagagggcgtcgtagggaagacgaacagagagagaaggcgcggtacagacttcagagaaggaaaaactcagcgacgggaggataaaatcccaagagatgacgaccgcgggaaatatcagaccggagataaggcagaggagggagcaggaaatatcccacgacgggatgagaccgacggctggaactcggctgggagcttctgccggcgagcagggagagcagaggatgaacttggcggcgggatattcttcctggagcttgagcggcgtaggagataa

SEQ ID NO: 33711 - DNA, 354 bp, Zea mays
  Peptide Sequence Number=SeqID_77086
atgtggagtatttacttttctgggaattcagtaccccatggatgtgtatgggtatacagacatgggactactgagaagtgtaatgtacttgtaacgacgcacctacgctcaggtacactaacctcgaaaacaaacagaaatgacatcgaattacaaatgtaccttcaacttgaaggagatgaaagtacaagcgtgacgcaagggcgaatgccaaatcagcgtgaacagtacggggattgcgacatggacgaaggcttttacgccgaaggtccgaaaaaacaccttccctttgctagaatagcaacattcactgacaagcggggtctttcaattttcaacgtactgggcgtataa

SEQ ID NO: 33712 - DNA, 552 bp, Zea mays
  Peptide Sequence Number=SeqID_77087
atggaggctgggcgggttctgcaggggcaaacacgccgaacagagggccaagccgagctggggcagacagccatgggaggtcaggggcgagcgccaggcgagtgcagggagcttcgacggctgggcgcgcaggggaaagaaccagggagcttggaccaggaagtggcgctggtcacaaatggaggggatccagtgagggggcgcatgcagggagcagtgaagtgctggctgccatggaggccggtgttgagggagtttggccggcgagctagacgcactgcccggtggggagcaacgacaaagggagcagtgacgcgcgctggaaggggtgtcaagcagagcttgggcgccatggacaggaaagggcagttcccgggcgagcaccagggttggcggtgtccaaggagatgggctgggcgcaggggccaggctcgcgcgtccatgagagacggaaaggaaaagcagggaaagcaagcagcggacacagggaggaagacgccgacgaactggagccgggcaccgagcgagcagggatcaccgacaaggctctag

SEQ ID NO: 33713 - DNA, 447 bp, Zea mays
  Peptide Sequence Number=SeqID_77088
atggtggctgtgcatgcctcctggccgtggacggttctggcccaggccaccgtcgtgcccagggaaatggtgcgcgtccctgcgcccggttttcgtttctgtcgcaccgatctgtgctccgtcctggccgtcttttctgcctccaatcttggcgccgtcgcaagcttgtcagccactgttgtcttgtccacgccagcacgcgttcatggtcgcgtcggccaagttcgccaacgttctattaccagttcgactatcgtcgcgcgctcgcgctcgctatcccctgctcgacctcatcgtcaggcttcgccttgccagtcgtcgttcttcgctcagcaaggtttcgttctaagcgccgcccttcaagttcgcgtccttggtggactcgcacctccgtgtcgtgtccgttcgtccatgctgtcgacccgtacgaacatagggtctcgctag

SEQ ID NO: 33714 - DNA, 234 bp, Zea mays
  Peptide Sequence Number=SeqID_77089
atgcggcttcatatccttagaggtatgaaggcagaagtcatccttgcatttgcagacatttgcactcatgagtttgatattattttacttgctgagatgtgtcatctcactcttgtattactcaatgcaggttcgaccatcaacatcatcttgcggagtagtccacccgttacgtcatcttggggtcgacttggctttggttctcggcatcacgtggttaataaacgtacctaa

SEQ ID NO: 33715 - DNA, 240 bp, Zea mays
  Peptide Sequence Number=SeqID_77090
atggccgtgacagggtggatcgaccactgtggcggcatcaattgctcatcggagaaggaaggccgccgcggattgcgtctctccgtggaccgccctcacctcgacgtcacggctgcggaagaagacccggcggcggcgaggtccgtcgtggtgcctgggcggcggcgccatgctctgggcggtcgtgaggtggaggatggctgtgtgccgttggatccaggggcatcggtcatgatctag

SEQ ID NO: 33716 - DNA, 2994 bp, Zea mays
  Peptide Sequence Number=SeqID_77091
atgcgaactgtcttttttttggaagttgtggattacaacgtgaattcatattctaccctatacgtgttgcagaagcatagagtgttttgtcagcttcgaaatggtgattgggcattatgcacagtacttgcaacctccggtgacgagtctgttctaaaggtttctgaagggaaagtactgagattgaaaacagagagccttcaacctgcaaatcctgaaattcttgatggagtggatgaccttatgcagctaagttatctaagtgaaccatcagtgctgtacaatctgcagtacagatactcccaggacatgatttatactaaagcaggtccagttttggtggctgtcaatcctttcaagaaagtttctctgtatggtaacgagtacattgatgcatatagaaataaatcaatggatagtccacatgtttatgcaatagcagatgcagcactttgtgaaatgaaaagagatgaagtcaaccaatctataattataagtggtgagagtggcgcaggaaaaacagaaactgcgaaaattgctatgcagtatctggcttctcttggaggtggaagtggcattgaatacgaaattcttcagaccaatccaatactcgaggcttttggcaatgcaaagacattgagaaatgataactcaagtcgttttggaaagcttatcgaaattcatttcagtaccactggaagaatatgtggtgccatgattcaaacatttttgcttgagaagtccagagttgtgcaatgtgcagttggtgaacgatcgtaccatatattttatcagctgtgtgctggtgcacctgcatctctaagagagaagttgaatttgaaaaaggtagatgagtacaaatatcttaaacagagctgttgctattcaattgcgggcgtggatgatgcccaaatgtttcgaactgtgacggaagctatggacatcgttcatatcagcaaagaggaccaagagaatgtttttgcaatggtctctgctgttctatggctgggggatgtctcgttcacagtaattgacaatgaaaatcatgttgaaatcattgcggatgaagcttcaaaaatggttgcagaacttcttggctgcagtattgaagatctcaatttagctttgacaaagcgccacatgaaagtaaataatgaaaacattgtccagaaacttacccttgctcaggcaactgacacaagagatgctctggccaaatcattgtatgccagtttgtttgaatggcttgtagaacaaattaataagtctctctcagttggcaagcgtcgaactgggagatctatcagtattcttgatatctatggctttgaatcatttgataagaacagttttgaacagttctgcatcaattatgctaatgaaaggttgcaacaacatttcaatcgtcatttatttaagcttgagcaagaggaatatgtggaggatggcatcgactgggcaaaggtcgactttgaggataatcaagattgtttgagtctatttgagaaaaaaccactggggttattgtctctgctggatgaggaatctactttccccaatgccacagatcttacttttgcaaacaagcttaagcaacatcttaactcgaattcttgcttcagaggagaaagagacaagggatttgctgtccgtcactatgcaggagaggtggcttatgatacttcgggttttctggagaagaatagagatttattgcacatggactcgattcagctccttgccaaatgcaaaacttttctgccaaaaatgtttgcatctaagatgttagttcaaccagatgattctatgtctgttccatatagatctagtgctgctgattctcaaaaactaagtgttgccatgaagttcaagggtcaactgttccaacttatgcaaagactggaaagtacaacaccacactttattcgttgcattaaaccaaataatttacaacttcctgcaatttatgaacaaggacttgtgcttcaacaacttaaatgctgtggggttctcgaggttgtccggatttcaagatctgggtatccaacaagaatgactcaccagaagtttgctcggcggtatggctttcttcttcttgaggatgttgcatctcaagatccactcagtgtttcagttgcaattcttcatcagttcaacattttacctgagatgtatcaagttggctacacaaagttgttcttccgaactggacagattggcaaacttgaagatactcggaatcgtactctacacggtattcgtggcagtcttgttcgaagatgtaatggcaatattgatctaataaacgtgctaagagagtttgaatcaaaacaggaggcagagggtgaccaaattttgatcaaggcatcagtcctggccgagttacagaggcggatactaaaagccgaggccacagtacgtgaaaaggaggaagagaatgagacgcttcatcagcggcttcagcaatatgaaaaccgctggttagagtacgagcagaaaatgaaagctatggaggaaatgtggcagaagcaaatgcgttcgttgcagtcgagcctttccgtagcaaagaagagtcttgctctgcatgagacacctaggatgtcggactcatcagtggatcagagctgggaaagcaacgggaaccatgtcagcagcgggtctcagctggtgccacgcactggtgggcgcgaaatgagcgctggcctgagcgtcatcggccgcctagcagaagaattcgaacagcggagccaggtttttgctgatgacgccaagttcctggttgaggtcaagtccgggcaggcggatgccagcctaaacccagacatggagctccggaggctgaagcacaacttcgactcgtggaagaaagatttcagtggccgaataagggagacaaagatgatcctgaacaagctcgggaacggcaacgagtcatcgcccaactccgtgaagcggaaatggtggggcaggctgaacacctccaagttttcgtga

SEQ ID NO: 33717 - DNA, 228 bp, Zea mays
  Peptide Sequence Number=SeqID_77092
atggggtccaggcacagtgcttgctctgccgaggctgggtgccgaggttctttcgttttgcttttgttagtcaccctcctgcgggaagagagatacttgatcagagatggttggtttacagatgatgatgatgatgatgatgatggttatgactatggtaatggtaaagaagaaggcgtcgaggcgaatctccaggggttccaggattttgacgagttcgaggattag

SEQ ID NO: 33718 - DNA, 1098 bp, Zea mays
  Peptide Sequence Number=SeqID_77093
atgcatcgcgcccttccaccttccgagcccccggatgggggcccgactacattccctcaccaatggtcatccaggatgatgaccaccagttcggtggtggggagaagcaagtcgggctgcgggctctgccccgccctcagcttcaaggatcttcatcatccgggctggggaggagggcggggcaagttggggcctacctccgcgtgggtcggcgacccgcttcttcctcctgcgttcgggggagaggggcatcctccagctgtgcggaggaggcgtcctccagccatgcgggggaaggcgaactgctgcgccccggccagggtgcaactgtccgtccttcgcccgagcgacgatcgccggctgcactgggaggtcacacaacacgtcgtacgccgcgagggtggtactcgtgttctgggacggtcccgttctcgttcttgtggtgagagcgggagtgaggacctgctggtgcgctttggagcggctgtcgctcgctggtgcggtgttggtgggcaggtggccactgtcgtcggtgctgaggtggtggcagcaagaggaggtttccccaccgacgagaccaaccttcggccgctctgcgatgagctggagccggaggcagcggcgtcggcgtggacagaaggcagagttggcttgaaaagaggcttcgtcggcccgggagcacgtggcgtccctggccgaggaggtgcagcggcggcggctagagcttggccaggccagaacccttgcggagaacctggccgtgagggcccaagcgcggtgctggcgtccttctccgaggtggagatccttccgcccgagtcgccgtccgaggctgggccaggatctgccgagggtggaaacgacgccaagggtgctgctactccctctgccgatgagtccctcggctcggacgaccttgccgcttacgcgcactcttacccgttcgcaggattctgttatcgatatagtcgtgaaggcacgaaagtcgttctggcagaaaagaccccgctatcgaagcagtcgaaaagcacgaaagacgttctggcaaaagacttttccgaggaaaattttgacgcagagggggttccccccttctag

SEQ ID NO: 33719 - DNA, 336 bp, Zea mays
  Peptide Sequence Number=SeqID_77094
atggccaccacccgggggatcgacccctttttaaaggcgggtctccccactctcatcctcaagcgtcacgggcaaagtcttcatcgacgtgctccggggtcctccccctacgacacgggggctgggtcccacacgccatgcaagctgaccagaaacggaagaagccaaaccactgcgcgcgaagcagggaccgggaaaggggatatttcgaaagggatccttctccgcgaaggaagcgggcctcgagccctcctactgatcaggggttcgaaggctggccccttggaagggttcgacagccgccctagagcacttgggctccgcacccactactga

SEQ ID NO: 33720 - DNA, 468 bp, Zea mays
  Peptide Sequence Number=SeqID_77095
atggcgtcggtggaggtgaggtcggtgcggaaatccacggccctgcgggcgcgcggcgggcccagcaagctgcagtcggcgcggtcgatgccgctcgactacaggtactcggacggtccctcggcggcgaacggcgccggtggcgggccggctgggaacggcgtcgggcgccgggcggttgcggtggaggcagggaaggaggagaaggaaggtgaagtggtgcggttggagggggacgacgcggactctccgtacagctccaatgtggtgacagcggaggaggaggcggggaatacaggtggaggaggagacgaggtggattcggcggccgcggcgacgccaaggcggttgtcgccaagggcagcagcgagccccacgcaagtcgacgcccggtggggtgacaccagctcgtacggcgctaagaaggtgggcggtctccctttcatttctgatgattttgaaatgtga

SEQ ID NO: 33721 - DNA, 480 bp, Zea mays
  Peptide Sequence Number=SeqID_77096
atggagaaggtgttgtccgtgaacatcctctcctcggactacttcaaggagctcttcaagtacaagacctaccacaaggtcgtcgacgagatctacaaccaggtggaccatgtcgagccctggatgaccgataactgtcgcgggccctcctccgccttctgcctcctctacaagttattcaccatgaagctcaccgtcaaacagatgcacggcctgctcaagcaccaggactccccctacatcagagctgagtggttggaagcaaataaagactaccaagctatagtcgatggtgcgaatattgcactatatcaacaaaattttgtggagggcggtttcagtttgacccagatgacatgtaaaggatgtgtttatatttttttacttccatttctggattgggaaagattccagctaggatgccaagtggtagggctatttcagcattttagcatgctcagtttactggtagagttgtga

SEQ ID NO: 33722 - DNA, 1083 bp, Zea mays
  Peptide Sequence Number=SeqID_77097
atgtcggcatcggcgggaacgatggtccaccagtcgctgatctacgtgttcgtggcgcacgcaacaagttcacctacaactgcgatagccacaccttcaactacctcatcgaggatggattcggggagccggagttacaagagcacgaaggtggcagcgaagaggctggaagaggcagcgctctcctgcaaaggggacgaacgggtgcagctgctgcgccggtggctcgtcgcgctcaaggagacccagcgcgtgaccatggtggttcgggagccgcaacttggggacaatccggaccaggctgcgtccctgctggcgccgaaccacctgtgctcgcgggagttgcaggatttgtacatcgattacgacagcggtgtggagccgatgaactttttccatgtcttcctctacagtcaagccctcgagtgtgttgttctctccttggcaaaacgtgacgagctgcttcagtttgctcagggtgcgatctcagggctaaagataaatgctgacattgcaagattagataatgaaattactcagttgcaacagcagataaagtcaatggatgcgctccatgtgtcgatctcttcgtcagtgaagagcatccaccagccacaagggcccgtcgatctgttttggtgtacaatgtggatgaaaacaacatggagctctggcttatgggggcttctcgacgccagcggagcccgtgggaattcacaagagcaatatggtacaccaatgccacacattggacaaacaacagttgaagttgatcttttgaaatatggtgtgatagaaggtgatgaatcatatggcatgaatcttacaaaggaacagagagtagagaaaattgagtcacaaaaacttgaaaaatatgaagccaaacatgataagagacatgacttgaaagttgatcaaagtgtacaggaagaatacataaatgcatattatgaggccttgaggaaaaagttggaagagaaagaagcaaaaagcagaatgcaccatgaaggcaagatttttgtccctgatgctcaaagggaatgccaagttggcaataaatacaagcaggatgatgatgaataa

SEQ ID NO: 33723 - DNA, 774 bp, Zea mays
  Peptide Sequence Number=SeqID_77098
atgtcgcgcgcgttcgacgactactatatcgaggattatggcgtcatcttggcgctagaggtgacgcagaggaggatcaacaacagtgaccagttcgtcatcctcgccaccgttaggccaaccaagactacacatgttgtgtgcgcactagaccttataaacagacaaggcccacagtcgacgctggttctgcctccaaccaatcatcaccgtccacctcgtcgcctccgcttcaagccctcgatcgcaactgctcctctctccgctcccctcttcctcgacagatcctccatcaagcttcatccgcgccgtcgtcggcaacggctccggccttcccacaccgccgtccaacctccccccgactctcctccccacaccgccgccgcttccacggcccaccctccctgcttgcctccatggccacctggaggcggattcggcctccccgagtcgccgcccaaccaaagtgagaaatccacttggcgaagcttctgcacctcccgaacgggggcggggaggggagcacgccagcactctgcgcttgcgggtagggtttctaccggtccgatggcgtccgccaagtcgtcgaggtcgcggcccaccggtcacttcggagtgttcccggtgaacgttgtggccggcgcgggaagcagcgatggtggggtgcagctcgcggacaagctcaagataatcaagactgacaactcagacacccatagcgcctccgacgagatccacctctccaccggcgacaacaagggcctaagtctgtag

SEQ ID NO: 33724 - DNA, 1527 bp, Zea mays
  Peptide Sequence Number=SeqID_77099
atggccacgggcaccggccgtccgtggtgggcgccggcgccgcccgcggcggctcgctccgccccgctgttcccctccccgccgtcgtcgttcacggccgacccgccggcggagttcctctgcccgatctccggcacgctgatggcggaccccgtcgtcgcgccgccgggccagaccttcgagcgcgcctgcatccaggcctgcgccgcgctcgccttctccccgcccactgtcgccgttgacctctctgagtcccactcctgctcctccgccccgctcgtgctcatccccaacgttgcgctccgcaacgccatcctcaactggtgcgaccgcctcgccctgccacacccgtcaccgatgtcgccggacaccgcccacgacatcgtgcgccgcctcatgccgcaggaccggcagcggagctcgctggcgcagcgcccgcatccgcaggtgcagcagcagccgagctccaggcagcggggcgacgctctggaggaggagatcatggccgcgctcggcacggagggcgccacccccgcggagcaggcgtccgcgatggccttgctgcggcaggccacgcgggagaaccgggaggtacggaggcagctctgcacgccgcgcctcctcgccgcgctgcgccccatgctgctgtcggccgacgccgacgtccaggtcaacgcggccgcagcggtggtcaacctgtcgctggagcccgagaacaaggtgcggatcgtgcggtccggcgcggtgtcgccgctcgtggacgtgctccgcggcggccacacggaggcgcgcgaccacgccgcgggcgccatgtacagcctcgccgtggaagacgagaaccgcgccgccatcggcgtgctcggcgccatcccgccgctgctggacctgttcgcgggcgccgccgcccaccgcgcgcggcgcgaggccgggatggcgctctaccacatctccctctccgggatgaaccgccccaagatcgcgcgcgcgccgggcgctgtccggacgctgctggcagtggcagccgcggaggcgcggcgggaccgcgcgagcgacgccgacgccgccgcgctccggaggctggccgccatgatcctggccaacctcgcgggctgccccgacgggcgcgccgcgctgatggacggcggcgcggtggccgcggtcgtcaggctgatgcgctgcggctccgcggctcccgggagcacggaggaggaatactgcatatccacgctgtacgggatgagccggggcagcatgaggttccgcgggctcgcgcgcgccgcgggggtcgaggccgcgctgcagccggtggccgagggcggcggcggcgtgcggcgagacctggcgcggcgcacgctgcgggctatgcgcggcgaggatgacgaggcgccggccatggacagcgggctactcggacggcagtgggacgacggcagcgtcgtgtcggaggggctcgtgtccatccggcggccgccgccgcaccgtagcaatcacgccgggccgtccgggtcaaacacaacccagttctga

SEQ ID NO: 33725 - DNA, 417 bp, Zea mays
  Peptide Sequence Number=SeqID_77100
atgcgtctacacctggtggcgcccgtgctgctgccgcacaaggccgtggaggatggggtgaagatcggtggttacatggtgcacattggctcgttggtcatcttcaatttgtgcgagatcatgcgtgacccgatggcgtggagctttgggaggggccatggcccctgccggccctcccttggctccacccatgggcatgggagaggcccgatcgacgagttcctgtcggtatacatgtccagggagctagacttcctgcccatagtggagcgtgtggtgccactagtgatggcgtatctggtgcacgcgttcgagtgccagctatcggacgacatgttggcggagcaggtcgacgtcagcgatgagttcaccaacaccaatgtcttagccttcctcctatcaaagtcatgcccttaa

SEQ ID NO: 33726 - DNA, 831 bp, Zea mays
  Peptide Sequence Number=SeqID_77101
atggtgaactcaatgcagaacaagattcatatggtaacctggtgctactgtggcaacgagagagaggtggtggtgacggttgcagtggctggcgatgtgacaacgatcgtgcagcagagtgacatctctcgcggcgggattgagatcctccgcagtcgcagctgccacgtgaatctgatggctggctggacccacgcgcagcaacaatggcttcggcagtcgactgtcgaggattatgatcctcgcggcggccgcacgaggttttggagagttattcgtgattatgatcatctcgtcgcgcggcttcgcctgtttggtatcctgcagctcgtcatcgccagattggcctgcgggctggccagggacgagcagctggcgaggatggtgcacggctacctcgtggcaggtggcttctgcggcgacccgtttgtgctcagctcattggtcaacatgtacgccaaggttggggatgtggcgagcgcgcggaggctgctcctggaattaccctgcagggatgttgtttcttggacgaccatcgtatcagggtgcgtgctcaatgctatgctcaaagaggccctcggggttttcctcatgatgctggaggacgacgtcctccccaacaacgtcacaatatcagcttgcagtcactctggtttgatttcagaaggtcacaagtgctttgaaagcatgggaagagaccacggcattgaacctagcatggatcactatgcctgcgtagttgatcagcttggaaggtctgggaggtttgcagaggctgagcaattcatcagggacatgcatgcccgtcctgaaattatgctgtgtgcttag

SEQ ID NO: 33727 - DNA, 417 bp, Zea mays
  Peptide Sequence Number=SeqID_77102
atggtgcagccagtggcacaccagacactgtccggtgcccaggccgagggacctcgcgaactagccactctcgagttttcacagagccactccactaaaattcaccggactgtccggtgcgccaacgaagcaacgatcaacttcgccaacgatcgactgcagtacagtctgaccgtcagaagtcagagccagtctgcaaagttagaacgcaccggattgtccggtgtgccaccggactgtccggtgccgcaagaggacaaagaacttcaacggtcaatagctccaaaccccaatggtcggctgatgtggcatgcaccggacaatgaacagtgcagtgtccggtgcaccaccggattgtccagtgtgctcatcgatagcaaagtcagccaacaactaggaagtggttggaggctataa

SEQ ID NO: 33728 - DNA, 324 bp, Zea mays
  Peptide Sequence Number=SeqID_77103
atgccccgccgcgacgcggcgacctacgcccccctcatctccgcgcactgtcgcctcggtgctcccctggacgcccttcgcgccttcctcgacatgctggcttggggttgctccgacgaggagggtgcggacgacgtcgtccgccccatcgagttcacggcggccgcggtcgtgcaggcctgcgggctggccagggacgagcgccgccgccgccgcgtcgtcggtgtcctgcgtggccgcagcgagagccgcccgtgcctcgccgaggagagaatcatatcgacaaaacataggtctgaccgtcttagtgtgaacatccaataa

SEQ ID NO: 33729 - DNA, 231 bp, Zea mays
  Peptide Sequence Number=SeqID_77104
atgtcgtgcgcgttccacgactactatatcaaggactatggcgtcatcttggcaccagaggtgacacagaggaggaccgacaacaatgaccactcgccatcgtcgggagatgctctagcgcaccatacaaaatgcataagcacaacaaatctaagtgcaaatgaaccatttgcagttcattatgatcacttacgtgtggggccagatccaggcgatcccacacgtcaatga

SEQ ID NO: 33730 - DNA, 813 bp, Zea mays
  Peptide Sequence Number=SeqID_77105
atggggacactaggatgccttgggtcgacgatggcggggcttcggctgcacggggagaacgccggtgagcacggaccgggcaaaacagaggggctgggggcaatccagagggtatctcgcgctgctggcgaagatgcggagctcactgaggcaacagacgcgacagacgctcgacaacggctatggaacaacgatggatcatggcagagctccacgggcgcgcgcgtagagagagagagtgagggagttcgactgagggcgcaactgggcgaggggagcaagcaactctgcgaggcctatcgtcgatcgtcgaggaccgcgagcttaggtgggtgggtgtacctactccagctgtggaagtggtcacacatacccgtcagtcgccctagagagtttgctccttgtgattggttcgtcgtagccacacctgaggcccatgacttcctaccgctgggaccaggtccaggagcccttcgcacgacactagcgtgcctacgtggagtactccaacgagctggacacacttacgcctttgatgatgttggtaaaattactataaacttatatgggaattctaatccttttcagatattcaatgaattcctaaaagaggtgtctacctttagcaggttcgacagacagaggcaaaagaaggtcaccgacttcaagacccatcaccgagattatattgatgaatgggatcaggagtctcacctaaactacaacaactaccagccgcacacgaactaccacttccgtaggtatttgacttggtatgctggtgccactaggtgcaagcttaagggccattag

SEQ ID NO: 33731 - DNA, 282 bp, Zea mays
  Peptide Sequence Number=SeqID_77106
atggcgcttcctgttgacgtggcgggcctgtgccctaggtcgggcgacgtggaggctcctccgaagccggggtcgagtctgtcttccatggccgaggccgagcccgagctcctgggtcgggcgaggcggaggtcgttcggcagaggccagggcggagtccgagccctaggcccgagtccgagccctgggtcgggcggagcggagttcgccgtcttccggggcctagcccgagtccgagccctgggtcgggcggagcggagttcgccgtcttccggggcctag

SEQ ID NO: 33732 - DNA, 702 bp, Zea mays
  Peptide Sequence Number=SeqID_77107
atgatggtggggaagggggactgggaagggaggctgacgcacgtctcgccggagatcctcgccgccgacgacgccgcgccctccacccgcttccacgtcctgccgttcccgcggctgtcggagcgagccacggagatcctcgtacaggcgcgcgccacgcgccagctggagcccctcatcatcaggccctcctcgcagtggtcgcgccttccacagccttccatggagagccggggcgggtcggtgcgttggggccgaggagagtggatcgtcggatggcgtgacgaggatcaagagcgagggcagcgatctgggttgaggcagcggggattgagggagagaggatcgcattctggggagccggggaggcgacacggggcagagtccgtggggattccttcggtgggggaggggcggacacggcggcgggatgggcggggagcagacgacgatgcgcggagctttgagggcgcgaccgatttggggactgcgggcgttgtcggcaaggaatgcgcggcgcggccttccattgacggcctgcggactgcgggcgaggcgttgatggcgcagactgcgggagcggccggaccttccattgacgggcggagaggaattgcgggacgaggcgcggggagggagcgtagcgcgcgatggcagcgatggcagaaccaaagtgtggacgcctacagtccacacatatag

SEQ ID NO: 33733 - DNA, 642 bp, Zea mays
  Peptide Sequence Number=SeqID_77108
atggaaggcaagggagggtggaagcacctttttttgcatgggagctgcatggagagaaattattggcagaaaacaaactttgaccagattcttgaatgtgccaagggaataagtagatgccagcagatcatgcagcgcccaaatggtgctgagctgcagtactatcagaagctgaatagattgctgctggaattagagcaaaggagtggaggagtttctgaagagagttatcagaccgaagtaattgcagcaactgtagctggtgttgcagctgagggtttgtctcctaaagaagcaaaaattcaagcagagaatgctgctcatctctcagtagcactagcagagaatgcaatagttattctgatgcttgtggaagatcatctgagatcacaagctcaacatttttgcacatcccttacaggtgatagcatcacatcgtccacatcaatgacttcattggctgccagtcggtcaaattctttgaacacagctggtaaagatcccatggctgctggggtcccaagacgggcatctttgtccagtgatgctggtggccttcctctggatacctgcaagttgtttgctaacagtgatcctttagagaaatggggacatgggaacaaacagaacgagaatgactaa

SEQ ID NO: 33734 - DNA, 1671 bp, Zea mays
  Peptide Sequence Number=SeqID_77109
atgtcggggaagacgacgccgacgaaggcgacgctgagccggccatgcgttctggtcatagtgatggcgggcgtggagaggttcgcgaacaagggggtggggtcgaacctggtgacgtacctcaccagcgtcgtgggcatgagcacggcggcggcggccaagagcgtcatcgcctggaacggcgtcagcttcatgctgccgctcgtcagcgccgtcctggctgactccgcccactgggaccgctactgcaccatcgccgcctcctccttgctctacgtcttgggaatggtagcgctcacgacatgggcgctgctggggacacggatgccgcgctccacgctcttcttcccgctctacctcatgtccatcgggcaaggcggataccagccttcgctgcaagcgttcggcgccgaccagctgagcatcggggacgacgacgacgacggtgacggcgacaccgagcccggcgcgtcgtcgacgccggaggagaaggccaaggtgaagagcatgttcttccggtggtggtacttcggcatgtgcagcggcagcctgctggggaactccaccatgtcgtacgtccaggacaacctgggctggggcctcggtttcgccatcccctgcgccgtcatggctctgtccgtcgcggcctttttctgctgcacccctctgtacaagcggcaccggcaggtgcagcagccgaagggcaccggtattaggccgtccccgagtagcgtcttcaacttcaagtcggttctcggcgctagccgaaagatcagtctgccgccgtcgagatcatcagacgacaatggcgacgccatttctgagcttgagtacgtggtggtgttgcaagagaagccactgaaaactgatgaagcatcagagtcctcccctgacgaggctgccgctgctcccggcgtggccaaggtcatactcggcctcctgccgatctgggcgatcctgctcgtcttcgcggtgatcttccagcagccgatgaccttcttcaccaagcaaggcatgctgatgaaccacacgatcggcgtcggcgtcggctccggctccctggtgatcccgccggcgatgctgcagagctcgatcaccgtctccatcatcctgctcgtgcccatgtacgatcggatgatcgtcccgctgaccaacgccgtcacggggggcagcgacggcatcacggtgctccagcggatcggcgtcggcatggtcctctccgtggtggccatggtcgccgcggcgctcgtcgagtcgcggcggctccgcgcggagcccgccctgctgagcatcttctggctcctgccgcagtacgtcctgctgggggtctccgacgtgttcaccgtggtggggatgcaggagttcttctactcgcaggtgccggcctccatgaggaccaccggcatcgggctctacctcagcgtcttcggcgtcggcggattcctcggcgcgtccctcatcaccctgctcgagatggccacggcgaggcccggcaacgcccgcggatggttctctgacgacccgcgggaggcgcggatagataacttctactggttcttggctctcctctgcttcgtcagctttgtcgtcttcacgcacttgtgcaagtactacaacgacagatctgcgtcagggagggcgattctagctagagatagttcgtctgtgtaa

SEQ ID NO: 33735 - DNA, 870 bp, Zea mays
  Peptide Sequence Number=SeqID_77110
atgtcttcttcctcccttatgcgtcgtgtctttccatcttccaagcccccggatggggggtatccgccgcctttccgcctcctcgttggagggacgcaactccgtgggagtcggtacctctcagccatcgttcggcttcaaggattttcatcatgcgactcggccgcacccccacgccggcggtcacccaggatggtgaccaccagttcctgggtggggaagagcaaaccgggctgcgatcttggtcccaccctcagcttcaaggatgttcatcatcctcgctggggtgggggccacgctgagccggcgctctacctcccgcgcgggtccgcgggtcacccttttccgcggcgttcgggggtggaggcgctcgctggccctgcgggcggcgcggacttagacaacgtggggctgatcgacggcgggcatcgtcacctccagcgtgtcggagtcgtcggccgggcgcccggcggcccctcctgccggagggcggccgccgcgccaggccggtgccccactcgtctgggaggatttgagtggggatctgccggggggctggcgtcccctgccatcggcgccgaggcggaggcggctcgagaagtcctcgtcaccgacgggatcactgccaccatccgcgccccgggccactgcgccggcgtacttatcctcgcccctcgagcgtcggcgtgggcgagggcaagattgcagcagcgcccgcccactgtcgccgtagtcagaacgggcggcggcgagccgctcgaatccctcggctcgattggccttgttgtctgggtcccctctagcttagttaaagagacccctcggccgctcttcgatgagccgaggccaggggtagcgatatcagtatga

SEQ ID NO: 33736 - DNA, 273 bp, Zea mays
  Peptide Sequence Number=SeqID_77111
atggcatggcaatggttgaaagttggcacattgactgagctgaccgcttgcaagctggcgagggtgcaaatcaaacagacctttaatcatctagaggatttcatcactgctgtatcaatcttttaccattttataatcattgagggaaaacaatggatggatagagcatcaaggttcaggtcttccgctttgaaggttggcatgaaacgtccaggatacaatgcaagtgactcagactctgatgacgatgcaaatgatgacgccaaccaataa

SEQ ID NO: 33737 - DNA, 1497 bp, Zea mays
  Peptide Sequence Number=SeqID_77112
atggcgtcctccacggggagcttggagcacggggggttcacgttcacgccgccgcccttcatcacctccttcaccgagctgctctccagcgcaggggacatgctaggagccggcgccgatcaggagcggtcgtcgccgagggggctgttccaccgcggcgccaggggcgtgcccaagttcaagtcggcgcagcctcccagcctgcccatctcgccgccgcccatgtcgccttcctcctacttcgccatcccgccggggctcagccccgccgagctgctcgactcgcccgtcctgctccactcgtcctccaacatcctggcgtctcccaccaccggcgccatcccggcgcagaggttcgactggaagaaggccgccgacctgatcgcgtctcagtctcagcaagacggcgacagccgggctgccgccggcggcttcgacgacttctccttccacacggctacctccaacgccgtgcgcgcgcacacgacgacgacgtccttaccttccttcgaggaggagcagcagcagcaagtcgaaaaagccgccgtcccgtcgagcaacagggcgagcggcggcgggaacggcaacactaagctggaggacgggtacaactggcgcaagtacgggcagaagcaggtgaaggggagcgagaacccgcgcagctactacaagtgcacgtaccacagctgctccatgaagaagaaggtggagagggccctggccgacggccgcatcacgcagatcgtgtacaagggcgcgcacaaccaccccaagccgctgtccacgcgccgcaactcatccggcggcggtgcggcggaggagctgcaggccggcaacagcagcctctcggccgtagcggcggccggctgtactggaccggagcactccggcgccaccgccgagaactcgtctgtcaccttcggcgacgacgaggcagagaacgggtcgcagcggagcgacggcgacgagcccgacgccaagcgctggaagcaggaggacggcgagaacgagggcagctctgcaggcggcggcggcaagccggtccgcgagccccggctggtggtccagacgatgagcgacatcgacatcctggacgacgggttccggtggcgcaagtacgggcagaaggtggtgaaggggaacccgaacccgcggagctactacaagtgcaccacggcggggtgcccggtgcggaagcacgtggagcgcgcgtcccacgacaagcgcgccgtgatcaccacgtacgagggcaagcacaaccacgacgtgcccgtgggccgcggcgccgccagccgagctgctgctgctgctgcggcggcgggttccggggccttgatggccaccggcggcggccagctcggctatcatcatcagcagcagcagcagccatacaccctggagatgctgagcagcggatcgtacggcggcggcggcggctacgcggccgccaaggacgagccgcgggacgacctgttcgtcgactcgctcctctgctag

SEQ ID NO: 33738 - DNA, 453 bp, Zea mays
  Peptide Sequence Number=SeqID_77113
atgggcaagaacaacaagcgtaagcgtgagccgactcctccatcagaggagtttggcgactcggagtactcggaggaggagttctcctccgagcccgaggggtctccggctcccgtctctcccccggcgtcgtccgatgactcggacgactcccaggggatagctgcggaggtctggacatacatccgggccgtcgagcgcgccgggctcgaaggctcggatgagtcggagtactcctcggatgaggaggactcggacggcggcgaggagggtgaagacgacgacgacgacgacgacgacgatgacgacgacggcggcagcagtggcgggggcgacggtgacggcagaggcggcaccaagggcggcagcggcggcagcggagacagcaccaggggcagcagcaggggcagcacccggggcggcggcggcggcaggggcagggccagtggttag

SEQ ID NO: 33739 - DNA, 117 bp, Zea mays
  Peptide Sequence Number=SeqID_77114
atggataggatagagagtagagtagtagcaggacagcgacttgacgacggccaggaagagacgatttgggaacgtaacaatgagtgggtacgcaaccgttgccatttctacttgtag

SEQ ID NO: 33740 - DNA, 237 bp, Zea mays
  Peptide Sequence Number=SeqID_77115
atggccgagctccctgggagcatgccggtgcccctgctctccccttggccgccagcagccatggccgccagcccctggcgagctcaggaggagagaaccccgtgttttgcgtggagaaggcaagccgctcgacgctcatcgatgttcgaagcgatgcacaaatcggaatcaccgtcgttcttgcaaacgccgattgggtttgtttatggtgagccgatgcatgtcgctctcgattga

SEQ ID NO: 33741 - DNA, 1263 bp, Zea mays
  Peptide Sequence Number=SeqID_77116
atgtctttgcgctcccctcatgcatcgcgtcttttgaccttccgagcccccggatggggaacactcgcagttcttccgccttgtcgtcgttggaggaacacaacttcgcggaagttggtacctttcagccatcgtttggcttcaaggattttcatcagccagcccagccgcatcccctcgccggtggtcacccaagacggtgaccaccagctcctgggtggggagaagcaagccgggctgcggcctctacccctccctcagcttcaaggatgttcatcatcagtgctggggaggggagtgcgccgagttggggtcggtctccgcgcgggcagcggcccgctccttctctcagcgatcgggggaagggcgttcgccgttcgtggcgctggcagctgccgcgtgtccggctctctggtccgagcggcttcagcgctgcttccggtgccaccttcggccgcggcagccggaagaggtttctccgccgacgagatagtcggtgccgcccgcggactaacctccaactctacggccttctgctcgtcctcgcccctcgaggggggacgtaggcgagggccttatggcagcagcatccgccctgaggtcatcgctgctgctgttcggccgctcggagcagaagtcgttgtcgctgctgctggagcgggcggcggcgagccatccgtcggccttctgttgctccgcaggccctccaatcgtgggggttgttcgtacctgcggaggaaccctcggccgctcttcgatgagccgaagctggaggcagcggtgtcagcacggacagaggcggagttggctcgaaaagaagacttcgtcggccggagcctggccgggccgtccacttgcgggaccagcgccggagttgagtcgccgaggccacgagccaggctggtgtcctcggaggatagctggctgaggcttcggggcgaccggctgagctgtctgctcgggccggattcctggaggagaccctggcgatggcccgggcgcagtgatgacgtcgtccttcggagtggagatcctccgaccacgttgccgtccgaggctcggtcggacttcgccgaaggcggggttgacgccgagggtgctgctgctccccctccgtcgacgtctgagcctgcaggatcggttcatcttgtaaaggtgacgagtgaggtatccgtatcccggaggcataggagtccctcggctcggtcagccttggctacttacgtgtacttcgtcgttttcaggatcccactttcgaagtag

SEQ ID NO: 33742 - DNA, 894 bp, Zea mays
  Peptide Sequence Number=SeqID_77117
atgcaggcgccatgcaactgcaccaagggggcgcaccctttcgacttcgacacgtccagcatggaggcccaggcccacacgtcatggaccggaagaggggataccccgaaagggatccttctccgcgaaggaaatgggccccgagcccccctactgatcagaggttcgaaggctggcccctcggaagggttcaacagctgcctcagagcactcgggctccgcgcccactactggtcaggggttcgaaggtcggcccctcgaaagggttcaacagccgcctcaggccactcgggctccgcgcccactactgatcaggggttcgtaggctggccctcgaagggttcggcagccgcctcagacgcagagctagggatgaccctgggggcagccaaccccggaggattcacgcctcgcccgagggtcccctcaagcaacggacacaccttcggctcgcccgaggcccagtcttcgccaagaagcaaccttggccagatcgccacaccgaccgaccgcaccgcaggagcatttaatgcaaagggctcggactcgggctcggccccggaagacgacgaactccgcctcgcccgaccccagggctcggactcggcctcggccccagaagacgacgaactccgcctcgcccgacccagggctcggactcgggctcggccccggaagacgacgaactccgcctcgcccgacctggggctcggactcgacctcgaccacggaagtcagactcgacctcgacctcggaggagcctccgcctcgcccgacccagggctcggaccgaccacgtcacagggggagccatcattaccctacccctagctagctcaggctacggggaacaagaccggcgtcccatctggctcgccccggtaaacaagtaa

SEQ ID NO: 33743 - DNA, 219 bp, Zea mays
  Peptide Sequence Number=SeqID_77118
atggagggagccaatggagtcggtgggtcggagtccgagcggaagccgctgtcagaggtggtcggcgactgcgtccagcgctggttccaggacgcgtacaaggaggcgcgcaaaggagacatcgccaaccaggtgcttgtagcgcagatgttcttctcgggttatgggacccccaagaacgagtacaaggttccttatgcagtcgtctgtgcgagatag

SEQ ID NO: 33744 - DNA, 459 bp, Zea mays
  Peptide Sequence Number=SeqID_77119
atgccggccatcaatgataatggtccggtggttcttcagctgggaggtgatctgaaccacgggatccggataccaggtgtgccaagcgacaggccacaatccgcgagtccggtggagagcgacgacacatgctacatcacatcgacgggacccttgtctccgaacctcatgctgatgtcgattctaccagtggctccgattcctcaaccaagcgccagagaaccatggaggggtgggcgcagggctgtcctcatgttcctgttgcccagacacttgccgtcatacccctacctcttaggcacaaccgtccctagaaggggcaacagcactggcggcatcaactacagcccgaggagcagtcttcgagcttctagccatggtggaatatccgaacaccatggtaaatactttttcctctgtgttgggcatcaaattgagcggcggacggtccggccctga

SEQ ID NO: 33745 - DNA, 966 bp, Zea mays
  Peptide Sequence Number=SeqID_77120
atggctccccctgtgacgtggtcggtccgagccctgggtcgggagaggcggaggctcctccgaggtcgaggtcgagtctgtcttccgtggtcgaggtcgagtccgagccccgggtcgggcgaggcggagttcgtcgtcttccggggccgaggccgagtccaaaccctggggtcgggcgaggcggagttcgtcgtcttccggggccgaggccgagtccgagccctaggtcgggcgaggcggagttcgtcgtcttccggggccgagcctgagttcgagccctggggttgggcgaggcggagttcttcgccttccggggccgagcccgagtccgagccctggggtcgggcgaggcggagttcgtcgtcttccggggtcgagcccgagtccgagccctgggtcgggcgaggcggagttcatcgtcttccggggccgagcccgagtctgagccctagggtcgggcgaggcggagcttcctatggcgcccgaggccggacttggccgctgtcagcctcactttgtcgagggcacagcagtcggagcgacacgggcggtgctgtcttcttgtcaggctggataaggggtcaggccacctttgcattaaatgctcctgcagtgcggtcggtcggtgtggcaatctggccaaggttgcttcttggcgaagactgggcctcaggcgagccgaaggataggtcagccggtcatgcatgcgacacttcggcatcgctatggcggtcaaaattggttttgatcgtcgcagtggacccaaacgggtatttattgcacttgttccacatgcctgagcctgacggtccatatcccatctttctgcacctgttttcggcatttcttttgcgtagtcggtggatctggaccccatgtcatagacagggtcatcgaggttccaggtactcgttgcctaagatttcgcgtgttgatccaacagtgtgcgcgggagagtctgcctag

SEQ ID NO: 33746 - DNA, 192 bp, Zea mays
  Peptide Sequence Number=SeqID_77121
atggtggcctatgggtatctgaaagggaaatgtgcccttgggccatttctaagtattttggtgattgagtgccaatgcaagtacttttgtgttgatctatgcaaagtggtggacaaagtgcaaatcatgtcaaaaggaaaagaccaattggaaatgtcttggctcgagcagccaagactctgctcagtctag

SEQ ID NO: 33747 - DNA, 417 bp, Zea mays
  Peptide Sequence Number=SeqID_77122
atgcctgaagctcggactcacagctcggcccctcaccctacatccccggcggcgctcggcaacgccccttcctccccggaggcgctcggcccccgcccggcctacctcgcggcggcgctcggccccacgcccggcatcccctcgcggcggcgcccgcccctgcaccggcccatgcgcgtggcgctcgcccgccccgcccctcggctcggccggccatggtggctcggcgccctcacgcggcgcggcaagccccgctcgcccgcgcgcacccccgcccccggctcggccgcccccggccggttcaaccgccccctgaccggttcaaccgccccggccccgactcggccgcccgttcctcgtcccggcctcgcccgaccgtatcttcgctcgcccgcgctcgcggtgattatttgttaa

SEQ ID NO: 33748 - DNA, 282 bp, Zea mays
  Peptide Sequence Number=SeqID_77123
atgtcgttcaacaaaaacctagcagtggtcgttggcttcaccttggctctgctcatcgcgtcgaacggtgaagaaacttcctcgtatggcggatcagcgctgtgcgattcaacgacgggggtcgcctgcgcatccgacgcggtctgcgtgaccatctgcaagcgaagggctggacagaactacgtctacggccactgctacaaggagcctagcggcggccgttcgtgcttgtgcaccgtacgcctccgtatcgctgtcagcggtaaccaaaacaaaatgtaa

SEQ ID NO: 33749 - DNA, 192 bp, Zea mays
  Peptide Sequence Number=SeqID_77124
atgctttcgtccggtcgtccctcgcaggcggcggcggcgttcaccgagcagcagctgaagcagttccgggcgcagtgcctcgtgttcctcgccgtcagaaacaacatggagcccaagaagaagcatctggagattgcactgggcgaattttctgaggaaggggtgtttgaatgtcatagagataatagttag

SEQ ID NO: 33750 - DNA, 282 bp, Zea mays
  Peptide Sequence Number=SeqID_77125
atggataagatcaagtacgaaattcgtgagggtgaacaagaatgggtgaatgaagggcggagtaggcttggactaaaggacaaagacactaagaatggaccgtgggtggctcatattaggctcatgaagagcaatcatacatgtgtgatcgagacaacatcgaccaagacaatgaggagcacaatggcatcatggcacttggtagagacacatggatctacatgggtgatgatggcgtcgttcaagtcaagaaggaagcttaaggtggcaatcatggcttag

SEQ ID NO: 33751 - DNA, 141 bp, Zea mays
  Peptide Sequence Number=SeqID_77126
atggaagagcaagcaccgtccgagaccacgcgcagaccgtccggcctcaggtgcggaccgtccgtcattgatctgcaggggcggaccgtccggactaggggcgtggaccgtccgcggtcggcagaaaggagcaacggctag

SEQ ID NO: 33752 - DNA, 327 bp, Zea mays
  Peptide Sequence Number=SeqID_77127
atgtccggtgtacaccggactgtccggtgcaaccgtggagcaacggctacttcgtgccaacagtcacctgcacgcacattcaatgcgcgccagaagcgcgcagaagtcaggcacgcgcgtgctggcacaccggacattgaacagtacatgtccggtgtgcaccggacacccaggcgggcccagaagtcagagctccaacagtcggaatccaacggcattggtgacgtggctggagcaccggacatgtccggtgtgcaccggactgtccggtgcgccatacgacagacagcctccaccaacggtcatgtttggtggttggggctataa

SEQ ID NO: 33753 - DNA, 705 bp, Zea mays
  Peptide Sequence Number=SeqID_77128
atggccggagggaagaaagggaagaaagggctccgccccgccgatgggaagcgcaagcgccccccgagtcctccctcggaggactttggggactcgaagtactcggaagaagtctcctccgacacggggctcggcgggtcagatgactcggaggaggcctccatggactccgaggagggcagcgacagcgagggcgacgacgatgagggcgacggcagcagcacggtggcagcgacggcagcagcaggtgcaatgatgacagcgacaaaggaagcggtgacggcggcgaaggcagcactaggggcgatgcccttttcagagttcatatccaacccgcatgttcaagacgacaatccaggccatagagtgcgaccttcttcagaagatattgaggccctcattgctgtgtaccagggtctccctaaagaggaaaaacaaactcatctccagatgcaagcgactgctgacgaggctgaagtgaacgttgttcttagtatgctagctggcgagtcgtccgaatttgcccgtattgagtcggcaagtgcggcagctgggcgtgccttcaacggggatgaaggagcttgcagtcctagaggtgcccatcgcaaacgatcatgtcaaacgggttatccagccatgtctgccaaggggaagaaaagaaaaaaggaaacttcggcgttcatccggcttggagttaggggctga

SEQ ID NO: 33754 - DNA, 459 bp, Zea mays
  Peptide Sequence Number=SeqID_77129
atgaatactttgtcgagtgtcttccttcattaccggaattcgggactttgccgagtgtcggacgctttgccgagagccgcactcggcaaaggtggctttgccgagagccgcactcggcgaattccgtctctcggtaacgagctggtttaccgagtgcaggacactcggcacaggataactctcggcaaagacatgtttgccgagtgcggcaaaggtggcgctcggcaaagggccgtcagcggccgtcataaagttgacggccgtgagcctttgccgagggccgagggtcggcactcggcaaagaagcctctttgccgagtgcctgagaaaagtactcggcaaagacggctttgccgatgcactcataagttacggcttatttcaggaaaacatataccagaattatcgagcaccatactcatgaaatatgaccgtaaacttgctatccaattgttttaa

SEQ ID NO: 33755 - DNA, 534 bp, Zea mays
  Peptide Sequence Number=SeqID_77130
atgtgtggatcggggccttcactagcaactccgatagaacctccgactcagcagatagcgaccagccacgacaaaggcaagcatcttggtgagggcccacgtgtgggacacaccgaagctaaggacttcgtcaacctcgactcatggaccttcggcacaaacaatccttccgagggaagcgaaggctccatggacgacaacgagggctatgtggagcgcgactcgccggggcgccaattactcaagagaaccagcggcggtgttctctggtcaggcgcggacggtccgcggcccaaggtcggacggtccgcgacctggcgcgaggcggcggtgctctctggtcaggcgcggacggggcggcggaagatcgccggcggcgcctggatctcgctctcgggagggaccccgtcggggaggagagatcctaggtggtgtctaggctcgggaggcgacggcctaaaccactcacggactcatcagggcatcctccacgctcctcatcctatggtacctgttcaggacctgtggatgtga

SEQ ID NO: 33756 - DNA, 363 bp, Zea mays
  Peptide Sequence Number=SeqID_77131
atggagacattgggatattcccatgttggttatggtcgagctgcgggagcggagaccaccccacgaccaaatggcgaagttgtggtcttcgaaagcttatttgctgccagacttcgcctgtcgtgtcatcagtttctacttggcgatcgctcccaagatatttttgtggcaaagatggtgaaagagctagaggacttggtgggtcttgttactaagcgtgaggttgagaagggtatcgagctgcgcgagggagaagtccagtcaaatctcgtgtttagtcagatggggcttgtgtatgaagcacacaaggctcgactgaagaggaaaaagagaatgccaatgggggtccctactcaatcttag

SEQ ID NO: 33757 - DNA, 228 bp, Zea mays
  Peptide Sequence Number=SeqID_77132
atggtggacctcaacatcatcctcgtcatcggtagctcagcgcacgacaatggaaaagcaacagcagtcgacccgacaacgagtaaccataactctgaatgtgacgcgacatctgtgtttcccgaggaagttgcagaagaagtccctgagcagcagcttggtgaaggcaagtgtcctctgacccattatgtcctatctatttataattcactgtcccgcactacttaa

SEQ ID NO: 33758 - DNA, 129 bp, Zea mays
  Peptide Sequence Number=SeqID_77133
atggctcttatcattaagagctttcgtgaaatcctcaagcaaaggagggggttggactacaagcctcactccaaaagggtgtgctaccagtgtgtgaaagttgaaagtcgcctagaggggggtgaatag

SEQ ID NO: 33759 - DNA, 294 bp, Zea mays
  Peptide Sequence Number=SeqID_77134
atggccgatgagagcttcgagcgcgaggtgatgggattcgggtatgctgcaatggcgccgttgtgcctcaactttgtgtcgtcgggctggcaccggtcagttgttgatgcctcgtcttcctcttctggggtagatcgggcatggcgactgcgtgcaccgttgagggatagtgctggagatcagccgtccgtggtgaaggtcgccatggcggatgatgacgatgtcaatccggtcaccggcaacgacgaccttcgcgcgacagggcttgtcctagatgacgaagacgacatctag

SEQ ID NO: 33760 - DNA, 1794 bp, Zea mays
  Peptide Sequence Number=SeqID_77135
atggtgaacaccgggcgcttcgtcgtcctcgtcctcgcctaccgcctcctggtacccctcctctcaggctcagctgaaccggaccacaccaccaaagagtcgtatgtcgtatacatggggagcccgtcgggcggcggcgacccggaggcggtgcaggcggctcacctgcagatgctgtcgtccatcgtcccgagcgacgagcaggggagggtggcgctgacgcatagctaccaccacgcgttcgagggcttcgccgccgcgctcaccgacaaggaggccgccgcgctctccgggcacgagagggtggtgtccgtgttcaaggaccgagccctgcagctgcacacgacgcggtcgtgggacttcctggaggtgcagtccgggctccagtccggccgcctcggccgacgggcgtcgggggacgtcatcatgggcatcgtcgacacgggcgtctggccggagtcgccgagcttcaacgacgccgggatgcgggacgtgccggcgcggtggcgcggcgtgtgcatggaaggacccgacttcaagaagagcaactgcaacaagaagctcataggcgcccggttctacggcgtccagcccgagtcgtcggcatcgaacgcctccagcagcgccgtggcgacgccggccgcaaccggatcgccgcgggacaccgtgggccacggcacgcacaccgcgtccacggcggccggcgcggtcgtgtcggacgccgactactacgggctcgcccggggcgcggccaagggcggggcgccgtcgagccgggtggccgtgtaccgcgcgtgctcgctgggcgggtgctccgcgtcggccgtgctcaaggccatcgacgacgcggtgggcgacggcgtggacgtcatctccatctccatcggtatgagctccgtgttccagtcagacttcctcaccgaccccatcgcgctgggcgcgctccacgcgcaccagcgcggcgtgctggtggtctgctccggcggcaacgacgggcccaacccctacaccgtcgtcaactccgcgccgtggatcctcaccgtcgccgcctcatccatcgaccgctccttccagtccaccatcgctctcggcaacggcgacgtcgtgaagggagtggcaataaacttctccaaccacagcctcagcggcgagcagtaccctctggtgttcggggcccaggtggccgcccactacgcgccggtcgccgaggcgagcaactgctaccctggatcattggacgcgcagaaggtggccgggaagatcgtggtgtgcgtaagcacggacccgatggtgtcgcggcgggtgaagaagctggtcgccgaggggtcgggcgccaggggactggtgctcatcgacgacgccgagaaggacgtgcccttcgtcaccggcggcttcgcgctttcccaagtcggcaccgacgccggcgcgcagatccttgagtacatcaactccacaaagaatccgaccgccgtaatcctccagaccgaagacgtcggcgacttcaagccggcgccggtggtggcgtccttctcggcgcgtggccccggcctcaccgagtccatcctcaagcctgatttgatggcgcccggcgtcagcatcctggccgccacgatcccgtccaccgatagcgaggacgtgccgccggggaagaagcagtcggcctacgccatcaagtccggtacatcgatggcctgcccgcacgtcgccggcgccgccgccttcgtgaagtcggcgcacccgggctggacgccgtccatgatcagatcagctctcatgaccacaggtacgcagtag

SEQ ID NO: 33761 - DNA, 453 bp, Zea mays
  Peptide Sequence Number=SeqID_77136
atggatcctggcccacatatgctatgcattcggttttgcccccaaaaccggatggttcgtacaatccaaaccacccggaccaacaccaactacatcccttcgccacgacaagttcccgtctatccagtggtagtcgaggaaatccctgtggatctccctcgcattcgtgtggagaacggagttattctggaggacagctcggagaagtttctgcctacgcccaccccgttggcagaatcactagccttcgcagctggatcgtcatcttcagcaccgccagcaccagcactccaagcccctgctcccagaggcgatgacccggacgactctggtgatgatgatgaagacgaagaagaagaagaagaagaagaagaagaagaagaagaagaaaaggaggagaacatcaacgaggaagccaacggtgaacagcaggatcacttcgtggggatatag

SEQ ID NO: 33762 - DNA, 1212 bp, Zea mays
  Peptide Sequence Number=SeqID_77137
atgggggagccgccgccggaccggaggaggctgtaccaggtttggaagggaagcaataaattcctcttcggcgggcggctgattttcggtcctgacgcgggctccctcttcctgtccacggtcctgatagcaagcccgctggccggcctgtgcttccagtgcgtcaccaagctcagcagctccggcggcagctcaccgctcggcctgccggtcctcctggccaccatactccttgggctatcggatctggcgttcctgttcctgacatcgagcagggaccccgggatcgtgccgaggaacgcgcgcccgccggagcagcaggagcgcggtggggtcgacgaccccgtcgtcgccgatgacgacgacatcgtctcggcgtcgaccgagtgggtggcgatgagcgccgcgaataacccgcacctccggctgccgcgcaacagggacgtggtcgtcgccggcggccatgtcgtccgggtcaagtactgcgacacgtgcctgctgtaccggccgccgcgggcgtcgcactgctccatctgcaacaactgcgtccggaagttcgaccaccactgcccctgggtcggccagtgcatcggcctgcgcaactaccgcttcttcttcctcttcatctcgacgtccacgttcctgtgcctctacgtcttcgtgctgtcctggctcaacatcgccgcgcagagggcgagccacggcgggtcgctgctgagaccaaaccactgctatgcatgcaatgcaattgatgttcatgtccatccgttccggtcctctgcgcagacgacgtacgagaacttcaggtaccggtacgaggagaaggagaacccgtacaacaggggcgtgctggctaacatgtccgaggtcttctgcaccgggatgccgccgtcgatgaacaacttccgggcatggatggagctgccggcgccggcaccggaggcgttcgacgccgggccgccgctcgcttctagggacaagatcgacctggagatggggcacaagggcggcgtgcaacaccatactggtgttccacccatcttgcaggggctgcattacgcgcaaatggagaagaattacagtgccagcgtccacatcaaggaccggcgatccgcggaggcgccggaccccttcatgatcccggaggcgccgcgacacgctgcagcaggagaagcttggcctccagctgtgtttcatgacgacggagtctaa

SEQ ID NO: 33763 - DNA, 162 bp, Zea mays
  Peptide Sequence Number=SeqID_77138
atggcgcccaagagaaaaactgcgaactcgtctgctgcagtgatccccgcaatcgaccccaacagccagttacccttcgcagaacattcagccgctgaaagacagggcctatccggcatatctttaccgagggctggccgactcaacccgagttaccaatag

SEQ ID NO: 33764 - DNA, 354 bp, Zea mays
  Peptide Sequence Number=SeqID_77139
atgcaggaatcccttgcaggaccgccatcacagcaaaatcctcccgagggcctccccaggaatcccttgcaggaccgccatcacagcaaaatcctcccgagggccttcccaggaatcccttgcaggaccgccatcacagcaaaatcctcccgagggcctccctacactgaccactcccctactgcccttgcccctttcgggaaagtgcagggggttctggcgcaagaatcccgagacacagggaacagggtccctggacggcgggttgaatactggaaaccagggggtttattttgtaaaatgtcgcgaggtcgaaggggtatcagccaccatgatccgtccgatccacactag

SEQ ID NO: 33765 - DNA, 342 bp, Zea mays
  Peptide Sequence Number=SeqID_77140
atgggaaggtggtgtaaggagaaggtgtcatcacgaacaatgaaggcagaagacaatattatccatgtaccatttgtaaatcgtgtttttgcgctaagaagaccattactacacatagttttggattatgaagacgaattttttgctttgttaatgggtgtccttgagtcccatagcctacggacaacagatggttccttttcagagtcattatatggtctcaggaggagacctgttaaggttgtagtgaagagaaagagtcctggtacagaatccaatgacaaagtctatggttctgctctaaggaagcgccagaaaatcctttcagttattttttggtag

SEQ ID NO: 33766 - DNA, 849 bp, Zea mays
  Peptide Sequence Number=SeqID_77141
atggtccgcgagacaacgttcctgctaggcatttcgccgagcacctgcagcaccagctcaaggcggctggtcttggcgacgacctccttcgccaccgcacgcgacattgccgtgtccgcgcggtgcctcttcatgcccatgaacctccacatgctctcgctcgtcgtccacctctccgagctggctgcctccttgcccggcgagttcagagacctggccgagccggtgcgtctacccggctgtgtgcccatcctagggcccgacatcgtctcgtcgctccaggaccggttcgacccatcgtacgtggtgatgctgcacctcgtcgtgcgctgccgcgaagccgccgaagccatcctcatcaactccttcgacgctatcaagcctgaggccgtcgaggttctgcgccatccagcaaagtccggcggccaccagtgtaccctatcgacccagatccttcaggccgagcccaacgacggcggcagcgtcgatgtcgatttcctccaacgcgaagaagcggagcgtcgggagcgcggtgacggcggcaaagaggtgtcgtgggggaggaagaagtggggcgggggcgacctcctcgcagccgcgggatgggagatctggtgcctccgcctcgaccgccgcacgagcacacgccaagccaattggagagggagtgcgagggcgcgggatggcggatctgctcgatctcaagacttggcgggcgcggcggacgggattgacgacggggcggggcaggagatcgcgcggcggtccaggggcgctgtgccgctgtcggcgcgggagtggggacgcacgggcgggggcacggtggacgcccacgttacctccttatag

SEQ ID NO: 33767 - DNA, 1797 bp, Zea mays
  Peptide Sequence Number=SeqID_77142
atggcgacagccggtggcgccgcaccggcggcaatggacgagaaggcgcggcgcacgcgcgacctccttgctagcttctacaacaccgacccgtccgcggccgccgggggtgccgcggcccccgcgttcctggcgcgcccgtcccctaccgccgcgcccgcatcgcccctcgactcaatcaactccacctccttcgatcccgacatctacatgaatgtcctggtgcaacaatccaatctggaaggtcttctacaaaggcatgtgaagatggctactgagatcaagaacctagacacagatttacagatgctagtgtatgagaattataacaagtttattagtgcaactgacactataaaaaggatgaagactaacattgttggaatggaggcaaatatggagcagctccttacaaagataacatcagtgcaatcaagaagcgacacagtgaatacatctctttttgacaaaagggaaaacattgagaaattacatcgcacacgcaatctgctccggaaagttcaattcatatatgaccttccaactcgtcttaacaaatgcatcaagacagaagcatatgcagatgctgtcaggttttttactggagcaaaacctatttttgaggcctatggagatacatcctttcgagactgtaaaaaggcttctgaggaggcaatggatgtagttatacaacaccttcagacaaagttatactcagattctgaacctattgaagcaagagcagaagctgtagttctccttaaacaattgaagtttccagtggacaacttaaaatcgaatctacttgagaagctggaagaatgtctcttgaatttccagaatgagactacacatgcttcaattggtgacatctcaaagacatttcgtgcttatttaataatatttcctgattcagaaaggcgtctcattgaacttgcacaagctttgttcttaaaccgatatgagacagtcagagagaatctgaagaaaagaattccatcaacagatctactggcaatgctacgatccttatgggaggatgcaaccatcatcgatgaggttatttcagaggctgcgctaccagctttttctttggaggtctccccacctcccaccatagtttactctgcatttttctctccagaactgacttcatccgggattgaagttcagatgtgttggtacaagtataaagaggcactggttaggacacattcaacatcaaatgagaagttggaagagtcacagctgcaaactgctatggagacaagcaaaatcaaagtatcccaaggatgcatagatctcctgcaggaatttcatcatctggtagatggcaatatagagttgcttgttaagctgagggatttgattattgattgggtacaagaaggttttcaagagtttttccagaaacttgatggacattttcatgtgctttctgggagaagcaaaacaaatttacaagagccaactatggattctatgcaaactgataagaccccaacagtcttggtacttatgcttgcacaactctgtgtttacattgaacaaacaacagtccctaaagttacagagaggttttatctcactatcaaatatggtggtttattttctttgtttgtcatcaattgctgtatggaattaaataactacataaagatagaaaagaaggcttccagagtaatagtttctcttgaaattttgggtctccttgttaaaaagaagtcagtgccacaatacccgtggcgctacagtacccgcgggtactgttcacagggtgggggctacgcgggttag

SEQ ID NO: 33768 - DNA, 447 bp, Zea mays
  Peptide Sequence Number=SeqID_77143
atggggagccgcggtttcggggcctcccggaaaggcagcaaggggcggcttgagagtgttagtgattattgtgtatgccctgttgtggttgttcgctaccctgatgatgttgcagatgtcggtggagatgcatcaggggtgacagatgagttgcacactgtaccagaggacgaacctgtttatcacgatgcacctgaggtgcagaaagacaaattggtttatgctaatatgaaagggaaatgtgcccttgggccatttctaagtattttggtgattgagtgcaaacacaagtgcttaaatgtgaaaatgtgctcatggttgaacaaagtgcaaatcacaagtaaagggacccctaggcgcatggaggagataaccaagcattcctacaacctttctaagcaccaagacattgatctagcgcattcgattcattgtgatagcatatag

SEQ ID NO: 33769 - DNA, 303 bp, Zea mays
  Peptide Sequence Number=SeqID_77144
atggcggcgccgagggggtcgattgagggacgaggcatcgtcgggttatatacccaggtgaattcggtcagcggccgtaccgcggagttcggcatgaccgcccaagccgcgtcgttcggagcaggaaacaagacggcctcgccgcctccaaaaggcggagaaccgactgtgaaccggcaatcagctaaagttcaggaagaggttgcccaggttgtgtgcgctcggaagacgggagacgatgtcggggatgtggcagaagtggaggtggagaggaagagacctgggggctgtttggtttgctga

SEQ ID NO: 33770 - DNA, 294 bp, Zea mays
  Peptide Sequence Number=SeqID_77145
atggcagcagcagagtggtcgacgcgtggttgggtattacatgtcctgcggaggtccttcctcggggcagagccgttgacgcggctcacgtcgtcgaaggcggtggccaagctgggatccaaacgaccgtgggtggacaggtccggtggtggactgctccaggaatttagaggcaaggaggagggtgtcctggagagaccgaccaaggtaattgaaggcatcacaacagttcctcaccggagagtcgccatcgccaaaacgacttttgacgtccaccgttgtcgttcaaggtag

SEQ ID NO: 33771 - DNA, 405 bp, Zea mays
  Peptide Sequence Number=SeqID_77146
atggaggcaataagagctttgaggtacctagtgcatgggagaaggtcaaagaggctgaggaacccaaagccaggggtgaagaagaagacttgtgaagtcaaggtttatcgagttgagaagatatatgaaaagctgggagaagaatgggaaagagggtattttgagatagaaacttcaattcgctgcgacctactcaaagggtctttcattccactgcgatctagtcttcgagtagatggagacaaaagcgacgatgaggaggaacatgatgatagcaacgatgaatatacatcatcacaagggaaaaagagaccgatgatgtgggtgaggaagaaattcgctagttctacaccaatctcagcaaagaagacaagtgctcttgatgaaattgttgagaagaaataa

SEQ ID NO: 33772 - DNA, 651 bp, Zea mays
  Peptide Sequence Number=SeqID_77147
atgtcgtcgtcttcttcttcatcaccgtctgctgtgaccgcgtcttcaaatgcgccgtcgttggagaagacaattagcgatccaaaggcgacagtggagttgctaccgggtcatactgtcgagtttgggacttcaaggatttactctagacgcatgcaagaaatgcagcgtttaggttattttgtgaatggtgtggggcatgctccggggggcaaagaggtcctagagccggagggtgaattggttgtgttcgaagcgtttttcactgctggactttggttgcctgcgcacgggttcttggttgaagtgttgcgaagaaggtctacaccggacagtccggtgctacagctgagagcgcccgttgtgggcctctctgcgcagactgtctgggtgtcccaccagacagtacggtgcacaccggatagggttccggtgactaggcctgcacaagcagatttaggcctgttgggcaaggggaaagaaaattttggtgttgtggaaagtgttacgtcgttgctttgtcagagtctaacagggttcaacgatgggggatctgattttgattcatggtcatcgggtagcgaaggattactgagcccgttcgcaaggatggacaatgagtcctcagaagaggacttagattttttgtag

SEQ ID NO: 33773 - DNA, 312 bp, Zea mays
  Peptide Sequence Number=SeqID_77148
atggacaagagaagtgctgctgcatctcgtaacagcgtgtgggagaagatggagaaaaatggccggtggcgtgtgggagagaagccatggaagaagtggaggagaggaaaccgagttcctgcgccaaggaagaaggccgacgttggtgagctgctgctgccaggaatgggaaagggcgtggaggagaagggagagcatgtgctgccatttatagagccaagctctggacttggcagactgcaccagcaggtggcagatctcctggcttgtcgtgcccctgccctgtataatcagagcaaggcgcaggtgtag

SEQ ID NO: 33774 - DNA, 315 bp, Zea mays
  Peptide Sequence Number=SeqID_77149
atgcggagaccgtcgtccgaggttgaggtggagtccgagccctggggtcgggcgaggcggagaccgtcttccgaggtcgaggtggagtccgagccctggggtcgggcgaggcggagcttcctatggcgcccgaagctggacttggctgctgtcagtctcaccctggcgggtggcacagcagtcggagcagggcaggcgacgctgttttcctgtcagctttgtgctgatgggggttaccagctgagattaggagtcttgggggtacccctaattatggcccccgacaaaactgtgattcctaaacgacaaaaataa

SEQ ID NO: 33775 - DNA, 873 bp, Zea mays
  Peptide Sequence Number=SeqID_77150
atggccacggatgtcgcgggcatcacgcggcgagggggtgggggcgacgtagcgatgtctgagcacggttgccgcagatggcagccggccagaggggcgagacgacgaagatctcggggggatcgcggacgcggtgagccctccccgatccactccgcctcctcttccctcgatggatctggattcaagtacccctttcactctcacatcgttgaaatccatggcgtcgtcgcctggacacgcagggggatggtcctgaccttccagtcacttacctatgaagatggagttctagatcagcgcggcagggtccacggcactgcatcgggggcagcgttggagttggaaaagggctgcgtcgtgaccgcggagggaacaacgcaagtgagcggtggaggcgttccactccacaaccctccaaccccgccactgccatccaaccacgtcggcgccgaggtctactaccttccctacgtcaccgacgccgagtactacacgaccggtggtaagaagatatctgccacctcgatctactttgagagcctgccgatgagtgtcaccaaggggtacatcaacttgattttcgtcccaagctcatcatccgcggcggcagtgtgtctgatcctcgtgttaaagagaagggtcgaatggatgcaatcaaaactagaagggtgtgcgccatcgaggatcactgcagctaaggcaatcgtgaaggatggaatcgttgttatggggcatgttggcctcacaccgcaagctattactgtgctcggtggatttaggcctcaagggaaaacggttgacagtgttgtaaaggttgtggagacaacacttgccatgaaggagactggatgcttctctgttgtgtattag

SEQ ID NO: 33776 - DNA, 1023 bp, Zea mays
  Peptide Sequence Number=SeqID_77151
atgcatcgcgtccttccaccttccgagcccccggatggggagcgcccgtgttgctttcgtcttgctgtcgttggaggagcgcaacttcgtggaagttggtacctttcagccatcgctcggcttcaaggattttcatcatgcagcccggctacatcccctcgccgatggtcacccaagacggtgaccactagtttgatggtggggagaagcaagccgggctacggcctctgcctcgccctcagcttcaaggatcttcatcatccttgctggggcggagggcgagctgagccggagctctacctcccgtatgggccggcgggccacctcctccttcagcattcaggggagagggcgctcaccggcctagcggggggcggacttcgacatcgcggggccgatcggccgcaagcatcatcagctccagcgtgcccggttcgctggctcagctggctctggcatagcttccggtgccacctcccaccgctgggcggagtgcggctatctgtccgccgtacgggcggttgttgcgccgcgcgcaccgggggaccgcccaagacgtcgcgtgctgctagggcggcgttcgtgttcctgggctgtcctgcccttgctccgatggctgccgtcgtcggtgctgaggtggtggtggctgaagaagtcctcgtcgccgacgagatcgccgccaccatctgcgcttcgggcctctggctctttggctttgatagcttgtcctcgcccctcgagtggggacgtgggcgagggccttatcgcagcagcgtctgccctgaggtcatcgctgctgctgtttggccgcccgaagcggaggtcgttgtcgctgctgccggagtgggcggcggcgagccacctggattttgtcgtcctgcaggccctccaataaaccctcggccgctctgcaatgagccggagccggaggcagcggtgtcagcatggacagaggcggagtcggctggagaagaaacttcgtcagcccaggagcaggggacttcccaggccgaggaggcgtag

SEQ ID NO: 33777 - DNA, 1491 bp, Zea mays
  Peptide Sequence Number=SeqID_77152
atggacccgtgcgcctcgcgtgcccccgattgcgtggcgtgccaaaggttgatgatggagcgcgaggaccctgaccgcgcgatccatcgagggaagaggaggcggagtggatcggggagggctcacctgaaaggagggattggggatcagagatggagcacgttgacggagcgaatggtcactgccgatgacgagggccaccagcagctctccctcgttcttggcttcgcgcgcgggcttcggatggcagcaaagggagtcgagatgggccgacggcgagcaggagggcgcagacctcgtgcgatgggggagacggagagagatgggagcagatctcgcaggggcgtccacatcgtacaccatgttctgccccgcatcaccgcgtccgcgatccccccgagatcttcgtcgtctcgcccctctggccggctgccatctgcggcaaccgtgctcagacatcgctacgtcgcccccaccccctcgccgcgtgatgcccgcgacatccgtggccatcgcgcccgcccctcccccaccccaagagcgacgcccgacaaccaccccactgtcaagatcaccgtgtcgatggatcccctcacccgagaatcacccacgtcaagactgacgcatcccaagccagataagggtggatctcctcacatctccgattattttgccgtccaaacacatgatttcctggttcaccctcctcccctttggcttcctccagatcttgcctttgcccgcatcgatgagtgctgcaacgtaggcgacgggggcatgacatctgaagccgcagagggcgcgcctgtgccgacgatggaagcaaagaagctggcgtcctccatcgcaaggtccaagcaggagatcacagaggacttctcattgattggcgggacatcgcccccacggcggcccaagaagagacaaggtgcaacgacagctcaatactccgcgtccaccggctcccatcgcacgctctccccaccacgctttcgcatctgccgatggaggtcacgcaacttcaccttgacgcctccccaccgcgcggacgccgatggaagggacccaccccgccccgcccctgcgatcctcgtccttccaaggacacccctgcacccgtcttgcccaatctgtctcctggatcgcggggtcccgtgcccaccgcgcaccaccgctgccctccgccccagacagccttcgggaccgcccatgctcgggttcgcgctagccgcctcacccgctcgcgaggtcgatgaagatggatctaaggacgccagtgccgcccctctccgagctccccctatggccgctgcgggcttgtgcccctgggtagccagtcgccccactcttgccgccttcgagctccggcgaccgcagagctggcagggcgcggccgacgccgcaatggacatgggtagccagagtccgctgttggccgccgagggcgagcgcccaggcgcggctacccgatcgagctctatccagatctaa

SEQ ID NO: 33778 - DNA, 492 bp, Zea mays
  Peptide Sequence Number=SeqID_77153
atgcgggagcgggggcgaggtatagaggactttgatctataccacggcctccgctcaacgccagctctccttactactgggcaatccctattaagcgtggtttatttatgcgggaacctgggacctgagtgcattatttatgccatgcttctattccatcgtttactgatgtttgatcctgttaaccaggtctgtcaccaagagcaggagttcaattctgcattttgctgcattttagatggcctgtgtggagaggatcaagcttacttcccatatctaacattgttctccatcaactggaagggaaatccaacaaagtcatttgaactaataattcaaagggaactctcaaggaggatgttttcctgtagaggtgtagatgcttctactggccatgtcgggctttatatggctacattaggcaattgttttgaaatagatgaatgggacccaatagagttctccatcagggcaaaacattttggccagtaa

SEQ ID NO: 33779 - DNA, 1878 bp, Zea mays
  Peptide Sequence Number=SeqID_77154
atgccgcgcacaaagaatgcgtcggcgtcagggggtggcgatgacgaggaccctcgtcgccccttcaggcaggtgaagggcaagactgtctatttggagcagctggaaggccgcaagaagcggcgttcggacagagaggctcgtgcagcagcagcagctgcagcagccgctgcgcaggcagcacttggagatcagccggatgttccatcagatcagattgctttctgtgctcgtcgtctcacctcccggtctcgctcctccactcacacctccgcttccactccgccacccactctgcctgctcccatcactcctattgctccatccacctccaccgccatacccactaccagcactacgccagcttcctctgcttcccctgcccccgctcccgcttcagctcctcctgtccctccacctcgcttccgggagcgtgatgagactgaggtccgtcctctggcttcggatcctcgtctgtttgatcttcagcgcgctactgcagcccgggtacgtcggttcaggtacgtacccgtggagtcttggctgccagctcagagagacccagcagcaggtgttcttttcagcacacggattcaggagtcattcttcagggctcagatgtctgctcagattgcgctgcgagtgcaccgcctattggatcttccagcttttttgctagcagccggtgctgagtttgaggcgcatctcacctatctgcctggcctcctaactcttctgactatcagcggcagatatgttgaggagtgggtccgcgtcttctacgcctccgtttggattgacccggatcatcattggatgaggttccgatttgagcgcgaggatgtcacgatcactgctagtcagatccgacagctatttggatttcctgagtcgtcgactcgccttcacagcctctgctacggcacttcagatcctcctcgtcgccctcacggcggtgttgctccagggacagctcacgtcgcggctctgttccgcccgcctttcacagatgggtcgcgatgttctccagcagactttactacagcagcgaagtacttatttgagctcatcagacggacactcctgccaaggatgggatacagggaggctaccactcatattcagctttggctccttggtgccctggtatcccactctgagtttgatgttgtggactttctgatctgtgagatcgaggacaccgttctggatgggattcgtgctcgtcggcagcttccttatgctcactacttatgccacatctttgcgcagctgattcagccacctcgctttcagagcactcttgaggcctcacgccttgtgtttggatcttaccgccctgctcctgagattccagtgccagcttctgcttctgtgtttgactctcaggccgaggatgcagctctacgtcagtttgacactcagggtacagctgctgctgctgatgatgatgatgatgattttggggttcctcctccgcctccgcctcctatgcctccacgctcacatgatcatgaggctaggagttctagtgctgcccctcctcatcctcaggctttggaccctgcccttgcttcgattcttcagactctcacccagcagcagcagactctcacccagcagcagcagactctcacccagcagcaggctctcctggcagccgagcaggcccgtttatccgacaggatgctctcgatgtttcagagcatgcaggacaggcaggatgctcttcagcagcagctacttcaggatcgggcagagaatagggccttcatgactctcatgcttcagcattctgaatcttcaaaacaaactactctcacaaaacttgtagggttgtcatcaatcaccaaaaagggggagattgaaagcatctag

SEQ ID NO: 33780 - DNA, 693 bp, Zea mays
  Peptide Sequence Number=SeqID_77155
atggctgaaagggactgggaaaggggatactccgaaagggatccttctccacgaaggaagcgggccccgagccctcctactgatcagaggttcgaaggctggcccctcggaagggttcgacagccgcctcaaagcactcaggctccgcgcccactactggtcagatgttcgaaggctggcccctcggaagggttcgacagccgcctcaggccgctcgggctccgcgcccactactggtcagaggaagctccgcctcgcccgaccccggagctcgggctcaacctcgatgctggacgacggactccgcctcgcccgaccccagagctcggactcagcctcgacctcggacgacggactccgcctcgcccgaccccagggctcggactcagcctcgacctcggaagacggactctgcctcgcccgaccccagggctcggactcagcctcgacctcggacgacggtctctgcctcgcccgacccccgggctcggactcagcctcgacctcggaagacggactccgcctcgcccgaccctagggctcggactcagcctcgacctcggacgacggtctccgcctcgcccgacccctgggctcggactcagcctcgacctcagaggagcctccgccttgcccgacctcgggctcggagcgaccacgtcacaaggggtgccatcattaccctactcctag

SEQ ID NO: 33781 - DNA, 519 bp, Zea mays
  Peptide Sequence Number=SeqID_77156
atggggaccctacctggcgggctctttgcttctgggaagagactcggcaaaggtgccaaaggttcacaacaaaccaataaaaagaccaagaaagggttcaaacaaagagagcaaaagactgccgaagtgtgccctggtctggcgcaccggactgcccggtgcaccagggaacccaactccaaactgctcaccttcgagaattctgggagccgctccgctataattcaccggactgtccggtgtagcatcggactgtccggtgcgccagcggagcaacgactacttcgcgccaatggtcgtctgcagagagcagttaacgcgctacagtgcacgcagaagtcagagcagagccagaaggagcactggacactctacagtgactgtctggtgcaccaccggactgtgcggtggcccagctgtcagaagctccaacggtcagaacccaatggccgggtgacgtggctggagacaccaattatgcggtggtccttgtggggacttagtgtcccatttgattga

SEQ ID NO: 33782 - DNA, 600 bp, Zea mays
  Peptide Sequence Number=SeqID_77157
atggcgcctcccgttgacgtggtcggcccgcgccctaggttgggcgatgcgaaggctcctccgaggtcgaggtcgagtccgtcttccgtggccgaggtcgagtccgagcccctaggtcgggcgaggcggaggccgttggctgaggccagggcggagttcgagtcctggggtcgggcgaagcggagttcgtcgtcttctggggctgagcccaagtccgagcccctgggtcgggcggagcggaattcgtcgtcttctggggctgagcccaagtccgagccctgggtcgggcggaacggagtttgccgtcttccggggcttagcccgagtccgagccctgggtcgggcggagcagagttcgccatcttccggggcctagcccgagttcgagccctgggtcgagcggagcggagttcgtcgtcttctggggttgagcccaagtccgagccctgggtcgggcagagcggaattcgtcgtcttctggggctgagcccaagtccgagccctgggtcgggtggaacggagttcgccgtcttccggggcttagcccgagtccgagccctgggtcgggcggagcggagttcgccgtcttctggggcctag

SEQ ID NO: 33783 - DNA, 1374 bp, Zea mays
  Peptide Sequence Number=SeqID_77158
atgggggtggaggagacgcggcccaaccgggccaccgcctcagaaggtgggtcgcagtcgcagcagcttccgcctgggcccctgcatgcaccgtaccggatcgcgcgtcggccaggaagcaatcaacggggaaagcgcaggggcgaaagcctgacacaggcaaacaccacgaaactgagagtgggtcgaccgtggcgcgcggacctggtgctgccgatacacgccggggacatcgagcgcctctgcagtcgtacaagcaggccaaccaagcagctctgcagtcgagacatgaagcgagccgtctccgctctctgggcgcgccgcgccgtccgccaagcctacctctacacccccaccgccgccaccgccacctcgtcgtcgcctgagtttggggcgtccacatcagaggcgtgggacgggcgtttccggctccacaagccgcgcgggcagcacctgctcaccaacccgcgcgtcctcgacgccatcgcgcgccacgccgccatcagtccaggcgacgccgtcctcgaggtcgggcccggcacgggcaacctcaccgcgcgcctcctcgcgtcccaggcggcgcgcgtcaccgccgtcgagatcgacccgcgcatggtcgaggccgtcaccgcgcgcgccgctgctctcggcctcgcgcacaagttcaaggtgattgcgggcgacgccgtggaggtagagttcccggagttcgacgtctgcgtggccaacatcccctacggcatctcctcgccgctgatcgccaagctgctgttcggcccctaccggttccggacggcgacgctgctgctccagaaggagttcgcgcggcggctcgtggccgcgccgggcgacggggagtacaaccggttggcggccaacgtgcgcctggtcgccgacgtcaggctgctcatggacgtgagcaagagggacttcgtgcccatgccccgggtggactcgtccctcgtcgagatccggccgcggggcaccgtgccaggggtcgacgtcagcgagtggctggcgttcacgcgcgtgtgtttcgggcagaagaacaagaccctcgccgccatcttcaagcagaagaggatggtcgttgagctgttgcgccggtcgctgagaacggagagatgtgccggtggtgtcagcctaggtccgcttgaggtcgacgacagtggagaagatgactgtgggggaaacgacgatggcagcaacagagtggttggtttcagcgaggaagaggtcgcggcgttcaaggagaaggttgctggagcgttggacaccgccgagctcgccggcaagaggccatcgaaggtgtccaacgacgagctgaaacgattgctccggctgttcaacgatcgcggggtgcggttccagtag

SEQ ID NO: 33784 - DNA, 1246 bp, Zea mays
  Peptide Sequence Number=SeqID_77159
cctggacacggggcggctcaacccggagacgtaccagctcttcgacagggtggagaagcactacggcatccgcatcgagtacatgttcccggacgccagcgaggtgcaggagctggtgcggaccaagggcctcttctccttctacgaggacggccaccaggagtgctgccgcgtgcgcaaggtgcggcccctgcgcagggcgctcagggggctcagggcgtggatcaccggccagaggaaggaccagtcccccggcaccagggccagcatccctctggtccaggttgacccttccttcgaaggcctggacggcggggctggtagcttggtcaagtggaaccccgtggccaacgtcgacggcaaggacatctggactttcctgcggaccatggacgtccctgtcaacgccctgcatgctcaggtaattttgaagctgcaacacttcttcgattcgttcttagatgtgctagcgattgacggcagcctcttatatcatctgtggccgtgtccgtcttctctcgaccagggctacgtgtccatcgggtgcgagccgtgcaccaggcctgtcctgccggggcagcacgagcgggaaggccggtggtggtgggaggacgccaaggccaaggagtgcggcctccacaagggcaacatcgacaaggacggccaggcggcggcggcggcggcggcccccaggactgccaacggcaacggctcggcgggcgccccggacatcttcgagagccccgccgtcgtgtccctcacccgcgccggggtcgagaacctgctgcgcctggagagccgcgccgagccgtggctcgtggtgctgtacgcgccctggtgcccgttctgccaggccatggaggcctcctacgtggagctggccgagaggctggcggggtccggcggcgtgaaggtggcccggttccgcgccgacggcgagcagaagccgttcgcgcaggccgagctgcagctgcagagcttccccaccgtgctcctgttccccagccgcaccgcccggcccatcaagtacccgtcggagaagagggacgtcgactcgctcctcgccttcgtcaacagcctccgcgccctcggtgaattcccgagagcgaggagttcgtcgctggaacagcctgggcaccggacagtgtccggtgcaccacaggctggaactggggctgcacgaccttacgtcaggttcgacctgatagcttatgtcatgggccacaagcggcgggtctccgcctga

SEQ ID NO: 33785 - DNA, 1389 bp, Zea mays
  Peptide Sequence Number=SeqID_77160
atgaccgcgtcaaaaaagggaccgggaaagggggataccccgaaaaggatccttctccgtgaaggaaacaggccccgagcctccctactgatcagaggttcaaaggctggcccctcggaggggttcaacggccgcctcagagcgcttgggttccgcgcccactactggtcagaggttcgaaggccggcccctcggaagggttcaacggccgcctcaggccactcgggctccgtgcccactactgatcaggggttcgtaggctggccctcgaagggttcacagtcgcctcagacacagagcgagcgggaacgatcttgtaacggaatcccatcagagggaggcattgagccctcggacaccgtcgaaaggggaccgggtctggcagatcacccgcagctcaccggaaacaccatgttcggcgccctccgagggcaacatggcgctttcccccctcctccttgcggaaaggtgacgcaggggcccgaccccggaggatctatgtctcgcccgaagaccccctccagcaacgagcataccctcggctcgcccgagacccagtcttcaccgagaagcaaccttggccaactcgccacgccaaccgaccaaatcgcaggggcatttaatgcaaagggctcggattcgggctcagccccggaagacggcgaactccgctccgcccgacaccagggctcggactcgggctcggccccggaagacgacggactccgcttcgcccgaccccaaggctcgaactcgggctcagccccggaagacggcgaactccgctccgcccgacccctagggctcggattcgggctcagccccggaagacggcgaactccgctccgcccgacactagggctcgaacttgggctcggccccggaagacgacggactccgcttcgcccgaccccagggctcggactcggcctcagccccggaagatggcgaactccactccgcccgaccccagggctcggactcgggctcggccccggaagacggcgaactccgctccgcccgaccccagggctcggacttgggctcagcctcggaagacgacgaactccgctccgcccgaccccagggctcagactcgggctcagccccgaaggacgacgaactccgcttcgtccgaccctagggctccgactcagccctggcatcagccgacggtctccgcctcgtccgacccgggggctcggactcgacctcgaccttggaagacagactcgacctcaacctcggaggagcctccacctcgcccaacctagggcacggaccgaccacgtcaacaggaggcgccatcattaccctgccccaagcctgactcaggctacgggaaacaagaccggcgtcccatctgggctcactccgccagacaagtaa

SEQ ID NO: 33786 - DNA, 405 bp, Zea mays
  Peptide Sequence Number=SeqID_77161
atggcttaccgacggcgagggaggttcgatgaagggtggggttggcttcaggaggtccttgcggtcacaacgaggtacgactcgacgatggtcattctaagggcacagggagctttacgggatgctaaagagtcgacctatgcaaggaatcgaagaataactcaccgtggagctcggtctacgttcgccggtggtcggctgaagtccggtgaccttgatccggtgtctccgccgaggcagagctcgattcctcgctccgggagcttcactgaggcacgtagagtctattccgagggttggacggggttggggatggctctgctggccggtctacgatggtggggattgggcggccgctggcacgccgtgtgcagggcaaaccccggcgatctcttgctccggtga

SEQ ID NO: 33787 - DNA, 360 bp, Zea mays
  Peptide Sequence Number=SeqID_77162
atgaaccgtgtgggtgagctcgacccaggtactgcgctaaccgagagcatccatgggggggagagagtaatgagatctgctgttggctcgatgggagccaagtcggcgataggcccgtggcggggaacgaggttaatcctgggcgtctttcaaggcgatgcatggcatcgacgggtcgagggcgtgctcggcgctactctaatcgctcaccggagcgcggcagtcgctgtgggaacactcctcgccgtttgtagacctactcgctacatgtttattcttatgtttggtgtgatgttaattttgcctataccatttttgtctgtactgctacatttagcagtgaggacacgtgtcatctaa

SEQ ID NO: 33788 - DNA, 483 bp, Zea mays
  Peptide Sequence Number=SeqID_77163
atggcgctttccccctcctccttgcggaaaggcgacgaaggggcgtatgataaaagccgagaaaacagcgccgcctgccccgctccgactgctgtgccacctgccagggtgaggttgacaacaactaagtcccgcctcaggcgcaacaggaggtctctgcctcgcccgacccaggggctcggcccccgcctcggccttagaagacggtctccgcctcgcccgaccctagggctcggcccccacctcggcctcagaaggtggactccacctcgcccgaccccaaggctcggcctcgacctcgacgtcggaaggtggtctccgcctcgcccgaccctagggcccggcctcaacctcgacctcgggcggaatcgcgtcctcgcccgaccccagccttggcctcatgaggagtctccgcctcgcccgaccttgggttcagaccgaccacaccacaggggggatcatcattaccctacccctagctag

SEQ ID NO: 33789 - DNA, 300 bp, Zea mays
  Peptide Sequence Number=SeqID_77164
atgaccgtgcccaacaccccaaatgccatagaaggcaagggaccacgacagcgaccgacagtggccgacagccccctgccatcccatctcggcgatggcggctcgattttgtgtgccagggtctgcgtatatgggatctatgctggctatataggcgaggaatcgatggtggccgggcagctaggagtctttgcgctagaaggccgatttcccagtcggtcgtggaagaccggcggcgaccttccctggtgtgcggctgagacgagcgaggtgcttcaaattagtgatgcacgcacataa

SEQ ID NO: 33790 - DNA, 195 bp, Zea mays
  Peptide Sequence Number=SeqID_77165
atgtcgggcgaggcggagaccttctcccgaggcctgaggtcgggcgaggcagagctccctgttgcgcccgaggctgatctcgggggaggttctctggaggacatggttgctggagtgacttggccgtccatcttgccaccgggttggactgtcgagtgggaccccacctcggctgaggaggagcatgaggagtga

SEQ ID NO: 33791 - DNA, 627 bp, Zea mays
  Peptide Sequence Number=SeqID_77166
atgtactgcgatgcctaccctgacctcagctggagggtgcagccaccagcccgcaccgccatacggaccttcttcacatccgtcgatgcggtgaagaactccgcggagaagagatgggtccacagggatcgggaaaggggatatttcgaaaggatccttttcagcgaaggaaacggaccccaagccctcctactaatcaggggttcgaaggttgcgccctgcgaggttcggcaaccgccccaaagcactcgggctccgagccctttattgatcaggggatcaaaggctggcccctcggaagtgttcaacagtcgccccagagcatgcagagtcagggatgaccctgggtacgtccgttacatggctgaggctcgggctacgctcccaaggtaccctaggacatttcagagactagcggaaacgatttgtaatggaatcccaccggagggaggcaccgagccctcggaccctatcaaatgggtccgggtccagcgaatcacctgtaggaaaacaacactattcactgtggcggaactgcccgaattattccaacttaagtgcctaagccctgccttagaggctagaccacacttaaatgggaataacccgtcaatccctcagatctag

SEQ ID NO: 33792 - DNA, 1959 bp, Zea mays
  Peptide Sequence Number=SeqID_77167
atggataacttgatcaccctcgtcaacaagctgcagagggcttgcacggctctcggagaccacggagaggagagcgccctcccgacgctctgggactcgctgccggctatcgccgtcgttggaggacaggtgcccttcttcccttcccgggcacgttttttcgcgttggttctgattggatctggtgctgtcgccccagcttcgtgggtgtggatctcgcgggttgctggtggaaccgcgaggagctctggtaaatcatctgtgttggagagcgtggttgggaaggatttcctaccgaggggttcaggcattgtaacccggcggccgctggtgctgcagctccacagaattgatggtgacagggaatatgcagagttcatgcatcttccgagaaagagatttacagatttttgttgtattcttgcagctgctgtgagaaaggagatagctgatgaaactgaccgagaaacaggccgttcaaagcaaatatcaactgtccctatccatttaagcatattttctccccatggtaagatgcaaactcttgaagggtacattgttaccgtcgcattatcacatctcaactgtcctcttcctattgtgaatcttactcttattgatcttcctgggcttactaaagtagcagttgatggccaaccggagagtattgtacatgacattgaaaacatggttcgctcatatattgaaaagaagtgcacggttgttgattcaggtgaaaggacctttggtgtgctcacaaaaattgatctgatggataagggtaccgatgctgttgatatactggaaggaagatcttaccgtctccaaacaccatgggttggtgttgttaatcgatcccaacaagacatcaacaagaatgtggacatgattgctgctaggcgtagagagcgagagtattttgcatctacaccagaatataagcacatggcttctaggatgggatctgaatatttaggaaagatgctttcaaagcatttggaacaagtgatcaaatcaaggattccggggatccaatctcttataacaaagacaattgcagagctggaaactgaacttaatcgtcttggaaaacccattgctaatgatgctggggggaagctgtacacgatcatggaaatatgccgtatgtttgatggtatttacaaagagcatctggatggagtgcgccctggcggagagaaagtttaccatgtcttcgacaatcaatttcctgtagctattaaacgattgcagtttgataaacaactctctatggaaaatgtgaggaagcttataacagaggctgatggataccagcctcacttgatagctccagaacaaggatatagacgccttatagaatcttgtcttattagtatcagaggtcctgctgaggcggctgttgacgcggtccatgcaattctcaaggaccttgtccgcaaggctatcaatgaaacacatgaactgaagcagtttcccacccttcgtgtggaagtaggcaatgcagcttttgagtcattggatagaatgagggatgaaagcaagaaaaatacattaaagctagttgacatggaatgcagctacttgacagtagatttcttcaggaagcttcctcaggatgttgagaagggtggaaatccaagccactctatttttgatagatataatgactcttatcttagacgaattggacaaactgttctgtcatatgttaatatggtgtgttcgaccttgaggaactccatcccaaaatctattgtttattgtcaagtgcgagaggccaagcgctcgctgctcgatcacttcttcactgaactgggagcaagagagatgaagcagctttccaaacttcttgacgaagacccagcagtcatggaacgcagaactaaccttgcaaagaggctcgagctgtaccggagtgcccaatccgaaattgatgccgttgcatggtccaaatag

SEQ ID NO: 33793 - DNA, 377 bp, Zea mays
  Peptide Sequence Number=SeqID_77168
ggcttacatgtggcttgtttacgaagaattctatggaggtaccatgtccagacagtgcagctggactatacattcggactcgtgataaccaagttgttaaggttgtgttcgacgaggatcagctagcttaccaaatcggggaaactactgaaatactgtcaagaggttatctatgtgcaaccccacactgtgtgcaggcacccagcagcgaaaatgcttcaaatgttgaccgctctacttttgccttgttcatgcaaccagattggaatgagaagctgaagtttccaagcgaaatcccctatcaccaagagaacagtcgttttctggagttatcagaggttcccgccgcatttcttatgattactgcacagcattag

SEQ ID NO: 33794 - DNA, 1380 bp, Zea mays
  Peptide Sequence Number=SeqID_77169
atgtacagtgctgtagttatcaagtcagtttatgtttgggcaggttataatgtttttgcctttttatctattgtagagacactttctacacgaagcaagctttctattggtgttgtgtgtccatacaatgctcaagttagagcaatacaagaaaaggttgggaaggcctgcaggaggaatgattatttctcagtgaaagtaaaatctgtggatggtttccaaggcgcggaggaagatataattatcatatcaacaatcaggagtaatggagctggctcatgcggtgaaaatgggagaaagccacacacaccatctgctattgttattggtggtgggtttacaggtcttgctgctgctgatgcgctcagaaatgcatccttccaggttattcttctggaatctcgtgatagaattggtggcagagttcacactgactactcttttgggtttccagtcgatttgggagcatcttggcttcatggcgtctgtgaagaaaatcccttggcaccaataattggaaggcttggacttccactgtaccgcacaagtggagacgattctgtgctgtttgatcatgatctggagagctatgcactctatgacactaatggacgtcaagtaccacaggagttggtagaaaagattgggaaggtgtttgagaccatactggaagagactggcaaattgagggaaggaaccaatgaagatatgtctatcgcaaaagccattgcaattgttatggatagaaatccacagttgagacaagaagggattgctcatgaagttcttcagtggtatttgtgccgtatggagggttggtttgccactgacgcagattcaatttcactacagggctgtgatcaggaggtgctgcttccaggtggccatggcctcatggttcgtggatatcgtccagttataaatactcttgcaagaggcttagatatacgtctcaaccataaggttttggaaattgttcgccaccggaacaaggtagaggttacttggtcactgttccctcaccttggaaaaagggcagagcagggaaaaagggcagcagcagctgtggctatgaggacaaaactgactggggaactgagattgggtggatctattgttctgttacagaagacattctcaccggattcaagatgcatgctcgaggctggcgatcaatctgaaatgagtcgggcgatggaagttggtcagcatgcaccagaggttgaggctgctgaagcatcagatgaagatgttgaggcctacatcggcaaagccaccggatgcacacatctttgtagtttacgctgtataaatgaaaccgtagcaaagcacgggcacactactagtcaagttcttaagactcttgaaacaaatagctag

SEQ ID NO: 33795 - DNA, 99 bp, Zea mays
  Peptide Sequence Number=SeqID_77170
atggctcatgtggtcgaggtggaggcttacattgtttttattcttggtatcttcggactcgtatcagaaagggagaagctcaaaagatacgaaggttga

SEQ ID NO: 33796 - DNA, 522 bp, Zea mays
  Peptide Sequence Number=SeqID_77171
atgggagcgctcaccctagcgcctcagttgtcctcggctcccaaaggaaaaattgctgggaagaaggttcaggttgatgaaaggtttactgaaataactaagatagttctaaggctctatcccctgtatttaggggtgttcaacaagtatgaaaataaatcttccaggatcttgatcgagttagatgaccagaaagtagcatggacaatctggaagaaaatccaattggaatctagcgttcttgattcaaaaagtgccatgcgtgtgacagttttatcacactcaccgcatttactctttttcaccagggagaaagaattggctgttgtgaagatcaaccctgtggatgtcgaaattatcgctagtgagcttgagctggacaagaagatcgcggagagagcgctctgtgagcacaagggtgatgtcgtggctgcggtctcatttatagattcttgggtattatcattgagtcctatgagacgagcatttctcaaggcgatgaggaaatctaacaatcattaa

SEQ ID NO: 33797 - DNA, 1137 bp, Zea mays
  Peptide Sequence Number=SeqID_77172
atggagcctggcggggggacagctgtcggagcggttgggtccttgctgacgtcttcttgcttcctcggagtggcgcaggcggcgctgtccttctgtccggccgactatagtaaatgcgttcacggtgcacggttctgcccccctccccacacaccccgtgtcaagggtaagggcgccgatttagtaaagtccaccaaggtttccaagacgggcgccaaatctgaggttgtcgtcgcggttgggaaggcgaagaaaccgccggcggccaattcgaccgcggatgcctgtgccaagccgaccaaatcaggcaagaaggcatcgatgcttgctgacgccaaggcaaaagccaatgcgaccatcatcagcgaggagtcggcggtggaggtggaggttgaggacgtggtgttgaccaagcaggcagaggaaggcaccgacgacctcatctccgagttccgggacctgcccagtcggctgcaggagacgctgataccggacctggcgcgcctctcgcagcactccaaggcgtacctgtccgcggcgaacgccgggatcaccgacggcgtgcgcccggtcctcggcggtctgtgggcgacgatggccacctccgcggcatcagtggcggtgttgctgctgctgccgctcttcatgctcaccgcgctggtgcggtgcatgggcccgtacctgccgctcctccaccacgcgctactgctggtgcaggcgtacctcaccatctacttcgcgatgctcgcgctcaccgtggccgccacggggctggcgccgctgcgcttcgaccacgtggcctccttgctgcctacgcctggacgcaggctgcgcaatcactcggcttcgtggcctacctcgcgctccagatggtggacctcgtcgccatcttctcgggcaccgcctcccccgaggacgatggcaacgggacaccgccaaggccctcgggctcgcgcagatggtggtcgcggcgtgcactactacgccactgtcttccaccgcgccgcggcaggggccgcgccccgcgccaactggcttcacaatcgtgtgcgcctgcgcgcgtgccgagaggatgaaaaaggcctacctctcgggcaccgaccgcgccgccgaggagtggaagaagagctgagctga

SEQ ID NO: 33798 - DNA, 732 bp, Zea mays
  Peptide Sequence Number=SeqID_77173
atgggggagatccgccgtctttccgcctcgtcgttggaggaacgcaactccgtgggagttggtacctttcagccatcgttcggcttcaaggattttcatcagctagcccggctgtaccccccccccccccgccggcagtcacccaagacggcgactactagcccctgggtggggagaagtaagccgggctgcgatcttggtcccaccctcagcttcaaggatgttcatcatcctcgctggggtggaggccgggctgagccggagctctacctcctgcgcgggttcgtgggtcaccctctcccgcggtgttcgagggagagggcgctcgctggccctgcgggcgggcctgacttcgacaacgtggggctggtcaacggcgggcgtcgtcagccccaacgtgtcgagctcgtcggcttggctcccggcggcccctcctgctggaaggcggctgccgcgccggcggcgttcgtgttctggggcggtcctgcctttgcgccggtatggcgcctccgcgcggaggtcggtgccccactcgtccgggaggatctgagtggggatctgccgggagcggctcccgtcgtcggtgccaaggtggaggcggctcgagaagtccccgtcgccgacgggaccaccgccaccatccgcgcttcgggcctccggctctttgtacttgtcctcgcccctcgagcgccgacgtgggcgagggcaagattgcagcagcacccaccctga

SEQ ID NO: 33799 - DNA, 1152 bp, Zea mays
  Peptide Sequence Number=SeqID_77174
atggacgccttccaagggggtcaccctccttttaagggcggttctccctactcgcgtccccagccgtcacgggctgagtcttctccaacacactccaaggtcctcccctacggcgcggggctgggtcccacacgtcatgcaagccgactcagggcagaagaagccaaaccaccgcgcgcggtgcatacaaccgcccagcggttacaagcgaccctccacttttgcccagaccagcgggcgaaagggtgggcggccatgcaggcggcatgcaaccgcgccaagtgggcgcgcttctccgactcccaatatgcccagcctagaggcccaggcccacgcgtcatgcaactggcgcgccaactgcttcgtgcatgcagctgcaccgccacttgcgccaccaccgcgcctcctcgactgcggaaccaataccgcgactcgaggcgacccagcgcacgactcagcagcgccagcctggcgcggcggaggagcgggcgacgcttcgccttcgccataatgaccgcgccagtaaaggctccgagcctccctactgatcagaggttcgaaggctggccccccgaagggttcgacagccgcctcagatcgcgtgggccctacacccactactggtcagagaggctcgggggctgctctcgcaaacccggcttcggccgaaccgttgacagcgtcaacataccagaccgagaacttgggacccgaccgtacacccgggctacggccagctcgcatgagggaacaaccagaccagccgaagtattacgcgaggcattaagacctcggaggagtgaaaccactcctccgaggcctcgggggctacacccggcgggtgcgctcgcgcgcacccaccggaacaaaacgcaaccgagaaaggctggtccccttgcaaaaagtgcgacgaaagcctccaaggcgagtgctaacactcccttcgaggctcgggggctactgtcgaggaccataattaggggtaccctcaaggctcctaattctcagctgagtgaggctgacaggcagtcaggccccgtcggaggcaccataggaagctccgcttcgcccgacccagggctcggactcgggctcagccccggaagacggcgaactccgctccgcccgacccagggctcggactcgggctaa

SEQ ID NO: 33800 - DNA, 573 bp, Zea mays
  Peptide Sequence Number=SeqID_77175
atgaactcagaatctgaccccgtatacagaaggcatattgaacacggcaccatcagcgagctcggcaacggtggagctgtaccgggggtccctgtgccgacgagtgaatgtcgcctcgtgcctcagcctagatgggtcgagcacgagggcgagcgcgaagggggaagagcgaggcggccggagaccggcgtgagagaggtgggaatcccgcggccttcgtgttcgtcccgcgcccaggtcggggggctgagggccgccgtcgtcacagagcatgcggggcgccatcattgcctatctggcggagctagccagatgggacgccggtctggttccctgtggcccgagtcagctcggggtagggtgatgatggcgcctcctgctgacgtggctggcctgcgccctaggttgggcaatgcggaggctcctccgaagccgaggtcgagtctgtcttccgtggccgaggccgagtccgagcccctgggtcgggcgaggcggaggtcgtcggctgaggccagggcggagtccgagccctggggtcgggcgaagcggagttcgtcgtcttctgggacttag

SEQ ID NO: 33801 - DNA, 597 bp, Zea mays
  Peptide Sequence Number=SeqID_77176
atggaccgaaggtccatgacacctggtatcagctccaggttatcctcaccaccaccaaccgcccattcctcaccaccaccagccgccgcgccatctgccaccacaacgccctcccacccgccctctccaactccagatgcattcactaggctcgaagagaagtgggatcaattcgttgtgatgttccaccgctacaaggagaagacagagaaggaactccaagcagcggtgcggcttcaggcggcagcgcgagggttcctggcacgccgccgggtacagtcccttcgtggggagaagcaccttgctgtggcctccagggccaccccatggtcgtcatcacatgagcaggccgtggtgcgcctgcaagccgcagtgcgcggcttccttgttaggcgggcggtgcggaagctgcacttgttggtcagctcatcgctgcaccaactcgcagcctgcgcgcccaaccaccaggtctcgtctatactttttgaaccccctgcagaagtcgagatctggaagctcgaggacgagctggtcctcaagggaggagatgtcatgggcatcatagggagtgagaggcaacaaccaggctgggataag

SEQ ID NO: 33802 - DNA, 504 bp, Zea mays
  Peptide Sequence Number=SeqID_77177
atggaggacgcggatggaggacgcggatggaaggtccgtggccaaatcccgggatccgcaacctcctcctctatcatggacgcggatggaatgtcagagatctccgctcagaaagaagtcccaagtgatcttgaagaactataccttcaacggcaaaatccaaggggagctcttaagttattttttcctgtatttgagcgaggtgtctgtaagaaggaagggataaggcgtttggttgacccggaccggacggcaggacaccgtcgggggttcgctgcaacgcatcgacggcttccgcagcttctcaggccaagctatctgtatggggtctcaaggctattgttgggggccttcgtcctccgaaggtaccttcggactcagaattacgaacataaagtgcggtcaggacgaagcctgaaccagacgaaggacgggctgattaccaagctccacgaaggatggtgcacagccgaagctgtgcgcagggaagcttcgtcgcgatag

SEQ ID NO: 33803 - DNA, 648 bp, Zea mays
  Peptide Sequence Number=SeqID_77178
atggtgctggaggtgggcaccgccgtgggaatacgaaccacctccacttgggctgcaggtccagccgcccggcgcagatcacggggccaggtcgtctccttcgccctcgctcccgcgtcgtcccgccgggtccggcaccgttgccgcgcgatgcaacagcacgaggaggagcaggagcggccgccgaccgtccgcgcggtcaccatccccttcgccgacctcagggtaatcttccccggtgttgagtgttgccgtctcgggagggagggaatgattgcaaaccttcctgaagaggtgaagaaacagcttgaagatccagatagcagatataactttgggtggagtcatgggaaggagaaactcgagtccgggaaacttgacacatttaaaggttccttttatgcgaaccctgttttggatgtccctactactgatgatgtgcttatttcttttcccttttttgtagcatttaaagatcttgggaagctgatgatggaagttggtttgatgttggctcatcattgtgatcgctatgtaatgaggcaaggagtagggtcatatgatggtgacagtcttgagcagacaattgctcgttcaaggtgtcacaagggtcgtctgttgtactatttcccacgacagtttaggtga

SEQ ID NO: 33804 - DNA, 465 bp, Zea mays
  Peptide Sequence Number=SeqID_77179
atgcgtggcagtatgaagggcctctgcccagtaggtggcagggagagacgcttgaaagagaaggcagcagatcatgttggtggtggtgcgaatcatgcgctcggctcggccattctgagcagaggtgtagggacacgagaaacgcaactggacgccgtgagtgaggaagaaagaacgggaggcgttgttgtcgaactcgcggccattgtcgcactgcagggcacggaccgagcgccggaactgggtggatacccaggcgaagaagtgagtgagggtgccggagaggctaaggacaggagacgtccagagatcacagtggacaagatcaaaggcctgaacagccctagacgtggaagtggaaaaaggaagacgggagtgacgaccgagctgacaagcatgacagaggtgctcagaagagcccccgagtataggatatgtctgagtggccggcaagctaggacatga

SEQ ID NO: 33805 - DNA, 330 bp, Zea mays
  Peptide Sequence Number=SeqID_77180
atggcggtattagcaatagcccctccacctgtttatggctacaacgaagagtgggggggaggagattattataacagtgggatgaggcatggttccccgacgctaggcgtggttgaagctctggacgccacgagggccactgcagtcactgccgaggaagcgcgtactgccgtcagggagatggagaagaaggccgccactactgcaaagctagccgccaacactatggacaaggtgggatttgtcgttgttgttgtggccagtgccgtcgccggggaagctaatgccttggatttagtggcacatcgctatttggctgtgaacttatga

SEQ ID NO: 33806 - DNA, 567 bp, Zea mays
  Peptide Sequence Number=SeqID_77181
atgacgaacctgagctgcaccaaggagcgctcctggcaccccaccgccttggtggctagggtcccctcgccggcgctggcgtccaagtcacgccaatcacctcaatcgcgctgggctctcaatcttgctgaacacgaagggcgaggaggggtgggcaccttttcactctccggcaactctctaatcattgacatcctgcttgagcaagttcacttggatagagacaccctctttgtttctattcacatggacataagatggtctgtgcgcaagaccgtggcggacctgcgcctggggattaatcgtgagcagagagacagggacatcacgaattcgtcgccggacttcaactcccacggccggaccgctgcgctgcgacggcaggcttcctcagagtttaatcgctggtatattacccacccccatcctcattgtcctatctgctatgtattgcaccaactagaacaggataagaactacccattcgcgcgaatggtttgctccggcgggacgccgccgtgggcgcggggctgcgccgccgtcgtcagacccgtttggggcagatag

SEQ ID NO: 33807 - DNA, 1248 bp, Zea mays
  Peptide Sequence Number=SeqID_77182
atggcaccccttgaagatcttgctgctagaagtggtagcgacggtggtgctagcggtggcagtgatccactgcgcccgtggcagggaagtcgggggaggtcgtcgacactgtggaccaacctccagcgtggcaagaatgtagggaaggcacaaggaagcttcacggcacctcgatgctatgttggggatgcagaatggcgtgctgtgtggccctccacgaggatggaaggtgagcgttggcggagcgcggctgtgggatgcggggctgcacggacgatgaaaggagggcggctgcgggatgcggggctgtcggcggattgcgagggagggttcagccgcgggcgtgagcggggtagctgcgatatcaactataacccagtaattgcattatcaaatagtagtcgaaagtcggttaaacctcttgtgctgatggatgacctgcggttggtgaaagccttccctcacacttactccaagaggcgtccttgctccaaaagctcctcgctcgcgccacgctcagtctcttcggaggaatctgcaccgtataaactgcaaggtgcttgtaaactggttggtgcgttgttgccatcccctgtgttcaccaaagaagacataaggcccctcaacctgaatgctcccttcacagaagtagacgggttgcagggctcagccttgctcaccagggcctatgatcagtctgacgcaaaaaagttcatgaagtcattgggttttggtgaacatgagaagtttgaccttgaagcacaggatatttacaataagctgttccggaatctacttgcggaatcacatgtatcatctttgtcagcactttttgcctggacagttggtgaaggcgagcagcacccgcacaagggtatcactcccccttggtcctcgcaagaaccaagtgctcactacgagatgattctttgccactccggcgcggtggatgtgacggaacctcccaagtcattaggcccacctacagttgtccttgtccaacggacctcagacaaccctgtaggtgcccctgaatcacttgacaacaagacttacccgactaaggaaaggactctcaagggcatgctggttatcagggagtcaaggttcacgccaactgagagcacagatacaccaccgtccagcctcttgccacggagggcctacatcgacatggtccttaatcgactcagatggagacactacaccgagactctcttctcatgcaagtcactcgcccggtcttag

SEQ ID NO: 33808 - DNA, 1485 bp, Zea mays
  Peptide Sequence Number=SeqID_77183
atggccatgatgggttcaacatcgaaaaagatgtacctctaccaggaccttgtcgatgtaggcctgctgaccgagaaccctttaactggggcacctgcacggttgtctgagatccgttggacaaggacaactataggtgggcctaatgacttgggaggttccgtcacactattggatttgcctgccttcctgctagcagccggtgcagactctgaggttcacctctcctatttgcctggacttctgactcttctgactatcagcagcagatatgttgaggaatgggtccaagttttctatgcttctgtatggatcgaccctgatcaccagtggatgaggttctgctttgagcgagaggatgtcactattcttgccagccagattcgccagctatttggatttcccgagtcatcgactcgtcttcacagcttgtgctatgatttcaccataacgaccaagtttttatatcagctcatgagacggacgcttctaccgcggatgggttacagggaggctgccactcatatccagctctggctccttggtgccctagtctctcactccgagtttgatgttgtggatttcctcatttgtgagatcgaggacaccgtattggatggtctacgtgccaggcaacagctaccgtatgctcactatctttgccacatcttcgctcagctgattcggccaccacagtttcagggcactcttgaggcctctcgcctacactttggttcctaccgtccagcccttgaggaccctgtgtcggcacctgctccagtggttgacactcaggccgaggatatcgcttttcaccagtttgagactcagggcacaacagtccatgatgatgatgatgatgatgatgatgatgatgatgatgatgatgactttggggttccgcctccgcctccccactctcatgatcatgaggctagaagttccagtgctgttcctgttgctcctcctgcggttgatcctgctctggctgctatccttcagactcttacgcagcagcaggcccttatggcgtccgagcaggctcgactggcagctgagcaggctcgactggcagcgcataccggtgttcagatccctccgattctgtctgcaccccctccagctcttcaaacgactgttgtgccaaccattcaggcaggaccccctcttcctacagttggtccttcttcctctctgctctggccggtcaccctagttttcttgtcgccgatcattagctccatcagctctcatccgccattgccaccagctcctgctattaccactgctgctgtggcagtgtctgtgacctctttagccccgacagctcctgtagcgcagcctccgtacgagtcagtgccagctctagcttctacgacagatcctggatccgagattgactctgaccctcagctggcgtttgctcttctgccacgaccacgaccggatgcgccctcgccacctccttcctcttatggtctgtag

SEQ ID NO: 33809 - DNA, 234 bp, Zea mays
  Peptide Sequence Number=SeqID_77184
atggcgatcatagaagagggagtcagcgtcggggacgagaacggaggagcggaagccaggaggcgctgcctgactagagaggagaccctcacgaacacgcggaacacggagggaggcatgggtccaagcagaggaggtggggtcggtctgaggaaggaggcaatgtatgaaggcatacttgttgacttgccgtttgcaacattcttcttgaccaagttgaaacaaaaatgttaa

SEQ ID NO: 33810 - DNA, 276 bp, Zea mays
  Peptide Sequence Number=SeqID_77185
atggcggcgattggtgagctcgggaccatggatagggtacttataccgacgaccaagcctatattggcggcggattcgcgagccgttgaagcagtctgcgagctcatcggtgacgagctgaggatgggccacacggggctggtggttaatatgggccacgaagtggatttggcccaaactcgagaaaagttggatatattgatcttggatatctatagcagatccccaggtacaagatcaatgacatacttctggttatatcatgagcaacattaa

SEQ ID NO: 33811 - DNA, 399 bp, Zea mays
  Peptide Sequence Number=SeqID_77186
atgggggagagagggtctcgggcaggccagagtaactccggtgaggaatcctggccgccagaggggacaatcggctgtgatagggctcgggctagtttcggtagaggtggtggaacaccctgtgccaaagcctggggcactggacgtggtcgagatggccggacaccacgcgagcacggcggaccatcgtggccgagcaccggcgagccaaaattggccgagcacagagcgcaatacggaaaattgggcacgaggacaggtgtctcacctcggggcggagctcgaggaggcttggcgcagtctccggcgagctgggtggtcgggaacacgggcgcaagtctccggcggctgctggcggtgtgggcagagcgcgagagagagtggagctatgcgaaatga

SEQ ID NO: 33812 - DNA, 252 bp, Zea mays
  Peptide Sequence Number=SeqID_77187
atgagcttcacgacggcgagctcgagacggcgcgagcaggggctcgacggcggttacgtgggcgacgagtggcaacggcacaacaatacgctgtcgcgagttgatcaaaggcgtggctctgctcgacagcagcaacaaaaaggagaaatggcgagcagggaaagaggaggggtgcggggttggcgacctcgagcatgttataaatctacccctcttaaaaagaatctcgtcctcgagattaagaaaggctag

SEQ ID NO: 33813 - DNA, 924 bp, Zea mays
  Peptide Sequence Number=SeqID_77188
atgatgctggtagactacacaacggtactcgatggaccaagtgtgtcggttgaaggcccgacacaacagggtatcgagagcatcgtggaaatgacacccgcgagcagcgtcacaagtgatgggcctagcgatccacccctgtggctccggctcctccgagcgctccatgccgtggctcgaactgtcaccgacgtcgtcgtcgtctccgtctccgtcgggggctcctccagcagccgggatgccctgtggtggtgcagggggcatctctggctggggtgcaggggaaggcggcctctcagactccacctcccgctgaggcgagggggaagagtcctgctgctcctgctcctggcatcggcgctcctactcctcatgcgtgatccgggctatctagcggggttcggccatggccctcacggtggcgcaggggtaccagagagcgcagaccacgacaaggttgctcaccttgaggggaagcgctggtgtcgcgaagcaatggcagaggcacagagactcgacggggcgacgacggcggggctccagctgcgcgaagattgctccgctgacagcgaggcggagctcaccgtggcactggacggggcgaggacgcgaaggtggccgcagaacaggcagcggtcgacggtgggtagtggtggagctccctgcacacgtgggcagagcgagagagagggcgagggggtttggcagagggcgcaaatgagcgaggggaggtgggcgagcagggcacgaggctcaaaaggggcacgggtgcacgaccgtggccggagatcgcgcggacgtgggcgcgtccacggcggggagatcgtgggcgagaggttagagacggctgactggtggggacagcaggacagagagcgagcgggcgcgcgcgagggaaacaacgccgatagatcggccccatag

SEQ ID NO: 33814 - DNA, 648 bp, Zea mays
  Peptide Sequence Number=SeqID_77189
atggtgtctccggtgagctgcaagcgggtaatccgagtgggcgtccgtgccccgttcgttgggggtcggctaggggcccagaggcacgcccaaaagtacctgcgggcgataaacgaagatgtggaggacctcgctagccttgatagctcggtgacccaaagggatgcttcggcggaggcaggagccgaagaacaaaccatgctccaaggaggtgtcggtgagggtcctgcgacggtagacgcttcggtgcaggttgagagagtcattggatttagctgcagtggagtctccgttgagggtcgctccccgcgaagcgccagtgacttcgaatggtgcactcccagggcaagaacatggtcttcgtcgataaggtccttggaggttgaatcatctacattgggagtagctgtggagcttgctcatggagatccatgcttcagttcttgcggcatcattgcttcggatccgtacatcaagcggaaaggtgtgaacccggtagctctggattctattgtgttcagcgcccatatgacttcaggaagctggtccgcccatttgcctttcttgtcttcaagtagccttttcttgatggcgctaaaaatcttgccgttggcacgttcaactactccattggattgtgggtggtag

SEQ ID NO: 33815 - DNA, 771 bp, Zea mays
  Peptide Sequence Number=SeqID_77190
atgccccctgcaccaccacagggcatcccgactgttggaggagaccccgatggagacggagacaacgacgacctcggtgacagttcgagccacggcatggagcgcttggaggagccggagccagaggggtggatcgctaggcccatcactcgtgatgctgctcgcgggtgtcatttccacgatgctctcgataccctgttgcgtcgggccttcaaccgacacacttggtccatcgagtatcgttgtgtagtctaccagcatcatcgcgggttatacccggaccagtgggaggctacttgcttggtgcgccttccggacgatgatctccagggtgcagaggccttctcagagcactattatatcactgagagggacactgccgaggcagccatgcaggatgcagcacgacgggcactttctcagtattgctcgttgttcaacggggtagctgacggccttgacctgaagtactaccctcgccgttcgaccgacagtgctggaggtgtgattgtcttgccagttggtgagggcaatcccaggctgagcagcatggtcaacctggccgccgtgttcaacacagagttggaccatgcccttgacgaattgggcaaggttcgggcggaggttgcagaattgcgtgctaaatgtgcggcacgccactatctagatggtggttctcccgcccctgtcgggattcagcacccttaccgttcaccgccccatggtcgcttcaactatggtaccccagactgcaggacccggatagattag

SEQ ID NO: 33816 - DNA, 348 bp, Zea mays
  Peptide Sequence Number=SeqID_77191
atgggcgacccgggcacctccgacgaccctgccacgcaccaccacctcacccaccgtccacccatcacctttcctgcaaaccttggtgacctccttctcaatctcacgacgctgtcctgcaagtctcccccgagccctctcttcaagccctaccacgcccagccaggccacagcggcgccaagatccaggccctgtctccaactcagcaacttattgcagcgcaacttgagctctggattgtctgcatcattgccatcgtggcgcgcgccgagcaggaggacgaggtgcgagccctggccgaccaggcggcccacatagacgtcgccgcgcacgcgaaggtccactag

SEQ ID NO: 33817 - DNA, 528 bp, Zea mays
  Peptide Sequence Number=SeqID_77192
atggcgaacaagatgaactatggcttacctacaaacggtgctccgacaatgctggttgcgccgaaccgcggctccacggcgatgacgcttccaggcaatggtgaccggtcgccgtggttgactcgacacgcgtttcccgccacagttggtgcgttgattgggatcaccgagcaacgaattgctcaccgtcgtcatagacccgcagacttccgccgcgtgctgcggctagccttccccttcgccgatctgggcgagttgtcgggcagtggagcattgcgggttcgcggtgaatccttccgtggtctcggcggggcaaatcaagagtccgtgcgtgaggaattgctcatcggcgtatcaccgacgacggaaaaccgcaccaccacgtgggcagagaagtcaccgccccaattcgagcaccgttgggttcgaagtttttatgcgctagagtgcaaagtaggagctcaccagtcatggtgccgccgcgccgttcttttccgccgccgcgttttcatcgtccgggtggagtag

SEQ ID NO: 33818 - DNA, 417 bp, Zea mays
  Peptide Sequence Number=SeqID_77193
atgaccaagcgaagccatggcgagtgcggcggcgcgggcgtggagcagagaagcacgaaggcaaaggggcgcaaccgattgggagagaatgcgaaagggaaatcccgttcgatgggcaccaaggaccaaggcaacctagtctgtgacacgggggcccgggtccacaggtcatacagtttgtgtgccggatttcagaagacaaaaggttatcttttaaacgaaggcagtggcaacgaggtgccccgcgcgtggcccgacgaaaacaccaggcgtggggccgtgggtctgtcagccgcgaggacagatatggcagttgacgtgactgaaggtggattgacagcgggcgcgtcagcagacgcgctaaaacggcgcgccaattaccgatcaggtcatgttgaggcaaagtacaagctttag

SEQ ID NO: 33819 - DNA, 297 bp, Zea mays
  Peptide Sequence Number=SeqID_77194
atggtgctaggtcacaaggaattctcctggtgtcatgcagaggagcataatacggcacagaaggacatgcatccagccatcacaaaacagaagcatgtgtgccaatctgcggttacgtgcaataaatataaccttctaggccactttgcagcagagtgcacctcaaaacctatttgctggaacttcaaagagcctgagcacattgctagcgagtgcaaggatgaggcactgtgccacacaagcatcaaaataggtcacttgccatgcgattgccctacttcatgggctaacgtttga

SEQ ID NO: 33820 - DNA, 843 bp, Zea mays
  Peptide Sequence Number=SeqID_77195
atgcaccagttggaggtccccagcccaccgttgtggctcgcagcgccaatcccgccgtggcccccagccccttggacaagggcaaaggggctgcaagcggtgcctctgccccagaagcgccagaggactgtaggtgaggccgaggaggctagctcccaggcccacggcgcgcagaggagcgtcagtcctccggtcccaccgccaccaccaccatctaggggtgatcacccccagggacaccatcagcagcaactgcaacagcagccgcaacagcagcaggagcggcgatcgcctcgcttccagggtcactggaaggtccagggccccaaggcttcttcctctaccgctcccaaggtcacgcctcctccaccagataccaggcctattgttgggtctggctctcagcagcaggaatctgctgagagtggtgccgacggtccgcccccagctgctgccaagacaacaccagcgacttctcatgccctagtcgcgggtccggtggcagcggtgccagcgtcaggcggcgtcgcagtggtggaggaggtcccagctaggggatccgcgcccactctggacactggaggtgacacaggaggcacgtccagctccaaccccccgcctactccggaggagatggaggtggtgtttgggcggcgactccggtcgggtgccgagcaagaagctgcgccagtccccctcccctgcatgttgtcccgtgcccaccaggtccttagtgacactgggacagcaatcttgcgggagtgggaggcgcttgaggctgagcaccagtgcctcagcgactggcgcacccaactggaggagcgcaccaagacgacatcctga

SEQ ID NO: 33821 - DNA, 498 bp, Zea mays
  Peptide Sequence Number=SeqID_77196
atggaggctaccaggaaggcccttgaagatctccaagcggagcaccgcgctaaggtccagcgtattgccgcgtgggccggcgaggcaagcacggcactagtgacgctagggatgagcctcgtcccagtgtcggagctgccagcgtcgatctccgatgcgctcccggtgctggactctaccgccgatcgcctccggcgcctagatcagatccttggggcccacctggaggcagagggtggcaagctctaccgggcggtggttgaatacgtcctgacgtgcttccggagtcacgaccccgccatatccttggcgtcgttgatcgctggtccggtagccgcaacagaagacgccacccgggagagtgtacaagacaccgtggagctggtggccgagcgcttccagcacgatcctgctgacgacctagagacaaagcaaggtttccgttgggaagcgactgtactaacttttgactttgtaagatattctaagaaccgctaa

SEQ ID NO: 33822 - DNA, 267 bp, Zea mays
  Peptide Sequence Number=SeqID_77197
atggacgtgggacaaccacgccccgatctaatctacaacactcattaccgaaccaacgccagatttaatgttgcgaagagatcaaacggccaggagccgtcccctactctacacgacgcgaccgacggcagcactgttcctcgcgacaaggatctcaccggcgatcaccgccccgactattccgagcacctcacatctattactctagcgcaaaacaaagaggatgattgtacgaatacggaggtcgggtgttcaccaacgatttag

SEQ ID NO: 33823 - DNA, 183 bp, Zea mays
  Peptide Sequence Number=SeqID_77198
atggctcgcttcgtcgacctcgccctcgcctaccactgtagctggcggaccactccttcggccctcgctgatccggccctgtcgatgagtgtggcttgcttcgccgaccccgctcttgtctaccacgccgccaacaccgagcctctcgtgtaccacccggtcggcttccaccgcgacccctga

SEQ ID NO: 33824 - DNA, 1002 bp, Zea mays
  Peptide Sequence Number=SeqID_77199
atgaccgcgtcaaaaaaaaggctccgagcctccctactgatcagaggttcgaaggctggcccctcggaagggttcgacagccacctcagatcgcgtgggctctacacccactactggtcagagccgacccctagcgaatggggcacggacgtccactcggattacccgccaacagctcaccggagacaccatgttcggcgcccaccgaggaggctcgggggctgctctcgcaaacccggctccggccgaaccgttgacagcgtcaacataccagcccgagtacttgggacccgaccgtacacccgggctacggccagctcgcatgagggaacgaccagactagccgaagcattacgcgaggcattaagacctcggaggagtcaaaccactcctccgaagcctcgggggctacacccggcgggtgcgctcgcgcgcacccaccggaacaaaacgcaaccgagaaaggctggtccccttgcaaaaaagtgcgacgaaagcctccaagcgagtgctaacactcccttcgaggctcgggggctactgttggggaccataattaggggtaccctcaaggctcctaattctcagctggtaacccccatcagcataaagctgcaaaggcctgatggggctcggactcgggctaagccccggaagacggtgaactccgctccgcccaacccagggctcggactcgggctaagccccagaagacggcgaactccgctccgcccgactcagggctcggacttgggctcagcccctgaagacgacgaactccgctttgcccgaccccagggctcggactccgccctggcctcagccgacggtctccgcctcgtccgacccaggggctcggactcgacctcggccacggaagacagactcgacctcggcttcggaggagcctccacatcgcccaacctagggcgcagaccagccacgtcaacaggaggcgccatcatcaccctaccccaagctgactcgggccacggggaataa

SEQ ID NO: 33825 - DNA, 162 bp, Zea mays
  Peptide Sequence Number=SeqID_77200
atggcgccaataactcggagaaacgatcggatgacgctccattacacagcgaggccacaggggcgcggggtcggggtgcacggcgtcgcactggttcctggcggcgcggtcagcatcggatcctgcaggactcgaccgcggtcggcgtcgggcttggcttga

SEQ ID NO: 33826 - DNA, 405 bp, Zea mays
  Peptide Sequence Number=SeqID_77201
agcacagcagggggtttgagggatggagcaggggccgtcgaccactacttgggagaggcagccggctgcgggttggagaaggacatggcggtggtgagctcggccatgggagaaatggcgcccgcgccttggggaagaagggctctgcgcttgggagcttccactgctagcgccctcggaagcgaggctgagcagggagatggcgtgggggagaaagaggagaggtacaatggatcaagcagtctcattagctgcgagaagcagacgattcgaatcgagtttttaaccttgcaaggcctcaccgccttggcatacaatgctccactgaccccggccgccgccgtgcagtggccgcacttgtacccaccatatctagaatgggagacccagtctcaggtcgcgtga

SEQ ID NO: 33827 - DNA, 2022 bp, Zea mays
  Peptide Sequence Number=SeqID_77202
atgcccgtagcggcgctccgtcctcccccggtcgctgtcggcgcgggacgccgcagcgcccgactccaggcgcggttcgccctccgcgcgagctccctcgaggcgtcggcggcagtgacggtgacagtgaacgggtctgcagaggccgcggtggagaggaaggagaaggtgcaggaggataaggacaacgagggactgccggtgaaggaggagcaggagagggggctggaggtcctctacgacgacggcttcggctccgtgaccgtcaaggactacttcgcggcggccaaggtcctgtgccgggacgacggtgggccgccgcgctggttctctcccgtcgagtgcggccacccggccgtggaccaagcgccgctgctgctcttcttgccaggaatggatggcgtcggcacgggactcatcctgcaccacaagtctttgggcaaagtgttcgaggttcggtgcttgcatataccagtcaatgatcgtacaccatttgaaggactagtacaaatcgttgaaaatttgatcaagcacgagcatgatttatccccggacagaccgatatatcttgtcggagattcatttggcggatccctggcactggcagtggcagctcgtaatccgcagattgatttggttctcatactagtaaacccaggcagaagatatgtttcaacaggtgacccactgaagatggctgcagttagcattgaaaacaacctatctcctccagaaactctgcagaaattgtcagacagtctcacatcaatgcttcctttgctttcagaactgtctgatattataccaagggatactcttctatggaagctcaaacttctcaaggcaggagcagcctatgcaaattctcgtctccatgccgtgcaagccgaggttctacttcttgccagtggtaaggacaatcttctaccaagcggagaagaagcggatcgactcttcaaggcactgaaaaactgcagagttcgatacttcaaggacaatggccatacactactgctggaggatggcgtcaacctgttaactgtcataaaaggagcgaacatgtatcggcgtggaaggcaaagggattctgtaaccgattatctcccgcctactctaagtgaattcaggcaaacatttgatgtggatcacaggctgttccaccttgcactgagcccagtcatgatgtccaccctgaaggatgggaaaatcgtccgcgggcttgccggtgtccctgacaaaggcccagtcttgttcgtgggctaccacgcgctcatgggcattgagctgagtcctctgtacgaggagttcctgagggagaagaggacagtcgtccgcggcatggcgcacccgttcctgtttgggaaaaagttcgagtcgtcgcgccaggagacgtcccgtttcgacactgtttctatgtacggtggactgccggtgaccccgatcaatatgtacaggttgttccagaggaaccaatttgttctgctctaccccggcggcgttcgggaagctctgcacaggaagggtgaagagtataagttgttctggccagatcagccagaattcgtaaggatggcggcgcgctttggtgtaactatcataccctttgggtgtgttggagaagacgacgttctcgagttggttctggactacaacgatcagaagaacattcccgggctccgggaatggatacagtcgatcaacaaagaagccgagagagtgagggacagcgtaaaaggagaggatgggaaccaggacatgtacctgccagctcttctcccaaaagtgcctggccgattctactacctgttcgggcagccgattgagatgaaagggatgggcaaccttgtcagagataggaagagcgcgaacgaggtgtatctacgcatcaaatcgcaggtggaggagatcatgtcgtatctcaagaggaagagggaggaagacccttacaggagcctaccgcagcgtgcactgtaccaggcaacatggggcgcctccgctcaggtccccacttttgagccatga

SEQ ID NO: 33828 - DNA, 270 bp, Zea mays
  Peptide Sequence Number=SeqID_77203
atggcgatgatcatgatgacgggagttgtggcgctcgcagagcgctctgttgtccggggtttccctactttagaggcttcgtcccgggagacaggacaaaccattgggaagcccattaggcggcccatgatacgttttagtgtttgtgagaacccagtggatatctatcccccacaaaattctcaccgaaatcgcgacgtgagagttccaagccacaacgtgaagcggctcagctgcaagcccgacatctggcgagcaatccgtgactaa

SEQ ID NO: 33829 - DNA, 612 bp, Zea mays
  Peptide Sequence Number=SeqID_77204
atggaggtggcgacgacagctcgagccacgacaccgacttttctgctgaccaggagccggaaggatgggttgctcgacccatcactcgcgacgctgctcgcgggtgtcacttccacgacgcgctcgacaccctgctacgtcgggcacttaaccgacgtacttggtccatcgagtatcgctgtgtggtctaccaacatagtcgcggggtctacccggaccactgggaggcgaccttctttggtgcgccgcccggagaacagtctccagggtgctgaggatgctgcacggcgtgcgctttcgcactactgctcggtgctcggtggggtagctgacggtctcaacctgaagtattacccccgccgtccatctagcagcacaagaggcgtgattgtctcacctgttggtgaggacaatcctaggttgagcagcacagtcaacctagccgccgtgctaaacacggagctggaccatgcattagacgagctgagtagggctcgtgctgagatcgccctgctgcgggctgagcgcgcggaacgtcgtcacctggatgatggttcccccgctcccgtcgggactcagcacccgtaccgctcacctcggcgtggacgctag

SEQ ID NO: 33830 - DNA, 573 bp, Zea mays
  Peptide Sequence Number=SeqID_77205
atggcgcgctcgcccggccccgtccgctcggcgctccggcgagccgccgtgctcggccgcgctcggcctcgccccgcccctccccgcgtcggccccgcctcggccgctccggccggcccgcccccgtcccgcgcccgccccgcctcgcccccggcgagcctgcccccgtgccgcctcgccccggcgagcccgctctcgcccggcctcgctccggcgagcccgccccgccccgtgcccggctcggccgccccccgccgcgcccgtccccgacgagccctgccccggctcggccgcccgcccccgtgcccggctcggccgcgccgtccccgccccggcgtggtggccggccgtgtcctcgctcgcccgtgctcgcttgccccaaggatctggggtgtagttcgcttcgccgtcgtgccgtcaatggggctcggtgtatgcggctcgctctgccaagagacatttcggtttacaggtggcaatgagactgatggttttggttatgtctatggtgctggcgaagatgaagctgtggaaggagacttccaggagttccaagactacgacgagttctag

SEQ ID NO: 33831 - DNA, 297 bp, Zea mays
  Peptide Sequence Number=SeqID_77206
atggcgcttcctgttgacgtggctggcctgcgccctaggttgggcgacgtggaggctcctccgaagccgaggtcgagtctgtcttccatggccgaggccgagcccgagcctctgggtcgggcgaggcggaggtcgctcggtagaggccagggcggagtccgagccctggggttgggcgaagcggacccgagtccgagccctgggtcgggcggagcggagttcgccgtcttccgggacttagcccgagtccgagccctgggtcgggcggagcggagttcgtcgtcttccgggacctag

SEQ ID NO: 33832 - DNA, 246 bp, Zea mays
  Peptide Sequence Number=SeqID_77207
atgagagttgttcttcttctcatagttctctgtggcgctagcatggtgattggtgatggtatcctcaccccagcaatctcagtcctctcatctatgtctagattacaagttcgagctactggtttaaagcatattggccacacattattctataggcttaatatcagctacctcgttctacaagctatgaccatgtgggggaataacatacgaatggaatttgttagggatgcaaagattctttga

SEQ ID NO: 33833 - DNA, 474 bp, Zea mays
  Peptide Sequence Number=SeqID_77208
atggcgcttggtccttccggcgcggccatcaaccagcaggtcgcccccgcgctcacaccggcccagatcgcggcgtccttggcggatctcagccatgccgtgcgcgatatgcagatcaccatgaaagccatgctgacaggccacctccccttccccaatccacaagccgcccatccaccccagccgccgcactcgatcctgacggcgcaaccaccgtcggccgcactacccctacccacgcagccacctccaccactccctccactcgatcggcaaccaatctcttaccagtacgacatgccgatcgaccctaggccttcatccaccgcaccaccgaccacatcccccatccatatgatccgcttcccaccatccccatcccccatcccatcttgggcgcagggcgcgcctacggtttcaccaccagtgtactccgaggctgaagcgtcccgatcctttgggactcaaatgtga

SEQ ID NO: 33834 - DNA, 351 bp, Zea mays
  Peptide Sequence Number=SeqID_77209
atggatgatgttggtgaagaacgtcaccgcctgctcggacctgatgctgttcagaggtcggacctcgacccacttggagaatttgtcgatggcgaccagcaggtgcgtgtagcccccgggcgccttctgcaaggggccgacgaggtccagactccccacagcaaagggccaggtgatgggtatcgtctacagagcctgagcgggcaggagttcctgaccttcggcgacggagatgcatcgctggaggatgcccgaggggctgcggtggtagagctccttctcatcgcccagcaagacgaacgacttggcgcgtcgcgctacccgccgagcctcggctcggtcgaggggtag

SEQ ID NO: 33835 - DNA, 735 bp, Zea mays
  Peptide Sequence Number=SeqID_77210
atgcagcccggctgcacccctccaccggcggtcacccaagatggtgacctccggcttgatggtgggggaaagcgagccgggctgcggcctctgcccctccctcagcctcaaggattttcatcactagggctggggaggggagtctgcaccgtgcctggctctcggacgcgagtggcttcggagccgctcgcggcgccggcgtttgccacggcagctggaagaggttcttccgccggcgagatagccaaggctggccacggaccgacctccaattctacggccttctgcccgtccttgcctcatgagtttgggcatgggcgggggcctcctggcagcagcatccgccctgaggtcagtgctgccgctgttcggccccccggagcagaagtcgtcgtcgtcgccgctgctggagcgggtgacggcgcgccgttcgtcggtcttctgttgctccgcaggcccacccctatcgagtggggttgttcgtacctgcggagggggaactggagttccgtttgtaatggcactttgaatgccaactcgcctgttgattatctgaaccgcttcaccaagcatgagtcgccccgtgtcaaggtgacgagtgagagtggggatccctggaccgcgtcgctgtccgaggctaggtcggacctcgctgaaggtgtcgtcgatgccgagggtgctactgcccccttccagcatcaagacccgagcctgcaggatcagagtgtcttgtag

SEQ ID NO: 33836 - DNA, 735 bp, Zea mays
  Peptide Sequence Number=SeqID_77211
atgtcattgactcatgtggacccacatcacaggtcatctcatctgatcataatggtgtggatgtatgcatggatatacgagcgtggtggggacacgaagaacccgaacgtcaccggcggtgacacgctcgcggacgaagtgcaggtcgatctccacgtgcttcgtgcgctgatgctacacgggattggtagagaggtagactgcgctgacgttatcgcagtagacgagggtggcgcgctggagtggactgtggagctcgtggaggagctgtcgcagccaggaggtctctgccacgccgttagccacggcgcggtactcggcctcagcactggagcgagagacgacgggctgccgcttggcggcccaggaggtgccaaaaggttcatctacaactatactacatcgaccgtccggaataccatagattattccggacaggaaaagctttttggaaaaacaggccaagcgcggaccgtccgggcccttgcggcggaccgtccgcaccaccaggatgaccctcggacagaactaatgcaaaaatctgagtttgcactatggaccgtccggaggaaaagagcggaccgtctgagacctcgcgcggaccgtccggcctctggcgcggaccgtccgccgttactgctgaccgttgcattttcagccgttgatctacaggcgcggaccgtccggaccaggcgggcggaccgtccgcggtgggcagaatggagcaacggctag

SEQ ID NO: 33837 - DNA, 633 bp, Zea mays
  Peptide Sequence Number=SeqID_77212
atgaaaaattattcacatctttatttgttgcctttattttcggacctatctcggaagacgcaggctcctgcattttttcgtcctgttgcagatgatatgagtcttggaggcgcagtgagccctgggctctatttaactacaggaaaccctgaccaggtgcgcagaccgcaccagaccctttttggcttattgcgaccgacggtggcgctccaccatgaacgagcgacggtggcgctccacagggagctcgcccgcctcgccgccaggtccgtcgcgcgcctgcctgctggggctgggctcgacgggagcggaaccgccgaggaggccgagatggccgccgcgctcatggacgtcgcggccgccagcgccgccgcctccgccgccgtgttctcggccgtcgcgtccgtgtctgccgccgcgtcgtcgtgctcgaacaagaaggccccgacggccttcgtggctgctgccttcgccaagaagccggagacgccgatgacggccgatgtcgcgcaggagaagcacgaggagcttgagcgatgcatcgacgagtgcgagagcggcagcgaggtggtgttcaggagcattgttcggaatagggtttcgttgctcaacatccatagtccggcgatctag

SEQ ID NO: 33838 - DNA, 2184 bp, Zea mays
  Peptide Sequence Number=SeqID_77213
atgaagtcagttgatcgtcctcccgctaatcccaaacacataacaattgagtcaagccaagaattctttagtgttgagataccacggccgacctctattggagttccgacaaacacaaagcattctgatccgtgtcctgcacctgtcgagaaaccatctgttatttatgaagccaatgaacaaactggatctggcaatgacgacgatgacttcatgacacctacaaagaagcgtaatgctgctggaagtcatatgaatatcttacggaagacatgcacaaagaggccgaaagtagtagaaactccacggcagaaactcaatgttagatgcaaccctcaggatgtgattataactattaagatattgaatgagaggcaacgacaagctgttgctagaaaaggattttccaatattcttgacatgacacttgatgcactgggtagccgttctcatcttcgttggttgatggataagttggaccacaaggatatgactattcgccctggagttggcaaggaactaaagattacgaaagaaactgtccaccttatactaggcctcccgaatgctggcggtggtaagccactaggaatcgatgaagcagtggcgggcaataacttgagggctgaacttggattgtccaaggatgagtttgttgttgcatctcttcaggaccgattgagaaaaggaaatgatgatgacctctctatcagatgcttctttttgatattgttcaatagattgttgttccccacttccagctggggcatatctaaccatgaagtgttattgacggaagaaatggaccgtttccacgaaatagactggtgccacttaatttttaacgacctatgtgaagctgcacaaaagtggcatacaagaagcacttctaatgtgtccacgacgatatatggatgctcagttgtcatactacccccccccaataaacgtggcacaccccgcataaaattctttgataaaaacattatccaagctctgacaaaagctgataagaggaagccacgccaaagcggtgaaccttttggccattgtgagttccgaagcttttttgaaacttgctattctgctgtccctagtgtgcagtttcaatcagagcatagggacaggacaaacatttttgatgtccctcgtcccgatccttgtggtcatcatactattcatatccagctccctttgatcaaggatatgctttcaagtaagataaagcagctccaaccacgtgaccgaccaaaattcattgaaaagtttgttgagtatgattctgaagttggcaaagcgtgttccatcataaaaagtactcttaccaagatggttgtgaagcagtatgaactagcggacacatttgctgagttaattgatgatgtccttcgcgcggagtctagcgacccagacaatgttgcggaagcgcctcaaacagataaacctccagatatatctcagcatatgtcgtcagaggaacagatccatgagggtacccagaatacccaggacatgactatgccttcacaaccgaatacggagttgacaggtacccagtttgaagaaatacacgaaaagcaacaacaaatgcgtcgtgcatttgagggctgccctgacgatttggagacgaacataaccccaaatgccgaaaaccagggaggagacattggtccatctcatgacactccaactttcacgggccccctttttgatcagacacctagtggtcatgttgcagatggtgaggaaacacatagcttgcacactacacatgaccactctctgccacgtttaacagaattggactgtgctcggtcgcttcgtgcttttttgtgctcctcaaaaactgacccaaacagtgtttcatcatgggttttcgccatgacaaaaacaataattgctcgtccatcaacaaagacagacttgtactggatgtcaatgttggtaattctcctcaactttgaggagcatgaacggtacagtaagtctcctcagacttttgatcaaactgtccttgatgcttatctggacaagaccctgccccaactggacaattttggtgactacaaaacggaaaactctggtgacctacgatctctggctctacattacctcaccttccatagcaagaacaagtgcctcccgttgcctccagaaattcaaagattcaagtttggacgctag

SEQ ID NO: 33839 - DNA, 138 bp, Zea mays
  Peptide Sequence Number=SeqID_77214
atggcgaacgatgatcacgtggaggatactaaatattgggcccatattacttttggccctcggccgtcgtctctgttgcatgggctcagggccaaccctgctcttatggtaggcaccgttcgagtggtgttaatctaa

SEQ ID NO: 33840 - DNA, 462 bp, Zea mays
  Peptide Sequence Number=SeqID_77215
atggtcgatgacatggtggagagcatcgtggaagcccaggtggcatcggcaacgagcgaacgagtggtggagaacccagggggcggctgcttgggaggcgggttgaagatagaagaccgattagataatctgttaaacaactatgaagtagtgaagaattttgctaaagacttgccctacacaaaatctactcgaatagataatatgaaccaaccaacgaatttaaagcgcttaacaagaacacacaagaacacgcaatataacccgaggttcggcaaccaccacaaaggtgtcctactcctcgttgaggagcccacaaagggccgggtcttttccaaccctaatcctccacaagccgaccacaaaggtcaaggcaatctcttctcaaatatgctcaaagagcgggtgatacaaacttcttggggtcgtccacaaatttggagactcccaagcaacctctaa

SEQ ID NO: 33841 - DNA, 3066 bp, Zea mays
  Peptide Sequence Number=SeqID_77216
atggcggcgcgcatcggcgagtggaagccggtgatggcgatgctcatcttcgacctcatctccgccgtgacgacggccctgatcaagaaggcgctgcaggaggggctggaccgcctggtgcttatcacgctgcggcagctcgtggccaccgtcttcctcgcgccgatcgcctacttcagagagcggagcacgaggcctaagctgacactggagatcctagtctacctcttcttcagcgcagcgtttggcgccgctctctcccagtacaccttcttctacgggctgcagtacaccaccgcgacgttcgccataactttcaccaacgtggctcctgtgctcactttcctcattgcagtcttgctaagggtggagtcactgagcatgaagaacaaggcaggagcagcgaagatcgccgggacgctgacgtcgttcgccggcgtcatgctcctcaccctctacaagggcgtctcactgacgcaccaccaagctggagaagcgagcccggaggatcacagcctcggagcagcagcagcatcgccgtctgacaggaagagctggacgctgggcaccctggcattgctcgccaactgcctgtgcttctccttctggctcctgctgcagtccaggctgaccaagaagtacccggcgctctactccagcacggcctacatgttcctcatcagctcgatgcagggaggggccctcacggcggccattcagaggcgagcgtcggtgtggcttctcacaaggccgatagagatcgtcacggtcttatatacaggaatcatggggtccggagtgggctacgtgctgatgacgtggtgcgtggagaagcgagggccggtgttcacgtcagccttcatccctgtcatccagatcatggtcgccatggtcgacttcttctttctccatgagaatctctatctcgggagtgttctgggatccatactcttgatcctgggcctctatattctgctgtggggaaagaagagggatgcctcatcatcagcggctgccaaggaagaggaagatggagagaaagaagatgaggaggaggaggacaaagagaagcaactgctggctgttgctgcttgcattgagatgtggatgatcagcgcagggcgcatggagcagtgggcgccgacggcggcaatggtggccaccaacgtcgtgatcgccgtcatgacggcgctgatcaagcaggcactgagcctgggcatgaacaggctggtcctcatcactttccgccagatggtggccacactgttccttggacccatcgcctacttcaaggaaaggaggatgagaccgaagttcacttccgagatcttcgtgtacatgtttctcagtggaattcttgggccggtgctgcttcagtacacactgtttgtcggattggattacacgacggcaacattcgctgcaacgttcggaaatatgcttccagtggttactttcctgatatcacttgctttcaggctggctcacacactcctcacagtacccagcttcaccaggttcgaagcactggaggtgaagagcaagtcggggagcgccaagatctcagggacgctcatctccctcggcggcgcaatgatgctcaccttctacaagggttcagcactgacacaaaccaccaccgccgccacgtcgtctccagcatccagcggcggcggccacatcaggcaacaagccggagagcacggcacggtccggtgggtgctgggctccgtctccatgctggccaacgtcgtcggcttcgcgctgtggctgctcctgcagcggaagttcacccgcaagtacccggccgtgtactcggccacggcgttcatgtcgctattcagcttcgtccaggccggggcgctggccctgtcgatccagaggaccagccttgccgtgtgggccctcagggggaccgtggagatcgccacggtgggtgtagtggcgtctggcattgggtacctgctgctcacctactgcgtggagaagagaggccccgtgttcactgccgccttcagcccgctcgcccagatcttcgtcgccggcatcgatctcttcatcctccacgagcctctctacctcggaagcgtgctggggtcagtgctggttattctcgggctctaccttgtactgtggggcaagagagaggaagctgctgctgctgctgcttcggcaaagccagtgcaggccgagcttcggctttgcgtttgcctttggcctggccgccgccgccccctccgcctctgtctcctctctcctctctcctctctcctctccgtcgtcctgacaccgcaccacggcgcccatggcgaagcgcccgcgccacgccggaaacggccccggacgatctcagctggtgcctttcgagtggaagctccaccgcctcatactcaacggcggcttggccggtcccggcgcctccgccgaagacgtcgccgacgccctccgcgtccaccacccggagttccgccgcccagaaagcaaggccccttcgtcgcctccgtccgccgcgctctcacctccatccccatcccctccccatcctcctctgactcctccgacgacggctcctccgcctcccgccgccgcggccaccacgacgcccacgccaccacctcctcctccacctccgtctctgacgccgctgcccgaccgtcgccaccagcccccgcctacgacgtcaccaagtccatgctccgctcccagtacgccgcgcagacgcccaagcggagccagcagctggagatcgaggtcgcggcggagaaaccgcgccgcctcatcacggccgacggcggcggcggaggcgatgccaagccggaggccgccccggcttctgaagggttcggcagaggggacaaggggcccaggttcgccgacctcggcgggatggaggcggtgatcgaggaactcatgatggaggtggtcgtgcccatgtgccatccggagataccgcatcgccttggcgttaggcctgtcgcggggctgctgctgcacgggccgcccggctgcggaaagaccacccttgcccatgccattgctaatgagactggcgtgcccgttctataa

SEQ ID NO: 33842 - DNA, 1191 bp, Zea mays
  Peptide Sequence Number=SeqID_77217
atggctgccccgcaaaccactcgtcccgtcgcattaactctgcggcgggacaggcggcacctttggcaggagaagcgggctacgcttcgccttcgccataatgatcgcgtcaaaaaagggaccgggaaagggggataccccgaaagggatccttctccgcgaaggaaacgggccccgagcccccctactgatcagaggttcgaaggctggcccctcggaggggttcaacagccgcctcagagcgctcgggctccgcgcccactactggctggccctcgaagggttcacagccgcctcagacgcagagcgagggatgaccctgggtacgttcgatacataaccaaggctcgggctacgctccggagctcactggagacaccatgttcggcgccctccgagggcaacatggcgctttttcccccctcctccttgcggaaaggcgacgcaggggccaacggacacaccttcggctcgcccgaggcccagtcttcgccaagaagcaaccttggccaagtcaccacgccgactgaccgtatcgcaggagcatttaatacaaagggctcggactcgggctcagccccagaagacgacgaactccgcttcgcccgaccccagggctcggactcgggctcagccctggaagacgacgaactccgcttcgcccgatcccagggctcagactcgggctcagccccagaagacgacgaactccacttcgcccgaccccagggctcggactcgggctcagccccggaagacgacgaactccgcttcacccgaccccagggctcggactcgggctcagccccggaagacgacgaactccgcttcgcccgaccccagggctcggactcgggctcagccccggaagacgacgaactccgcatcgcccgaccccagggctcggactcgggctcagccacggaagacgacgaactccgcttcgcccgaccccagggctcggactcagccctggcctcagccgacggtctccacctcgcccgacccaggggctcggactcgacctcggcctcggaatacagactcgacctcgacctcggaggagcctccacctctcccaacccagggctcggaccgaccacgtcacaggaggcaccatcattaccctaccccaagctaactcaggctacagggaacaagaccggtgtcccatctggctcgccccagtaa

SEQ ID NO: 33843 - DNA, 645 bp, Zea mays
  Peptide Sequence Number=SeqID_77218
ctcggcgccaagatctgtggcgccgagctagttgccacgcgggactgccacgtcacgaagctcggctccataggctatggcgccgagctgtgttacctcggcgccatagcctgtggcgccgagcttcggatccaaacttttgccagacaattttggcatgctattcttgttcccttgtgtcttggggatctcattcctgctgttgatgaaatctcatttgctgattggtggaggaaggcgcttaagaagccgggtggggtgacgcagaggatctcgtcctcgtcaggccaacagccagccagccagcgcacgacgcagcttgcttgcttgctttataaaagcggccactgtgctcaggcgcaggtcaaagctgccctcgccacgcgcagctgcggcggcgtcgtccgcctcgccgcgctgctcctcctggccctggccttggccttgctctcgccctgcctctcccgcgccgacgccgtggccgctccttcggctcctctcgcgtctgctgccgccgccgcctcggactcggagcatggtgtggcgaccgcacgggagaatgctctagcacagggtggcgatgtggagtggatccaggactacggcggccccagcgccaatacccggcacgtcccgcacccgtga

SEQ ID NO: 33844 - DNA, 291 bp, Zea mays
  Peptide Sequence Number=SeqID_77219
atggccaatcccatacacctctaccgaggacgcgaggcaggtgcaggaatccctcgcctgaccaccatcgcagcaaaatcaacccaaggacctccctacactgaccactcccctactgcccttgcccctttcgggggccccggtgctaaaaatactgagacacatgggacagtcgccgaggacggcgggttggtttcaaagtttggcaaggtctctttagcaaaaaatccctggccgaaggggtatgtttcgaccagggccgcacgatcctacacctacggctcggattag

SEQ ID NO: 33845 - DNA, 1143 bp, Zea mays
  Peptide Sequence Number=SeqID_77220
atggaggagttggcggggagcaggaggcagcaggagcacctccacctgcagcaccaccaaccctttgctgccgctgctgagccagcagcacccgggatgatcaaagatgtcaagccactggccaagacgctgagaaggctggcccagaacagggaggctgcaaggaaaagcaggctaaggaagaaggcttacatccagcaactcgagtccagcaggatcagactagctcagctcgaacaagaactgcacactgcaagagctcagggagttttcttccccaacagtggcatcctcgctgaccaaggtgtcgccggcaaaggcgtccccatcggcggcatcgacggcctcagctcagaggcggcgatgttcgacgtggagtacgggcggtggcaggaggagcactaccggctgatgtacgagcttcgggcggcgctgcagcagcacctgccggagggggagctgcagatgtacgtggagagctgcctggctcaccacgacgagatggtgggcatcaaagagggcgccatcaagggcgacgtcttccacctcatctccggcgtctggcggagccccgccgagcgctgcttcctctggctcggcggcttccgcccctccgaagtcatcaagcggttgaaagtagcagcaatgatgggcgttcgttcccgcagcgccgtgggtgacggcagccgaaatgttccttcgatgctgctgagccacgtagagcccctgaccgaacagcagatcgtgggcgtgtacgggctgcagcagtcggcgctggagacggaggaagcgctgagccagggcctggaggcgctctaccagtcgctgtctgacaccgtggtctccgacgcgctcagctgcccctcgaacgtctccaactacatgggtcagatggccgtcgccatgaacaagctctccacgctcgagggcttcgtcagacaacttcattctgacgaacatcatggacgcatgcatgacgcacaggctgagaaccttcggcagcagacgctgcaccggctgcaccaggtcctgacgacgcggcagatggcgcggtcgctgctggccgtgtcggactacttccaccgcctccgcacgctgagctcgctctgggtcacacgccccagggcaccgcaggagcaataa

SEQ ID NO: 33846 - DNA, 654 bp, Zea mays
  Peptide Sequence Number=SeqID_77221
atggtgcggcccattctacagcccatcctacggcgcctgccttctacaccccaggctacggcgcctgccgcctccactccagcaacggcgcgagtaggatgcccacgacctcgacctcctcctcacgaccacgaccacggcctcaaccgctccgccagctccgccatttacgcacacgacttcaacctcgtcaggctcaggctccgcgacggccgccacctcgcctactgcgagagcggcgtgccccgggaccaagccaggttcgccgtcgtcttctcccacggattcaccggctcccgagaggacagcgtcagcgcctcccaggtaccgaccgatccaagcaccaccaccaccttgtctacctccccttccctcccccatctgctgccggacccgtacgccggccttcgcttcactcgcccgccaggttcatggacgtacgggcgagatctgaagcgcgtctctgccggtgtccttggaacgaagacgacctggcaaagagtccccttttctttggtagcatcgcagccgccaccacgctcggatgaggtcgcctcgtccctcgcgctgcgcgctagcccgcaactcggaggacgagcggaggcggcgcaagatcggctcgctgcggcggaaggccatctgaaagtcgcctag

SEQ ID NO: 33847 - DNA, 153 bp, Zea mays
  Peptide Sequence Number=SeqID_77222
atggcagctaagcaaattgaaggatcattcaagacacagcgggagagagagagacattcttacgactgggtagaagtgtcaacagtcgtccaaggatacggggacgacatgctagacatccctgggcctgaaggtattgagacacttggatag

SEQ ID NO: 33848 - DNA, 461 bp, Zea mays
  Peptide Sequence Number=SeqID_77223
atgggacagaggacacttgccttcaccaaactgctgatcagggacttcctctgcaacttcctcgggaaacacagactgctcgttgtctacgcagggccgggcgggcagcgcgagcacgcggctgacgggcgggacccaaacggcagcgcgggcacgggcgggctgacaggcgggaccggcgggcagcgcgagcgcgcgggcggggctgacaggcgggacccaactggcagggaggcgggggacaccggaggggggcggttcacggcggagcggctcggcggcggcataaaacaactccggcgaggaattaagcgcagtagaaggcaatacgcgggtttggagggggcaggagaggttctttacctcaaggcgggctccggggactcctcggtggcggcaatggcgcgacggtggcccggggcgacggtggcggacctccgtggctgcacggggaacagcgg

SEQ ID NO: 33849 - DNA, 342 bp, Zea mays
  Peptide Sequence Number=SeqID_77224
atggcaaatggcagctggctgctgggggtcgcggcccccccgcacgggctgctccagctaaccagcccaaaaggaaaacgccgaaagcgacctctcctccgcggtcacagcccacgcactgttcctgtccggccggctggcgcggccacacagccaatccgcgggcctgccctcctggctggatccctatcgcgctgtagcactagtgcaccacccccaccaacagaagaatctcgcgcgacggcacagggccaggcggctcaagagcgctgcgccggtcgagtcgagtcgagtcgacgggaaacaatgcgagagaagaagagcactgagaaatttgaatag

SEQ ID NO: 33850 - DNA, 285 bp, Zea mays
  Peptide Sequence Number=SeqID_77225
atggacgagtctgaaaaaggagatcgggtaagagttatgactgttcccaaccttgcctgtggctgttggaccgctgaattgcttcactacgtatatcgggctgcttcagtgttggggacgaaggcgaagacgccacccttcgctcgaggccttcgtcgtggtcgttggtccaacggagacaagacaacgggcgaggacacccttcgctccatacgtcatcgggtgaagactacaacgaggtcattccaccgtgcggcctcgtccagcatggaggcccacgggtga

SEQ ID NO: 33851 - DNA, 2217 bp, Zea mays
  Peptide Sequence Number=SeqID_77226
atgagttcggcagacaagacgcatggttcgcacggcgcgtggtctgtcatcgacgaggcgttcatgaaggctccgccgtcggacgacccggcttgctccgtgcaggtggacgctgtcgcataccgcgagaccatccagacctgggtggaagacctgcgcgccaagaacggggcgcgcccgctctcagcggccatgtaccgccgccggcgcgccctcaaccactgcagcgtagctctcgagttcgcccagcggcgcagggtggcggtgggcctggaggacgacgagctgtgccggtccgtgcaggccgcgatggacacccaggtggtcggttcgtgcgcctactgcggctgcaatttctccgtcgtggccgtggtcgccgtggggggcctgggcatggcctgcggcgtctgtttccggctggttcgagtgtacaacccggtgccgctgggcatccagaacctcactgagaacgatgtcagtgacgaggagattgagcccgaggacctggcgcggcgaatgtggaaggacagagtcaggctgaggaggatcaaggagcggcagcacaagcttgccctgcagcaggcagagctgcagaagttgaggcccaagcccatatccgaccaggccatgcgcaagaagatgtcaagggcacacgacgggatcctcaagtatatgctcaagctcatgcaggtgtgcaatgcacgcgggttcgtttatgggatcatcccggacaaggggaagcctgtcagtggcgcttccgataatatcagagcttggtggaaggagaaggtgaagtttgataagaacgggcctgcggcgattgagaaatacgagtctgacaacttagtatccgctactgcccagagtggtggaactaagagccagcacagcttgatggatctccaagatgccactcttggttcactgctttcctcattgatgcagcattgtgatccaccgcagcgcaagtacccattggagaagggtgcttcacccccgtggtggccttcagggaaggaggaatggtggaccgccctgggtcttccaagcggccaagttcctccttacaagaaaccacatgatcttaagaaggtctggaaggctggtgtgcttacaggtgtaatcaagcacatgtctcccaattttgataagataaggaatcatgtacggaaatcaaagtgtttgcaggataaaatgactgcaaaagaaagcctgatttggctgggagttctacagagagaagaaagccttgttcacagaatcgacaatggcgtatcggagattactcagcgcagtatgccagaggagaggattgcagacacaaatagcagcagtaatgagtatgatgtgtatggttttgaggatgctcctgtttctacatcatctaaagatgatgaacaagatctgtctccagttgcacaatctgctgtggagcatgttccgaaaagaggaagggaaagagcttacaataaacgccctaatcaaatcgttcctggtaaggcaaaagaaccaccaaagagaaaaagaacacgccacagctccactgttaccgagccagatgcacacagagttgttgatgcaccagaaaactcaagaaatttgatccctgatatgaatagattggatcaagtagaaatcccaggcacgtcaaaccagattgtcacctttgaccatgggggcaccacaactgaagctttacaacacagaggagatgctcaagtacaggtccatcctcctggtgctgaggttaatagcttctatagtgctccaactgcaaaccctactcctataagcatatatatgggtgaccagcctataccttatcaaaataatgacagcacaaggccgagatctgaaaatagttttcctgtagatgctcatactggtttaaataatcttcccagcagttatcagaacttacctccgaaacaatcactaccacttcccatgatggatcatcatgtggttcccatgggtatcagggcacctactgatagcattccttacggtgatcatatactaggtggtggaaattcaacttctgttcctggagatatgcagcaactcatagattttcctttctatgctgaacaagataagtttgttggcagttcctttgaggggttgcctttagactatatcagtatcagtagtccaatcccagatattgatgacttgctgcatgatgatgatttaatggaatacttgggaacataa

SEQ ID NO: 33852 - DNA, 666 bp, Zea mays
  Peptide Sequence Number=SeqID_77227
atggatgagagggccgaggaacgtaggaatctgataccaattgttagcagtggggaagggaatccagaggatagcaggaggaagagagaaaaaatcgagttggagaagagatggctcgagcagccaaagtctgctcagtctgggtgcaccggactgtccggtggtgcaccggacagtgtccgatgtgccaggctggctctggcgaaaaggctgctctcaggacttcgacggcggtgtacgactataaatcaccggactgtccggtggttcaccggactgtccggtgtgccgttcacaggcgaactcgtcgctctcgggaaaccatcaacgacgtacgactataattcaccggactgtccggtgtgcaccggactgtccggtgagccaacggtcgacagggccaacagtcggccgcgcgatctgcgcgggacacgtggccgagccaacggctggaagggggcaccggtctgtccggtgggcaccggacatgtccggtgcgccaacggctctcaggctgccaacggtcgactgcgccatttaaggaaggaaatcgggcaccggacagtgtccggtgtgcaccggactgtccagtgcgccagtcgacagaaggcaagatcagccttcctagattgctctcaacggctcctagctgccttggggctataa

SEQ ID NO: 33853 - DNA, 565 bp, Zea mays
  Peptide Sequence Number=SeqID_77228
atggggaggaggggagtatgggggagggagagaaacgacggcagtaaactccattgctcgcgacaagaaacggacggggctcgacacggcggtgtcgcggctgttcgacttcgggtgcgcgcggcactgggcgccggtcggtcgtcgggctggggcgttgctgggcgcggctctggcggctcggcggctgtggtcggggtgtcgggatcgcttcaggcggcgctcggctccatgggcgcgggcgtcgtggcaggggcactgcagggcggtcggctgcgcgggtgcgtgaggcaggctgggcgcggctcggagtcgagtcgggtccgcggcacctgggcacgacgcgaggtgcagggcatggacagggcgcggggtgccgaggccgggtcctggtgcgtgcaggtgggcgcggtcgggcggcttcaggcgcgcggcttggagaagaagcagggaggaggaaatggcctggtggggcccgcgcgcaagaggaggatggggttttcccctggcggcggcaacagggagcaggggcgcgcgcggcttgctccagggaggcagcggctag

SEQ ID NO: 33854 - DNA, 924 bp, Zea mays
  Peptide Sequence Number=SeqID_77229
atgccccgctcccgcgatacccgcgcgtgccctcgcctccgccgccgcgatgctcgtgcctctgcccccgcctcctccgccctcgcgacgctgcgccctccgtccgccacgagatccctgcccttcccccaaaccctgtcctgcacctcgtgcccccgcctccgctcgcgatgctcctgctcgccccaccgccgtgacagtcgccttcgcatccgccgccagatctctgcccttcccccaaaccctgcctcgtacccctccacgagcttcgtcgcgtcatccctgccctgccccccggaacctcgttcccccagccctcccctcgtccccgcgcgctacaaccgccggatccggggtttgctcgggtctccttgcctcgccggggtcccaccgcgacgatcgaggagcatggtgggcgaggggaggcgggaacgagcggcggaggaggtgaagctcgacatccgcaacgtgctcatggcgctcgaatccctcaagaaggagtccctcaagaagaagaagggcgacaaggatagagcagtcgggccgtcctctaggaagaagcacgcagaggccgcgcagcagcaagcgccaccacagaaggaggtattctgggctcccgcgtcgctcaccaccaagtcctgtgcagatgtcgagtacgacgacgatgactcgatgcgtcccgccgccgagcccaccaaggaggaggaggacatcgagggagctgtgtgcagcgccccctgtcgccgcgctgtcaagaatactaccccctccccctcgcgcaacatggtggatgcacgggccagtaccggtgctgaggatcccatggtcgtggacgtcgtcgtgacgcaactgatgccggaggaggaggcgctccagctctgcaccggctgcgtccatgaaagttgcctagaggggggggggtga

SEQ ID NO: 33855 - DNA, 255 bp, Zea mays
  Peptide Sequence Number=SeqID_77230
atgtccctgcccccgcttgcgatgctcccgctcgtgtccgccgccgaggttgcccccccccccaactccctccctcatggattcacggcacgagaccccaccgtcgtcgcacgcgtagcccaggactcctccgttgtcgaggagaagccacccatcagattctccgtcaacgcccctcacattgatgtttggatgcttaagaaattaactaacatgaagaaagggcagcatgcatacatagacgatagacgatag

SEQ ID NO: 33856 - DNA, 345 bp, Zea mays
  Peptide Sequence Number=SeqID_77231
atgccgcaacgatgcctgccttggaagaatttggggatgagtagaccacgtcgcaatgttccagatagcgaacgaatgagggcaaaagagaggaaaaataggttttgcaagattgtaaatacagtgaacatcatcgatgccaaaatcagagatcggatgttaaggggaactgctgtcggggcccgggttctcggattgacggtcgtgcacggggctgcggtccgccttcgacctgcccatcgtggtggcgtagctacagatcaaagcaaagcaggggcgagcaaagcagggccgcccagatcgagacgccgtcgaggccgagcagagctccgcacctccacctag

SEQ ID NO: 33857 - DNA, 465 bp, Zea mays
  Peptide Sequence Number=SeqID_77232
atgcccctgcacgcccgcgacgcccaggacggccgagccaccgaccccgagccgaccatcccagaacgtgccagccaaccgcgctcaagaccccgaccgcgcccgaagcctgccgccagccgaagtgccgcccacgaccgaagtccgaaataccgcacgccgtcagctctccctcgacgttatgaacttcaatgcacccatttcctctccctcattgaagctccattgatggctatcaatggaattcatggtcgccgtttctcttccctcctcggcgccctctcccctcccctctcctctataaattggacaaccgtgcctacggaactctcccctcccacagccgagctcgcctctctctcactctcttgttcgccgtcgaacgccgtcgccgcagtccgtggaaccccgccggagctccgcccgcgctgcacgaggatcacgtcgttccctgctcgacgctaa

SEQ ID NO: 33858 - DNA, 573 bp, Zea mays
  Peptide Sequence Number=SeqID_77233
atgggcccaactatacagaaggagcttcgttaccagaaaagcttcgtcatagatcaagggaagtacgacgaagcaagcttcgtcatgatgaaaattgagattgcactctcattttctccttcgagcaagccgaagaggaagggtactcaaggtcatggaagagctggtaaagagaaagtagtagatgttccatactccacaaatgtcgatgacaaaactgatgacactagtcaaggaaccaagaggccagttggaagggacgctgcaaaggctgcaaaaaatgcttccaatgcaaacttcacgcagtccagctcagagtacacgagttcgatgtcaaacttgcatctggagcgcattggggattacaaagaagcgcaaggtgtgatggctatcaacatcgaccaacttattacagttcaagagaaagtagctgctaagaaacaagagattgccatgcaggtcattgagtacaagaaaaagaaatgggaggcagcagttgctgagaaggcagctctcaaagaagagagaatcatgaaccttgatctggagtggtacgcaaagggcctactatga

SEQ ID NO: 33859 - DNA, 594 bp, Zea mays
  Peptide Sequence Number=SeqID_77234
atggggctctctcccatccaaaagtgtatttccactctgcggatcttggcgtatgattcacctgctgatgcggtggacgagtatgcatgtcagcaacgagcaccccttgttcacttcgaggttaaaggcaacatgtataatatggtctattatcttgtagacgggctcggaggttcgcccaagttcaagaaggcgctcagaaagatatcaagcatgctttcgaggttcttgaagcaaggttcagccccctcgccgccagcggcctttgcacccggattcgcgccggccgtcgcgattcgtgcctcgggcgagtggatttcgctcagctgtgaaaagatcgcctcgggcgagtggattttgctcagccgttactgtggcctcgctgttcctcgaccacttgcaccggtagttaagcacctaatccaggaactcgtgcctcaaatcatccaccagagctcgccaattcgtgatttcccccaaatcggtttccgccgccgtagaaaggatctcaccgtggccagtgcacttcagataagctttaaatattatttagaagccttgggtaaagtttggcatgatttggaccatgtttga

SEQ ID NO: 33860 - DNA, 948 bp, Zea mays
  Peptide Sequence Number=SeqID_77235
atgcaggcggcatgcaaccgcaccaagggggtgcaccctttcggcttcgacgcgtccagcatggaggcccaggcccacacgtcatgtaaccggcgcgccggttactatgtgcgagaaactgcaccgccacttgcgccagtaccgcgcctcctcgactgcggaaccagtgccacgactcgaggcgaccctgcgcatggcccaacagtgccaaccgagcacatcggtcacggggatcgggaaaggggatactccgaaagggatccttctccgcgaaggaagcgggccccgagccccctactgatcagaggttcgaaggctggcccctcggaaggtttcaacagccgcctcagagcactcgggctgtgcgcccactacgggtcagaggttcgaaggccggcccctcggaagggttcaacggccgcctcaggccactcaggctccgcgcccactactgatcaggggttttgtaggctggcccccgaagggttcgatagccgcctcagacgcagagcaagagatgaccctggggtgaggctgacagcagccaagtctggcctcgggcgccataggaagctccgcctcgcccgaccccagggctcggcccccgtctcggcctcggacgacgaactccgcctcgcccaaccccagggctcggactcggcctcggctccggaagatgacgaactccgcctcgcccgaccacagggctcggactcaacctcggctctgaaagacgacgaactccgcctcgcccgaccccagggctcgaactcggcctcgcctccggaagacgacgaactccgcctcgtccaaccccggggctcgaactcagccttggcctcagacgatggtctccgcctcgcccgacccggggctcggactcgacctcgacctcggaagatagactcgacctcaacctcggaggagcctccgcctcgcccgacctag

SEQ ID NO: 33861 - DNA, 276 bp, Zea mays
  Peptide Sequence Number=SeqID_77236
atggcggtgacaggcaagggtctgttatggcaggtggcagcctccatcaatgatgcccgccgcaggcaaaggagaacccgtgccgccggcggattggctgctgctggaccggcggttgcccggtccctcggcgcccccaaaagaccgggggccacgcaaggcgagttgacgcgtgcatggatcatggatgtgacgaccttcgtcttccccggcctgtggggtgtggcttcgccctcaagcctgtctctgcatccatcattcgcgacggatttctag

SEQ ID NO: 33862 - DNA, 1038 bp, Zea mays
  Peptide Sequence Number=SeqID_77237
atgaacttacaaggccatggtaaactatggcgacacaaagcagaaaccttgaaggcaaaggggcgcagaaagctcgaaggcgaaggggcaccgcgagtgggagagaagcaaggcatggctgctagtcaagggatgaacccctctttaaaggcagactcccccgctcccgcctcgaaacgtcgcgagaagtctcccccaatgcacactgggtatccatcctatgacacgggggcccggtcccacaagtcatatagctggcgtgctggtcttcgagtgcgaagaaggcgaaccgccacacaaggagcgtgctaccgcccagcggtagtgcgccccttcatcttcgccgcgaccaacggtcaagaaggcgaaccgccgcacaaggagcgtgctaccgccccgcggtacgaaaccatcaagtacggaagtcacgggctcgttccctcccctaaggcgggctcgggggccactgtcggtaccctgaatcaggggggcgccacgtggccagaaaagatgatatatcctagggtgcaatcagttggaccggacctccacgaggaagcaccggacccctgtacgcacagcctggacccccgaatacggtccgggactcccaagctttatcctgtgcgcatgcgctccccgctctggcggagacccgatgctgatacatggcttgttgcccgtgacgtaagccagtgggcggagcctgacgtaaggcctctgggccacgcggtgcggcgtccaagccatcctgcaggcggcgtgcctgtccagttcattgccaaacagtacgcccgtgctgcaaggtggactgtggtcatcatcacttatgcattgccagggaagcttcctctgcacgccaataccacgcaaatcgcggatgtcagggtgcaagaagattgctccagcagccccaagtattacatccattatatttctgggctcacatgtcggggctcagcacccttgtacgcgcccccattgagctataaaaggggaggcatgcaacgttacagacggacacacacggacacttag

SEQ ID NO: 33863 - DNA, 537 bp, Zea mays
  Peptide Sequence Number=SeqID_77238
atgaaggaacaattatatgtcgacagagtgaggctgacagcagccaagtccggcctcgggcgccataggaagctccgccttgcccgaccccagggctcggcccccgtctcggcctcagacgacgaactctgcctcgcccgaccccagggctcggactcggcctcggctccggaagacgacgaactccgcctcgcccgaccccagggctcggactcagcctcggctccgaaagacgacgaactccgcctcgctcgaccccagggctcggactcagcctcggctccggaagacgacgaactctgcctcgtccaaccccggggctcggactcagccttggcctcagacgatggtctccgcctcgcccaacccggggctcggactcgacctcgacctcggaagacagactcgacctcaacctcggaggagcctccacctcgcccgacccagggctcggaccgaccacgtcacaggggggccatcattaccctacccctagctagctcagactatggggaacaagactggcgtcccatctag

SEQ ID NO: 33864 - DNA, 174 bp, Zea mays
  Peptide Sequence Number=SeqID_77239
atggggagtagctctctccgggcagaaagggaatcacggcttgtgggtggcaatgagactgatggttttggttatgactatggtgctggttgtcaacattgcaaccactgctcaggagaagatgaagccgtggaaggagacttccaggagtttcaagactacgacgagttctag

SEQ ID NO: 33865 - DNA, 993 bp, Zea mays
  Peptide Sequence Number=SeqID_77240
atgacgtcacagaaggacatctttgatgttgcagggccaacgtatctgacatacgtgaactggaactgccctcatcaccggcgatccgtcatggcgagccttgtgcagggcgtgtacgtcctagagcgcgaccggcagtgcaacaggcagggcgccgacgcccgcgcgccggcgtggtggaggttcttccgcttcgagccgcggcagccgccgctccacctcctcgaccccacggccgccgccagcgccccgcactacgtcgtcgccttccgcgggaccattaccaagaagggctcggcgaagcgggacctggagctggacctgcagctcgtccgcaacggactggaaggcaggtcccggttccgcgccgccatgcaggcgatccaagacaccctggcggcggcggcggggcagcacggccgcgtctggcttgcgggccactcgctgggctccgccattgcgacgctgggtgccaagaccctggtcagggcaggcgcccccgccctgcccacgttcctcttcaacgcgccgttcgtgtccgcgccggtggagcggatcggggaccggcggctgaggcagggcatccgcatcgccaacagcttcgtcacggccggtgtggcagccgtcctgcagcgagccggcggcggcgcccacgacgcggcgttcgcggcgatggcggcttggatgcctaatctgttcgtgaacccggcggaccccatcagcgccgagtacgtggggtacttcgaccaccgcaggaagatggaggccatcggggccggcgccgtggggaggctggccacgaggaactcggtcaaggacctgctgctgggcattggaaagggtcgcagcggctgcgaaccgctgcacctcttcccgtctgccgttctgacggtgaaccgcgggccgtcgccggacttcaagacggcgcacgggatccaccaatggtggcggcccgacctgtcactggagtgcaccgcgcattactacacgtga

SEQ ID NO: 33866 - DNA, 1359 bp, Zea mays
  Peptide Sequence Number=SeqID_77241
atggcctcgccggacgctcttcctctacgattcctcctcgtcgtcctcgtcgcctgcaccgctgacgccacccaacgaccgacaacgctgcacatccccgtcgtccaccgagacgcagtcttcccaccccggcgcggcgctccaccgggcagcttccgctgccgccacgccgccccccacaccgcgcagctggagtccctccactcggccaccgccgccgccgacctgctccggtcccccgtcatgtcgggtgtccccttcgacagcggcgagtacttcgcggtcattggcgtcggagatcctcccacgcacgcgctcgtcgtcatcgacacgggcagcgacctcatctggctccagtgcctgccctgccgccgctgctaccgccaggtgaccccgctctacgacccgcggaactccaagacgcacaggcggatcccctgcgcgtcgccgcagtgccgcggcgtcctgcgctaccccggttgcgacgcccgcaccgggggctgcgtgtacatggtggtgtacggcgacggctccgcgtccagcggcgacctcgccaccgacacgctcgtcctccccgacgacacgcgcgtccacaacgtcacgctcggatgcggccacgacaacgaggggctgctggcgtcggcggccgggctgctcggcgccggccggggccagctgtccttcccgacgcagctggcgccggcctacgggcacgtcttctcttactgcctcggcgaccgcatgtcccgcgcgcggaacagctcctcgtacctcgtgttcggccgcacgccggagctaccgtccacggcgttcaccccgctgcggaccaacccgcgccggcccagcctctactacgtggacatggtcggcttcagcgtcggcggcgagcgcgtggccggattctccaacgccagcctcgcgctgaaccccgcaactgggcgcggcggcgtcgtggtagactctggcacggccatctcacggttcaccagggacgcgtacgcggcagttcgcgacgccttcgtgtcgcacgcggcagcggcggggatgcgcaggctacggaataaattctcggtgttcgacacgtgctacgacgtccacggcaacgggccaggaactggtgttcgcgtgccaagcatcgtgctgcacttcgccgctgctgcggacatggcgctgcctcaggcgaactacctcatccccgtggtgggcggggatcgccggacgtatttctgccttgggctacaggcggcggacgacggcctcaacgtgctcggcaacgtccagcaacaaggcttcggtgttgtgttcgatgtcgagaggggaaggatcggtttcacgccaaacggatgttcaggtgagtga

SEQ ID NO: 33867 - DNA, 294 bp, Zea mays
  Peptide Sequence Number=SeqID_77242
atgtccggtgcaccagaggactccaactcaaacttgccaccttcgggaatttccagaggcactcgcgctataattcaccagactgtccggtgtacaccggacagtgtccggtgcgccaaggaggagcggcctcaggaactcgccggcttcgggaatcttcaacggctcgtccgctataattcaccggacatgtccgagggcgaagatctaggaatttcagcagaagaccagcttaaactgtgtggcctccgcatcaaagctggtccagaaacaaagggaggtcctcacagctaa

SEQ ID NO: 33868 - DNA, 300 bp, Zea mays
  Peptide Sequence Number=SeqID_77243
atggcgcccgcgcccggctcggccgcccccgcgccggccccgccccgccccggcaagccccgccccgtctccgacctccgtcgcgccccggcaagccccgccccctctccgaccacggccgcccccgccccgccccggctcgggcgcccccgcgcagcatggcgatcgctgatctgcgaccacgcgaacacttggaaacaagatctaaccttcttcctacaaccgtcgtgcatccctcaacacaagatgactaacaggtacctcagtggagcggtgtcgatcgacgtggacactagttga

SEQ ID NO: 33869 - DNA, 225 bp, Zea mays
  Peptide Sequence Number=SeqID_77244
atggcagaacggcaatggaattactgcggtgctgagggcagtagcagagggtgcaggtaccctgagggagaggtcatatccctggacgagaggcactggccgagtcttataggccgcgagatagtagccggggcaggtcttacatgcaaggaacacaggccaagcaaaagtacatttatggccctgatacctacacattaccctaatacaagtatcaaggattaa

SEQ ID NO: 33870 - DNA, 734 bp, Zea mays
  Peptide Sequence Number=SeqID_77245
gccgggctgagccggagctctaccttccgcgcgggttcgtgggtcaccctctcctgcggcgttcgagggagagggcgctcactggccctgcgggcggcccgaacttcgacaacgcggggctggtcgacggcgggcgttgtcacccccagcgtgtcgagcttgtcggcttggctcccagtggcccctcctgccggaaggcggctgccgcgtcgtgtgcacaggaggaccacccaaggtgtcgcgcgctgctagggcggcgttcgtgttctggagtggtcctgcctttgcaccgcgtgggcgagggcaagattgcagcagcgcccaccctgaggcctgcgctgctgcagttcggccacccggagcgggggtcgttgtcgtcgcagtcagagcgggtggcggcgagccgccccttagttaaagggaccccttggccgctcttcgatgagccgaggccagggccgaagcctcgggtcgggctggcgccctctgaggacggctggccgaggccctggggcgaccggccgagccgcctgctcgggccggattcccggagaagaccctggcagcgattgcccgggtgtggcgatggcgtcgtcctttggagtgggaatcctcggaccgcgtcgccgtccgaggctagatcggaccttgccgaaggtgtcgtcgatgccgagggtgctgctgcccccttccagcgccaagacccgagcctgcaggatcagattgtcttgtag

SEQ ID NO: 33871 - DNA, 522 bp, Zea mays
  Peptide Sequence Number=SeqID_77246
atgggcggcggctgcctcagcacgcacggaggggttctcgctcctgttcgaccaataggagtgaggacaagaccatccaagaacgccgcggccaccgccgcggcgtacgacgtcttgattggtgtagccaaggtccccccccgcaggattggtgaacacccttctcctccgaatgctggaggaagaagcgggtcaccaacccatacggagggcgacgtcaaggtcatccagcaggcggcgcgcctgctgggtctgctggcaaacaatgcgcccgtgccgagcggcacactatgctcatcttctcttccgcaagaagcttcccctgcacgccaaggatacgcagacctcgagcgccagggcacaagaagattgcctcgacaacagacattagaggatccaagcactatattctttatgtccctgggcccacatgttggggcccagtccttttgtgcatgccccccttcaactataaaaggggaggcacgcgacgttaaaaggagaactcagaccgagctctag

SEQ ID NO: 33872 - DNA, 384 bp, Zea mays
  Peptide Sequence Number=SeqID_77247
atgaccgttggtggaggctgtctgtcgtatggtgcaccggacagtccggtgcacaccggacatgtccggtgtgccagcgcgcgtgtgcctgacttctgcgtgcttctggcgcgcattaaatgcgctgcagttggcgagttcatgaggccgctcttccttggagcaccggacactgtccggtgtacaccggacagtccggtgaattatagcggagtgcctctagaaattcccgaaggtggcgagtttgagttggagtcctctggtgcaccggacactgtccggtggtgcaccggacactgtccggtgtacaccggacagtccggtgccccagaccagaggtgccttcggttgtccctttgctcctttgttgaatccaatacttga

SEQ ID NO: 33873 - DNA, 432 bp, Zea mays
  Peptide Sequence Number=SeqID_77248
atggctagggatccactacgaggcctttacaaagttccactaactttagaaaacaccctacgatttctgagaagggaacattattgggtaaagagaaaagtgatcaagggcacaacttgccttagagttgagatccccaggatcgacgaccgagaagagctcaggcccaaccagtaccataggatctactcccagccatctgctaaggatctaaaggtcgacgatgtgtcttcctcacaacaccccgcccctgcacttcagtcaggcgcgcaagcccacccaaggcggacgccattgccgcagacaccaaacccatgttcctcgtgcccgaacttcaacctagaccgcactacacccagaggggatggaatcgagctagcaaggaagtcactcactggtgcttgcagcggagacgggtcttccatagtgtga

SEQ ID NO: 33874 - DNA, 225 bp, Zea mays
  Peptide Sequence Number=SeqID_77249
atggcgttcggctcagggctcaccgacggtagtggaaagttgggcgaggtggcgatgagacgcggggtcgacgacgaacccgacgctatcctcagttcaatggttgggggatggggtgctttgtccatgtgcgccggcatgaaccaaaagcacaaagatgtcgatggcgaggctccagcgtccttgaagcccaggcagaggctccagggcttcggcacgcgatga

SEQ ID NO: 33875 - DNA, 405 bp, Zea mays
  Peptide Sequence Number=SeqID_77250
atgaccgttggtggaggctgtctgtcgtatggtgcaccggacagtccggtgcacaccggacatgtccggtgtgccagcgtgcgcgtgcctgacttctgcgcgcttttggcgcgcattaaatgcgctgcagcggagcagccgttttggtttcccgaagctggcgagttcgtgaggccgctcttccttggagcaccagacactgtccggtgtacaccggacagtccggtgaattatagcggagtgcctccagaaattcccgaaggtggcgagtttgagttggagtcctctggtgcaccggacactgtccggtgtacaccggacagtccggtgccccagaccagaggtgccttcggttgtccctttgctcctttgttgaatccaatacttgatctttttattggctaa

SEQ ID NO: 33876 - DNA, 612 bp, Zea mays
  Peptide Sequence Number=SeqID_77251
atgcagtcacaaaagaatgtgttgctccagtatcaagtaacacatttgcataatgagattcgactgagaacgtacctagtgccactcctagggtctcctaaactatgtcggcctccaggttgttcacctttctgtactaggcatgaggctgcccacggttgttgcctccttgctgaggtgcattctgtcttgcagggaaattgggagctgaatggtgctgaactgctttctttgggcaatgatccgccaagtgaccttgttccccacattggaaacattcgcggcctcctccttgcgctggagctgcttggttgctctgattggttgttggggcaggaaggcgaggtgcctggttattctgtcactgatactggtttcctctctgttggttgctctggcggtactgctgctactgctgagggaactacctctgatacaactgctggtgctggcgttgatgctggtgtccttgaggtcatgatggctctatcgatcagatgctggaaggtagggaaggcggaagttgtctctgaactcctcctaggtgatggcttcagggtctacatcggtggcaaggtaggactcccaccaggactgtgctgctccccatag

SEQ ID NO: 33877 - DNA, 498 bp, Zea mays
  Peptide Sequence Number=SeqID_77252
atgtctgccttgcctgaaccagtctcaggcgacgaggacaaagcatgcccgagggccaatgggggacaactatctttaatgcgcatacctaccctgcccagcactacaggagggcagatcggccctcgggcacaaattccgcctcacctgatgccaagctcaccctcggatccaaagccccctcgcccgagctcggctatctgttccaccacgaatcctgcaggaggccactccgtcgactgtgtcgcacgtcagaaagggttcgtctatcacctcgggaagacttccaccgcgcccgagctcgactctgttctcaatatctgcagcaaaggacaccccaacgtcatcggatatagaagcgatgacgcatcacgtaaggtatgtggccaaaccctcaacctcggccttggctctcagtgggaaaaccagcggattcaagtcagtgatgaagtaaaaggccatactgtcaacagggtacaaagatgcctccctcagtga

SEQ ID NO: 33878 - DNA, 180 bp, Zea mays
  Peptide Sequence Number=SeqID_77253
atggggctcggtgtatgcggctcgctctgccaagtttgggttcgccccttggggaggagtgcgagacattgtggtacaggtggttatgagattgatggttttggctatgactatggtgctggagaagacgaagctgtggaaggagacttccaggagttccaagactacgacgagttctag

SEQ ID NO: 33879 - DNA, 702 bp, Zea mays
  Peptide Sequence Number=SeqID_77254
atgggtttcctagtgccccaagatcgtcacagagggatcctacacaatgcggctacaaacgcgaaatcaatggagggatccttaccgagaatcgtttgcacaggcgtgcagtccacggtcacccacggttccctggcgattcgtggtcgacagcgagaaattacgcgcgcccagcttgcggatccaacccgagtttggccccgatccgtacggtggaatccccggatgcactggggacggaatgccgcgaccggaggtccggccgagagcgtaacgacggcggcggcgcgagctccagttttctttgccctctcggctatggtggaggatcggcactgggtatgcgatgtggtcgggtcacgacgcgcacggctacggtcttatgctcccccaatcggcggtaacaaccaccccgaagccctcccggaggacccggctggtttaccacgaatcgccgttggcgcagcccgccatacgcgcgtagaggtggagttcaacgccctgtacccacaggagtctttgaaatatgcaactgcgttcaagataatgcatgatcaagaagggggtgcaaatgattgggtagtgcaacatactacaagatcgaagaaaattgtgtggggacaacaccaattcaaagtgacagctgatgaagaatccggaaagtatacgtgtgaatgcaaacattgggagcatacagattga

SEQ ID NO: 33880 - DNA, 147 bp, Zea mays
  Peptide Sequence Number=SeqID_77255
atggctgaggaagaagctgctgcggccgcggtggacacgacaattgagaaaggtaccagcgacaacatatcgccggtagcttgttctacgctaatttcaagatgttttctgacgaaggttgttttgccagagtatattactaagtaa

SEQ ID NO: 33881 - DNA, 603 bp, Zea mays
  Peptide Sequence Number=SeqID_77256
atgcaggcggcatgcaaccacaccacgaggatgcaccccttcgacttcgacgcatccagcatgaagtcccaggcccacatgtcatgtaaccggcgtgccggttactacgtgcgaaaaactgcaccgccacttacgccaatgctgcgccttctcggctgcggaatcggtgccgcaactcaaggcaaccccgcgcatggaccaacagtgccagccgagcacgtcgttcacgggtcagtcagccgcgggagaaggcgcgacggtcaatacggccaaaagtgggccgacagtaatggcggcagcaggcgagcgaaagcggtggtcaaatcgtctgcaggctcacgtcccctcctaaagcagcaggagagccctcttccacgggaccgggaaaggggatactccgaaagggatccttctccgcgaaggaagcgggccccgagccctcctactgatcagaggttcgaaggctggcccctcggaagggttcgacagccgcctcagagcactcgggctccgcgcccactactggtcagaggttcgaaggctggcccctcggaagggttcgacagccgcctcaggccactcaagctccgcgcccactactga

SEQ ID NO: 33882 - DNA, 198 bp, Zea mays
  Peptide Sequence Number=SeqID_77257
atggagaaggacgcgctggagtgcgacatctgctgcctacccttccagtccgaagttttggaggatgaggaagaggcgggcttctctacggctactatctcttttctactattgtggggtgtggatttcccgagaggaggagggcggagtggtgagcgccatcgtgaagtgtgtaacgtgggcaagctggacacctaa

SEQ ID NO: 33883 - DNA, 1233 bp, Zea mays
  Peptide Sequence Number=SeqID_77258
atggctcacactggaaacttgagccagcgtgatcacacaatcgatataccaatgagtgatggtatgaccgcatcaacatctcaccaggatgatcatagtggctcggatgagctgcatcgcagcagaggtccttcgaatgaagtttcaccaagcccagatacatcttccggtacaaacgatgtatctaactctcacaatgcatcctcagcaagaatagatcgaggccaccgtcaacagaaccctttgaattctggcttctggatctcaatcgaacttattgtaaatcttagtcagattgtagcagctgttgttgttctgtcagtatcaaggaacgagcacccacaggctccattgtttacatggcttcttggctatacaataggttgtattgctattcttccgcatctttactggcgttatcttcaccgcaatcgcctagacatggagcaggagatgccaccccaaaggtcgccaggaatgaacatatccgagattaattcttatgctgtcgtttcatctcctcatgcatcagaagctgtggaaggtgccaacagtactggagtctcaagaactaacttaccaatggcaagtccaaggttttacgcaatggttgcctgctttaaattggtgttggattgtttctttgccgtctggtttgttgtgggaaatgtgtggatgtttggtagccgttcttctgcccatgacgctcctaacctatacaggatctgtctagtgttccttgcgtttggcttcattggctacgcgttgcctttcattttatgtacaatgatatgctgctgcctgccctgtataatctccgttctgggcgtccatgaggatttggatatgaacagaggcgctaccacagaggcaatcaataccttggtggcatacaagttccaatcaaagagggttcatgatggggatgtgggaggagatggtggtggagtcttggcagctggaactgacaaagagcgaactatttctgcagaagatgctatttgctgcatctgcttgtcaaagttctcaaacaacgaagacctgcgcgaacttccctgtgcacatgtcttccacatggaatgcatagataaatggctccagataaacgcgttgtgccctctatgcaaggctgagatagggggatcaaaagcaacaagtaatccagagagtggctctgtggatcccgacaacaacaacaatagagtagacaacgacgtggagtcacaacggtag

SEQ ID NO: 33884 - DNA, 837 bp, Zea mays
  Peptide Sequence Number=SeqID_77259
atggtgaccactagctcgatggtggggagaagcaagccaagctgcggcatctgccccaccctcaacttcaaggatcttcatcatccttgctgcggcggggggcgagctgagccggagccctacctcccgtatgggccggcgggccacctcttccttcagcattcaggggagagcgcgctcaccggcctagcggagggggcggacttcaacaacgcggggtcggtcggcggcaggcgtcgtcagcttcagcatgcatggctcgctggctcagctggctctggcgctgcttccggtgccacctcccaccgctggggcggagcgtggctatccgtccgccgtcggtgctcgcccgtccgggaggacttgagtggggatctgccggtgggcctgcctgtcgtcggtgctgaggtggtggcagccggagaaggtttctccaccgatgagaccgttggcgccacccgcgcactgacctccggctctttggctttgatagcttgtcctcgcccctcgagtggggacgcgggcgagggccttgtcgcagcagtgtctgccctgaggtcatcgctgctgctgtttagccgcgcggagcggaggtcgttgtcgctgctgatggagcggtcggcggcgagccacctggaatttgtcgtcccgagtcccttggctcagtcggccttgccacgcaaggcttctcttgctcagttaaagaaccctcggctgctctgcaatgagctggagccggaggcagcggtttcagcgtggacagaggcggagtcgactcgagaagaagcttcgtcggcccgggagcacgtggcctccctggccgaggaggtgcagtag

SEQ ID NO: 33885 - DNA, 270 bp, Zea mays
  Peptide Sequence Number=SeqID_77260
atggcgactggatgctcgtcggcgacgtcccctggaagtgaaattctcgagaggcgctgttggttgttggcagtaattcatgcctatagtgatgttcgtggaaacctgccagcgccttcgtctgatgaaaggttcagaggccgtgaacttggcaccaagagccgcccgatgaggcacactccgttgggcgttggcacgcacgcacgcactggcgtcttgaaggaaagggggaactctgctggtcttgatgaggatcttcacgtgagatag

SEQ ID NO: 33886 - DNA, 336 bp, Zea mays
  Peptide Sequence Number=SeqID_77261
atgaggaaaaaacacggctccgcgccaaaaatacatacacgttcaggccccgacagccacaatgaacaaaagaccggcattcaaggttccattacaaacggaactccggttccgtccccgcaggacgcctcctccgcagagctaggggatggtttccaccaccagaagctggaagaggaggtggccagccgacccgtgcgggaggtagagccccggctcgcctcgctctccgccccagcaaggatggtaagcatccttgaagccgagggagaggcgggggccgcagcccggcttgcttctccccatccaggggctggtggtcaccgtcttgggtga

SEQ ID NO: 33887 - DNA, 372 bp, Zea mays
  Peptide Sequence Number=SeqID_77262
atgcctcccgtggcggagcttctggacgtgcacatcttctgcgtcgccggagggttatacatcttcatcttctacctctacaggaggagttcacgagattgttcctgcagctctgatgtttctcttataaagagagctctcagctcaactcaaggttgccatgtgtcactatcaggcaggctacttcgtccgttctattttacactattcttagttgttaatattcttgtctggcgcttggcagcgtttggcagacgcacgttaacggatgtctggagtagagcaataaacaagtgcttgttaagactgtctcaaatagagcgtggaaatgtggaaaatatgggacgtgaaattgtagatgacattgtttga

SEQ ID NO: 33888 - DNA, 765 bp, Zea mays
  Peptide Sequence Number=SeqID_77263
atgccgcgccttctcgactgcggaaccggtgccgcgactcgaggcaaccctgcgcatggcccaacagtgccaactgagcacatcggtcacgggtcagtcagccgcgggaggaggcgcgacggtcgatatggccaaaagtgggccggcagtattggcgacagcaggcgggcggaagcagcagtcaaatcgcctgcagtctcacgtcccctcctggagcagcaggggagccctctcccatggcgtgaagacggcgcacccgtgttccgtccctcgaacggctcgcgcaacagctgccccgcgaaccacccgtctcgtcgcgttaacttcgcggcaagtcgacagggccgaagtgaccgcagtcactttgccctttccactgaccgacctgacaggaaagcagtcgcctgccccgctccgactgttgtgccacccgccagggtgaagctgacggcagctgagtccagcctcaggcgccacaggaagctccgcctcgcccgacctcaggtctcggcctcaggagaagtctccgcctcgcccgaccccagggctcggcccccgcctcggaagatggactccgccttgcccgaccccagggctcggcctcgacctcgacctcagaagatggattccgcctcgcccgaccccagggctcggcctcgacctcgacctcggaaggtggtctccgcctcgcccgaccccagggcccggcctcaacctcgacctcgagcggaatcgcgtcctcgcccgaccccggcctcggcctga

SEQ ID NO: 33889 - DNA, 1008 bp, Zea mays
  Peptide Sequence Number=SeqID_77264
atggccaaagaatgttccgatccccttcgtatggcttgcgacttgaagatttttccttacgggcggaatattgctgctgttgtatcggtagtgatggagaaggatcgccaagacgctgctcagaagcgtcgggcgttcgttaggatcggggatcctttccacgaggcgaagaaggcgcggggagccacgaagtctgccaccccgggcagtagtaagccattgccagctgcgaaaccggctgcccccgggcccagcaaggcttcgactggtgcgaaggctgctgcttctggcgcgggcaagccaccctcaggcgggcccgcaaagggacgaaggctaccttcgccggcacgaacggacggggcggcggcgcgtgttggcgactttgacacggacatctgtgtcgggggttattttgttgggtcggatggggggcaactggctgttgtcccgcctccggtggcgaccacttcgctaacgacggtggttggggcgaagggtgccacgcgggactcgtgggccaccttctgcgcgagtggcgagattctgtcggccgctgccgctaaggacgtggcgggctccatgtcccagcaattgaggcaaccgtcgcagcagctgaagcatgcggccgacttcgccgaccacgtcatgtcgggtgccttgactgcggagtttgctgccgaggtcgagagtctccgggcacaacatgcggatgctgtgcgggagaagtcggctgcagaaagcaaaaaccgcaggctgtcggagaaggtggcagccatggaggtcaagaaggcggatctccggcgccagctggcggaggagaggagggaggcgaacaaggccattcctgatgcgcaagctgcgcaagccgaggccaagcttgcgcaggcggagggcagtctcgcctgccaacttgacgaggagctggaggcgaggctcgacgccctgcgcagctgcgtggacaaagccgagacctcgatgcatgcggaggtcgagcggacgcatgcgtag

SEQ ID NO: 33890 - DNA, 231 bp, Zea mays
  Peptide Sequence Number=SeqID_77265
atgagaaagtgggagcaagagctcgagggcaaggccagcgacgtctccctcaccgaggagaaccgtaaggcgaaggagcagtccttggacaggcgggagacagacctcgccagacgagagatggatctcaccttcaaggaagacatgcttaccccgcaaggtgagatgctggccgagcacgagcttaaagcagaagagaaggagaggaagctgaaggattggatccgctag

SEQ ID NO: 33891 - DNA, 450 bp, Zea mays
  Peptide Sequence Number=SeqID_77266
atggatgccgtggcttctgtgcaactcccaaccagattccgattcttggagcatataagccaccttcccccttaccttcccttcacatcccctccacgcgcagccaccgttgatcacatgggcgtttcttctatgcgctcgccggaatcacgcctggaacccgcaaccgggggattggaccaccggcgtcgacggggaccagtctgggcgcttctccgagtccccaggaagtcgatcgtggcgccaaccgggtggaattggggctacggtgacaataacggctcggcagggcgaggctgccgccgcggtggtgcgtctcgccgtggtcagacctcctcgtggctccaatcatcgggctggggattcgtgcacgccggcgatgccgccgccgtgtataaacagggcgtcgccgcagcttgtgtccaggtgacgacgcttcatgtgccctag

SEQ ID NO: 33892 - DNA, 504 bp, Zea mays
  Peptide Sequence Number=SeqID_77267
atggcgatgaccaccgccgtgacgggcctcgccgtcgcagcaaccgctcccattcgctccttcctctcgtccgccgccgcctctgtcagcctgcccgccgatcttcgtgacctcgcctccgacctagcctcggaccctgccgtctcctaccgctctctgcgtgccatctggtgcgccacctcgccggacacccgcccgccgctccgcgacctcctccagggcgccgacttcgtgctacccagcccgaaacctcgtgagaagagcgatgagctgaaggcgaggctggagaagctccgggagacacaggagaggaaggagtatgctgagctcgtcagggacgtcgctccgcccagcaaggatgacgctcctgagcccttttcatcctacaaggatcagataggatttggtactacccaaccgccctattttcaaattgctctatgcaatcttcctactgcttgtttcatggattacacttgttccattgaagtaataggaatatag

SEQ ID NO: 33893 - DNA, 231 bp, Zea mays
  Peptide Sequence Number=SeqID_77268
atgatcatagctcaacaagttgtggggaaccagtggcatgaactcaccaaaggcgcacaaatccagagaaacccaggggcccagacgcatgattacacagactctgtgaacaacatgcgtcgatcgtgggttaattctaagaaactacaggggctcttatgtaagattgacgcagcgaagaggtatcgcccagatctggccgttggattagaaacggttggcccagattag

SEQ ID NO: 33894 - DNA, 177 bp, Zea mays
  Peptide Sequence Number=SeqID_77269
atgcctttagtccaggtttcacctattcacaccccctctaggcgactatcacattccccggtcaccgaggtgatgaccaagaaacccaacaagttgcttcacatggacacagttggatcaactcaggcgaaaggtgaggtttttactcatgctcaagacttgattcttcagttgtaa

SEQ ID NO: 33895 - DNA, 375 bp, Zea mays
  Peptide Sequence Number=SeqID_77270
atgttgttgattgtagctcgatggttcatgctaggcgcacgagagacgatagacaattttctacaggttcgggccgcttggagaggcataataccctacttcctggtgtggatctttatgtggtgggttacacgggaattctctagtatgaaggatgctagagaatggagtagatggctgatgaatgacctgccttttgatggggtgccccctaggccttatatatcggaccgtggggcacctacatgcgtgtatgataacgatatccagctatgtccgcaagcattagccttcctcccacagatgggaaatcaggatatggttactggcttagagtctggagaagatgatttgggactgcaccacgacagctaa

SEQ ID NO: 33896 - DNA, 291 bp, Zea mays
  Peptide Sequence Number=SeqID_77271
atggagatgaataagaagataaaagaggatctgaaggcagttgcacttggaacgtcaaaggtcaactactttgattctagaataacagtggcatggtgcaaacgccatgaagtccctattgagaaggtcttcttccatgggcggatcattgtcgactggtggtgtcaggtcttcttccatgggcggtgccgtggagcacctgattgtctcacgtatttgaccagcaacaagggacgaagattgtcgactggtggtctcacgtcgatagatcataactcaagttttttgtag

SEQ ID NO: 33897 - DNA, 966 bp, Zea mays
  Peptide Sequence Number=SeqID_77272
atggcctccaggacgtcgccgctggtgttcaagagggtggccgggatccgaaccatcgctgagtccggccgcttcaaggcaagctccttccacttcccaataatcaagctattacctgctttaatcacaatcgctctgcccctcctggtgctttgctggccttcgcgggtcactgtccacagtagtagctgcaaatgcttgggattcgccttgcgactagccgcggaatgcacgattctgatcactagaacgcaaattccgatcaccagaggctactccgttcggagcaagattctactcttaggaaaattcattgtctatgcttcagactataccactcctgctgattctgtcgccacctcggagcaaacaggtggtgaagctgaggccaccttagaaacaggtggtgaagctgcagccaccttggagcaaacaggtggcgaaaccgaagagccgaccattgtagcacctgctaatgaatatacagagcaggaggctgctcctcagcagaagtgtgcaaagatacacgacttttgcctagggataccttttggtggacttttactctccatgggccttattggatttctcttctggaggagccctgcgagtcttacctttggcgttgcacctggccttgccatattggccctggctgtacttagcctcaaggtctggaggagcgggaagtccagcttactgttcatactggcgcaagcaggcattgccgctgcggtagcatggaagcacggccaggcgtacaccactacgaggaagctgcttccgtggggcttctacgtcgcgctgagtctactttgccactcagagagtcaaatgaaggctgcaccatgcaggcttagaaggcagaaatcagagatccttcgtgcccagatctgtgtaggaacatggaacattgaggcgtatgtcaacccaatgaattggatattgaagaatggctggatatag

SEQ ID NO: 33898 - DNA, 198 bp, Zea mays
  Peptide Sequence Number=SeqID_77273
atgggcctgcacgcggccatctcgggacagggctcaggcaggcgaaatcggcggcatgcatggtgcgagcagcaggatgctgacgagcgtgggggcaggtggggcattgcacagaggggggaggcaggggcgggggcacaagctggtagcagatttttacgcagtacaccgaattgcataattatctacacagtgtag

SEQ ID NO: 33899 - DNA, 384 bp, Zea mays
  Peptide Sequence Number=SeqID_77274
atggcggggacgcgttgggggcggtggctggggctggtgacggcggtgtgggtgcagtgcatctccggcaacaactacaccttctccaactactcgcacgcgctgaagacgctcatgggcctcacgcagctacagctcaacggcctctccgtcgccaaggacgtcggcaaggcgttcggcctcctcgcggggctagcgttcgaccgcatccccacctggctcctcctcgccgtcggctccctcgagggcctcctcggctacggcgcgcagtggatggtcgtgtccggggccgtcgcgccgctcccctactggcagacgcgctcgttgtgggtgccaaataccgcggcgagttcgaggaggttgctgctatgctccaagaattag

SEQ ID NO: 33900 - DNA, 846 bp, Zea mays
  Peptide Sequence Number=SeqID_77275
atggtcacccatcccgccgctcgccccctcccaccatcgcgtttccgcccgcgtaccccgtccatccatacgtcgtcatcgtgcaggtctcctcctgcctcgcggagtcgtgagcccctctactcggcccttgccgtgccgctgcgcgatggaggacctcaaaggggaacactatgctgctcctgcatcctctccagagccgactcggatgccaccgtcgtccgtctcatctccctctcttcgggaggacatctcgctggccgacacgagctagccttcttctttggttctgtcccttgcccccaccccaccccactccgtgcctccctctgtgcccacgtgctgatgtatatcccaatgcccatggggttcattggtgctgatccatacaagattcatgctagcttcgctagcggtcgcgaccttgagatcggggagcttgcccggggctccaacctgtccatggacgtgacagagagactagcgctggaggagttgttcccgaacccgtcatccatgcccggatccaatgtcccgccccctcgtcaagcagtcgcggatgatgggcaatcgactgcggagacggtgtgcgagagctcagacgcggaaaggtctgcggcgagatgcgtgacctatgttggcgtggagttgaggcagaggagcgtcttcgagggcgggagggtggtggcagcgtccgcggatgatgggaccagcagctgcggaagcagcacgcgggagagcgccgcagctgctgcggatgtggcggccatggcgtggcgacctgaggcaaatggcggcatgaagaagaagctggagaaggagtcgtcgctggactacagctgttag

SEQ ID NO: 33901 - DNA, 507 bp, Zea mays
  Peptide Sequence Number=SeqID_77276
atgcagccgccgccgcagctgccggcggctttgccggtagggttccgcttccgccctacggacgaggagctggtgctacactacctcaagcctaagatcgcgggtcgcgcgcacgcggatttgctcctcatccccgatgtcgacctctcggcgtgcgagccttgggagctgcccgctaaggccctcatcaggtccgacgatcccgagtggttcttcttcgcgcccctagaccgcaagtaccctggaggccaccgctccaaccgctccaccgcagccgggtactggaaggccacgggcaaggaccgcctcatccgctcgcgcccagcaggcaccctcatcggcgtcaagaagacgctcgtcttccacagaggcagggcaccccgaggacaccgcaccgcctggatcatgcacgagtaccgtacggccgagccccagctcccacaaggccaaaacgtttgttgctcccgctacccatttcgatttggctgctactgcccccaggcctga

SEQ ID NO: 33902 - DNA, 264 bp, Zea mays
  Peptide Sequence Number=SeqID_77277
atggactacatcaagcacgcgctgactctcttcaccgactttgttgcggttcttgttcgaatccttgtcatcatgatgaagaatgcacaggagaaatcccaagacgagaagaagaggaagaagcgcctctcctttccttctcaaggatggcactgccactctagtcacatggacgctgtgctgcatgccatcacgaacatcctgcctcgtctcctccgtgcgccgctgcctgagattgcctccatgatgcagctcaccatgtag

SEQ ID NO: 33903 - DNA, 258 bp, Zea mays
  Peptide Sequence Number=SeqID_77278
atgtatgtagaggagtggcacatccggtggtgcaacgaccaggtgtactacctcgctgatgagcccggggtgcacttcatttggcagcccagccaagggtcatcggtactcaccatgtcgcgcgcgttcgacgactactatatcaaggatggtggcgtcatctcggcaccggaggtgtggcacgtgctctccaatgataagaccatgcaaatcatgacatatatcgaagtctgcatgatactgataattgcaatgtag

SEQ ID NO: 33904 - DNA, 942 bp, Zea mays
  Peptide Sequence Number=SeqID_77279
atgaccgtcatcccagcgcacaagaattcatggccgaacaacgtgagagtcgtcggcattggcgacgaccatgaggtcaccctgtttgacaatgaacaacgtgaggtcgaattggcagtcgccaagcttcttctcatcgtcgatgagcgacgccaacgcgagcgcctcgtgctagtggtgtttgttcggggttttcaaccgcctcccaggctcctcctgctcttccctgcgcaaccggccacccgtgagcccgcttccccgtcctccgctctactgctcgctgcttgtcgagacagcgtcttctcctggcgcgcgacggtgcccggtcggccgtcgccacgtccgcccctgtccctggccgccgccaccaagtccagcggcccggccagcttccctgtgcttcttcctcggcgctgccccaactctgcccctctctggcggcccccaaggttgcgacccccgcctcctcagctgactgcgcccaccagctctgcccctctctggcgggccccccactgtcatgattccggctccccatgctccttagcacacctcccaccaacatctgccatgccaaccatcgcgattacggctgctgactcgaccctcaccgtcgattccgcggttggcttcccctcgcccagcgccaccggtgctaccactgcagccatcgcgcgcgccgtcgacctcgtcccctccaggcttggtctaccgggctacccgacgtgcataggcgtcctctccggtctaccctcactgacacgtcttcctagacacccaccccctgggttctccaccactcggccgctcgtcgccgacgccacctgggcttccccgacaccctccactgactccacgctggcaactaccatcgccaccatccaagttgccttggccgcctcgcaggagcgcgagcacgccgcatcccgcgcactggaatag

SEQ ID NO: 33905 - DNA, 177 bp, Zea mays
  Peptide Sequence Number=SeqID_77280
atggggtaccacaactgccaacgggtaccggagggcatcacggtggtgccgcctccgccatcgtctcagggcgtcgatgccgccatgagccatggtgctttcctggtcatccgtgggcagcactttgctatgcaatcgggaccgcggcttttatatggtatggctgcagtacggtga

SEQ ID NO: 33906 - DNA, 888 bp, Zea mays
  Peptide Sequence Number=SeqID_77281
gagcggcaaggaggcgtcaggggcgtatgaccatctgggcgagctggaccaggcgctgttcatgtacctggatcacggcagcagccatggcggcggcgccacgcagcaagagcgaaggcagacactcaacatcttcccttcccagcccatgcatgtggagccgtcgccgaagggggagattagtttagtcctgtccccggcgccggtgggatccaagcagcctaggtcaccggaccatcaccatcaccagcaggcggccatggaggagttggcggggagcaggaggcagcaggagcacctccacctgcagcaccaccaaccctttgctgccgctgctgagccagcagcacccgggatgatcaaagatgtcaagccactggccaagacgctgagaaggctggcccagaacagggaggctgcaaggaaaagcaggctaaggaagaaggcttacatccagcaactcgagtccagcaggatcagactagctcagctcgaacaagaactgcacactgcaagagctcagggagttttcttccccaacagtggcatcctcgctgaccaaggtgtcgccggcaaaggcgtccccatcggcggcatcgacggcctcagctcagaggcggcgatgttcgacgtggagtacgggcggtggcaggaggagcactaccggctgatgtacgagcttcgggcggcgctgcagcagcacctgccggagggggagctgcagatgtacgtggagagctgcctggctcaccacgacgagatggtgggcatcaaagagggcgccatcaagggcgacgtcttccacctcatctccggcgtctgggcggagccccgccgagcgctgcttcctctgggctcggcggcttccgcccctccgaagtcatcaag

SEQ ID NO: 33907 - DNA, 279 bp, Zea mays
  Peptide Sequence Number=SeqID_77282
atgaagaagggggaatcgacgggtacatttatagcgcagggaaaggagtccgcgtcgaggacaatcggttggcggggaagggaggaccccgagattcccggcgacgaccatggcgggattgcgcttctccgtcgcgggctcggttccgaggtgaacggtcgagctgacaacgcgggtcccacgaacagaggaagcaaggatgcggcagtggaagcggctgacgagacgggcccgcaaggcagtgagcgcgcgcaattatcgcatgaagccaccgactga

SEQ ID NO: 33908 - DNA, 297 bp, Zea mays
  Peptide Sequence Number=SeqID_77283
atggcggcgcagctaatttcagcgttagaaactagagacgggatcggtgattcatatgtacggaactacggatccgaacaatcaatgcaagatggaaacagcactctgccggccaatgctattcttttttttttgtggaaacaaaacaaactgcagcaatccaaacagctgcaacagtgtcggcttgtagccagccgaacacgcccggaagctgcgcgccactgggcgctgattgccacgcgattggtctggttcgtccaccctgacggcaaattgcccgcccgcccctttctttaa

SEQ ID NO: 33909 - DNA, 456 bp, Zea mays
  Peptide Sequence Number=SeqID_77284
atggcggagccgggcgacgggagtaggcggcggcgggaggcggaggcgccggtggtggcgctggagtgcgtggcggggagctccaaggcggaggagtggggaggcggcgcgggcgtcgtgcaggagggggacgtggtggaggccgtccgcgtcggccgcggctccggcggcgggggcgccgcggccgcgctggagctcgaggcgccattcaagggcgggcgcgccgggctgcacaaggcgctgcacgcggcgttcaagcgcggggacacctccgtggaggtgcgcgtgcggggcggcaggcagctgcaggcctgcatcgtgccgcaccacgccagtcccggcgccggcggcggaggggtcaggaagcagtacgtcctgcggtcgctgcacgaccccaactacttgctcggattcgtcgaccgccctcgagagcgagtgcctcgtcttacaaggtaa

SEQ ID NO: 33910 - DNA, 1110 bp, Zea mays
  Peptide Sequence Number=SeqID_77285
atgaccatagtgtggtcaccgtcaccgccccaattatatcttgccaccgtctctctcgttcttaccgttgcaactgcacatctcccctgcataccgttggagctgcacataagcccgcggaagatggagaagaagataggaacgaggagcacaagagtcgcgtcagccttgagcaaggcgcagctccaggatggctatgtcgcgtacccatgggacaagaagatgcgcgacacgctgcacacgcccaactccagctgctacctctcgatgcttgtcctgcccaaggctctggacagcaatgcctgtcactacgagtccttcgacgacaccgtggcgcgtgccaatgcatggttctactcttcgcaggccgccgggatacccatcgacttcatgaatgtgcagagcgaagctcttctcaccaagatatctggagagacagcgtccgcgtctgtgaattcgagctcattatctgatctgtcgaacgtcactaatgcgacgctctacggttttgaagattaccatggagtggatattggtgtggtaaaggcagcacggctttggtacagctgcgtaggaggagaattgctgctggaaatcccacttgaagaaggtgacacaaggcttggctttgctatcagccgaactgaagagggctttatctacatatcatctgtagtggaagatgacaaggaaagcgaggcaccatctacgcggtctgggctctgtgatctgttcaaccgggccaaggaggcgtcgaaactgctgatcatctcgagggtgtccaatgagaaggtcctaccttggatgatctccagttcaggggcagtccgctgcttcgacaccatctccctcagccagaaactctccttgcaccgcctcgcagtgcgccccatccagctgcatctacttgcctgggagaagccttctgctcccaacccagcagagagggccgtgcgttccccaaagctcaccatgccttcaacgctgctccctcacctacagcaaaaccttgtggagaccatagaaggcggagtagatgctgaagaggagtacgtggggaatttgtcgtttcggatcgatgatatctcatttgagagcagctgggtgtga

SEQ ID NO: 33911 - DNA, 1761 bp, Zea mays
  Peptide Sequence Number=SeqID_77286
atggccgtggtcgccgccgggggcgaggaggcctttgcccccgctgcgccttccacgtccggcgccccggcgtcgcgccaggacgtgcaggcggccatcgccaaggccgtcgagctgcgccagcttcacgccgccctcatccagcgcggcgcgcccaatgcccgcgccgccagccgcagcccggccgtcattcgcctcccgccactcgcgtcccccgcgcgctccagagcagcagacgaggagtacccagtttttactccggcctacgacgacgaggagcacgtagcagccgttgcaccgaaccacatttgcccggacaaccgaagccggtcggaaaactggactggggtcgccctggatcagggtggcagcgacgacgcggccttgtccgattacgacggcctccaagccttctcgtcctccaacagcgacgtgttcttcccttcctccaacgaccaccgtcttcggaacagaggcacggcgtacaagatccaccccgccttcatgcactcggcgccgtcggccgaccgcttcctgccgtccgccggccgggtggcctacacgtccgagctgaacctgccaccggcgacgtgcggcaacgcgttccggcccgccacgatcagcggcaccagggtgccacccccatcggcgcactcgcggacgaagcaaggagggccgccgcagatcctctcgtggctcttccccaagtcgagaaagaaagccaagccaccggagatgacgtcgccgacggccatcgagcgcggcaacatgccgcagctgctgaccgagtggggggcgctatctatggagtccctcaagaaagagctcgcggaggccaacgcgcaccgggacgccgccctgcacgaagctgccgaggtgaggtcgtcgctgggggagctggccaccaagctggtgagcgtggaagcgtactgctcggagctcaagaaggcactgcggcaggccaccaactcgccgtccgtctcccggagaccgacgaaatcgatcgaacccagccgagagctctcgatgccggtgagccacgaggtgatggtggaaggcttcttgcagatcgcgtcggaggcgcggctctctgtgaagcagctctgcaaggcgctgatccagcaggtgaacgaagagtccagtgacggcctgtccgacaagctgaacctgctccttcgcccgtaccagctcgcgctcagcagcggcagcgtcagcaaacactgctcgaaggccgtgctgtaccatcttgaggcgatcatgaaccaggtcatgttccaggacttcgagaaccccgcgttccagcggaacggctcgccgaggtgcctcgacccggcggaagacagccggcagagcttcgcagccttcgtggcgctgcgcaaccttagctggaacgaggttctgcggaagggcaccaagtactacagcgaggacttcagccgtttctgcgaccggaagatgagcgtcgtcgtggcgacgcttgcctggtcccggccgtggcccgagcagttgcttcagtgcttcttcgtcgccgccaagtgcgtctggctgctccacctgctggccttctccttcggcccgccgctgacgatcctgcgcgtccaagacggccgcgcatttgatgagctgtacatggaagacatcctgcatgacaggcagccggtgcagagtccttgtcaagtgaagataatggtgacgccggggttttacgtgcaagatagagtgctcaagtgcagggtcctcaaaacaagatcggcagcataa

SEQ ID NO: 33912 - DNA, 201 bp, Zea mays
  Peptide Sequence Number=SeqID_77287
atgagattgatggttctggttatgattatggtattggtaaggggtattctttccgtttggaaaggatacattgggttaataacttgggttaatgttaaaacctggctttctactagttgtcagcattgcaaccactgctcaggagaagatgaagctgtggaaggagacttccaggagttccaagactacgacgagttctag

SEQ ID NO: 33913 - DNA, 699 bp, Zea mays
  Peptide Sequence Number=SeqID_77288
atgaaccatccgaagggatctacagtggatgacaagggtaacatctatgtagccgatgccatgaacatggctattaggactgtgaggtcggcaaagtttatttcaaggaaacaatgggttgtagctggtgcagacgacatgttcattcgtgtctacaactacaataccatggacaaagttaaagtttttgaggctcatactgattacatcagatgtgttgcggtccatccaactctaccatatatgttgtcatcatctaatgacatgctaataaaactgtgggactgggataaagggtgggtgtgcactcaaatatttaagggacattcacactatgtgatgcaggttactttcaatccaaaggatattaacacctttgcaagtgcatcccttgaccgcactacaaagatatggagtttgggttctccagatccaaacttcacacttgatgggcatcaaaagggtgtcaactgtgttgactacttcactggtggtgacagaccctatttgattactggttctgatgactccaccgcaaagctccctataatcattactggatctgaagatggtacagttcgtatatggcattcgacaacttacagacttgagaacacactaaactatggccttgagagagtctgggctgttggatacatgaaggggtctagaaggtcaatgcttgttgcaacatcatag

SEQ ID NO: 33914 - DNA, 381 bp, Zea mays
  Peptide Sequence Number=SeqID_77289
atggggagggacgagatgctacggcgtagcctcgtggcgctggcggcggccgtggcgctcacggggctggccacggcgtcgctgcgcaaggcggcggtcacgtacggcttcggcatcctcgccatcgccggcgtcctgctcccggactgggagttcttcgaccgcgactactcccagtggctaacccccatgcccgcctcccgccgcacggccgccgccgcggctgccgaccgggagcacgacgtctggaaatttgttcctgttcttgttcctgtggattcgacacagcagatcgaatcgaatgcatgtcgatcgctgtatggtcctgaatatcatcgcattaattcttcatctacaatcataacaattgatgggccctga

SEQ ID NO: 33915 - DNA, 321 bp, Zea mays
  Peptide Sequence Number=SeqID_77290
atggcggacctagaggtgggctcaatttggtccgaggaggtcgggagggggctgcccgcggggaggtggcggagcttcgcggcggggttgccgtcggtgagctctgggcgagcaatcggggtgggggagtggtgtattgcgtttgcggcaagcgccgccgaggggacgctacggcggggcggtactggcgaggacgctggtcaaggggaggaggacggagcggtgccaaactttcctgtgcggcgaggagacggcggtgaagagacggtggtgaaggacggcggtgaagggacggcagggcgtcgtatgcggggaggatga

SEQ ID NO: 33916 - DNA, 252 bp, Zea mays
  Peptide Sequence Number=SeqID_77291
atgggaactaatgggcatctcgacctcgacacgggaggtaagtccgtggatcaaaagggggagaattcaaagcaaaaggacttcgtctttggggagagagtaagcccaaagcaaaaagacttcgtctttgggaaggttggacttgccttcgtcgaagctttcctggcacagaagacctacttccggaagttcgggctctggtccctcttccggggctacgggttccggatcaacgatccccgcttcttctag

SEQ ID NO: 33917 - DNA, 560 bp, Zea mays
  Peptide Sequence Number=SeqID_77292
atggcacaggggagtgttggtgaggctgggaagatgagcaggggaccggtgggcccggcggctgggcagctgtgcagggggagtggcttggcgttgcgcgcgctagggcgtggggcttggggcggtgcgcatgggagcgcgaggcgcgcaacgcggctgggcgagcgatcctgctcgcgcgccagggcgcaggccgaacggcgaagtgggccgccgcgcgcagggagccggagggagtgccgcgcgcaggggcgagccgccgcgcagggccccctggacgcgacgccgggcgggactgccgagagggtccgtcgaggggagagaggatgggtaagggaagagaggggagaggactcaccgggaaccgccgtgtgcagggacgacagcttctgcgcgatttggatctggggcgatttggatctggggagggagacgagaggttatgtgacggcagtggggatagatggggatagccaacggagcagcatgtcgtttgcgaggaaagatattttaatgatcccgcgaaaaggacacgagatctggaacaggctcgacgagag

SEQ ID NO: 33918 - DNA, 203 bp, Zea mays
  Peptide Sequence Number=SeqID_77293
atgtcgcgtgctgttcgctcacatcgtcacgcgctatttgctcgtggtcacacgtggtcgtgcgcgctttccgtgtgctccttcacacactgcgatccatttccgagcttcgaagaatcgacagtcaagcttggcgaccaagggatcgagctcttcgagttctacgaggctgaagaccctgagcatctgtttggtgaaggcaa

SEQ ID NO: 33919 - DNA, 153 bp, Zea mays
  Peptide Sequence Number=SeqID_77294
atggggtccaggcacagtgcttgctctgccgaggctgggtgccgaggttctttcgtcttgctttttagtcgccctcctgcggggagaggtaaagaagaaggcgtcaaggcggatctccaggagttccaggacttcgacgagttcgaggattag

SEQ ID NO: 33920 - DNA, 366 bp, Zea mays
  Peptide Sequence Number=SeqID_77295
atggacgagagttgcactcaactcctttcaagtgatccaatgatcaacttgaatatcacgtcgactgttgacgatttggagccgttggcgcaccggacagtccggtgctcccatcagaccgttggctcggccacgcgtcacgcgcggattgcgcggccgaccgttggctcaccggacagtctgctgagcaagcaagggtgtatcctggaggctgttattgaagcaagtgctactgaaattatcaatctcatggatagcctaaatgaatgggacagtaaagtgagcgatggtgactatggaagcacaatgtatagaggtgcaacagctattcttgaagatatgaaaaagcggaaatttacggcataa

SEQ ID NO: 33921 - DNA, 453 bp, Zea mays
  Peptide Sequence Number=SeqID_77296
atgacaaccttcaccttcgggtcccacgagctgcgcctcctctgcctccgtgccgcttccatgcttgtacagtggatgcagttatcggtgataaattctgtgcttgctctttcatttgctgaatcagctgttactggagtctgtaatgcagtggcgctccagattgttgtgacagttagtgtgtccaggggcagtcctgatgaacaactacctactcaacaccctgaaattgttaagggatgttcagtaattgagctaggatctgggattggcattactggcatattgtgcagccgtttctgcaaggaggttgtcttgactgatcacaatgatgaagttctggaggcaagttctattgcagtgttgacatccgagaaactagagtggggaaactcagatcatttaagcggtattattgaaaaacgtcctggtggatttgatcttgatccttga

SEQ ID NO: 33922 - DNA, 657 bp, Zea mays
  Peptide Sequence Number=SeqID_77297
atgcaagccggctcagagcggaagaagccaaactgccgtgcgcggtgcgtacaaccacccaacggttacaagcgactctccacttttgcccagaccaacgggcgaaaggggcgggcaaccatgcaggcggcatgcaaccgcgccaaggaccgggaaagggggataccccgaaaaggatccttccccgtgaaggaaccaggcttccgagcctccctactgatcagaggttcgaaggctggcccctcggaagggttcgacagccgcctcagatcgcgtgggccctacacccactactggtcagaggttcgaaggccggcccctcagaagggttcaacggccgcctcaggctactcgggctccgcgcccattactgatcaggggaacgatcttgtaacggaatcccatcggagggaggcatcgagccctcggaccccgtcgccaggggaccggctcaccggagacaccatgttcggcgcccatcgaggaggctcgggggctgctctcgcaaacccggctccggccgaaccgttgacagcgtcaacataccagcccgagaacttgggactcgaccgtacacccgggctacggccagctcgcatgagggacgaccagaccagccgtagcattacgcgaggcattaagacctcggaggagtga

SEQ ID NO: 33923 - DNA, 63 bp, Zea mays
  Peptide Sequence Number=SeqID_77298
atggattgctccatccgcgaggtatgtgtagtgacgaaagttgagtactactttggctcctga

SEQ ID NO: 33924 - DNA, 717 bp, Zea mays
  Peptide Sequence Number=SeqID_77299
atggcgccgggtgtcgactgccgactgccgacttctggcctggttttgaagcagacggcgaggacattcatgcctcgcactcctctgacccacagagagataagccctgcttccgtcttgctctgctctcccggcgacaacacgccatccaggcagcaagctgcaaacgcgccgtgcgcgaaggtgaagcctgggcgctgcaagatccagtaccgcggcatccggcagcggccgtggggcaagtgggcggcgaagatctgcgaccccgtgaagggtgtccgcgtctggctcggcacctaccccaccgtcgaggccgccgcgcgcgcatacgaccgcgccgcgaggcgcataaggggagccaaagccaaggtgaacttccacagcgacacctcctcctgcgtcaccgtgccgacgacggcgtcgaggtctactgctgctgccgccgcacaggccccggccgttctcccaccgcctaaggtggaggcacagactgagctgtccgacgaggtcaaggagttgtccgaggagctgatggcctatgagaactacacaaacttcctcggcatcccttacatggagggagggaccacagctgcaagtgccaccacagctgccgcctccgccgccgccgaagaatcgcaggtcccggctccggccgggctatggagcttcgaagattactactacccatcgtctcagtcgctctttactgaatga

SEQ ID NO: 33925 - DNA, 114 bp, Zea mays
  Peptide Sequence Number=SeqID_77300
atggcggactctggcagcccaaggaagcgggaggagaatgaagagggggacgacatcgtgtgcctggatccgtccttcttcgtggacagcagctacgagatgactgttaagtaa

SEQ ID NO: 33926 - DNA, 501 bp, Zea mays
  Peptide Sequence Number=SeqID_77301
atggacgagaaggagttctggcgcatgctcgacctcttccccgtcgtccgctcccgtgactattgcgtaatcctcctctcctccgccaggccccactatcactctccttttctctctgcctatgcagctaagtccggggttctgatttggggacgtcccaaatcccaagccgcgatctgtggcgtaccttttgagcatgaactgatgcaattttttttgggaggcaaatgtaggctgatcctggaacatctatcagaggaaccagacagcgatcacgagttcagctattgcttgcaggaggcagcgaagggcaatgacaaggactcatccgacgcacaagatttatttatgcagaagttgaagatggctgcagagaaaaagattggaacaacaaaagcagagttcttctgcaaggcatttgaagaaactcatgagaagcttgtttacaaagagctgaatttggatgctgctaagaagtttctgagcgcatatgagagctga

SEQ ID NO: 33927 - DNA, 486 bp, Zea mays
  Peptide Sequence Number=SeqID_77302
atgggcaagaacaacaagcgcaagcgtgagccgactcctccatccgaggacttcggtgactcggagtactcagaggaggagttctcctctgagtctgaggggtccccggctcccattcctctgcgtgagtcgtctgacgattcagacgactcccaggggcttgcggcggaggtctggacttacatctgggccgtcgagcgctccgggctcgagggcttggatgagtcggagtactcctcggacgaggaggactcgtccgaggaggacggtggcggcgatggcgaggacgacgacgacgacgacgaaggcgatggcggcggtgacggtgacggtggcggcaggggcgacagcaaggatggcgacggcggcagcagcaggggcggcggcggcggcagcaacaagggcagcaacaagcataactcagagttcttgaatcattcctccgcccaccttatttgtgaagttgatttccttggaataaggtag

SEQ ID NO: 33928 - DNA, 201 bp, Zea mays
  Peptide Sequence Number=SeqID_77303
atggcagaagcaagcttccacgtgttcgacgcgagctggcatccgggggcgcgctcagagcacgcccactgtaatcttgctgacggagagtacatcctcgtgccggagcaaggagctgctcaggaggtagccccagatccagcacccgagcctgcaccagaggacctgcctgccacagcctggaaggcaagccccggttaa

SEQ ID NO: 33929 - DNA, 249 bp, Zea mays
  Peptide Sequence Number=SeqID_77304
atggcgggtcgcggggaggtcgccggaggcaatggctggctcgggcgagtccggcgagggcattctagggttcatttggcgccattttgtccattaggtcgacaggttttgaagaggggatcaagtctttatgtgataatgggtaaaaggggtaaccctgggatggacaccctgagtaacacctggggtgttacagtagacctcttccttgattggtccattgaggaaggcactcttcacgtccatttg

SEQ ID NO: 33930 - DNA, 231 bp, Zea mays
  Peptide Sequence Number=SeqID_77305
atggctgggaaaaagtccctggccacgacggtgcggggcaacgtggtggagtgccagcgccggcgaacacccccaggtgctccaacgacgacctgcggccctcgacccggcataacaaacgcggagcacgccatgattacaatagggaaacaggcgtaccgcggggacgacgaggtcgacgccgacgatgtcactgcgccgtcggccgcgggacacgagccgcgcagttga

SEQ ID NO: 33931 - DNA, 585 bp, Zea mays
  Peptide Sequence Number=SeqID_77306
atggcgcagaaccatccaatccctaccaacggcccaagccgtggcggcgcgcactggcaggtggtggtgccatggtcggagcaaggcgcccggcccaccagtggtccaaacagaacaggtaggatatctaaacgatgtggagatcagggcaaatcagacggggatattcttaccaaggatcaggacgccaatcgcgaggtccctgatgagcagcagctcccaaattccgacggggaatcacggtcaaaccttggtttcacgcgcgccgtcgatttctcgcacatgatccaccgattcctacaatcctccacccaaagcgctgcttccttctctctgctccgactgccggtttcgctcggcagattgactagtagtggtgttgccttacttgagtccaacatcgaggcagcaatgacctggcatataaatataccgagccacggccaagatcgcacggctggccaggataccggcgcacggtggattcgggcaaatccagctgcaacggcctccgagaatttcagcaaggtttgttatagagtggccagggaatcgctgacgaaccgggcccacataggagattaa

SEQ ID NO: 33932 - DNA, 825 bp, Zea mays
  Peptide Sequence Number=SeqID_77307
atgaacgtaaatggaaatttgcagaatggaattgggattcagatgggtcaaattaaggcgatagaaatcaaggagaccgcggaaaaagggagaaataggaagagcgagaccgcggagaagaaaaggaacataaatcacggattcgtgggtatcctctgttggaacagtgaccccgtggcaaattcgccaagaacagagctccttcggaggaaggaccccaatggacacgagatggagaagatccaacggtgtacgcgtttcttcctagacggcccaagccgtggcggcgcgcactggcaggtggtggtgccatggtcggagcaaggcgcccggcccaccagtggtccaaaaagaacaggtagggtatctaaacgatgtggagatcagggcaaatcagacggggatattcttaccaaggatcaggacgccaatcgcgaggtccctgatgagcagcagctcccaaattccgacggggaatcacggtcaaaccttggtttcacgcgcgccatcgatttctcgcacctgatccatcgattcctacaatcctccacccaaagcgttgcttccttctctctgctccgactgccggtttcgcttggcagattgaatagtagtggtgttgccttacttgagtccaacatcgaggcagcaatgacctggcatataaatataccgagccacggccaagatcgcacggctggccaggataccggcgcacggtggattcgggcaaatccagctgcaacggcctccgagaatttcagcaaggtttgttatagagtggccagggaatcgctgacaaaccgggcccacataggagattaa

SEQ ID NO: 33933 - DNA, 333 bp, Zea mays
  Peptide Sequence Number=SeqID_77308
atgggtgtgaccaagggacgtcttgacgactcccaggggatagccgccgaggtgtggacgtacatccggtccgttgagcgcgccgggctcgaaggttcggatgagtcggaggtctcctcggacggggataactcttccgactcatccaaggaagggagcggcggcgacagtgatgacgagggcgatgagggcgatggcggtgacagcggcgatggcagtgacaacggcggcaacggtggcagaagcgaaggcagcggcaagggcggcgacgacgacaacggcaagggtggcagcagcagcagcaaggtcagtggcaaagcgccactggcttaa

SEQ ID NO: 33934 - DNA, 2193 bp, Zea mays
  Peptide Sequence Number=SeqID_77309
atgtggaggctcaaggtggcggagggcggcggcccgtggctacggtcgaccaacggcttcctcgggagagccgtgtgggaattcgaccccgaccttggcacattggacgagcgttcggagattgagaagatgcgccgggagttcactcagaaccgtttcacgcggagggagtcttccgatctcctcatgcgcatgcagtgcgcaaaggagaatggtcctcaacaagaacttccgcacatcaaccttcaagaggatgaacaggtcactgaagaaattattctcaagtcattaaggcgagctttggataagttctcttctctgcaagctagtgatgggcattggcctggtgattttagtggggtcatgtttatcatgccaggcttgaatgaagatggtggatggggcactcttatattaggctcaagcagcatgtttggcacatgttcaaattacgtcaccctaaggcttctcggtgaggagctaaatggcaagaacaatggattggctaaagggcgtacatggatcctaacccatggtggtgcaaccttggtaccccagtggggaaaaatatggctttcgatacttggagtgtacgattggtcgggaaataatccaattttccctgaactatggctatctccccaatttcttccatttcatccagggaaattctggtgcttaacccgtatggtttatctcccaatggcttacctttatggtaagaaattcgtgggcccaattacatcaactatacttgccatcagagaggagatctatgattcttcatatgaaaagattgactggagtgaggctcgtagaacttgtgcaaaggaagacctactctgtccaaggacaccactgcaaagtgctgtttggacttcactttacatgtatgtggaaccagtattgagctgctggcctatgaataagctaagggagagagctttgaggagtctcatggagcatatccattatgaagatgtgaacacacaatatgtctgcatatgtgcggtaaacaagattctaaacatggtctgctgctgggtagaagatccaaattcagacgcattcaagtgtcatcttgcaaggatacctgatttcttgtggctctcagaagatggcatgaaagcacaggaagctttacttttgctatattgcgttgacttcaccactgaagttcacccagtagaaaactttaggtgcaaggtatatgatggttgtcagagctgggagacagcttttataattcaagcattttgtgctacagatcttgtcaatgagtatggtccaactattcagagagcccatgagtttataaaacattcgcaggttctcaggaatcatcctggtgaccaaagttactggcatcgtcatacatcaaagggttcatggactctttcatctgtagacaatggatgggctgtctctgacactacagcagaagcactgaaggctgtactgctgctgtcaaaaatttcaaacaaccttgtcgggtatccattagagagaggaaggttgtatgatgctgttgattgccttctatcttttatgaatccagacggtaccttttcaacatatgaatgcaaaagaacttcttcatggatagagatcctcaatccttgtgagagttttccaaacatggttgttgatcatccgttaggaacttggggtgtatgtttcacttatgcggccttcttttcgatgaaaggattggtaactgcaggaagaacatatggaaatagcatgtctatcaggaaagcatgccagtttctattgtcgaagcagctcaattctggtggatggggagaaagccatttatctaatgaaactcaggttattacaccttcataccagattgagcgtgatccagcaccactacatcgtgctgcgaaagagctgatcaatatgcagatggaaacaggagagtttccacaacaagaacatgttggttgcttcaacaagtccctttttttcaattacccaaactatcgcaacatattccctatttgggcccttggacataaaaagcaaggcaacataagtgaactaaccttccttttcacctttaaattactcttcttaaagagattaattaaaggagagaagccttgggccaggatatcaccataccaggggccaggatatcacacttgtaaagcacaagccctcaacatatcttctaggatctggtag

SEQ ID NO: 33935 - DNA, 786 bp, Zea mays
  Peptide Sequence Number=SeqID_77310
agggatgaccaccagccttgtggtggagagaagcaagccgggctacggcctccccctgccctcagcttcaaggatgttcatcatccatgctggggaggagggcgagctgagttggggtcccgcctttcgcatgggctggcggcccgcttcttcctccagcattcgggggagaagggcgttcaccagccttgcggaggaggcaatctttgggtatgcgggaccggccgactgcaggtgtcgccggccgccgcgtgcccagttccccggcttggatggccttggcgccgcctccaacgctgcctcctgccttttggttggaacatggctgtccgtccaccgcacggacgatggtcgcgccgtgcgcaggttcgccacatccacggcttctcccgcgccgccggccgcaccagggggtcatacaagacgtcgtgcgccgtgggggcggcggccgcgttcttggatggtcttgtcctcactccctcagtgaggacgggagcgaggacctattcgcgcgtgctaaggcacccgccgcccaccggtgcagaggtgaccgctgtcatcggtgttgaggtggtcgccaccactgaggtggccaccaccgtcggtgctgaggtggtcgcctccgctggcgagcgctcagagctagctatcccgcgaccctactgggtggtggagcgtgccggcccacggtacgggaccaggctgagcgactacatgggctccggaccaccccaggagactaatgtccattctctagttccggtcccgaggttgtcggacccatag

SEQ ID NO: 33936 - DNA, 966 bp, Zea mays
  Peptide Sequence Number=SeqID_77311
atggcgagcggtaaaggtgctgagtcacccgataggggcgggggaaccatcctcctgatggtggcgctccacgtgctcagcatgcagtctgcaatctccgcccaagccttgcacaactcagcaagggcgtggtccatctcggtgttgagcatggcaactaggttgaccatgctgctcaatctgggattgccctcaccaactggtgagacaatcacgcctctggtactgctagtcgagcggcgaggtgtgtcggtccaaggcccgacgcagcaaggtgtcaagagcgtcatggaaatgacaaccgtgggcggcgtcacgagtgatgttcgggcgatccatccttctgtctcctactcctctgaaagctctgtgttgtggctcgaactgccaccgtcttcgtcgtctccgtcagggtctcctccagcagcagggtgccctatggtggtgcagggggcacctctagctgaggcgcaggggagggttgcctcccagactccacctcctattgaggtgagggggaagaatcctgttgtttctactcctggcatcggcgctcctgctcctcgtgcaggcggcggtgcagtctctccaggtggctcgactgtcctgtcacattgcggcgcagtggatgctccgcaaggcgagaggacaggaaagggatcaccgacttacgtgcagtgcatctatgacgggccatctacaaaagacatcgtaggcacaagagtgagaatagaactatatgaccagcaagtaaaccaaaagcaaagccacacggagaacggcacccgactgcactgcatgggcaggtctaagggcaccacgtggaaaggaaagataatacatcctaggatgcatcattgggtccggacctccacagagggacaccggacccctgtacgtacaagtctggagctcccaagaaggcatgtcgggtccctcgggtgggccccagctctctccgagtaa

SEQ ID NO: 33937 - DNA, 108 bp, Zea mays
  Peptide Sequence Number=SeqID_77312
atgaagggctccgcaactctcccccagctgggagggacccttcaaggctttgccgaaggtgtttcttcctgcaggaccttcggcgacgaagcacggtcccaacagtag

SEQ ID NO: 33938 - DNA, 363 bp, Zea mays
  Peptide Sequence Number=SeqID_77313
atggagtggtggagtgtgaaggctttcgggtacggaaccaggctaagcggccacacaggctccggaccaccccatggaacggggtcccgttctctggagccggctcccaggctgttggatctcccaactttcgtatcgggggccctaaactgcaagcctgactgctcaattcagatgtcgtcatgtcagtacagatgggaactgttgggaccgtgcttcgtcgccgaaggtcctgcaggaagaaacaccttcggcaaagcctgtttatacgagataccaaaattaccactcacgaagcttcggtattatggcgtatccgaagatgaaggatcgaaccgacttgaaagtagaatgactttttag

SEQ ID NO: 33939 - DNA, 207 bp, Zea mays
  Peptide Sequence Number=SeqID_77314
atggcgaaagagcgccaacccccacggggttgcgctcctctaacagcagcaagaagaagacaagattggcagcaccaccacgagcgcgagctctccgacggtgagatcgccagagggggcggccctaacgcggatccctccagagaacatcggcgcaccccatctggaggcccggaaggtggaagggtgaccgttggcgcgaagtag

SEQ ID NO: 33940 - DNA, 1197 bp, Zea mays
  Peptide Sequence Number=SeqID_77315
atgcaatcggcatgcaaccgcgccaagtgggcgcacccctttgactccaacgcgcctagcatggaggcccaggcccacaagtcatgcaaccggcacgctggttgctacgtgcgagcaactgcaccgcccctcgcgccactaccgcgcctcctcgactgcagaaccagtaccgcgactcgaggcaaccctgcgtatgacccaacagtgccagccaggcgcatcggtcacgggccagcgggcggaagcaacggtcacgtcgtcagccaagctcatgtcccctcatgggacagcgagggaaccctctcccacggcgtgaagacggcgcgcccgtgttccattcctcgaacggctcgcgcacgcgcaacggctgccccgcgaaccactcgccccgtcgcattaactccgcggcgggacaggcgacacctttggcaggagaagcggacaacgcttcgccttcgccataacgaccgcgtcaaaaaagggaccgggaaaggggataccctgaaagggatccttctccgcgaaggaaacgggccccgagcccccctactgatcagaggttcgaaggctggcccctcggaggggttcaatagccgcctcagagcgctcgggctccgcgcccactactggtcagaggttcgagggccggcccctcggaagggttcaacggccgcctcaggccactcgggctccacgcccactactgatcagggcgggaacgatcttgtaacggaatcccatcagagggaggcatcgagccctcggaccccgtcaaaaggggaccgggtccgacagatcacccgcagctcactggagacaccatgttcggcgccctccaagggcaacatggcgcttcccccctcctccttgcggaaaggcgacgcaggggtgggctcggactcgacctcggccttggaagacagactcgacctcgacctcgaaggagcctccacctcgcccaacccagggctcagaccgaccacgtcacaggaggcgccatcattaccctaccccaagctaactcaggctatggggaacaagaccggcgtcccatctggctggccccggctccagcgctcctacgacgaccacgacaccacacgaaccgggtgccaaaacctctccggctaccacgatggcatggccctcttacagaaggttggtcgcgcggggaaggacgggacgacgctcgcgtaa

SEQ ID NO: 33941 - DNA, 1773 bp, Zea mays
  Peptide Sequence Number=SeqID_77316
atggagatggaggccgtggagtcgcacggaggcgccgggcgccggacgcccaagagggatcgcggcatctcctgggcctgcgtcttcatcctggctttatatatggcctcgctcgccctcaaaccgtctggctgtggcctctgcactgcatgcacccgtacatgcattcatggcggcgatggcgggactcggccggacatcacaccagcgagtaactgcttccagttcatcgcctacttcgccgtgtcgacgaacctggtgaactacctcaaggaccgcctgcaccagggcagcaaagccgccgcgaacggcgtcaccaactggatgggcacgagcgccatcacgccgctcgtcgccgccttcctcgccgacgccttcctcggcagatactggaccatcgcgctcttcctggtcatctccgtcctggcctacgtggtgctcacggtgagcgcggcggcggcgctggagagcgcggccttctacgcggggctgtacctgctggcgctgggcggggcgctgcagccggtgctgtcgtcgttcggcgccgaccagttcgacgaggaggagcgcgggcgccagagctccttcttcaactggttctacctctccatcaacgtcggctcgctggtcggcggcaccgtgctggtgtgggtgcagtccagcgtcagctgggggctcgggtacggcatcccggcgctcttcagcgcgctggccgtcgcggcgttcctggccggcaccgccacgtaccgccgccaccagccgccggcaggcagcccgctcaccagggtcgcgcaggtcgtcgtcgccgcgtgcaggaagtgcggcgtccaggtgccggaagacgcgtccacgctgcacgagtgcgaggacgtcggcggcatgtccgcgatacaggggagccgccggctcgcgcacaccgatcagttcaggttcctggacaaggcagcgtcggtggagccatcggacgacaagtcgcgtccggcgagcgcgtggcgtctgtgcacggtgacgcaggtggaggagctcaagtgcgtgctccggctgctgccggtgtgggcgagcgggatcgtgttcgcggcggcgtacacgcagatgaccaccaccttcgtcctgcagggcgacacgctggacccgtacgtgggcggcttccgcgtgcccgccgccgtgctctccgtcttcgacacgctcagcgtcatgctgtgggtgccgctctacgaccgcctggtggtcccactggcgcggcgcgccacgggccacgaccgcgggttcacgcagctggcgcgcatgggcgtgggcctcgtcgtgctcaccgccgccatgctcgccgcgggggcgctggaggtggcgcggcgccgcgtcatcgcgcgccacgacatgtacgacaccaacacgggcgccggcggggacggcgagtacctgccgctgtccatcttctggcaggtgccgcagtacgtggtggtgggtgcgtcggaggtgttcacgttcataggccagatggagttcttctacgaccaggcgcccgacgcgatgcggagcctctgctcggggctctccatgacgtccttcgcgctcgggaactacgtcagctccgcgctcgtcaccgtggtggcgcgcgccaccgcgcggggcgggcgggatggctggatccccgacgacatcaaccgggcgcaccttgacaacttcttctggctgctggccatgctctgcgccggaaacttcggcgtctacctgctcatcgcacgatggtacacatacaagaagactgtggactag

SEQ ID NO: 33942 - DNA, 84 bp, Zea mays
  Peptide Sequence Number=SeqID_77317
atgttcttcctccccaacctgctgcccctgcccacagtcgcagccgcgagccgaccgacactcgtcgacgcggcggtatactag

SEQ ID NO: 33943 - DNA, 954 bp, Zea mays
  Peptide Sequence Number=SeqID_77318
atgcaggcggcatgcaaccgcgccaagtgggcgcaccccttcgactccaacgcgcccagcatggaggcccaggcccacaagtcatgcaaccggcgtgccggttgctacgtgcgagcaactgcaccgccacttgcgccactaccgcgcctcctcgactgcggaaccagtaccgcgactcgaggcaaccctgcgtatgacccaacagtgccagccaggcacgtcggtcacgggtcagtcagccgtgggagaaggcgcgacgggatcgggaaaaggggataccccgaaaagggatccttccccgcgaaaggaaacgggccccgagcccccctactgatcggaggttcaaaggctggcccctcggaggggttcaacagccgcctcagagcgctcgggctccacgcccactactggtcagaggctggccctcgaagggttcacaaccgcctcagacgcagagcgagggatgaccctgggtacgttcgatacataaccaaggctcgggccacgctcccgaggcgccataggaagctccgcctcgcccgacccaggtctcggactcgggctcagccccagaagacgacgaactccacctcgcccgacccagggctcggactcgggctcagccccggaagacgacgaactccgcctcgcccgacccagggctcggactcgggctcagccccggaagacgacgaactccgcctcgcccgaccccagggctcggagtcgggcttagccccggaagacgacgaactccgcctcgcccgaccccagggctcggactcagccctggcctcagccgacggtctccgcctcgcccgacccaggggcttggactcgacctcggcctcggaagacagactcgacctcgacctcggaggagcctccacctcgcctaacccagggctcagaccaaccacgtcacaggaggggccatcattaccctacccctag

SEQ ID NO: 33944 - DNA, 1125 bp, Zea mays
  Peptide Sequence Number=SeqID_77319
gagaccaccgcaacgcccaacccgacattttccgctgccgccaacggcgtcgcctccaaggacatccacatcgaccccaactcatcgctctccgtccgcatcttcctccccacgcccccgccgccttccccgcacgcccacctcctcgcgcacgcgcacccgcgccgcgccagcgaccccaccccgacgacccccgcgcccgcgcccgccaacggcgcgccgtaccgagggtacctcccgcacgccgtctcctcgccgcgcgccgccgcgtcggcgcgccggaggctgcccatcgtcgtgcagttccacggcggcggcttcgtcaccgggagcaacactgccgcggccaacgacgccttctgcaggagggtcgccaagctctgcgatgccattgtcgtcgccgtggggtacaggcttgcgccagagagccgataccctgccgcgttcgatgacggggtcaaggtgctcaagtggatcgccaagcaggccaatctcgccatgatgaccaaggtcgggggtggtgttgacaccttcggtgcatccactgttgagccgtggattgctgcacatggtgatccagctagatgtgttctacttggtgcaagctgtggtgcaaatattgctgattatgtcactcggaaggtggtcgaagatgggaaaccgtttgacccggttaaggttgttgcacaagttctgatgtatccatttttcatagggagtgttccgacacactcggaaattcggcttgcgaactcatacttctacgacaagtccacatgtttacttgcttggagactatttttgtcagagaaagagttcaacctagaccaccctgctgccaaccctctggcgcctagcagacgagctcccccactgaagtgcatgccgccgaccttgacagttattgccgagcatgactggatgagggatcgagcaattgcttactctgaggaactccgcaaggttaatgttgactcgccagttcttgactacaaggatacggttcatgagtttgcaaccctggatgtgttcctaaaaacaccacaggcccaggcctgtgccgaggacattgccatatggatgaagaaatatatatccctccgagggcatgagttctcgtattag

SEQ ID NO: 33945 - DNA, 441 bp, Zea mays
  Peptide Sequence Number=SeqID_77320
atggctttttccatgcagatccacacccaggaaacatccttatctgtggctttacttgattatggacaagtgaaagaaatgccagaagatttacggcttgcttatgcaaatcttgtagttgcaatggctgatgatgatttcttgagggctgaggaaagtttcagggagcttggtattcgaacatgggccatatctgacaacaagttagaagaattgtttcagttatccctgcgaatgtttgatacaagattaccaccaggtgtaactgttatgtcaccttttgctgatgattcttcgcttactaaaattggagtggagcttcaaaatcaagaaagcaaaagagaagttttctcaggagactgttttggtgaagtagggataggggctatcaaagaacatgatatacggacattctgtgatgaaagtatgaaacggaattag

SEQ ID NO: 33946 - DNA, 339 bp, Zea mays
  Peptide Sequence Number=SeqID_77321
atggccaagagccggagcgaagcgggggagctcagagtgaggctgacagcagccaagtccgacctcgggtgccataggaagctccgcctcgcccgaccccagggctcggactcggcctcggccccggaagacgacgaactccgcctcgcccgacctcagggctcggactcagccctggcctcagccgacggtctccgcctcgcccgacccaagggctcggacttgacctcgacctcggaagacagactcgacctcgacctcggaggagcctccgcctcgccctacccagggctcggaccgaccacgtcacaggaggggccatcattaccctacccctag

SEQ ID NO: 33947 - DNA, 405 bp, Zea mays
  Peptide Sequence Number=SeqID_77322
atgaccggggataaacaaagacaaaagctcaagcaaaagccatcaagcgaaatctcaaacacctacatcaaaaaggtgcacaaaaaggatgctacaccatatttgatcaagaagaaaaagaacggaaaggtgatagcaatcaaggccaacaagcaagccaacaaaggaaagggggccaaacgcatctgggtgccaaaggagataatttcaaccatgaaaagcaccaagaaggtttggatcccgaaagggaatttattgccaagtggattagtaaaaattgtggacccaaatttcccacccatgtctaagtggttttggttatttggtccaaaaataggaattcacaggatgcaaagagaattggaccaaggcaatgaggatgcaacacctcaaaagaagacataa

SEQ ID NO: 33948 - DNA, 496 bp, Zea mays
  Peptide Sequence Number=SeqID_77323
gcgctcgacgcgcgccgacagaagggccccaccgggcagtctcacgcgcgcgcgctcctcaccgctctgtcgcttacgtgtgggaccgctctgtctggttggccttccccgtcgcgctcgcgcaacagaccgcgcgacaacggcggactccgcgcgggaatcacgctggtccgggcaacggagtccgcgacccgacctccaaggctccaaccccgccgagatcctcgcgggactacctataaagaccggccacctcctctcgtccgtgacatcgagcgaaaagcaccaaggagcgccgccgccgtggatcgccgtcgttggggggtctcggctcttgaaatcgggtcgtggagtgtcgcattcacctggggaagccgtgtgtgccatcaatttgagttgaacgccgccaggactcgagcaatcgctcgtcgcactgcgattctccgccgcggtccgctcttcgtcgcggccagggtcgccgtggtatcgaacacag

SEQ ID NO: 33949 - DNA, 105 bp, Zea mays
  Peptide Sequence Number=SeqID_77324
atggccatgatgggttcaacatcacataagatgtacttctgtcagaaaggcttcggcatgatagcagaaaaggggaaccgacttaaagatgaaaaggcaaattag

SEQ ID NO: 33950 - DNA, 312 bp, Zea mays
  Peptide Sequence Number=SeqID_77325
atggcaaaaaggggaaacgccttacctgggccatggagctctgatcggctcacccaaccggcttgggccagaaaccacatggccgcgcatacacgtgacgagctgccggaattgtttaatgtattcatgggtggtgaggtcatgccgatgtcaggggtgacctcatctccatgggcacctgtaccactgacggttgggccccgaaactggtgcttgggtgtcggccttgccgaccccagctgggcgccgtcgtgtgtccctgttgccgtcgcgattaggagcggagggttgaagatggtgtttggaccgtag

SEQ ID NO: 33951 - DNA, 795 bp, Zea mays
  Peptide Sequence Number=SeqID_77326
atgacttctcacggatcctcggaaggagggaacgcacagtcccacacagacggacttgcacgagagggttttccccatatcttgtgggaggtacttcagggagcaggttacacgacgcctccccagtacgcggtgcagatgttcgagaagcaccgagtgccccgttgtagggatactatcgaggcgattgctctccacgggctgaccaccttctgtggttttcaccccttggagctgtctactcatcccattggcttgttccccacggagaaggaggacgacccaatgtggaaggaccgagtggagcatgccaaggatatatgggctctttacctagggcagactgctcacttgatggtgcgatgcatggatgccctgtatcgtctgcaagtgatgcgaggagaggcaatgtctcatctaatggcattgttagaggctaccaagatcaccttggataatagagaggaacttgtggtagacctatccactgagatggtggaaaaggacctacaggtggaacaaatgtccaacgagatccaggagcttgaggagctagtgggaaccagggagaacaccattgaggttctcgaggatcagctaatcaacactcagcagcaacttgcggaggctaaccaacatttggatatgcaccactgggagattcaggacatggaggccaacgaggatgtcgatatcgtgggaggagaggagccagagcctgcatccaacttggacactgctggctcagggagaccaccttcccccgagtcgagcgttgcctcgtttgctcactag

SEQ ID NO: 33952 - DNA, 765 bp, Zea mays
  Peptide Sequence Number=SeqID_77327
atggcgtttccttgccggtacgggtccgtcgtcgtgccgctgaggttgggcagacctgggcatgcttcgaagggctggcatgcgctgcgccgtggccggaattgttgccgccacggacccgtcgtcgaaactgggtgcttgggtgtcggccttgccgacttcggctgggcgctgtcgtgtgtccctgttgccgtcgcgattaggagcggagggttgaagatgcggaggtcgtcggtggacctgctccagccaaacaacggcggtagggttcaatcaggtgcacgaggacctccactaggtgatgtagaggctatgcgcgcaaggaatcgagaaatggttcagtggattacccggtccacgtgctccggcggggtcacgaaatccggcgagcgtgattgcactgttccggtggggctggtcctcggctcaagcttgggaaagctttatggcctctcaaggaagctatccgagggctcggatcgagtggaggtgggcgggaatggtttggccatggcgggcgcccttgggtggctctggtgggtcgcggggaggtcgccggagttgcgggctggctcgggaaggctaggcgtggtgcgaaaggggcgacagggaaggtgtccgtgtatgagggtgggctttatagccacttgcgggcacgacatgggcgcgggcacgggggcggccgagggcgcacgagggcgcgcgtgcgggcgtgctctgggcgtgttcccgagtgcctgcccacgtcgaatacgtggtggttaa

SEQ ID NO: 33953 - DNA, 765 bp, Zea mays
  Peptide Sequence Number=SeqID_77328
atgggcaaggtagaagatgctaccaaagtacagacgcttctgttcagtgccactctgccagattgggtgaataagctctctatgaggtttctgaaagttgacaggaaaacagttgatcttgtcggtaatgagaaactgaaggccagtgcatctgttaagcaccttgctcttccttgtaacaaggcagcaatggcacaagttattccagacattatccgatgttatagccaggatgtactaccccatagatggttgtttttcagtaatactggtgttgctgtcatgctttatgagcccagatataagcacagtgatagcagactagaaagggagtctggggttaaatttgagcatatctctgcgccacaacccactgatgtaacacaatctactggcagtgaagctgcagacgccatttcgagtgtgtcagacagtgttattcctatcttcaggcagcaagtagagcagttgctaagctcttccagtctgtctgcagctgacttgcttgccaaagcacttgcgaaggcagttgtttgctataacattccggtgatcgtgtttcttcatcgttggggtcatatttgttcacattggtgttatcttcagtttgacgtcggcaacgtggtcatggtgactggtgggaggaacaccgggcgtgtaggagtgatcaagaactgggagaagcacaagggcatcttcgaggaaaacatagaatggaattcaaatttggtggtcgcaaaagtgtggagacttgaattcatataa

SEQ ID NO: 33954 - DNA, 423 bp, Zea mays
  Peptide Sequence Number=SeqID_77329
atggttttcattagggtttggcagctcggtttcgaacaacagggaaggtggccattgggcatacctggtgggcggtgggcacttatcgccgctgaagggccggccgacaaagggggaaaggggagaaaggttacacaaacacgtgctcgcctttggaccttcccgacgatctcgctagggttccgcgatggcgacatcgcgttcctgagctcctgcgtcgacgcgctcctggactcggcgtgtttcgtcgcagcacatgcagcagaggcagtcagctacgtggttgcaacagccggatcccttttggagcagtttgaagtgagacttcagaatggccttgaatgtgtaggtgcctacattaagtacatccgccctcaggatgctagatgggatgccaaggagtttgataatgagactccatag

SEQ ID NO: 33955 - DNA, 216 bp, Zea mays
  Peptide Sequence Number=SeqID_77330
atggggggttgctcacctcgagtggagactcaggagcgcttgagcgacggcgcggacgtagggaggcctcgtgtcgacggcggtggggcttcggctgcacagggagaacaccggggactcaagctgtttcccgagtacctctctgtaaggacctgttcgttggataaccacccaggaaaacagtacaaccatgagggtggaatgggatgcccttag

SEQ ID NO: 33956 - DNA, 405 bp, Zea mays
  Peptide Sequence Number=SeqID_77331
atgcagcgcctttccctcgggtccccggccgggaagaactcccgcctaagcgtggccgccgacgaggaggcagaggcgacggacgagaaggcggcgaaggctatggtcagggcccgggcgctgaacaggtccatccacttggtccccgtcctcactctcctgtgcttcctcgtcctcttcctgctgtcccacgacccctccgcggcactcaccgattcgcccgtgctggccgcggccaccaccgtcaccgtcactgcacgccccttggaggccgccgtcgtcgctggtggagcggacgcgacggtcgcgtccagtggcgtgtaccggcggctgaaggaggacccgaggcagcagcagcagcagcagccccacgggcggaggctggggatgtcgcggcggcggtga

SEQ ID NO: 33957 - DNA, 498 bp, Zea mays
  Peptide Sequence Number=SeqID_77332
atggccgacgatgagctatccggccaaccaaggcccaaactgcacaccagacccccctacgcaaggaggagaactaggcgaaccctatggtggccctctaccacaaatatggttgtgccccggttcctagtgccacagcgaagttctacgagtcacgctcatgcctcgcacgatggtcgaggagagggtgaccgcggaggccaattccctagacccggctatggcagtgttcgtcgacggtgtccaacaaggcatggcaagatgggatgggtgcacgaagggatagcggcgcctggtgtttatacccgtgaggactccgcaacggcccgagaagagggggaaatccggtcagtggagcgcgcgagatttccagcagcgatctcgccgcgatctgttgctgtcgagggagcagaagagaaaaatggggtcactgcgccctgggccccacgcaccagcgtctcaacggtgtggcatagaaaacaaggatacatggggtag

SEQ ID NO: 33958 - DNA, 507 bp, Zea mays
  Peptide Sequence Number=SeqID_77333
atgccccggatgatggtcgaggagaggggtgaccgcggcagccaattccctagacccggtcgtggcagtgttcgtcgacggtgtccaacaaggcacgacaagatgggatgggtgcacgaagggatagaggcgcctggtgtttatacccgtgaggactccacaacggcccgagaagagggggaaatcaggtcagtggagcgcgcgatattttcggcggtgagctcaccgcgatctgttgcggtcgggggagaagaagagaaaaatggggtcactgcgccctgggccccattcaccaccgtctcaacaatgagtcaagcacccgcgcgcggatcggatgaggcacagtcgaacggggcccactgtcagggagaaaagagaaagaggtacacggagagggggagactggacagcggcccgccagtcagtgaaacggcgctagtgggctatgcgcgagtggaggagaagggaagtgggccgaatgccagatatgcggcccaatttagatag

SEQ ID NO: 33959 - DNA, 336 bp, Zea mays
  Peptide Sequence Number=SeqID_77334
atggaggaagtggattatgaagttagggggaggattgtcgatgtttgggactcgactgcgcacccggggttacccctcaaggccgtcgagcgctccgggctcgagggctcggatgagtcagagatctcctcggacgaggagaactcctctgactcgtccgaggaggagagcggcggtgacgacgacgacgagggcgacgacggcgatggaggcgacggcggcgatgatggcgacagcgacggcaagggcgacgacgacggcgacaagggcgacagcggcagcagcaagggtgacggcggcagcagcaaggccagtggcaaagcaccactggtttaa

SEQ ID NO: 33960 - DNA, 1746 bp, Zea mays
  Peptide Sequence Number=SeqID_77335
atgccctcaccttcctccctccatcacttctcgccaaggctcccgctcgcctctacaaatggcaaggccacgcccttccacttccaccaattcactaccaacgacgtacaagccaccaccaaccagcaggagctcatccggatgggcgacgcggctattgccgtcgtgcatgaggctgatgaggaggagcaggagcacatcttccggagccggttcccgcctgtggacctgccggacgacgtcactgtgccggagttcgtactggccggcgccgaggcctacgcggacaaggtggcgctcgtggaggccgcgccgggggggcggtcctacacctacggcgaggtggcccgggacgtggcgcggttcgccagggcgctgcggtccgtgggcgtccgcaagggccacgtagtggtggtcgcgctcccgaacctcgcggtgtaccccgtggtgagccttgggatcatgtccgcaggcgcggtcttctctggtgtgaacccgcgcgccatcgccgcggagatcaagaagcaggtggaagactcggatgccaagctcgtggtcaccaacgaggttgcctacgacaaggtgaaggacgcgggcgtgccggtgatcggcatcggggacgacatggagcgcctccccggtgcgatcagctgggacgagctcctcgccgccgcggaccgcacgggcgcgccggtggtggcgctggacccggtgcagcagtccgacctgtgcgcactcccctactcgtccggcacgacgggggtgtccaagggcgtgatgctgagccaccggaacctggtctccaacctctgctcgtctatgttcgcggtcggggaggagctgggcactgtggtggtgatggaccgcttcgacctgcgcaccttcctgggcgcgctggtgacgcaccgcgtgatgttcgcgccggtggtgccgcccgtgatgctggccatggtgaagagccccgtggccgacgatttcgacctctccggcctcgccctcaggtccatcatgacggctgccgcgcccctcgcgccggacctcctcgcggccttcgagaagaagttcccgggcgtgcaggtggaggaggcgtacgggctcacggagcacagctgcatcacgctgacgcacgccgcgtccggcgacgacgcgcggcaggggcccgtccaggtcgccaagaagaactcggttgggttcatcctgcccaacctggaggtgaagttcgtcgaccccgacacgggccggtcgctgcccaagaacacgcccggcgagatctgcgtccggagtcaggccgtgatgcagggctactacaggaagaaggaggagacggagcgcaccatcgatgccaaggggtggctccataccggcgacgtcggctacatcgacgacgacggcgacgtgttcatcgtcgaccggatcaaggagctcatcaagtacaagggcttccaggtcgctcctgccgagctggaggccattctcctgtcccacccgtcggtccaagatgcggccgtcttcggcctgccggacgaggaggctggcgaggtcccggtgtcgtgcgtggtgcggcggtgtggcgcgtcggagagcgaagcggacatcatggcgtacgtggcgggccgcgtggcgtcgtacaagaagctccggctgctgcagttcgtggacgtcatccacaagtcggtgtcaggcaagatcctgcggcggcagctccgggacgagttcgttagcaggaccaaaacggcggcagcctag

SEQ ID NO: 33961 - DNA, 1464 bp, Zea mays
  Peptide Sequence Number=SeqID_77336
atgtcggagaaagatttgacggagttttcgcgtgctggccaggaagcagagcaggaaccagagtcggagccgcagcgcaagtgggtggccctcgtctccgttgtcgtcttcagcaaagaggacgatcggacccaggagatcgtcctcggcaccgacgtgctgctcgacctccacgacccgccgctagcctcctacctggtgctgcatccccgcctcgcccctaactccaggcgtcccgacgagccgctgtccgcctacatcctcgccgccaataacggctccgcctgcatcctcctccaggtcgtctcaggcaaccgcctggacttcttcctctgcgacacgcacagtcgtaccgtcgacatcgtcgccccggtgtcctgccatcttcggacagaccaggacatcgacatccgcccccacctcagcatcggcctcgtcgccgacccgtacgaacgcggccacaacgtgatcttccagcttcaccccaccacctccttgtaccaccagagcaggctcctcgtctaccccaccgccagacgccggtggttcgtccttcccattcccatcgcccgtcaagcggcccacatgtgcaaccccttctccgagaacagcgcgctcgcccacgacggccgcctctggtgggtcgccctcgcctatggcgtattcttctgcgacctcttcacgccctcctgcgcctggcgccccgagctgcgcttcctcccgcttccggccgactgccagatggacggctacgtcgccttcgagccccgcgtcaggaccctcctccaccagcggcgctgcgtcaggaccagcgagggcaagctgcgattcgtcgagatccgcggcctctcctacgacgacccaccccgggacccggctaaccccaccgtctggatgtggacgctccaagacccggagggcccggatccctggacgttcgagtacgaggtgcccttcgccgaaatttgggacaacgagacctacgccgacgccggcctgccgccgggcgaggtgccccacgtcgctcttgtcgaccccaacgatcactgcgtcgtctacttcttacagggctccaagctcttctccttggacgtgcgcaagaagcaggtcatcgcctgcaaggaatcccttatagaccgtgatcaagtcatattgttccaatcctcccgccccgtcgtcgatgcctgggagctgccgccgccaccacctacgttctcgggagacgacgacgaccttttaccagaagatgttttgtctgaccgggaagagaaacgccaggtgaacgagtatgttcaatcttggctagaccaagtctggttggagtggacgaggagggacgcggacacgacggacgagggggcaccaccaccatctgatgaaccacctgatcactcgggtgtccaacaagctggtgatgagccggagatacaagctcctgggacagggagcccaggggcactgtga

SEQ ID NO: 33962 - DNA, 240 bp, Zea mays
  Peptide Sequence Number=SeqID_77337
atggcccccaagagagcaacctcgaaggctgctgcatccatcgacaacgcggcgaaggcagcactcctggcggagaagaaaggcaaagccctcgcggacaacgcccccaggaggcctttgaagatgatgctgtcaacagcaagagacagcgccaggataaccccacccccgatggcactatgcgcacttgcagttccgaggatgcaccgcaagcaccaccaccaggcttcgctcccctag

SEQ ID NO: 33963 - DNA, 438 bp, Zea mays
  Peptide Sequence Number=SeqID_77338
atggcgtctgcgtgtggagcgctgcgcaagtcgacatccctggcatcgaagcgaagtcttcttgtttgggtgctggcggtggggggttgtgacgtggaggatttgggtggtccggaggcggtggtggtagaacctgcacctcttgatggtgatggtaatcattattgggttgatgctggatttgctcgttatggtagggttgtcagtgttgttaggggtggtaatcttcgtcgtgaaacaagaaatagaatcatcgtggctgttgggtccgtcctcggccccttcgtcttgcgccattgccgcggccttgaggggggtattcctgatggcgtgtgggctctctggctgggtgctgattggctatgggtccttgggcttcctctgggattcaactttgcgttgatggagctcctcagacctgtcatacttctcaactag

SEQ ID NO: 33964 - DNA, 297 bp, Zea mays
  Peptide Sequence Number=SeqID_77339
atggtgctggagattgtggtctttccttaccaaggggaaactactctaaggctatcgaaaggcaagggggataataagacatgcaaggacttgcaaggtgtcaaagaaggggaagcagtcaatgatgaagtaggtgaggcattatctccgaacagggatggaaaagaggaggcttcaaagggtaggttcaaggtaagcggaaggcaagggaatagatatcatgtgggtgtaaaggtgataacagacaaggatgtaggagaggaggtaaatgggtataagaacgaaggatataaatag

SEQ ID NO: 33965 - DNA, 177 bp, Zea mays
  Peptide Sequence Number=SeqID_77340
atgggtaactcacaactctcaaactgggtcgaaagaaaggggaggcttctaaaggataagttcaaggtgaggtcgagagatgagatcagtaaagagaataccccaccagagtgcaaggatggagttgaagagctcgcgagcgacttggaggaggatgacgaccaccggtaccactag

SEQ ID NO: 33966 - DNA, 111 bp, Zea mays
  Peptide Sequence Number=SeqID_77341
atggggtccaggcacagtgcttgctctgccgaggctgggtgccgaggtaaagaagaaggcgtcgaggtggatctccaggagttccaagacgttgatgagttcgaggattag

SEQ ID NO: 33967 - DNA, 543 bp, Zea mays
  Peptide Sequence Number=SeqID_77342
atgggtgtgggcaagggacgacttgcgccttcacacatcttactgccgcttgttgcttactctcttcttttctactccaccattggcaagagcaaagaagggcggaagttcgttgcaccactctggcgacaagcggaagcgcgagccgactcctccctcggaggacttcggcgattccgagtacttggaggaggagttctcctccaagtccgagggtcgccggtccatgcctctcccccggcgtcgtctgatgactcagacgattcccaggggattgttgcggaggtgtggacatacatccgggccatcgagcgcgctgggctcgagggctcgaatgagtcagaggtctcctcggacaagggggactcctctgactcgtccgaggaggggagcgacgatgacgacggcggcgagggcgatggcaacgatgggggcgacggtgatggcgacggcagcaagggtgacggcaagggcgacggcaaaggcgacggtggtagcggcagcggcaagggcggtagtggcggtggcaaggccagtggctaa

SEQ ID NO: 33968 - DNA, 507 bp, Zea mays
  Peptide Sequence Number=SeqID_77343
atggcctcccccggactccggacgccgagggctatcggtggctgttcactcgggcagctaatcatcttctacctctcgctcatccgccgagtgatctacgacacgccatcaacagtcggcgagacgcacggagctccatcaacgcctcgcgcgaatgccgacacgagaacgagatccggcgctgagaagaatatgatcgggatcacgacatccctgcgcggagtcaggccactagaattgagtcggcaacggcttcgactggtggcacaacccggggacggtcgaggcaccacgacaacaactcccctccccgggatagacatcatcatcgacgataggaggacacgtgtggagtatcgacgctcactccacgcctcagggccattcaatggccccctaacttcaaagtctccaatgtcgacaagtatgagcctaagcaggatccgggaggctggttggccgtctacaccaccgccacccgagccgctggggcaaccgaagatgtga

SEQ ID NO: 33969 - DNA, 276 bp, Zea mays
  Peptide Sequence Number=SeqID_77344
atgaaccaaccgcgccaggagaagaacctcttcagcgagaatctcgccgacgaaggaaccgacgccgaaatattcggcgacatcacgaagctggagagcgggacccggcgcagctcgtgtcacgagatgaggtctcggagatgggagagactccagaagaacgggtcttcagggaaaggaggaattcccgacgatgtgatcgtcggcaacctcaagagcgggctgagcaggaagcaagacaacgccaagagaatcctcttttcagatgaaacctga

SEQ ID NO: 33970 - DNA, 261 bp, Zea mays
  Peptide Sequence Number=SeqID_77345
atgacggggcccaaggcatatagcaaccccgctgtctatagccgcctaagtgcgagcaaggagcacgagatcgagcccagccatacgacctcggcaaaacagctcacatcatcggatacaacaactccagagacaatctgggcggcatccaacaaccctcatgatcgtccagcccatcgccgcaccagtccaaccacccacctcgctgagatactttgtgcacatgatcttatctttgttagtgttgttaatactttgtga

SEQ ID NO: 33971 - DNA, 462 bp, Zea mays
  Peptide Sequence Number=SeqID_77346
atgggcaagaacaataaacgcaagcgtgagccgactcctccgtcggaggatttcggcgactcggaatactcggaggaggagttctcctccgagtccaagggatctccggctcccgtctctcccccggcgtcgtctgatgattcagacgactcccaggggattgccgcggaggtctggacgtacatccgggccgtcgagcgatccgggctcgagggctcggatgagtctgagttctcctcggacgaggaggactcggacgacggcgaggacgaagatgacgatgatgacgacggcgacgacgacgatgatggcgacggcgacggcagcaatggcggcgggggcagcggcggcaagggcggcactagaggcggcagcagcacgggcagcaccagaggcggcagcagcaagggcagcaccaggggcggcggcggcaagggcagcagcagcaaggccagtggctaa

SEQ ID NO: 33972 - DNA, 459 bp, Zea mays
  Peptide Sequence Number=SeqID_77347
atggagactatctccacgctcttcgctctagccgacaagtgcgccagagacgctgaaggtcgggcatggcactcggccccacaaaccggggtcgcccaggcaggtggctcgggtgccgtcccccgggacggtaaaaaaaagaagggccgcgaccacgagaagccgtggtcaaccactctagtcgtcatagctgcggttgagggccggggcgaccacaacaagcgcccacggccgcagaggggtaacagcggctcatgccctatacaccccaacagtcgccatagcgccgcggagtgtcgcgagatcatcgacctcgcgaaacatgtcagcaagcggcgtgagcagtctcccaaggacggctccccacctcgtcgtcgacctggcaaggaaagggtcgacgacgcgaggtggccgtggttgaacgggacctctggtatcagtcacccgagggggtcctga

SEQ ID NO: 33973 - DNA, 753 bp, Zea mays
  Peptide Sequence Number=SeqID_77348
atggataatatggcagaggtatctgttgtgtcggataattatgagcaggcggcggcgggggagagggagctgccgagcaacgggtcgccgccggtggtggatgatgccggcgtccagggcctccgcgaccgccggatgcggctctcggtcggggtcgcgcgagagttcttggcgctgcaggaccgcctcgggttcgacaaggccagcaagaccctgaactggctcctcgcccagtccaagccgcccatcgactgcctcgtcgacgccgccgaccaggtggctgtagtcactggaggacgaccgacgctggtgaaggggagagagcaggggagcaactcaagcacttgctgtttgacagacttgagggctggagtgctacttccagtattgcttgcaggtcgaggagttgatgagatgcaacggccgaatgccaagattctaggagttgggaagaccacttctcaacaagaaataaagaaggcgtatcacaaattggctctgcgcctccacccagataagaatcctggggatgaggcattggtgggagaagcagcaaacaatcttcaggagtacttcagaacaatgtacaagaaagtcgcggaggctgacattgaagaatttgaagctaaatatagagggtcagattatgagaaaacggacttgaaggacctctacacaaaatataagggcaacatgaacaggaataattatctcttatatcatattgtaaaatctgaaatagttctccagtag

SEQ ID NO: 33974 - DNA, 405 bp, Zea mays
  Peptide Sequence Number=SeqID_77349
atggggctgggagatgtagatgtcggccattggccacagtgcaccacgcggtcaaggacacgagagatcctgcaggatctgggatggcctagggcgatcccatgcgggcgcggctctcacaactcatatctctccccctttggcgtcaaacaccaaaagggaacccgaacctacacatcagaagagggaggaggtggcgggggcgcatccggtcgcggtcgtggcagtagagcgaacaccagctgtgggtcagagtcagtctcggatcaaggatctgctgtagaagctgaagctggtactgactcagacggaggctgcgctgcaggagctgcccgagctgaagaagtcatagacaccgccacaacagcagtggtaacagcaggagctggtggcattggcggctga

SEQ ID NO: 33975 - DNA, 465 bp, Zea mays
  Peptide Sequence Number=SeqID_77350
atgggcgcgattaaggtcaaggctcagtccactcaagggacacgatctcgcctcgcccgagcccagcctcgggcaaaggcagccgaccccggaggattcacgtctcgcccgaggaccccctcaagcaacggacacagctttggctcgcccgaggcccagtcttcgcagagaagcaaccttggccagatcgccacgccaaccgaccgaatcgcaggagcatttaatgcaaagggctcggactcaaccacgactcagaagacgacggactctgcctcgcctgaccccagggctcggacacagcctcggcctcggaagacggtctccgcatcgcccgacccggggctcggactcgacctcgacctcggaagacagactcgacctcgacctcggaggagcctccgcctcacccgacctagggctcggaccgaccacgtcataggggggccatcattaccctacccctag

SEQ ID NO: 33976 - DNA, 549 bp, Zea mays
  Peptide Sequence Number=SeqID_77351
atggcgcgacgacggcccgggtcgacggtggcggacccctgcggcggcacggagggcggcgggtaccccatatatagaattccaacagggccaacattgaaggatctcgatgcctgttttttgacattccattgcctagcaacaccttgcaaggattgtgaccctcctacgctagcatgccctggctttgggggaattaaccgcggcaaaacggcagctgggaaactatctttgcctatctttgggctggcaccttacaaattacgtgcctccatttggacatctgacaaaacccaagaacgggaccgcgtcacctctctgatgcaggaggctgacagctggctccgcacaatacaagtgtccattgtcgaatcaaatcatattcttaatgaagtgaatacccacatccttccttcccacaatgatctcaccccaataactacaatagctggtggaagtgttgccaacacaatccgtgggctctcagctggttttggaatatcaactggggactattgtttgtcaacaatacgagctttagtggtgtag

SEQ ID NO: 33977 - DNA, 663 bp, Zea mays
  Peptide Sequence Number=SeqID_77352
atgggtcagaggacacttgccttcaccaaactgctgatcagggacttcctctgcaacttcctcaggaaacatagactgctcgttgtctacgtaaagtccgaggacctaactgtgagaatccagggacggcgggttaaatttcagaaaaccgggggtctctttaagaaaacgcgcgggcgaaggggtatcgggctcctacggccgtcagatctcagatcgacgcgcaggattagatccgcgggcgggcgcgcgagcgcgcggcggcctgagcggctgacaggcggggccggcgggcagcgcgggcgcgggcggctgacaggcggggccagcgggcagcgcgggcgcgggtgggctgacaggcggggccagcgggcagagcgggcgcggggtgtgggggaagtgggccctgggccgttggatctccggtgggcggccaggattgggctcgggctatttaaaatagagccatccgatttgagatggacggcggggatggggcggctggcttctgtccccttctccagccagcagagacggcggcggccgcacccgcggcggagaatctcgccggagacgagggcgcgggggctctgcgggtccttagggcgaccggagtggcctgggaggttggggaaagcgcggggaatcctcaggcggggctag

SEQ ID NO: 33978 - DNA, 696 bp, Zea mays
  Peptide Sequence Number=SeqID_77353
atgaccaccatcagcgtaccgcactctgtcttttcacaacaagttcattcaatatacttaggttataaaattttatttgatgcactgatttctgtttatgagaaccaggttgctgtatcaagaaggatgtcgttattcgaggactgttctcagctattgtttgaactgcttgatgcttcgttgaatgccacaacatctccagattgttcagtgaaaatggcatatgttttaactaatgtatcattgacctatatggcgaaactgcgggatgaaagattcatatgcccagctggtacagattatgatgtggttacttgccttgacattatttcatcaaagcagctaacaaatgcagcttgtaactcattgttattcaagcttgtgatggcaacattaacaaatgaatcatctgaaatcttgagaagacggcaatatgcattattactgagttatttgcagtattgtagcagcattctggactctgatgtccctccatctgttctttggttcttgctactggaggagcaagatggtgatgatgaggacatcactcttcaaaaggttctcaaggagcacaatgaattagcacatgccaacatttccatcataaggaaggaagctcaagctatcgttgatttggttgaagttacagatactgctcttcttgctctcattgaaaactttacaccactgtaa

SEQ ID NO: 33979 - DNA, 1029 bp, Zea mays
  Peptide Sequence Number=SeqID_77354
atggttttgatggagccagccgtattgaaccgtgaaagagttgcattggacaagaaaaacaggatgcctatgttgttcgacgactatagcgatgaagatttttatggggtacaacggaagtatagtattgtcgctcgagttgaagttaaattcccgattgaaccacgttatcgtgacaggcaacattacattttgtctgacatcaatggagccaagatcgaggccattgcaactcggtatgagatagtcaaatacttcaacagtttgctccatgaaaagcatgtctacaagatgcacaacgtatggtttggtcttaatccgggtgcatttaattttcgacatctaaatggtaccatggagttgtatttcacccaccaaactgtcgtagagccatatgctgttccagttcaaatgccaccatttccaaaacatatattcttgaaccttgatgatattgccgagctgccaaacaggactttagttgacattatggctattgtagtccacttggatacaatccatcgcacaatgtggggtacattcaggaagattgttataatggatgctaggtggtctttacataccattaaagtttggggcgatttactaaacaaaaatgcactccgctgggaattggctaatgagaattatagcatcataattgggaccatgtttcggcggttcagaaaacaagtcatatcatttcacccttggttcttgcagtattatttttatgctcatgttttctcgggtactgttcttgttatagatcagatgggacataatgccggtcgcaaaccattcacagacatctctagcaatatcattagaggtgatcaaaatgaattgctcggaccaatggtcgatgctaaggagcgtaagaggaaaagggatagggaaagatatgcagcgatgtccattgaacaaaaaaacgagaagaataggaagcatcgtgaagcacgtcaacgaaacaagggacacaatgtgatgcccaatgtgtcaggacgtgatgaaaacgtccaattttaa

SEQ ID NO: 33980 - DNA, 2247 bp, Zea mays
  Peptide Sequence Number=SeqID_77355
atggctaagagacaatcaattgaagtgttggacaacagcatgtgtgatatcatgggacgccctgatctgccctttggtgggaagactattgtgtttgggggagatttcagacaagtactccctgttgtacgtaaggggtcaagggctcagatagttgcttcctctctacagagttcttacctatgggaatcaatgtgccacctaaagcttgttcgcaacatgagagcaaagagcgacccatggtttgcagaatatttgttgcgtgtcggtggtggaactgaggaagtgaacaacaatggtgatgttcgtcttccagatgaggtatgtgtgccatataccggtgatgaccgcgaccttgacagattgatagatgacatttaccccagtctaaacgaaaacatgtctaatacaagctacatcacttcaagagcaatattgactactcggaacgactgggtggatatgataaatatgaggatgatcgatcgtttccaacgggagcagatgatgtaccatagctttgacaccgcggtggacgatcctaataactattatccatcggaattcctaaacatgctgactcctaatggactacccccgcacgttctgaagctcaaaattgggtgcccaatcatgttgcttaggaatatagaccctgctaacggactttgcaacagtacacggctggtgcatgctggaatgcgggttttcttgcctcgtatacccgtgtgcccttctgatgacgagatgttccctttccattttaaaaggaagcagtttccgctatatgttgctctctcaagggccacaactcgattgaatgtgaagggtgatcttgcactcatcgattggattaaagaaatcccttgtgaaccaagggtagaagtcgtgcttattgatgatgcctttgtggaaaggaagtggatggaatgcctatttcaaccggacgcatatctaggtgatgaggtgatagactgttacataaatttaataaaagctcaagagcatctaaaatgccgatctggaggtcgtgtacacatagaaaatgcttttcagtttaactttctaaagcgagacggtgatgttgaaactaaaacagatgagttatatccaagtaaagacatggcacaaatatctagcgctaaaagaagggttttactttatcgagaccatgacatggtgtttattccaataaatatccgagaaatgcactggtatcttgccgtgatcaatgcaagaaatatggagatgcaagtgctcgactcacttggtacatcatccggtcgcaatgacctcattgacactgatgacatgtcacactttaggaaaaaattggctgctatattactatcttcagatataaacaagagaaaggggtgtccgttatacaagtatgacaaagaagtcgatgctggatgctcctctgatgttcagatattagatagtcccacaaatcctaagaagaggaaactactttgtgtgtctaaagaaagcgaagtattgatggaagatgatgatggccccatcacccaagcagacttagaaaggtggtttgttcatgattgggataaaagaactcctataaaaatcccgatcgatgagtgcactaatgaatttttactgagtggcctttccacaaaggacatgccagtgaccaaagccgatttaatagatgttctatgtgattacatcatgacaatccaagatgatacgacattagagatgacatgggtgcgaagtttcaacccttttaagatagaaatatctgtcaaagacctgcaaaacgtattaagggttcttatgccatggaaattcaacggatgctacgcacttttcataatcgatcatggtaaaaagcacgtaacttttatagactttacacccactcaagattggtgtaaacacatgccatacaagaggtttgcggaagcaattatcatggcctccaagaaatataagattgcctacaataagaaacgttctggatgggcagatgatatttttaagtgggaacatacaattcggtctggtcttccaatggacttaaaaggggttaatacaagctacttcgttctacaagctatggtcatgtgggggagtggtagacgaatggaatttaattgggatgcaaagattcttcgaaggaactttgtaattgatctattaagttacgaggagaattcatgccgctatgctatccctccaaacatacaacaacgacttatcagtattgctaaaaaagattag

SEQ ID NO: 33981 - DNA, 366 bp, Zea mays
  Peptide Sequence Number=SeqID_77356
atgtggcagcagggggtacaagataatgtagagcagatgaaggacaagcagactgcaactttggatgatgtactagcatcagcacaagttgattcgtgcaataccgatggtgcatcaacaatagtcgcaagtagttcgcgaggcagctatgctcagcacaagtgtaagatgaacaagcacaagctccgcaagctccagaagcgactttgccgcagacatgagagctctctcctatccagttcgaggaccctaacttttggacaattaggcccttgtctggcagtttgcaatgagctgcattgtaggtgcttttgcttaaacgacaaccagtttgcagattggtcacctcttaccagtttcctgtga

SEQ ID NO: 33982 - DNA, 201 bp, Zea mays
  Peptide Sequence Number=SeqID_77357
atggagagggattactcgtccatgggcagcgagatgcccgggaagaaggcgaggaagccctacaccatcaccaagccccacgagcggtggagcaccgaggagcacgcccgcttcgtcgatgcgttgctcatgtttggacgcgactggaagaagatcgaggagcatgtcggcaccaagacgacggtccagttttgcgcttaa

SEQ ID NO: 33983 - DNA, 702 bp, Zea mays
  Peptide Sequence Number=SeqID_77358
atggaatctgccgcggcgatttgtgcccagaagttgtccttggcagttgttgcagcccgtgacacactgaatgcttctgctgccgctagtatagttgctggtgattattgcgccacattttccataggtaaccatgtggtttcaactcttgatgttcttgaatccgctgttgcggcggaaaaaagtgctatgcattcttacaaacaggcaagtgcagctgtcgattgtgctaaggagacagtggccaatgtatactacactttttttgatgcgatgaaatctgtgagggctttggctgttatcagccagttagaactgaggcttgaggtgaaccaaaaactagcgcaagcactcaaatatgccatgtctcagatgagtgatacggctaagaaactacaagatactgcctctttgtgctacacagacgaagatgttgtagacggtttcaagcttacccaagtagctcgttcaatggacgagttagctgaaatgcttgaaggaactgcaattgactgccaagtctccatgatggatccaacaactatgttagaagctggctatgctagtgaagacagtgcggtgtgggaggacgtattccgtgaccgagaaataatgaatcagccagtagaagcggagacacttgctgagcactgtgctaagtgggggcttaattacaatgagatctgggatagatcagtgtaa

SEQ ID NO: 33984 - DNA, 315 bp, Zea mays
  Peptide Sequence Number=SeqID_77359
atgggcgagagaaccaccatccagatagtggtgtgttgtgcactcagcacgcaattccgcaacctctgcccgaaccttgcccaactcgtcaagggcgtggtccagctcagtgttgagcacggcggccaggttgaccatgctgttatgactgggattgccctcgccaattggcgagacaatcagaccatcgaactgcaggtcaaggccatcagctacctcgctaaacaacgagcaatactgaaaaagtgcacgtcgtgctgcatcttgcatggcttcctcggcagtatccctctcagtgatagtgtagtgctctaa

SEQ ID NO: 33985 - DNA, 123 bp, Zea mays
  Peptide Sequence Number=SeqID_77360
atggagagggaggaggagctccctgctcagccgaacagagaagggaagggagtggtggcagtgagcagtggcaggtggaaaaatgtcgacattgggcggccatttttggcgttttccttttga

SEQ ID NO: 33986 - DNA, 555 bp, Zea mays
  Peptide Sequence Number=SeqID_77361
atggttcagtggattacccggtccacgcactccggcggggttgtgaactccggcgaccgtggactggcctctccggcgaagcaggcttcgattcctcgctcggggagcttcaatgaggtgtgctcagtcgtctccgggggtcggacggggttgggaaaggctgggttggccggtctacggcggcaggggctcgggtggccgcggacacgccgtgcacgggcaaacgacggtgagcagagctccggtgagtccttagcaccaaggtgtgctctagccatggtaacacctgaggtgttacattcaccccgttccgactactatgccaaccaccagggtaaagctaacgacaggagctctgcctcgcccgacctcaggcctcgggagaaggtttccgcctcgccagaatcgggcctcggcctcagcctcggcctcgggaggagtcacaacctcgcccgacctcaaccttggcctcaggagaaatctctgcctcgcccgacctcggcctcggaccgaaccgcgccacaggggatacatcattaccctacccctagctag

SEQ ID NO: 33987 - DNA, 789 bp, Zea mays
  Peptide Sequence Number=SeqID_77362
atgggaggtgtagcaggtaatgatggcgcctcctgtgacgtggtcggtccgagccctggggtgggcgaggtggaggctcctccgaggtcgagatcgagtctgtcttctgaggccgaggtcgagtccgagcccctgggtcgggcgaggcggagactgtcggttgaggccagggctgagacggagccctggggtcgggcgatgcggagttcgtcgtcttctggggctgagcccgattccgagccctggggtcgggcgaagcggagttcgtcgtcttccgggctgagcccgagtccgagccctggggtcgggcgatgcagagttcgtcgtcttccggggctgagcctgagtccaagccctagggtcgggcgatgcggagttcgtcgtcttccggggctgagcccgagtccgagcccttcgggcagtgcggagtttcctatggcgcctgaggccggacttggctgctgtcaccctcactctgtcgagtggcacagcagtcggagtggcgcaggcggcgctgtcctcttgtcaggccggtcagtggagcggcgaagtgactgcggtcatttcggctctgtcgactggagggcgcgcgtcaggataaggtgtcatgccacctttgcattaaatgctcctgcgatacggtcggtcggcgtggcgacctggacatggttgcttcttggtgaagactgggcctcgggcgagtcgaagctttgtgctgatgggggttaccagctgagattaggagtcttgagggtacccctaattatggtccccgacagtagcccctga

SEQ ID NO: 33988 - DNA, 252 bp, Zea mays
  Peptide Sequence Number=SeqID_77363
atgcaggcggcatgcaaccgcgccaagtgggcgcaccccttcgactccaacgcgcccaacatggaggcccaggcccacacgtcatgcaaccggcgcaccatttgctacgtgacaggcggcacctttggcaggagaagcgggcgacgcttcgccttcgccataatgatcgcgtcaaaaaagggaccgggaaagggggataccccgaaagggatccttctccgtgaaggaaacgggccccaagccccctactga

SEQ ID NO: 33989 - DNA, 141 bp, Zea mays
  Peptide Sequence Number=SeqID_77364
atgaaggccgcgggtttccccttttacgcctgtctccctccggcttcttccccccttcgcgctccgtctcgcgccgacccatctggactagggcacgcggcgacaatttactcgtcggtccagggaccccccggggcttaa

SEQ ID NO: 33990 - DNA, 348 bp, Zea mays
  Peptide Sequence Number=SeqID_77365
atgactctgggtacgtccgttacatggccgaggctcgggctacgctcccgaggtaccctaggacatttccgagaccagaaggagcgattttgtaacggaatcccatcagagggaggcatcgagccctcggaccctatcgaacgggatcgtgtccggcaaatcaccagcagcatacaaatatcttattcattgcattcgatagattgcaacctcgctgacggagagtacatgctcatacctaagcaaggagttgatcgggaaggagtccaggagctagcacccgagcctgccaccgaggatgtccccgcagccccagctttggaaggcaagccccggttttatgcataa

SEQ ID NO: 33991 - DNA, 1365 bp, Zea mays
  Peptide Sequence Number=SeqID_77366
atgccgactttagtccgaggacatcgacagagggagcagcagcaccctcggcgtcgtttccaccttccgcgggatctggcctggcctcggacggcgacacgggtggaaggatctccacctcgaaggaggacgccagcaacactctcgggccatcgtatccaaggtctccgcaagggtcctggcccgagcagacacctcgaccggccgctccgtagcctcagccagctgtcccccgaggacaccagcccggctcacggcctcggcagcgtgactctggggttggtcccgctagcggacgacctggccaagctccagcgtgactcctcggcctgggaagccacctgctcctggaccaacgaagcttcttctcgagccaactccgcctctgtccacgctgacaccgctgcctccggctccggctcatcacagagcagccgaggggcaactcacgctcggttaagcggttcagctagccgacaggcgagtcctagtgctcgaaatgaggaagaaacacggtattacactcaaatacccagatgttcaggcctcgacagccacaatgaacaaacaccggcactcaaggtgccattacaaacggaactccggttccactcccgtgggtatgaacaacctccacatcggagggcctacgagacgacaaactccggatggctcgccgccgaccactgcagcagcgacaacgacctccgtctcggacggcaagacagcagcagcgatggccccagggcgaacgctaccgctggaaggccctcgttcacgtccccttgcgggggacgagaaccagccattaaagtcaaagagccggaggcccggagcgcaggtggcattgacggtgtcgtcggcggagaaaccctctccggctgccaccacctcagcaccgacgacagcggccacctgcccaccaacaccacaccaacgagcggcggccgccccaaagcgcaccggcaggtcctcactcccgttctcgccacaaaaacgagaacgggaccgtcccagaacatgagtaccaccctcgcggcgtactacgtgttgtgcgaccccccggtgcagccagccacagtcgcccggacggaggatggaatgctgcaccctggccaagcagtagcagttcgccttccctcgcatggctggaggacgcctcctccacagagctacaggatggtttcctcccccgggtgctggaggaagaagcgggtcgccggcccacgcggaagcaggccccgacttgccccacgctcctccccagcaagggtgatgaagatccttgaagctgagggcggggcagaggccgcagcccggcttgcttctccccaccatcgaactggtggtcaccatcacgggtga

SEQ ID NO: 33992 - DNA, 187 bp, Zea mays
  Peptide Sequence Number=SeqID_77367
gactttgctcagtctggagcaccggactgtccggtggtgcaccggacagtgtccggtgcaccaggctggctcgggcaaacaggctgctctcgggacttcgacggcggcgaactcgtcgctctcgggaattcatcggcgacgtacggctataattcaccggactgtccggtgtgcaccggactgtccg

SEQ ID NO: 33993 - DNA, 1014 bp, Zea mays
  Peptide Sequence Number=SeqID_77368
atgacatatggtggagagccttcaatcaaagtctttgcgaagcattactgcctccataggcagaagaagactgtggatgcggaggctgttaaaattgttgggaagtattctgcgaagactgaatttacaagaagcatagaaatccaagatggtaatatttgtctcaatagggttttcgaaatgagggagctagagtatgggccatatcccgaagacgtagaagaaggggaggaggaagattcgagtactattgcaaaggtgaaggaggttatcgaaggcagcgaagacatggttggtttgaagcggagggctttgcctactgaaggtaaaatgagaaaaagcgtgaaggggtcgaggtctccgaacaagatggagaccgtgcctgaagattttgtgggtttgaatgttgaaatgactgagtttgccgaggatctagcggagactatgggtgaagccatgtcacccatgtctcttgtggcagcgcacgcgagggcggccacagtcacttggggtaaatatattcctaatgctgttggtgaggattatgaactgaatagactagctagatctcttgatatttttccctatggttataacattgggggcgttttgtcagcgctcatggataaagatcgaaggtcgaagtccaagaaacgaaaaggagtcatccgcattgtggacccaaaaggatctgcgaagacccagaccgtgaaggcgataggggcgaagggtggcgcggtggagaccgctaaagcggaagcagctagggttgaggagaccgaaaccagggcagtgtctaccgtaggggcaaaagacgtgtcagtttatgactatttggctgagggtttggttagcaatgagcctccatctcttaggctagttggcgctggggacccgaggggtgttgcattgagtgtagtcgctggcacggccgccgcgacattgcgaatggctatggaagacatgctagcagttgctgaggtagcgaaggctacaggggagcagctacgctat

SEQ ID NO: 33994 - DNA, 492 bp, Zea mays
  Peptide Sequence Number=SeqID_77369
atggggaaggtggtgcagatgctggacggggtcatggagctcgagaggcctccgcacccgaagtcatcagtccgcttttttagcacaaccaccacggccagcggcgacaactccagcatggtctcgaccggtcatgcctcgttggcagccgctcccggtcgtgatgtttgtcgttcggtatctatattgtatttaattttttactctcgtgcactaccggaatcgcaggctttgtcgagtgttgtattctttgccgagtgccttttgtcgggcactcggcaaagaaggctttgccgagtgccgcactcggtaaagttaggcactcggcaaagcgacctttaccgagtgctgaacactcggtacaggacaacactcggcaaagacaactttgccgagtgtcaaacactcggcaaagggggttctcgggaaacggacgtcagcggccgtcccaaagctgacggccgtcagtctttgccgagagccaacggctga

SEQ ID NO: 33995 - DNA, 339 bp, Zea mays
  Peptide Sequence Number=SeqID_77370
atgaggggaaatgtcacacctaaacacttgccactcctttggatgctacataatggttatgaagttccagatgatttgcagaaggaccttgagaacatcgatacaattcgtgagttatatactgttcggtccatttctagcgaacagtcttcagaagaacagtcagaaaatacagattctgtgcaccgtaatctgagtcaatcaaatgaattactggaaaggaaaacacctggtgtgtttgcacaatatgggtactatttggggagggtagcaaagcaaaggttgcgtgaagctacacagcaggccgttgattacctaatattgtgtattgctgattag

SEQ ID NO: 33996 - DNA, 363 bp, Zea mays
  Peptide Sequence Number=SeqID_77371
atggcactcggcaaagaaggaaacctgggaaccggcaaagacatctttgccgagtgctgttgccaaggcactcggcaaagatactggcaaaggggcccactggagggttctttgtcgagtgccagtccaccagacactcggcaaagaagcctcctttgtcgagtgcctactagagctctcggcacagggactggcggtggggcccactggagcagtctttgccgagggcctctcgagcaaacaatcggcaaaattggcctctttgccgagtgccacagaaggcactcggcaaaggatccgtcaccgtcacttggcgccgtgacgattggacctttgctcagtgcaataatgcttatccactag

SEQ ID NO: 33997 - DNA, 609 bp, Zea mays
  Peptide Sequence Number=SeqID_77372
atggtgtttagggctagtttcggaattcaattttctcaagaaattcatatttttccaagttcattgagtactcttttgtcaagtgtcacactcgtcaaaacatttgttgagtgttatcgaggatttcccgagtgcctgcggcactcagaaaagtactctcactaccggaaacgggcgctttgccgagtgcccgaaacactcgacaaagccccactcggcaaaggctttgccgagtgtcgcactcggcaaagaaggctcggcaaacagtacatcggcaaatgcttctttgccgagtactttttctcgggcactcggcaaagaggtttgccgagtgccagggagcactcggcaaagaaaagtggccgttacggcgacgaggtaacggagacggcttctttgccgagtgtcaaggacgacactcggcaaaggcttcaccgcctttgccgagtgtcttcccggaagcactcggcaaagaatacatctttgccgagtgccttctgggacattcggcaaagagcccgccagggagggtccccatgtcaggctctttgccgagtgctctctggcactcggcaaagcctgcctctttaccgagtgccagagacataa

SEQ ID NO: 33998 - DNA, 462 bp, Zea mays
  Peptide Sequence Number=SeqID_77373
atgaccgaggaccctttaactggtcacatgcctcgtcatgggatccactttagtaagcatttatgcaaaacagagtctttgatctttgagataccttaccttgactcccttataaccagcatacccttgagagtcttttccttagtcggattatgtaattgcttccgcatttctgtatctccgatggtctgtaatatctgcgtgacgggtgaaacgctcttgggaaagacttatctagaaaaagatttcttccattcttaccccttatatctgaagaatctatatgaaagaccagataggaggagtgcaatgtatagaaggcatattgcaataccctacatgaagaagttcatgtactgtattcgcaattgcaccctaacgtacctgaaaatcctgtcgggacagaagccggaccttctcatgaagctggagaagcttttggtggagaactggaccttttag

SEQ ID NO: 33999 - DNA, 87 bp, Zea mays
  Peptide Sequence Number=SeqID_77374
atggcgtcgtcggcgtcgaccctcgaaatcgaggcccgcgacgtggttaagatagtgctgcagttctgcaaggagaattccctatga

SEQ ID NO: 34000 - DNA, 186 bp, Zea mays
  Peptide Sequence Number=SeqID_77375
atggctagtgtgctggacgccgttgtggagacaacaagagcgctgactcctactcttgtgaagaaggttaccgaaggtgttacaactcatacggaaacagaagctgggccctcagtgcctgctgagacgaagcttgccgcaactgagcagaaggtcgaagaggaatctccagggcttaatccttag

SEQ ID NO: 34001 - DNA, 186 bp, Zea mays
  Peptide Sequence Number=SeqID_77376
atggcgagcggaattaagctcgccggagctaaggagagggggctggccggtgaaggggagcgcgggagatatggagccaggaaatccggtctgtctccctgctcaaacccgaggcaaatccagggttttgtcgtgtctagggctcgcgtcccaatgccatcttctggcacacgacagaggggttag

SEQ ID NO: 34002 - DNA, 822 bp, Zea mays
  Peptide Sequence Number=SeqID_77377
atgagcgacggcaatggcccaccaaagctccacgccgcgaagcccgacgaccacgtcgaattactcggtgtagaaagtaattggaatatgggcgatgcagaggaggtactacataccagctatgatgaatccgtggaggccgaccatggtgggggacggtttaacagcggggcgcttgatggaggctcagaggaaggtggcttgggttcccaggtgtacaacattcgtgatttcagtgaacggaacacgacgcggggaggggatttcgcccgccaggcgcgcgttctgttggggacgacgacctggcagagggggggccaccggcaggacaccgtgcccaatggactcacccgcagcggcacatgttctacctcccatggcgacggacggcagaccagagccgcgaccgaagctgtgaggcggcgccccgccgagacgacgtcgagctcgagcgcccaggtggcgccagcgtggacagaaggatggagcgtgtggcgctccggttgccccaggcgcaacgctgctcgcccaaaccggaggagaggaaaaaaaagggtcgcggccttggatttatacccagggcggaaggagaaaggaaggaggtctccgcctcgcccgaccccagggctcggcctcaccctcgacctcggaaggtggtctccgcctcgcctgaccccagggctcggcctcaacctcgacttcgggctacgggggaacaagaccggcgtcccatccaggcttgccccggtaacaagtaatgatggctccccgcggctcaagcgctcctccgacggccacgacatcgcgtacacagggctctag

SEQ ID NO: 34003 - DNA, 486 bp, Zea mays
  Peptide Sequence Number=SeqID_77378
atgcaggtggcgtgcaaccgcaccacggggacgcaccccttcgacttcgacgcatccagcatggaggcccaggcccacacgtcatgtaaccggcgcgccggttactacgtgcgagaaactgcaccgccacttgcgccaatgtcgtgccttctcgactgcagaaccagtgccgcgactcgaggcaaccctgcgcatggcccaacagtgccaatcgagcacatcggtcacggggcaagcgacacctttggcaggcgaagcgggcgtcgtttcacctccgccatgatgaccgcgtcaaaaaagggaccgggaaagggaatatttcgaaagggatccttctccgcgaaggaagcgggccccgagccctcctatagatcaggggttcgaaggctggcccctcggaagggtttgacggtcgccccagagccctcaggcttcaagctcattactgatcaggggttcgaaggctggcccctcgaaagggtttga

SEQ ID NO: 34004 - DNA, 345 bp, Zea mays
  Peptide Sequence Number=SeqID_77379
atgacaaccgtccccatcgattccccgttcgcgtccaggcctcactgccttggcatacaatgctccactgaccccggctgccgccgtgtagtgaccgcacttgtacccaccatagctagcatgggagacccagtctcaggtcgcatgaggtataaagtccgcgcccggcttcaatcagaatttacgacttcgaaggtgtatgatcttcttgagttaaacaaggttaactttgcttattggcttggtactggtgtatgtttctctgtctcaaaatttggggatcagaaagtgaatggttttctctggacaaagttaccaaattttagggcagaaggggtgctttga

SEQ ID NO: 34005 - DNA, 904 bp, Zea mays
  Peptide Sequence Number=SeqID_77380
catccgccgcctcccgcagaacccgaagatggcgtcgtcggcgtcgaccctcgaaatcgaggcccgcgacgtggttaagatagtgctgcagttctgcaaggagaattcgctgcagcagacgttccagacgctgcaaaacgagtgccaggtctccctcaacactgttgacagcatcgacaccttcattgccgacatcaatgccgggcgttgggatgctgtgcttccccaggtcgcacagctcaagctgccacgcaagaagctcgaggacctctatgagcagattgtgttggagatggctgagctccgtgagcttgacacggcccgtgccatcctccgtcagacgcaggtcatgggtgttatgaagcaggagcagcctgagcggtacctccgccttgagcacctccttgtccgcacatactttgaccccaatgaggcctaccaagaatccaccaaggagaagcggcgagcactgattgctcaagctgttgcttcagaagtctcagtagtaccgccatctcgtcttatggcactgattggtcaggctttgaagtggcaacagcaccaaggattgttgcctcctggcacacagtttgatttatttagaggaactgctgcaatgaagcaggatgaagaagaaacataccctacttccttatctcatcaaataaagggtggtggggacgctgagaacccaaacgtcgtcggcagccacacgctcgcggacgaagtgcaggtcgatctccacatgcttggtgtgctggtgctgcacgatattggtggagaggaggcctcgaccataccgttggtcacagcgcgatactcggcctctacactggagcgggagacgacgggctgtcgcttggcggcccaggagacgaggttggcgcccaggaacacaacatag

SEQ ID NO: 34006 - DNA, 144 bp, Zea mays
  Peptide Sequence Number=SeqID_77381
atgtcgggacgtcgggtgccgtgggtgcagtcgtcgcgcgctggtgatagacgacggcggttcggcaagccgtgttcgtcgacgggcacagggcacggaccgggcggcggaactgggtggagacccatgcgaagaagtgtgtga

SEQ ID NO: 34007 - DNA, 744 bp, Zea mays
  Peptide Sequence Number=SeqID_77382
atggccatacaaacacaataccctcagcatttgctccactctgagcgacgtgccattgaacaccacctcattcctcatcttccatatactccaggccccaagagctacaagcgagttaaatccttcccttatttctttgcccaatggaacccaaacctgctgccacaaatcaaagaagtcaaccatattcgcctgagggtacatggcctcaagtctggaaagatgctgaaagaatttcgaggtcattcttcatatgtaaattatgccatcttcactactgacggtagccgtgtcattacagcttccagtgattgtactgttaaggtctgggatactaaaacaacagattgcttgcatactttcaagccaccacctcctttgaggggaggagatgcatctgttaattctgtccatttatttccaaaaaatactgatcacattgttgtctgcaataagacttcatcaatattcatcatgactttacaaggacaggttgtgaagagtttctcatcaggtaagcgagaagggggagattttgttgcagcttcagtttcaccaaaaggagaatggatatattgtgttggtgaagacatgaacatgtattgctttagctaccaatctggtaaactggagcatctgatgaaggtgcatgagaaggatgtcataggcattacgcaccatcctcacaggaacttagtagccaccattgctgaggattgtatgatgaagatatggaagccttga

SEQ ID NO: 34008 - DNA, 405 bp, Zea mays
  Peptide Sequence Number=SeqID_77383
atggcagcccctgtcgctgaagctttctttggcggcatgacaaaggtcgatgcttgcggaaggtggtcgaaaagggttcaccggagaaaaatagaaatgataacaagttacaaatgtaccttcggcttgaaagaagataaaagaccttcggaagccgaaggcccccaacagatgttcctcaaaatgaaggaagatgaggcgaagaacaagattgaagaagaagaaaatgatcgatggagaccaaacgacgaatccacctcttcacaaggttcgtctttcatatccacttcccatatgtgctttgtcgctaatgggagtgacagtgaaagcgaaagtgaggatgaggatgaacatgaaagtgatagtgaagatgagaatgatcttcaaaaattcttcgctcaataa

SEQ ID NO: 34009 - DNA, 444 bp, Zea mays
  Peptide Sequence Number=SeqID_77384
atgaacaaaaaacactggcattcgaagtgccattacgaacggaactccggttccccctccgcaggtacgaatgaccccactccatggggaaggcctgcggagcaacagaagactgacgagcggctcgccgccgcccgttctaaccacgacgacaaccacccccgccccgggcagcgaagcggcttaggcagcagctttggggcaggtgtcacgacaggagggctctcccccgaggacgagaaccagccattcaggccgggagacggagacccagggccactggcgccctacctatcccggcatggctggaggaagtccccgtgggactcaaggacgccattctcccccaggcgcggggggaagaaaaaggcagccgacccatgcgggggcagccccccgactcgcctcatcttccatcttggcctggatgacgaaaatccttga

SEQ ID NO: 34010 - DNA, 81 bp, Zea mays
  Peptide Sequence Number=SeqID_77385
atgcggcttcatacccttagagatgatgtggttttatactctcagaggtgcttgttgctcatcaagggaagtgggaattag

SEQ ID NO: 34011 - DNA, 375 bp, Zea mays
  Peptide Sequence Number=SeqID_77386
atggacaaagaccccctcgacatggtcgagactgcagttcaagtgattgaggcacatgtcaacatcattcacagtcttgtaactgatggggttgtcgaaactactttacctgagtcggtctacacacttaagaccactttgtttcagattggagatgtttgtgacaagcttgagaagtgtgcattgtccataaaaaaatatgcaacaaccaagagacaagcagttgttgaacatcaggaacgtcagttagaacatgacatcgatgcaacacttgaggtggactcactgccaagccctgaggccatatctcaaagggaaatattggaaaaacattttggaatcgagtacgatagcgaccagtcctggggctgttga

SEQ ID NO: 34012 - DNA, 1020 bp, Zea mays
  Peptide Sequence Number=SeqID_77387
atggggagcgcccgcgttgtctttgtctcgttgtgggaggagcgcaaccttgtggaggttggtacctttcagccatcgctcggcttcaaggattttcatcaggcagcccggctgcatcccctcaccaatgggcgagctgagtcggagctctacctcccgtacgggccggcaggccacctcctccttcagcattcaggggagagggcgctcaccggcctagcggagggggcggacttcgacaacgtggggccgattggccgcaagcgtcgtcagctgcagcatgcctggttcgctggctctggcacagcttccagtgccacctcccaccgctgggcggagtgtggctatctgcccgccgtacgggcggctgttgcgccgcgtgcaccgggggaccgtcccaaacgtcgcacgctgctagggcggcgttcgtgttcttgggttgtcctgcccttgttccggcacgacgcctccgcgcggaggtcggtgctcacccgtccgggaggacttgagtggggatctgccggtgggcaggtggctaccgtcgtcagtgctgaggtggtggccgccggagaaggcttctccgccgacgagattgtcggcgccatctacgctccgggcctccggctctttggctttgatagcttgtccttgcccctcgagcggggacatgggagagggccttgtcgcagcagcgtctgccctgaggtcatcactgctgttgtttggccgcccggagcggaggtcgttgtcgctgctgcaggagtgggcggcggcgagccacctggaagttgtcatcccgagtccctcggcttggtcagccttgccacccgaggcttctcttgctcagttaaagaaaaccctcggccgctctgcgatgagctggtgccggaggctgcggtgcgcggtgctgacatattcgttcgaggtggagatcctctgaccgtgtcgccgttcgagaccgggccggattccgtcgaaggtggagtcgacgccgagggtgctgctgcccccccttattga

SEQ ID NO: 34013 - DNA, 945 bp, Zea mays
  Peptide Sequence Number=SeqID_77388
atggctaccacccaggaggtcgatccctttttaaaggcgactcaccccactcgcgtcctcaggcgtcgcgggctaagtcttcaccaacgcgctcaaaggtcctccccctacgacacgggggctgggtcccacgcgtcatgcaagctggccaggacagaagaagccaaaccgccgcgcgcggagcgtgtaaccgcccaacggttacaagcactcctccaccttcacctaacccagcgggtgaaagggcggaccacaatgcaggcggcatgcaactgcaccacggagatgcaccctttcgacttaaacgcacccagcatggaggcccaggcccacacgtcatggaccgggaaaggggatactccgaaagggatccttctctgcgaaggaagcgggccccaagccctcttactgatcaggggttcgaaggctggcccctcggaagggttcgacagccgcctcagagcactcgggctccgcgcccactactggtcagaggttcgaaggctggcccctcggaagggttcaatagccgcctcaggccactcgggctccgcgcccactactgatcaggggttcgaaggctggccccccgaagggttcgacagccgcctcagaacacgcagagcagggatgactctgggtcaaagctccgcccactcaagggacacggtctcgcctcgcccgagcccagcctcgggcaagaacaacagacctaggtggattcacgtcttgcccgagggtctcctcaagcaacgggcgcaccttcgactcgcccgaggcccagctcgggcaggcttcgcggagaagcaaccttggccagatcgcctcgccaaccgaccgtatcgcaggagcattcaatgcaaggatcgcctgacaccttatcctgatgcacgctcctcagtcgacaaggccgaagtgaccacagtcacttcacccctccactga

SEQ ID NO: 34014 - DNA, 414 bp, Zea mays
  Peptide Sequence Number=SeqID_77389
atgcggagttcgtcgtcttctggggctgagcccgagtccgagccctggggtcgggcgatgcggagttcgtcgtcttccggggctgagcccgagtccgagccctggggtcgggcgaagcggagcggcgctgtcctcttgtcaggccggtcagtggagcggcgaagtgactacggtcacttcggctctgtcgactggagggcgcgcgtcaggataaaggtgtcaggccacctttgcattaaatgcccctgcgatacggtcggttcgcgtggcgacttggccaaggttgcttcttggcgaagactgggcctcgggcgagccgaaggtgtgtccttcgctggagggggtcctcgggcgagacgtaaatcctccggggtcggctacccttgcccgaggctgggctcgggcgaggcgtga

SEQ ID NO: 34015 - DNA, 381 bp, Zea mays
  Peptide Sequence Number=SeqID_77390
atggccccagccaagccgcgacgcttgatctcatccctgccgttaccccgcagatcaacggcaccaggtgccgtcttcctcctccagccgaacgcccagaacgccatgaacacgacagcgagcgattttgagctcgctattcgagccctaactaccgcccaggagtatggatcgaggccgactgacatgcgggacccgccaggcggtgagtacgagcatgagctcggctggttgggctgcgcagagcaagggagatgggccgcatggggcaatttcagcccaggtgaggtcatgggtgttaaactagggtggataagtatggctattaggataggatggatccataaagataagatagaatcttttgagatgaaattgtga

SEQ ID NO: 34016 - DNA, 861 bp, Zea mays
  Peptide Sequence Number=SeqID_77391
atgtaccccctgcgacgtggtcggtccgagcccaagatcgagcgaggcggtgactcctccgaggtcgaggctgagtccgagccctggggtcgggcgaggtggagaccgtcttccgaggtcgaggctgagaccgagccctggggtcgggcgaggcggagaccgtcttccgaggtcgaggtggagtccgagccctggggtcgggcaaggcggagaccgtcttccgaggtcgaggctgagttcgagccttggggtcgggcgaggcggagcttcctatggcgcctgaggttggactcggcggctgtcagccgcaccctggcgggtggcacagcagtcagagcagtgcaggcgatccttgcattgaatgctcctgcgatacggtcggttggcgagacgatctggccaaggttgcttctccgcgaagcctgcccgagctgggcctcgggcgagtcgaaggggcattgggagctggctgctactgagctgctttctttgggcaataattcgcccagtggccttgttccccataatggaaacatttgcggcctcctccttgcactgcagctacttggttgttctggttggttgctggagcaggaaggcgaggtgcctagttgttctagcggtattgctgctgctgttgagggatctgtctctagtactgctgctgctgttgagggatctgtctctagtactactgctggtgctgacgctaatgctagggtaggtgctggtgctggtgctaacaacgagcagcccatgattcctgagtgtgttgccgaagatcttcctgagcagcaacctggagaagatgtaagcaacatggaggactttgaggagttccaggactacgacaagttctag

SEQ ID NO: 34017 - DNA, 300 bp, Zea mays
  Peptide Sequence Number=SeqID_77392
atgaagaagagcgagaaagacatcaatgaggcccgagtacaagctaagcaagctgaagaagttgcagagcgcgagaggcgcatagtagaactatctcctccacaggaactgttcgaccccctggctgacccggaaacgaaggaagcaatagatatcattaatgtgaccgaatctattgttgacgaagttgttaacaagttgttaaatgaagttgcgaagaaggtcctgaaagagaacaagtacttgtttgtaaaaacatttctagatgatcaatgtaactttgctgtatcaagactgtaa

SEQ ID NO: 34018 - DNA, 519 bp, Zea mays
  Peptide Sequence Number=SeqID_77393
atgggtatcgacggtggctgctgcctcgacgcggagggtgataactcacctgcaagcagtcttgggcgaaggaggatggcgagtgcacagtgtgaaatcaacgatggttgcctcgacgcggagggtgataactcacctgcaagcagtcttgggcgaaggtggcgaggagatggtgccgagcagagcagagcagcagagcagagcgggaggaagcagagcggagcagacgattggaggaagggtaacgacgcgcacctcaaaatagcacaggcagctcatctggtcgctgcggtgcggttcgggccgccggaggaactggctggccggcttcgtgaggcgcgacccgcgcacctcttcctcgccgcgttcgtccctgccgcggctgccacggtgtacctcatgctgcggccgcgggcagtgtacctggtggactacgcctacttccgcacggcgtccaactgccgcgtccccttctccaccttcctggagcacgcgaagcaggtgccggaggaagggtaa

SEQ ID NO: 34019 - DNA, 324 bp, Zea mays
  Peptide Sequence Number=SeqID_77394
atggaggacagcaccaaagcaagctcggagggctctatcatagcaacagaggagggcacgatagaagcagcagaggaaggcacaacagaggcagcagaggaaggcacgacagaggagggtaccacggagccaacagaggaaggcacgacagaggaggttaccacagagccaacaaaggaaggcatgacagaggaggtggcacttgtggctctagtggttgtagtgactgatcatctccaaaagttgtatctagtgccaattgtggctctagtggctgatcctctccaaaagctggatctactgcattcttgcaatttctcgtaa

SEQ ID NO: 34020 - DNA, 192 bp, Zea mays
  Peptide Sequence Number=SeqID_77395
atggcgagagtggcacgcaccctcttggcaaaggaccgcctaaaaggggtgcatacccttgagagtcttttctttggtcggggtatagctttgtgccactttttgattgtgttaagtgccggtgggctcggccttcttataagtctaagtaacccttctatacttcttattgaggatggtcacttaagctag

SEQ ID NO: 34021 - DNA, 126 bp, Zea mays
  Peptide Sequence Number=SeqID_77396
atggtggcagcaaacgttaacatggggacgtattcttggctaagcggtaagcttaagtggttcgctcaagaggttgatcttcatgttgatgatatatatatgctgaagattatagcttatgcttaa

SEQ ID NO: 34022 - DNA, 333 bp, Zea mays
  Peptide Sequence Number=SeqID_77397
atggctcaggccttccatcgagcaccaagcggcactgcgtggacatcaccattaacaccgcagatgcatacgcggtcacagaatgacacccacagcgagcgacgaggagactgcgaccaccggcagacgaacgccgatatcacagttgcaggtaacttgccgatgcaaggcataggcggagtcagagacgacaacgtagacaggggcgtggcccgagatcagagcgctggctggagagggctcagcgccatgacgatgacgtacggccgggaggttgacgcggagcaaagcaaacgcgaggacgacatccagcgtcctgagcgcgagctctaa

SEQ ID NO: 34023 - DNA, 1029 bp, Zea mays
  Peptide Sequence Number=SeqID_77398
atgggtctctgtcttcgcatggcaaactccaagaagacgggtgatgagaggtgggagaagatgatgaagaggttggaccgattgggaggtagactggaggcgatgatggtgggtcagcatcgatttctggagctggcggaccgcgtggccgcagtggcaaggaaggcagaggaacacaagcaagtggagagccagcatgaagggttactgaagcaacttgctcgaggtggagaagatttagaagaatcgaataggaatgatgcttttggtgaagaagaggctagaaggcctgactcgtcgagtgaggcaaccgcggtggataagaatgatagaagcatggaggggtttcttcttgctagtgctagcaatgtgtttgaggaatttcctagccaggtggtgtgggatgaggatgattcttctgatgcaaccatagagtctacaactgttttggttaaaagttgcaatgatcctaaggtagatgaagtggtgattgtcatgcagaaacagttcacaaagcccaatgaaggaattgtgaaagagcaagagcctttcaatgttgagcggtctacttactcatcagtcatggaggattcaccaatcctgggtgtctttgagaagaagtatggtgcctcagttgcagattgtgaggacttggttgaattctcacctgtaagggagatgattggtgaggatatttctgttactgatgatctggaagtgaccatcaatgagaaggccatcaaggaggatggttttgttaccacaggtgaggctgatcctacttccaaggtgatttttctaatggcagcaggagaagatgaggaatgtgaaagtcgcctaaaggggtgggtgaataggagaatcctgaaaattgtaaactttgaacacgaacttcacaaggggttaggattagaaataagtaataatgaaattagagtgcggaagagagttcttcttgctatgagttgctcaatcaatccggataactttggaagcaaactcaaaaatattgcaagcaagagaacttag

SEQ ID NO: 34024 - DNA, 345 bp, Zea mays
  Peptide Sequence Number=SeqID_77399
atggcacgggcggaaggatctccacctcaagggaggacgccagcaccgcgcacgagcccccgcggccaggctctccgtagcctcagccagctgtcccccgaggacctcagcccggctcacggcctcggcagcgtgactccgggattggtcccgctcgcggatgacctagccaagctccagctgccgctgctgcacctcctcggcctgggaagccacatgctcccgagccaacgaagcctcttttcgagccgactccgcctctgtccaagccgataccgctgccgccggcttcagctcgtcgcagagcagccgatggttctaaaaccaagcaagagaggcttttga

SEQ ID NO: 34025 - DNA, 99 bp, Zea mays
  Peptide Sequence Number=SeqID_77400
atggcgatctatcttaaccaagacaccaatacgaagaagatcaaccttatcaaggaaaggataagagtcaccgtcaaggaaggtaatcgtcaaggataa

SEQ ID NO: 34026 - DNA, 912 bp, Zea mays
  Peptide Sequence Number=SeqID_77401
atgaggaagaaacgcagctttatacacgaatacccaaatgttcaggcctcgacagccacaaagaacaaacacatatacttggggtatgaacaacctccacaccggagggcctgcgggacaacaaactccgggtggctcgccggcgaccgctacagcagtagcgacaacgacctccgtcttcggcggctagacagccgcagcgatggcctcagggcaaacgctgctgcgaaaaggccctcgcccgcgaaggatgagaaccagccattaaagccaaagagccggaggtccggagtgcaggtggcgctgacggcctcgtcggcggaggtaatcgcttgtgcaaggggaagcctcacctatggcgaccaccaccccagcaccgacgacagcagccacctgcccaccaacaccgcaccggcgtaccgcggccgccccaaagcgcaccggcaggtcctcgctcccgtcctcgccgcaggaacgagaatgggaccgtcccagaacacgaacgccgccctcgtggcgtacgacgtgttctgcgaccccccggtacaaccggcggcacaggaaggacctggacgcggccggcccgcgtgcggcgcgaccgacacctgtgcggtggacgggcggccacgctccgccccagcggtaggaggtggcaccggaagcagcgccagagccgcccaggccagagggccggacacgcggaagctgccagcaccacgaacgacgaacgaccttctcccccgatcactgagggaaggagcaggtcgctgcctgcgcggaggcaggccccgactcggcgcacccccctccccagcacggatgatgaacatccttgaagctgagggcggggcagaggccgcagtccggcttgcttctccccaccatgaagctggtggtcatcatcctggatga

SEQ ID NO: 34027 - DNA, 345 bp, Zea mays
  Peptide Sequence Number=SeqID_77402
atggcggcgtctagggttcttataccaggactgagtccgatttttgtggaggatcgtttaacggagcgcgctggcgagttttgcggcacggttcctacggtgggcgtggatcgcgggaagcccgaagaaggcattcgcacatcacccgccaccaggggacgaaatcccgatcaggatggggaagagggtagagatatcaccgacgatggaggggaattcgttgggaaaaaaagaagacgtgcagaggtggtgcgggtcccacttgtaggcgaccgagcgcagaagctggagactgggatggcgcgtggactgaaggactggtcagaggggcccacatggaagtga

SEQ ID NO: 34028 - DNA, 309 bp, Zea mays
  Peptide Sequence Number=SeqID_77403
atggcacagagagctccgtgcggctcggttgggcacggtgagagcaggggagggcttcgcgcggccgcgtacggcggagctcaggcgacgaacagcgaacagggccacgacgacgagctccggcggcaagctgagcacgacgcggacatggagagagaggagagcgtgagaaagagcaagctcagggagggaaagagagaagggggctcggccggatttatagaggggataggggagaggagagggcaagccgggtggaagaaacggtggccggtcttcatgactgccattaatggcaggagggagtaa

SEQ ID NO: 34029 - DNA, 474 bp, Zea mays
  Peptide Sequence Number=SeqID_77404
atgtggcacagggagcgcgagatccatcacctgagcagggcgttggccatgggcgacggtggctcaccagctcgagctcgaaccagggaagggccctgcgccatggccggagcagaagggctcgcgtggtcaagctcggccaggggggaaaaggggtgcccacgcccatggaagaagaaggcacagggagcttggaacgactgcgcaggggagggacgctgtccatgggagggagctgctgcttggaggaatggagctcggcggccatggagtttctgcccctgcgcacgtacaggaaacagagagaagaggttgttgtgcaaaggaggccgaccagggggtgaagaagggcgccgagcacatcggctcaggacgccatggccgtggctgctggccaagcagggagaaacagggggagggctgggcgtccatggcaggagcgtcggcaaggggaggaagaagactactggctga

SEQ ID NO: 34030 - DNA, 189 bp, Zea mays
  Peptide Sequence Number=SeqID_77405
atggggtccaggcacagtgcttgctctgccgaggctgagtgccgaggttctttcgttttgtcttttagtcaccctcctgcggggagaggtggtgacaaggatgatggttatgactatggtaatggtaaagaagaaggcgtcgaggcgaatctccaggagttccaggacttcgacgagttcgaggattag

SEQ ID NO: 34031 - DNA, 351 bp, Zea mays
  Peptide Sequence Number=SeqID_77406
atggacgcacgcggggagccatcattacccgttaccgagggtcgggcaaggcggagacttctcctgaggccgaggccggggtcgggcgaggacgcgattcctccgaggccgaggcagagttcgagtcttggggtcgggcgaggcggagatctcctcccgaggccgggcctgaggtcgggcgaggcggagcttcctgttgtgcccgaggctgaactcggtgggtgcgcgcgagcacacccgccgggtgtagcccccgaggcctcagaggagtggtttgactcctctgagttcttaatgcttttcgtgatgccccggtcggcctggttgttccctcatgcggccgggccgtag

SEQ ID NO: 34032 - DNA, 378 bp, Zea mays
  Peptide Sequence Number=SeqID_77407
atgtggtctgccctgatgaatagtgggaggttcagcagcaacaacatccccagcaggccttcttcgccgcattctgggcgaccagccgcagtggacactgcctctagccctaggtgtttgtggttacaacgtaaccgggtagtctttcatggtgatcctcctgccatcagcaaggtgcagagaaacttcttggatgagatggcatgctgggttctagctggagctaaacatcttggaagtttaggcttagctgaagcccttagtgtgatcgggtcaattttgcagattttgaaggcaattgagatggtcagtgctatgcataacatagatcgatccattggtctttttaggagtgctcatgctgcagtagggatctaa

SEQ ID NO: 34033 - DNA, 603 bp, Zea mays
  Peptide Sequence Number=SeqID_77408
atggggaagaaggggggcgaccacggggcatcctgggatagggagccgagcgccatggggcagctctgcgcatcctgcagcaagagaagtggggaaatggcggccaggggggtggagctcgcagccattggagagccgagggagcgcgagatccatcacctgagcagggcgttggccatgggcgacggcggctcaccagctcgagctcgaaccagggaagggccctgcgccatggccggagcggaagggctcgcgtggtcgagctcggccaggggggaaaaggggtgcccgcgcccatggaagaagaaggcacagggagcttggaacgactgcgcaggggagggacgctgtccattggagggagctgctgcttggaggaatggagctcggcggccatggagtttctgcccctgcgcacgtacaggaaacagagagaagaggctgttgtgcaaaggaggccgaccagggggtgaagaagggcaccgagcacatcggctcaggacgccatggtcgtggctgctggccaagcagggagaaacagggggagggctgggcgtccatggcaggagcgtcggcaaggggaggaagaagactgctggctga

SEQ ID NO: 34034 - DNA, 330 bp, Zea mays
  Peptide Sequence Number=SeqID_77409
atgggcgtggaggcggatgacgacggcagcatcgtcaaggcgtccctgcagcggtgcgagccctctggcgatgccgcctacggcgagctcagggctctgctggcgcgcctccatgacccggccaccaggcgtgacgcgcgcctcatcctcaccgcgctccaccgccaccagcagcacagctcgtcgcgggcgggggtgtctgcgggccggggcgaagcgggcgtgccggcggtgcggggaggggcgcggcgggggcaccagcaggcgggcgtgggggcgcggcgggcggcggtgcctggcggctgcaacgaacgggagcgagaaagatga

SEQ ID NO: 34035 - DNA, 1269 bp, Zea mays
  Peptide Sequence Number=SeqID_77410
atggggattggagatggatcttcaaatgggaaccagcaaccggtgcataaggaaatacgagatgagaccacaccacttcttccagtcaaggtggaggaggacgaggggtttcatgagttcaatggagcttcattctctggggcagttttcaatctgtcgaccaccatagttggggctggaattatggctcttccagcaagtatcaagatgctgggcatcatcccggggattctgttgatcatccttgtggcactgctcacagaggcatccatcgacatgcttgtaaggtgcagccaccagggcaagattacatcatatgggtggctgatgggcgaggttttcgggcagtgggggagaattgcgctgcaggcctccgtcatcataaacaatgttggcgtgctaattgtttacatgattatcattgctcttttggtgttcgctccgttggtgagctttaagcgcttggattcattaagatacacatctgcgctatcagttgccctggcagtagtttttgtcgtaattactgctgggattgccatcatcaaactcttcaatggaactgtagcgatgcccaaactttttccagaattagatggtcttaattctatctggaatctttttacagctgtccctgttcttgttacggcctatatctgccactataacgttcacagcattgacaatgaacttgaagacagaacacagatcaagccgattgtgcgaacatcgctgttcctgtgctccagtgtttacattgccacaagtttctttgcttatctcctcttcggtgaaggcacactggacgacgtgctcgccaactttgacgcaaatcttggcattccattcagttcagtcttcgatgacatagtgcgagtgagctatgcagcacatgtcatgcttgtctttcccattgtcttctttgccctccggctcaacttggatgggttgctcttccccacgtcaaggcacatctctcgtgacaacaagagattcgccatcatcaccgtctctctcctcgcagtaatttatcttgctgccattctcataccaagcatctgggacgcgttccagtttactggtgccacagctgctgtcctgattggttttatatttcctgccatggtcatacttagggattcttacggaatcgcgagcaagcgcgacaagattctggctgtaaccatgatcgtgcttgctgtcctgtcaaattctgtcgccctatacagtgacgcgatgaacatcttccgtaagaaggaagtggcctga

SEQ ID NO: 34036 - DNA, 399 bp, Zea mays
  Peptide Sequence Number=SeqID_77411
atggtgtacggtggggccacgaggaaacgtggtcgtcggcgagaaattgcggcacgatcagccgatctctgccctcctgagatggtcgcacacaagcggtacaataaggcgaacccccagagtggtattcccaggccacagcagctgcgtggcactcggtcgacggcggcggtccagacccgaagcttgcgacgcggtagcagcaatgggtttcaccgaaatacgagcgcaagtgggcgagaagatagctgggggaggaatgggtcacgggagcgcccatttattccccggggtcccagttcggagagagagggaggtcgcccacgatcctggccatggcggcgatatctgtgccatccgttgcgagaaaggggggaagacacaggcgcacaggtctaa

SEQ ID NO: 34037 - DNA, 189 bp, Zea mays
  Peptide Sequence Number=SeqID_77412
atggaggccgttggcggagacgacttgacagcacggtcccgcgatccagaggggcacaacgagtggttggctgaccagctggccccgtcggtctgtgaccgaaggcggaacgcgcgagaaagagctgcggcgcgggcccgatctatcggcgagcaccacagaatgcacagttcaaaaacttcagcatga

SEQ ID NO: 34038 - DNA, 519 bp, Zea mays
  Peptide Sequence Number=SeqID_77413
atggcgggtggaacttcgaaggcagcggtggcagcgcggtttcggctaggctcggtgaggaaacaaggaggagggccacgatggcccgacctatatggccgcggggtggagcgccatgcaagtaacggaggtgcgccggggtcttcagggcacgcctgccatcgtcggcgagttagttcaggcgttgacgccccgggcccgcagaacagcgagaacgcgccagcgcggatcaatccgacgcaggggtcccatccgtcagcggcagggagatcgcgcatggggaagagaagctgggccgtgcggtttggatcccgagagggaagtgaggagttcgaaggacttcgaggaatttggagatttgcaaaatttggatgtatatcgtggaatacatcatattggatcaagtctattgccattgccaagtgggttagtgaatatttttgtaacaccctaaagttcaattttgtgaaaataaggaaaaattccccaaagattttaaatcaaaacacctttccttaa

SEQ ID NO: 34039 - DNA, 333 bp, Zea mays
  Peptide Sequence Number=SeqID_77414
atggcgggtggaacttcgaaggcagcggtggcagcgtggttttggctaggctcggtgaggaaacaaggaggagggccacgatggcccgacctatatggccgcagggtggagcgccatgaaagtaacggaggggtcccatccttcagcggcagggagattgcgcacggggaagagaagctgggccgtgcggcccagatgggtcggcgcgagacagagcacgaaggggggaagaaacaggcaaaagggaaacccacggccttcgtgttgccctgcgcccaggtcgggcgtaaggagagggtccaggtgtacaatgggggtgtagcagtgtgctaa

SEQ ID NO: 34040 - DNA, 321 bp, Zea mays
  Peptide Sequence Number=SeqID_77415
atggccccctgtgacgtggtcggtccaagccctaggtcgggcgaggcggagactcctccgaggtcgaggttgaattcgtcttccgaggtcgaggctgagtccgacccctggggtcgggcgaggcagagtccatcgtcttccagagccgaggctcagtccgagccctggggtcgggcgaggcggagtccatcgttcgaggtcaaggttgagttcgagccctgggtcgggcgaggcagaaaccgtcttccgaggtcgaggctgtgtccgagccctagggtcgggcgaggcggagcttcctatggcgcccgaggctggacttag

SEQ ID NO: 34041 - DNA, 141 bp, Zea mays
  Peptide Sequence Number=SeqID_77416
atggccatgatgggttcaacatcgaaaaagatgtacctctgccaggtgaagaatcaacaaacttttgttgcttctattcaaaggtggtaccaaaagaagagaaccaagactaaagctgcgggaggaaaggtcctccattaa

SEQ ID NO: 34042 - DNA, 432 bp, Zea mays
  Peptide Sequence Number=SeqID_77417
atgggcgcgattaaggtcaaggctcagtccactcaaaggacacgatctcgcctcgcccgagcccagcctcgggcaaaggcagccgaccccggaggattcacatctcgcccgagggccccctcaagcaacggacacaccttcggctcgcccgaggcccagtcttcgcagagaagcaaccttggccagatcgccacgccaaccgaccccttggcctcggaagacggtttccgcctcgcccgacccagggctcggactcaacctcgacctcggacgacggactccgcctcgcccgaccctagggctcggactcagcctcggctccggaagacgatggactccgcctcgaccgaccccaggggtcggactcagcctcgacctcggaagactgactcgacctcgacctcggaggagcctccgcctcgcccgacctag

SEQ ID NO: 34043 - DNA, 354 bp, Zea mays
  Peptide Sequence Number=SeqID_77418
atgcatatatcttacgcattgcattcattagattgtaatctcgccgacgaagagtacgtgctcatccccgagcaaggaactgtccaagaggaggaccaggagcaagctttcgaggctgctatcgaggatctccctgtagccccagctattgaaggcaagccccgcttttgtgggtacaagtgcggtcactgcacggcggcagccggggtcagtggagcattgtatgccaaggcggtgtgcttcaggatatggttgatggtgaagaagcaacaaacttttgttgcttctgttcaaaggtggtaccaaaagaagagaaccaagactaaagctgcgggaggaaaggtcctccgctaa

SEQ ID NO: 34044 - DNA, 330 bp, Zea mays
  Peptide Sequence Number=SeqID_77419
atggactccaccgctggagctcgtttgggttgccgttcgggccttggatctgggccagggagcttcgccatgctgggcgtgactcctccgtggccttgcttgggcgaagccgcgcttcaggcggccggaatccttcaccaatgcaccactactactcaccaccgtgggcaggatcttcggtctctttttcgcctagtcttatcccacatcgacggccagaacccagaacttggcgtgctccggcgagccttctgctgtggtccgctcgggctccgccgctggcgtgttccagggaggaagaaagcgcctgggacatcagatcctatgtga

SEQ ID NO: 34045 - DNA, 372 bp, Zea mays
  Peptide Sequence Number=SeqID_77420
atgtccatttacatgatctccgagtaccttgttcagtgccatatttggtggtacacgaatatgttggttcacctggagctcctctactacccttacgcgaagcatgaaggggttcctaatccttttgctaatcagattcaactaacttcattggagaaggttctcaaaaccgagtctaatggatatgatattaatcagaggaaaaatgttattatgagaggagtcctttcggtgacggtcatatctgcagaggagttgccacctatggacattggtggcaaggctgacccatttgtggtcctgtacttaaagaagggagaaaccaaaaagaagacaagggtttttatctttcccaatctcagagttctgtag

SEQ ID NO: 34046 - DNA, 402 bp, Zea mays
  Peptide Sequence Number=SeqID_77421
atggatgaagcatcacttgctagcacaagcgcacaaggagcagacactactacaattggagatgaagagaggtctaattctaaatttgtatgtcaggtcatcgggtcagcccatgggccatcgggtcgggtcatcggacgggctcaggccgtgattttaaggagacaagctacgctgaattcagcgaaaaggccctactcccaaaaggcgcccgcgcctgaaaaagccgggtgcagcagcgcgacaaagcaagcagagaacatcctcattccgatgacaggcagcgtcctagcatggatagtttcatcggcaaagaccagccagccgagcattgtgacatgccaaacatgcaattccgaaaacaagccttattgctgtttatgtactactggcctagactaa

SEQ ID NO: 34047 - DNA, 570 bp, Zea mays
  Peptide Sequence Number=SeqID_77422
atggatgaaggcgacctcttcgcaacgccgagcactacaattcggctgtccgaggagaacatggatggcgatggaagcatcatgaccaatgacagtagggactgtgggcagcggtacccgatgatgaaccaagaaccggctagaaggcctccgccaatgggccagcggtacgacccagagccatgctggaggcagtctcggccgcaggaactgagcaacgggcagacaaaggagcagttcgtcgcggagatgcttgccagaccctcgagcgtggagtcgggccccgggagaccgcaggcgaggcctaggcagcagcaccaggacaccccagcagctcaagccaggccgcagccggctgcgtccgagaaaccggcggctcaactcgacgcgaactctgtgcgagcgaagctggagctcgcgaagaacgccaagctcgaggcgaccaagaggaagctccaggaagggtaccaagaatccgataacggtatgcgtgctgctgctgctgctatgggtataggatatccatccttcattgtgctggtggttcatgcattgtgctgtgctgcttga

SEQ ID NO: 34048 - DNA, 495 bp, Zea mays
  Peptide Sequence Number=SeqID_77423
atggggagaggcaagccgggctgtgatcttggtcccgccctcagcctcgagggtgttcgtcatcctcgctggggcggggagcgaggcgagctggggctctacgtcccgcgcgggccggcgggtcacctcttcttccagcttttggtggtggcaaacaccctccagctctgcggaggagatgtcctccagccatgccggggaaggcgaactgttgctggccagctaggatgcaacattctgccctcttccttgcattcgcggcaaggacggcagcgaggacctaccggtgcgcttgggggcggcccgctctttggctttaatagctggttcgcgtcccttgagcgagaacgcgaacgagagccctccggtggccgcatccatcctgggaccatggctgctactgtagaggtcgctggcgggtcccccggtgttcgtcgccccgcaggctcgaggttgttcgtacccacggggacggaaccagagttccgtttgtaa

SEQ ID NO: 34049 - DNA, 399 bp, Zea mays
  Peptide Sequence Number=SeqID_77424
atgggagggggaggatttattcagctccccatcacgtggttcaatgatttattagattcaaattcatctaaagaagggatcgcctgggctgggaatcgaacgtgggtgacaatcctggccactgccagtggtaaatcagttttcgccattctgccctgctgcagttgctcatggttgatggaaatggattgctccatccgcgaggctttatcttacagattgaaggttggacagaaacgtggaagattgcttgcagatctagaagaagatgaacaacctaaaaagaaggttagattagggagcccagcgactcaatggattttactttataatgctaggcggcccatgaagctgagtctctatggttcaagtagatccagaactgaactcttgagttaa

SEQ ID NO: 34050 - DNA, 855 bp, Zea mays
  Peptide Sequence Number=SeqID_77425
atgatgcgctctcattcgctgacctccactccaagctctctgttttcttcgaggaatccatatgcggcggcgcaatcatcttcgactacatcccggcatggcgccgggtgtcgactgccgactgccgacttctggcctggttttgaagcagacggcgaggacattcatgcctcgcactcctctgacccacagagagataagccctgcttccgtcttgctctgctctcccggcgacaacacgccatccaggcagcaagctgcaaacggtcaatggtgtcacgccgtgctgccgactgttcccatgcagcgccgtgcgcgaaggtgaagcctgggcgctgcaagatccagtaccgcggcatccggcagcggccgtggggcaagtgggcggcgaagatctgcgaccccgtgaagggtgtccgcgtctggctcggcacctaccccaccgtcgaggccgccgcgcgcgcatacgaccgcgccgcgaggcgcataaggggagccaaagccaaggtgaacttccacagcgacacctcctcctgcgtcaccgtgccgacgacggcgtcgaggtctactgctgctgccgccgcacaggccccggccgttctcccaccgcctaaggtggaggcacagactgagctgtccgacgaggtcaaggagttgtccgaggagctgatggcctatgagaactacacaaacttcctcggcatcccttacatggagggagggaccacagctgcaagtgccaccacagctgccgcctccgccgccgccgaagaatcgcaggtcccggctccggccgggctatggagcttcgaagattactactacccatcgtctcagtcgctctttactgaatga

SEQ ID NO: 34051 - DNA, 597 bp, Zea mays
  Peptide Sequence Number=SeqID_77426
atggcacccaagagagctagctcgaaggcagccccatccgtcgacgaagcagcgaaggcagcacttctagccgagaaaaagggcaaggccctcgcagacaacacccaccaagaagcctgcgaagacgacgcactcagcaagagacagcgcaatgatcaacccactcccaaaggcaccctccgcacctacagctccggagaacaaccacaagaaccacccccaggcttcgctccactagagggcgaggatgccacagaggatggcgaagtcatcggcatctcagcagaagaacaactacagctacgagccctgcgcatcaagaaccaaaaccttcaaaagcagaaagaaatcctcgaggccaagcatcagcgtgtctccgtgcaagccaaggtgcgccagatgatacgagacgaggagcagagggctcaggaactcgagcaagagattgcgctcatgcagcgtgaaggccaacacgatctgcaacacgacccgcccctccaacagcgtgcgctagtcggggacttattcattccccagcgcggacccttcatcccgcacgctgcagctttccagggcatcaactacctcgatgagtga

SEQ ID NO: 34052 - DNA, 333 bp, Zea mays
  Peptide Sequence Number=SeqID_77427
atggcgttcctattcggcgcattcctgggcctggtggtgggcgtggccgtcgtgatggcgttcgcgcgattcgagaacagccgcgccgagcagcgccgtgagctgcttaaatggctgaatcaagagctgacaaaaatctggccatttgtcaatgaggctgcatcagagttgatcaaaacttctgtggagcctatttttgagcagtacaagtcattcatcctggcctccctccatttctcaaagttgacacttggtactgttgctcctcagtttactgaacaaccaaacatcaagactgtatatgtttatgctggcttagattatgctacataa

SEQ ID NO: 34053 - DNA, 1452 bp, Zea mays
  Peptide Sequence Number=SeqID_77428
atggaccgaaggtccatgacacctggtatcagctccaggttatcctcaccaccaccagccgcccatccctcaccaccaccagccgccgcgccatttgccgccgcaacgccctcccacccgccctctccaactctagatgcattcactcggctcgaagagaagtgggatcaattcgttgtgatgttccaccgctacaaggagaagacagagaaggaactccaagcagcggtgcggcttcaggaggcagcgcgagggttcctggcacgccgccaggtacagtcccttcgtggggagaagcaccttgctgtggcctccagggccaccccatggccgtcatcacatgagcaggccgtggtgcgcctgcaagccgcagtgcgcggcttccttgttaggcgggcggtgcggaagctgcacttgctgatcagctcatcgctgcaccaactcgcagcctgcgcgcccaaccaccaggtctcgtctatactttttgaatcccctgcagaagtcaagatctgggtatgcaatccccctgcacggccaaagagggtcgtctccttcattcgggcaactgccttggtgctggacagacccaacataagaacgggctggttcctccttcacctttcatccaacgtgaagtccgcagttcagctctttccttgggatccaggaggacaggaggacatagctacagttcaaatttatattttagttccacaattattttgcattttcgtcttaaataataaagcctactctaacacacttgagttgagactaaaaggctccattgtctttgttgttattcaggtgaaaaatattggattcacaggagtacttcggctcatatttaaaccgctggtgtctgaattcccctgttttggagctgtttgctgttctttaagggagaagagcaaggtggaatttaccctcaaggttattggtggcgaaatgactgctattccaggaatttctgatgcaattgaggggacaatacgtgatactattgaggatacactgacatggccgaatcgcataattgttcccattgtacctggagactatagtgacttggagttgaaacctactggggtattagaagtaaaactggtggaagctagggacctaaagaacaaggatcttgtgggaaagtcggacccttttgcattgatatacatacgtccattgcatgataaaacaaagaaaagcaaaacaattaacaatgatttgaatcccatctggaatgagcactatgaatttgtggttgaggacatatctacgcagcacttgactgtaaaaatttatgatgatgaaggactccaatcatcagagatcattgggtgtgctcgagtagacttagctgatatacagccaggaaaagtgaaggatttatggttagatcttgtgaaggacctggaaattcaacgagacaagaaacctcgtggtcaggtttag

SEQ ID NO: 34054 - DNA, 465 bp, Zea mays
  Peptide Sequence Number=SeqID_77429
atgaacaaagacagaaatttgcagaatagagttgggattcagatgagtcagattcagattgtaaaagtcaaggagaccgcgaaagaagggagaaatgggaagagcaaggccgcggataagaacagggatgtaaacaacgcactcgtgagtatcctctgtcgggacagtaaccccacgacaaatacgccaagagcaaagctccttcggaggaagaactccgatatcgacaaggtggagaagatccgactcggagacaacagacatatgattacctgcgaaaggcaactggctgttgaaatcgataggaggaatggccgcagcagcagaattctagttcttccgcttgggtgccatcgcaatctcatcggtggactaagcggaagcgaaatcaaagggaaacagaggatgttcggaggcaaaaaagcgaggctagggctcagaacgcagaggcatgcggcgatgtga

SEQ ID NO: 34055 - DNA, 390 bp, Zea mays
  Peptide Sequence Number=SeqID_77430
atgggcaagagcaagaaaggcagaagttcgtcacaccattccggcgacaagcgaaagcgcgagccgacccctccgtcggaggacttcggcgattccgagtactcggaggaggagttttcctccgagtccaaggagtcgccagggatcaccgccgaggtgtggacatacatctgggccgtcgagcgctccaggatcgagggctcggatgagtcggaggtctcctcgggcgaggagaactcctctgactcgtccgaggaggagagcggcggtgatggcgatgacgacggcgacgacgacgacggaggcgacggtgatggtgacggcgactgcggcaagggcgacggcaagagcggcagcagcaaggccagtggcaaagcgccactggcttag

SEQ ID NO: 34056 - DNA, 189 bp, Zea mays
  Peptide Sequence Number=SeqID_77431
atggccgagtttcccctatgcttgatgcatggcgccttggtacaacagcagcagtcagacctttgcaaccccgattcaagaatcagggttgttgatggccttaatctagttcacaagtacaaagcctccgatttgcagcctcaaagtggcaatatcctaagcaccagttcaaatcacagcgcattctaa

SEQ ID NO: 34057 - DNA, 186 bp, Zea mays
  Peptide Sequence Number=SeqID_77432
atgtgggagtacacccacatcgtggaagacatgcagcgggtcgtggagcatttgagggacatgaccaaggcccccatcaaggataggagtcagcaacaatgtagccacctagatttccatgaacttgagtgtgacctctggtgtcattcctcggagtaccaaagctaccccactaggagccagtag

SEQ ID NO: 34058 - DNA, 177 bp, Zea mays
  Peptide Sequence Number=SeqID_77433
atgcccgcgggaaacgtcctgcgtgcaggcgctgaccggaggatggtgggcgagcagctgtttgctcatgcacgcaaaccgaggtcgcgggcatgggagaagaagaaggatcgataccgaccgcagtggaaagctgcggcaaggacggagaagaagctatgtcgctatgtcaagtga

SEQ ID NO: 34059 - DNA, 1692 bp, Zea mays
  Peptide Sequence Number=SeqID_77434
atgtcgtcttcctcctcgtctactgcgaccacgccgacggtcgaggcgtcttctgaagatctctcgggcactgtggcggcggcggaattacgaccgggcgatacagtggaattcggtgtttcgcggatgtcgttggtccgcgtgcaagatatgcaacggttggggtattttggcggcggggttggtcgggtcccgggggcggaggaggtccccgagcccgagggcgaattggttgtttttgaggcatttttcatcgccggccttcacctgcctgcgcatcgttttgtgtcggaggttctgcagaagttcgaagtccagccggccgcccctaagtccagcaaggtgccggagagcgcgaaggcggccagcgccggcggaaccaagtcggccccggacagagctgcgaaggtccgggaactgccatcgccggggaaacgcgttgccgacttcggcacaaatattagcgtggacgactatctcgttggatcgggcgaggggcaacttgttgttgttccgcctgcggtggcaaccacgacgtctaccgtggtgcttggggtgaagggtagcgctttcagcgctggcggcgagatttcagcggtcactgccgtcatggacgaagcgggcactgtgtcccgccggctgagggaggcgtcgcagcagctgagtcaagcggccaacttcgccgaccgcgtggcgtcgggcgcccttactgcagatgtgtctgccgaagttgagagacttcgggcgcagcacgctaacgccgtccgggagaagtcggctgcggatagcaagtgccgcaagctggcggagaaggtggccgccctggagggcgagaggacggacctccggcgccagctggtggaggagaggagggaggccaaccaggccatcgccaaggcacaggcagcgcaggcagaggccaaattggcgcgggtggaggggagtctcgccagccagcgcgccgaggaatgggaggtgcggttcaacgctctgcaggcccgcatggagagggccaaggcctctacgcgcacagaagttgagcggacgcgcaaacagctcgtggactcataccgcgagctgggtgcgcggactgctgacttcgaggtgcctgaccccgaccgagaggcgggccttcgcttcctcgagtggctgcaagatgaattgttggtgctcccgaccatcatggagggattcatgtcctttgcctccctcgtcacctgcgaaggggctatgaacgcgctgtcccttgaggggtgcagccactatgagggcttcaaccgatccgatgaagactttgggcacgagatttttaaggtcgaagaccctgtggtgaaggactccgtgggggccctcttcgaccggatgtggggcccccacggtcgggaggtggttagggagcggtctaaccgggcgagggatcagatggcgcgtgccgaggacgtggaggacttcggacccctgaacagcgcgcagcccgaagcggaggccaacccggtggtggccgaggctgaggtcgacccggcaccgcccccagaaaccggtgaaggctccctcgctgcccctgcgtctactgtgtccggtggaggctcgttgccagccactgtgccgatggtggaggatcccccgaaggtggcgacagagctggcagcggaggatcccatggcggcggctgggtcttcgcaggtggcttag

SEQ ID NO: 34060 - DNA, 294 bp, Zea mays
  Peptide Sequence Number=SeqID_77435
atgacgattcctgagagcagcgagttcgtcgctgagccagcctgggcaccggacaatccggacgctttggctcacaggccaactattgcggtgcacgtgcgcgtggaatttgaagtgacccatccctctcttggtcttcactcgggacagctcagcccacgcttcgcttcgatggccgagaagttgagcgttcttcctccctgcgacccgtggcccatttccttggtcaccgacgaggatctagaggcgttggtggatgtcgggctgcttcgcccccgctcctacggaccatag

SEQ ID NO: 34061 - DNA, 468 bp, Zea mays
  Peptide Sequence Number=SeqID_77436
atggaggcaagaagagctctgaggtaccgagtgcacgtgagaaggtcaaagaggccgaggaacctaaagccaggggtgaagaagaagacttgcaaactcaaggttgatcgacttgagaagagatatgagtccaacatcgacctcaaacaggccaaaatgggtaaaacgatgaaaaaggttaagtatagaaagtgccattctgagctctacttgatgagaaatagaaaagctaggagaagaacgggaaagaggaaaaccctcccaaaaattgaagtaaaatggagaaagaatggaggaaaaacacttaatgtgttgttgctagcccttttagagaaggaaactatcaatcagatctattactgtgcacagtccggtggtacaccggacagtctggtgcacccacagatagggaaggctgtgagctccaacggctccaaggccccttgggactataaaagggacccctag

SEQ ID NO: 34062 - DNA, 1770 bp, Zea mays
  Peptide Sequence Number=SeqID_77437
atggactacatggtgtttgaggttgctgaattggatggagcagcaatgatctgtcacactaacagcaaaaatgaaaggcagcttggtgcacggttctgccactacgaggtacgcccccgcctacccctgccccccacgaggccgcgacgcccaatcccccacgtcgcgcatcgtcgtctgctccccacccatcccgccgccgcgtccgccccctcccccaccgaaggagacaccgcgcgctacctccctccacgccctgtccacgcccagtcctcagcgtcctcggcgtcttcggcgttgcccctcgccctgtcctcgacgtcgcgtaacgacccctccgccgtcgcatcgcgtggaagggggaggagtcgcccgactcgcgccctcgacccctccgccgtcgcatcgcgtggaaggggaggagccgtccgactcgcgccctcgacccctccgtcgtccgctgtcgcatcgcatggtagggggaggaggaggacatggccggcatcgcctacaggcgtgcggtgctcctgcacgggcaccattagtggccgcagtggtggtagacctcaccctgcccccactccatctcgtagtggagcagttccatcgtcggagaaggcaaagatccagccaccaagttctctacgtgtgattcaaatgatgcgtccagattcaccaccaaatccttgggagcgttctggagctgaaggagcatatggtcctgcacctttcaagtccccatctggtggaagcaccagtgatgttgttgaagcttctggagtttacgacctttttaagagttctcggaagctaatcctacagatgcagcggagttttccaccatttggatccaaacgcgacgacagcctatcgtgcccaggcttctatagatgtctcaactcagtagattggatgaatggacctgtcaggccaaactttctagacttccaaggggtggactttgaggcaacgtttggggtgaggagagcttacagtgtaagggacattcaggattactcaaacccgtttgatctctttgagtccctgtttgaagggtttggtgaaatgggtggaatggggggtggccgtgctgctcggaacagaccaatgcaaggtgatgatgagagctacaatctggtactcaatttcaaggaagctgtgtttggtgtggagaaggagattgagataaccagattggaaggctgtaacacctgcgatggaagtggtgccaagccaggtacaaaggcaacgacatgtaaaacttgtggagctcagggccaggtagtctcctccacaagaacactgcttggaatattccagcaagtctccacctgcaatacttgtggtgccaccggcgaattctccactccttgcaacacctgtgggggtgatggccgggtgcgaaggacaaagaggatcagcctaaaggttcctgctggagtggattctggaagcaggctgaggcgagatgggacaaacattctctacacatgcaaggtttcttacattgatgcaatccttgggacaaccgtcaaaatccccactgttgacggaacagttgaccttaagataccctcagggactcagccaggcacagctctggtgatgtccaagaaaggtgtcccgcttctcgggaaatcaattgcccatggagaccagctggtgcgtgtccaggttgagattccgaagcgtctgagcagcgatgagaagaagctatttgaggagcttgcaaacctgaacaaggctcaaacaaccaatagcaggagatga

SEQ ID NO: 34063 - DNA, 129 bp, Zea mays
  Peptide Sequence Number=SeqID_77438
atggagcttgaacccacaacctcaaggttgggccagcgtagcacgcacctcggcgccatagcttatggcgccgagctgtgttacctcggcgccattggctatgacgccgagcaaagggtccaaaaatga

SEQ ID NO: 34064 - DNA, 564 bp, Zea mays
  Peptide Sequence Number=SeqID_77439
atggcgtcctccctcccacgagagcaccgacgtccggacttcgccagccagatccgttggttccaacagaacatttccatccacgcccgccaccgcgcaccgacatctccatctctatctccgatccgttgcagcccgcaggcacattctccatcagtccgaccgaccggtgcgcagcaggcagcgagcgggccactatgtgcgcgcgtagcgcagctaccgaattttcgctgcacaaaaccagagggaggagggggagggtgggggaaaaggaacgaaaagaaagggagggacagaggtgcagggcaaacctgcgtggtgcgggtggtttcgggcacgggcaagcgccaccccgctcgctgccgatcccaatccggctacagtagcggccgccccgcctgcggggcctccctccgaccgttccccccaccctccatggcaggctccatggtggaccgcgccaccagcgacacactcatcagcccggactgggctaagaacatggagatctgcgacatctgcaactgcgaccccgggtacgtacccctactccccccgctctga

SEQ ID NO: 34065 - DNA, 1626 bp, Zea mays
  Peptide Sequence Number=SeqID_77440
atgaaggatgcaaagcccatcaagacaccgatgggaacgaatgaacatttggacctcgatgcgggagcaatttttgagatatttggttcacacgcctcactcgggctctggtatcctaaggggtctacctttgacctaattgggtactcagattctgattatgttggctgcaaggtcagcctattcaccctcggtgctctgctcaaggaggggctctccgaccgccgattcgaggctggatctggatgctgccgcagcagcaagatgggaggcgagcagccaaagcatcgcccgcggatggcgtctccgccccactcagtcgaggtccggacccccggcgactcgccgcggcccaccgccgctctcctctccccctccgtggccgcaccccagccctccaccgcctcccgcctcctgctcctcctcactgcagccgttgccgccgctacgaccttcgtcctgctccgcccgcccatcaccgtcgtgaccgcggcatccgccaccgcgcgtccgctctccaagctctccaagcccgtggtgctgctcaccccctgtcatcctcggcgattcaagggatttacactgctctccaaggaaggacagggacttgctctaccccgtgatccactcccccaccgagctgctttcctaccgaggtcgcgaactcctcctgtgcgagatccacgctgctctccatggaaggctggggacctgcttgacccacaaatctcctgcttgttggtgaaaaaggttaagaggatgagggtgactggctacactatggaggatgttcttatgcaagaacctaaagcaggaattttgaagccagctttcaccattttgcttgatagagacaaaaagtctatacttctattaattaggggaactcatagcatcagagatacattaacaactgccactggtgctgtggttccatttcaccataccatcgtacaggaaggtggtgttagcgacttagtactaggatatgctctcagggccttgtctggcacaagcattgcagatgtgcccagacttcaaaataaaggtttgaattatttcatagccattttctttgtctttgatgctagagttgttggacattcactgggaggtggtacagctgctctgttgacatacgttctgagggaacagaaggagtttgcctctactacttgtctggcatttgctccagatggaaggttctgcatgccccgctcgaccccgcccccgccccaccctacacatgcccgccagaatcgccgccatgacaggctatccgaggtcagccgcatcgaggaggtcgaggagcccctcaagccggcgctcaccttcgcctcgccgtccgagagaaggatcagagcggggggagtagggcttgttttggcaaaatatctacacagagaagttctcaagggtgaagcctatgcagctggtgacctgggtgttgttgtccacatagcttacttcagaatggatgaaatgatgcgaggtcaaagaggatggcgggaacttcaagcacttggagataagataaatcagtttagtggcataatagaaggcttaatttggtctcctaaagcaagtgattcaaatgatagacacgatgattgggcttttgaggag

SEQ ID NO: 34066 - DNA, 615 bp, Zea mays
  Peptide Sequence Number=SeqID_77441
atggaggtgggggcacggctgggcgggccgattcacggcgcgcgcgcaggagagctcggcgggctagcagctagcacggcggctcgccggcggctcggggcaggccgccgtgcgtgccgcgccgggaagaaggagaaaggggaatgggagaagggacgcgagctcaccacggtgacgaacggcgactccggtgaggcgagcttggacgtcggtgaagacgggggcatgcgggctcgctggccggtcgaccggctgccgcgccgcgcttccatgcagcaccgtcggggctggccgcgcgcaggggtgaggatgggtgtcgcttcgtggctggccaggggcagggccgccaggcgccaggggctcggccacggctcaccacgcgcgggcgctggtcgccgcgccgggctgccgcgccaccgtgggcaggagccaggggaagaggcgggacagagaaagaaggagagcgtgttgaggggagagacggctaacccccttaacaggagcgttgatatgcacttggtgaagatgtcaccgactctgatcttgactgatttggaggagttggaggttgccaaatggataggtgcaagaggaaagaatagcgagaaaaggtaa

SEQ ID NO: 34067 - DNA, 1029 bp, Zea mays
  Peptide Sequence Number=SeqID_77442
atgacgaagatccttgaagctgagggcggggcggaggccgcagcccggcttgcatctccccaccaaactgcccattggcagacctcctcgcttgcaccccttagcgtcacgggcgaaatccccactgacaacctccaggaaattggtggtcgaaagggtgggctgccaggcgacaggcatccaactgcagcgcaactatgcgccccttcggctccgtccacatccggtggaccggcacaaaggaagcaggcccgcatgtcatgtaaccggcgtgccggttacgacgtgcgagaagttacaccgccactcgctccaatgttgcgcctcctcgactacggaaccggtaccgcgactcgaggtagccctgcgcaagacccaacagtgccagttaaaggcgacggccacgggccggttagccgcggggtaggcacgacggttggcatggtcaaaagcgggccggcagtaactgcagcggcagacaagcggaggcagcgggaccgggaaaggggacgttgtggaaaggatccttctcggcggaggaagcgagccccgagccctcctactgatcaggggttcaaaggctggcccctcgaaagggtttcgacagccgccccagagcgctcaggctccgtgcccactactgatcaggggttcgtaggctggcccctcgaaagggttcgacagccgcccagagcacacagagtgagggatgactctggcgccgctcgctccgctccgactgccgtgttagccaccccgggaacgactgacaacaagtcacgatcaaccaccgagttcagcctcgggcgcaacaggaagctccgcctcgcccgacctcatgctccggcctcgggaggaggtctccgcctcgcccgacctcaggctccaacctcgggaggaggtctccgcctcgcccgaccctcggactcggcctcgaccccagtctcgggaggaatcgcgtcctcgcccgacccccagcctcggcctcaagagaagtctccgcctcgaccgaccctaggctcggactga

SEQ ID NO: 34068 - DNA, 933 bp, Zea mays
  Peptide Sequence Number=SeqID_77443
atggaggtccattgccaaaccagcttttgccagaatgaagatggtttccccaagttgctgagagcatgcacagttcgcctcgaaatcaggagccagccagagtatgatggtcgtgaattcatcgagcatagcacagagaagtgtgtcgtgactgtatacattggatccagtccgcaccatgtggaatggagtgtcactgctgcagggcacagattcaaagacacctaccaagtcgtcgcccgcaaggcattgagggccctatgtcagatctatgaagaagtggcagacacgccgctcagattctttctaccctttcagagagaccaagatgcaaagaagcgcaaccgtcagctccatgtggatctcaccatagctcaagcccgtgcaactgcattggaaagtcgtgaagtcattgtggttgaagccctgaagcaagccaaggatgagcatgtccagaagctgatagaggcctacttggtaacccataaccaacatagagcccagcagatccaagagtctactccatccaacccagttcaacccatgagagctgaagatccccatattcttgaaggtcacctggtctctatcagaggagagaagaaggcttgggaactcccagaaggagccatagtcttggaaagaattccagtcttccctcaggctatgaataagcaagagcaccccaaatcctcccaagattccccgccagagttgtttgagcccctcaccatgaagaagattccagcaccatcccttgaagtcaaggaagaagctgcaagcaccccgccagcaccgccgccctttgaggagctacaagagccagtcccgcttgaagaagagttcaaccccatcttgccatctcagtccccgccagaagaagtcattaacatcagctccctcttgacccatccaggagatgtctcagattga

SEQ ID NO: 34069 - DNA, 579 bp, Zea mays
  Peptide Sequence Number=SeqID_77444
atggcgcctcctgttgacgtggctggtctacgccctaggttgggcgatgtggagatcgtcgtcttctgggacttagcccgagtccgagccctgcgccgggcgaggcggagatcgtcgtcttctggggccgagcccaagtccgagccctgggtcgggcgaggcggagatcgtcgtcttctagggccgagccccaagtccgagccctgggtcgggcggggcggagttcgccatcttctgggacttagcccgagtctgagccctgggtcgggcggagttcgccgtcttccgggacttggcccgagtccgagcccttggtcaggcgaagcggagcttcctatggtgcctccggcagggcctgactgcttgtcagtcttactctgtccagtggcactgcagtcggtgtggcgtatgcggcgctgtccttctgtcaggccgggcctcgggcgagctgagaatatgttcgccgctgaaggggggcctcgggcgagacggaaatcctccgggcttcatgctgatgggggttaccagctgagaattaggagccttgagggtacccctaattatggtccccgacagtag

SEQ ID NO: 34070 - DNA, 1494 bp, Zea mays
  Peptide Sequence Number=SeqID_77445
atggcgagggtgtgtttaggcctcggcggccgcaggaaacacacgctacaagacaatccgatcctgcaggctcgaaccttgacggctgaagggagcagcagcacccttggcatcgacgacaccttcggcgagggccaacctagcctcggacggcgacgcggtccgaggatctccactctggaggacgacgtcatcaccatgcccgggccatcgccgctagggtcttctccgggaatccggcctgagcgggcggctcggccagtcaccccggggcctcggccagttacctttcgaggacgtcaatccggcccgagcaggcggctcggccggtcaccctggggccttggccagctgccctccaaggacgtcagcccgacccgaggcctcggctggtcaattccggcgtcggtcccgctaacggacgacccggccaggctccggccaaccaggccccgacagccacaacgaacaaaaacaccggcactcaaggtgccgttacaaacggaactccggttccgtccccgcgggtatggacaacccccaacgacgaggcggaaagacggcggatctcccccatccgggggcctagaaggtggaaagacacgatgcataagggagcgcgaagacatggccgccctccaaaggggtcaccctccttttaaggacggttctccctactcgcgtccccagccgtcacgggctgagtcttctccgacacactccaaggtcctcccctacggcgcgggggctgggtcccacacgtcatgcaagccaactcagggcagaagaagccgaaccgccgcgcgcggtgcatacgaccgcccagcggttacaagcgaccctccacttttgcccagaccaacgggcgaaaggggaccgggaaagggggacaccccgaaaaggatccttccccgagaaggaaccaggctccgagcccccctactgatcagaggttcgaaggctggccccccggaagggttcaacagccgcctcagatcgtgtgggccctacacccactactggtcagaggttcaaaggccggcccctcgaaagggttcaacgaccgccttaggctactcgggctccgcgcccaatactgatcaggggttcaaaggctggcccccgaaggaatcccaccagagggaggcatcgagcccttggaccccgtcgccaggggaccgggtctggcagatcacccgcagctcgtcggagacaccatgttcggcgcccatcgagggcaacatggcgctttcccccctcctccttgtggaaaggcgacgcaggggcgtatgtaaaaaagccgagtctacccctgaccgccctctcgctctgtgcagaggctcgggggctgctctcgcaaacccggctccggccgaaccgttgacagcgtcaacataccagcccgagaacttgggacccgaccgtacacctgggctacggccagttcgcatgagggaacgaccagaccagccgaagcactacgtgaggcagtaa

SEQ ID NO: 34071 - DNA, 219 bp, Zea mays
  Peptide Sequence Number=SeqID_77446
atgggaatccgggagggccagccaagccgcctaggccgggagcacccaccacggatgaacggcgccgcccagccatgggagaggttgttgggggtaggatcgaatcatatatcatgggcgcaccgaaatcccacgaacccagccgatcccggcggctatggattcggcacgaaggagatggagccgccagatttctcaagttcaaattttaaattctag

SEQ ID NO: 34072 - DNA, 459 bp, Zea mays
  Peptide Sequence Number=SeqID_77447
atggacaaaaactccaaaaataaggataagcagttgaagtctcatcctccaaagaacgctgaatcggaaatcttgcgtgagcatatcaagaaagagagggaggcagcaaaggctggaaaacgaccatactatctgaagaaatgtgagttcctcaatcccaatacctccttcctctcctcactatctgtctatcttctaatcaaatggttactatctgttcctcaacctgatggtgatcagcgagatcacgcgtgcctttctgtgtttgtgcagctggtgatcagcgagatcgactcgtcagtcgctacctcgctgcaggccatgaagctactcgctctgtacctcactggagacaaggatggtgctatctctagtctcaaggaatggttgagtgattcagcaattggaagcaatcctgttctgcgattgattgccggaattatatttatgcatgagtag

SEQ ID NO: 34073 - DNA, 444 bp, Zea mays
  Peptide Sequence Number=SeqID_77448
atgggcaagggtcacaaacgcaagcgtgagccgactcctccgtcggaggatttcggcgactcggaatactcggaggaggagttctcctccgagtccgagggatctccagctcccgtctctcccccggcgtcgtctgatgattcagacgactcccaggggattgccgcggaggtctggacgtacatccgggccatcgagcgctccgggctcgagggctcggatgagtccgagttctcctcggacgaggaggactcggacggcggcgaggacgaagatgacgacgacgacgacgacggcgacgacgacgacggtggcgacggcgacggtgacggcggctacggcggcgggggcagcggcggcaagggcagcaccagaggcggcagcagcacgggcagcaccaggggcgacggcggcaagggcagcagcagcaaggccagtggctaa

SEQ ID NO: 34074 - DNA, 81 bp, Zea mays
  Peptide Sequence Number=SeqID_77449
atggccatgatgggttcaacatcggacaagatgtacctctgtcagccttaccttgactccctcaagccagcatatccttga

SEQ ID NO: 34075 - DNA, 852 bp, Zea mays
  Peptide Sequence Number=SeqID_77450
atggctgaaaggtaccaactcccacggagttgcgttcctacaacgacaaggcggaaggactgcgcgcatcccccattcgggggctcggaaggtggaaagacacgatgcataagggagcgcgaagacatggtcgcctttcaagggggtcaccctccttttaaaggcgactctccctacttgcgtccccagccgtcgtgggctgagtcttctccaacacgctccaaggtcctcccctacggcgcgggggctgggtcccacgcgtcatgcaagctggcccagggcagaagaagccaaaccgccgcgcgcggtgcatgcaaccgtccagcggttacaagcgtccctccaatttcgcccagaccagcgggtgaaagggcgagcatccaggcaggcggcatgcaaccgcgccaagtgggcgcacttctccgacttccaacacgcccacgtgtcatgcaagcaactgcaccgccactcgcaccactaccgcgcctcctcgactgcggaaccagtaccgcgactcgaggcgacccagcgcacgacccagcagcaccagcctggcgcgacgggactgggaaaggggataccctgaaaaggatccttctccgtgaaggaaccaggctccgagcctccctactgatcagaggttcgaaggctggcccctcggaggggttcaacagccgcctcagagcgcgtgggctccacacccactactggtcagaggttcgaacgccggcccctcggaagggttcgacggccgcctcaggccactcgggctccgcgcccactactggtcaggggttcgaaggctggccctcgaagggttcacagccgcctcagacacagagcgagggatga

SEQ ID NO: 34076 - DNA, 324 bp, Zea mays
  Peptide Sequence Number=SeqID_77451
atgggcggctccggggccgccacgtggccagagaaagtgatatactccaaggcgtcaacagtgatatacagtacggacctccaagctggtccgagacctccacgtgtacaagccggacccctagaatgggatccggacccccctgtatggggtccgtaccgcccacagtggggtcccaagaccttacttaaggcccaggcggggtctagagctgacacgtgtccagacctgctctggtgcgctcctaacctatccgcatacactcttgctccccgctcaggcggagacccgatgctgccacgtggcatactgcgtgcggcataa

SEQ ID NO: 34077 - DNA, 960 bp, Zea mays
  Peptide Sequence Number=SeqID_77452
atggcgcctcttgttgacgtggccggtctgcgccctaggttgggcgatgtggaggctccttcgaggtcgaggtcgagtctgtcttccgaggccgaggtcgagtccgagcccctgggtcgggcgaggcggagaccgtcggctgaggccagggctgagtccgagccctggggtcgggcgaagcggagttcgtcgtcttcaggggctgagcccgagtccgagccctgggtcgggcgaagcggagttcaccgtcttcaggggctgagcccgagtccgagccctggggtcgggcggatcggaattcgtcgtcttcaggggctgagcccgagtccgagccctgggtcggggcggagcggagttcgccgtcttccggggctgagcccgagtccgagccctgggtcgggtggagcggagtttcctatggtgcctgaggccgggcctgactgcctgtcagcctcactctgtcgagtggcgcagcagtcggagcggcgcaggcggcgctgtccttctgtcaggccggccaccttcgcattaaatgcccctgcgatttggtcggttggcatggcgacttggccagggttgcttcttagcgaagactgggcctcgggcgagccggaactttgtgctgatgggggttaccagctgagaattaggagccttgaggcagggttcaacgacaagatcatgagcagtcgcatgaggacgcttcccaaaaaccttattcgccctctcccagtgcaggatctcgaaggcgaagggaaaccgttcgtcagccaggttcatggaaggagggtcctaaaaaggtccaactcctcatcaggtccttcatttgctgttcctgaagctctgtacgaagttgttccaccttggcctccaagtctccgattgggtcattgctgccgctactactcccttcatgtttgggggctagctgatgacgaggcacgccaagaggtccagtag

SEQ ID NO: 34078 - DNA, 492 bp, Zea mays
  Peptide Sequence Number=SeqID_77453
atgacgtcgtcgcacttcctctcgagtctcgaccatgcctggcagcacaacgtgctttactcgcatgacgccctcgacgttgaccaagatcaggatgcgcatcagctcctcgcccacctcgtggagcgaagtagcgcgcgtatggataaggcagtccgtcgtggccctggaaggagtcttgagcgcctcaacgcaggccacgagcccctcgagatacttgccggaggcgcgggtattgaggaggaggcaaagggagaatgtgagggaagggaccaaggggggtctctcacggcggggcaaggggccgaggaggcaggggcaacacacgggggcaggcgcgggcggggccggagtggagggaggcgaggatggtgggtgtttggtgtggccgtagacaaggcaaggagcgcgagatgtgcgacggtgcgtggagcacgggatatgcggggctttgcggccgacgatggtgcgaaggggcatcagaatagatga

SEQ ID NO: 34079 - DNA, 1305 bp, Zea mays
  Peptide Sequence Number=SeqID_77454
atgggtgtcggcggagagaagttccagctggggacggtgggggcgctgagcctatccgtggtctcctccgtctccattgtcatctgcaacaaggccctcatgagctccctcggctttaacttcgccactaccttgacaagctggcatctgctggttacattctgctcccttcatgtggcattatggatgaaattctttgagcataagccttttgattcaagaactgtcatgggatttggagtacttaatggaatctccattgggctcctcaacttgagtcttggcttcaactctgttgggttttaccagatgactaagctggcgatcatcccgtgcactgtcatcttagagacacttttcttcaggaagaagttcagtcggagtatccagatgtccctttctgtgctccttcttggtgttggtgttgcaactgtcactgatctgcaactcaatgctatgacaaacactatccagaagaagttcaaggtctcatcgacccaactgctctaccagtcttgcccttatcaatcactgaccctgtttctcattggccccttccttgatggctttttgactaaccaaaacgtctttgcttttaattatacatcacaagttgtgtttttcattgtgttgtcatgcctgatatcggtctcagtgaacttcagcacttttcttgtgattggaaagacgtctcctgttacttaccaagtcctgggccatcttaaaacatgccttgttcttacctttggttatgttttgcttcatgacccatttagctggagaaacatacttgggatcctaattgcagtagttggaatggtcttatattcatacttctgcacagtggagacccagcataagaacactgaagtctccccacagcaggtgaaagaaagtgaggcagcccctttgatctcagactctttgagcaaagttgaaaatgggggcggtgttgttgatgacgagcctttgaagcgtcacgatctactactggtaaaagggtctgtttcttgggaggatcttaccttcaagattgccagatatacattgaaactagacggcagatattgtatgattgtatctggacatgttccacatcgtctaactgtaacttccaactggtacatggcatgcctatatccaaagatagatttctttttttttgtatcagaaagatccgataggtcactcgacctttgcaactacgtcctctgggaggctactatctgcaactgcttctcgcacgaacctggaaagcacatggcatcaatgacaagccccagattcataggtgtgccggagtga

SEQ ID NO: 34080 - DNA, 1275 bp, Zea mays
  Peptide Sequence Number=SeqID_77455
atggtgagtaactgcgcaacccatgtatcatggactgagttccgcccgttggcttatgccgtgcgcagtatgccacgtggcagcatcgggtctctgcctgagcggggagcacgagtgtatgcggataggtccggagcgcaccagagcaggtctggacacgtgtcagctccggaccccgcctgggccttaagtaaggtcttgggaccccactgtgggcggtccggatcccattctaggggtccggcctatacacgtggaggtctcggaccagcttggaggtccggactgtatatcactattgtcgccttggagtatatcactttctttggccatgtggcgaccccggagccgcccatgtggtggggtcagatgatgttgctggcccagagtagtcacccgaggctggggcgagtgacggcctggccccaagcacagctcctttaccacgtgactaaagatagccgcgtgggtactgcatcttcatactgtagtaaggggtaccctagttctagggtaccgacagtggcccctgggcccacctcaggagaggatgcgagcctgcagcaggcatctgctgggagtggtggcggcgatccgcccccggctgctaccgccgagacagcgccaccgggctcccatgctccagctgggggtccgacagcagcggcgccaacatcaagcggcgtcgcagcggcggaggaggtcccaattgtgccgacggctaccgcagcctcaacgacggtgatgccgtcgagtacaccatcggcagcgacggaggaggtcccaactgcgcccacccccgccattgagggtgacgcggggggcgcgtccaactccatcccgctgtccacttcggaggagatggaggtggtttttgggtggcggctctggtccagcgccgagccagaagcagcgccagttcccctcccccgggtgctgtctcatgcacatcaggctcttcatgagactgaggcggcgatcctgcgggagtgggaggtgcttgaggccgagcaccagcgcctcagcgactggcacacccaactggaggagcgcaccaaggcggtgtcccgccagttcgcctccaagtggtctgagctcaagcgggaccgcaagaattacaaaagggacctccagaaggtgtacgctcgggagctagaggcgtcctggagggagaagaagttggccaggagggaggaagccgtgtctcagcgggaggccctcgtaacagagctccgggccaagctgagtgccctagacaagatcttggaagagtag

SEQ ID NO: 34081 - DNA, 261 bp, Zea mays
  Peptide Sequence Number=SeqID_77456
atggcggcgtcgggatcgggaggcaacgagcccagcggacggccctggactgcaaccagcacgtggacccccggtcccgccggcggggccgtggcggacgctgtctcgtttgagacctccgacgacgacgcggaggcgtcaccggcgggcgtcgtgctctgccacccgtcggccgactcggaccgcgacatgactccctgcccctgcgaggtcactgatatagcgtgtccattttctgtgcaaggagtgatggttagctaa

SEQ ID NO: 34082 - DNA, 345 bp, Zea mays
  Peptide Sequence Number=SeqID_77457
atgcaggtggcagtccgcccgctcgctccgagcgccgtcggaggaggaggtgcgttttcggccggtcttgtccggtccgtgcgtgagtggagggggaggacgcatcggagggtaatcagcttctcgtcggcgggacaggggggcgaggaggcggcgcggcgcgagacgccggaggagacgcggaagcggctggaggagctggacgcgctgctggaggggctggtcgagcccaagatgcggccgccaacgccacctcctcctccggttctggttgaaatggaaaaacttcctgacgtatcttccttaatgccaacaactgatgctgagtacaagtctgtcgcctga

SEQ ID NO: 34083 - DNA, 1353 bp, Zea mays
  Peptide Sequence Number=SeqID_77458
atggcgttccgcctcctgcgtatgcacggatacgacgtctcttctgatgggctagctcagttcagcagtgagtccagcttccgcgattccgtccatggccaggcaaacgataccgaggcattgctggagctgtacaaagcgtcgcagattcagatcacggaggacgagctcgtcttggtagacattcgttcttggtcagctaaactactgaaggaacagcttggttccgacaaggtgcagcaagttctcaagtttcccttctacaccaccctagaccggctggaacacaggaggcacatagagcaattcaaggcagggggcttccacatgctaaagtcagcctaccgcttttgcaaggaagacgaagagcttgtatcgcttgctgtccaagggttccattcctcccaggcattgtaccaacaggagctccagttcctcacgaggtgggcgaaagaagcgagactgcatgacctcgagtttgcacgaatcatgccgatgaacacgttcttcccaaacgccgcactcatgtatgcccctgaactatccgaggctcgcatcctgtgcaccaagaattgcatgctggccaccgcagtcgacgacctgttcgacgtcggcggatcaagggaagagatggagaacctcgtcaggctgatcgacatgtgggacgagcacgaagaggttggcttctgctctgagcgcgtagagattctcttccgcgccatttacgacacgagcaaggagctcgcagccaaggccatggcggtgcagaaccgcagcgtcatcaaccacgtcgccgagctctgggcggatctggtgagggccatgatgaccgaggcggaatggagcatgcgcggacacgtgccgtcgtcgatggaggagtacatgcaggtcgcggagacgtcgtttgctctgggcccgatcgtcctcatgcccctctacctcatcggcccggagctcccggaggccgtggtccggtgccccgagtacaagcagctgttccaccacatgaacgtctgtgggcgcctgctgaacgacctccagtcgtacgagagggaggcgaagcaagggaagatcaacagcgtcctccttgtagcccctcggcacggtggctccatcgaggccgccaagagcgaggtgaggcgcgccatcgaggcctcccggagggagctgctgaggatgctggtcgccgaggcggacgccacggtaccccggcccttcaggcaggagttctggaacatgtgcaagatggtccacctgttctacatggaggacgactgctactcgtcgcccaaggagctggtgcacgcggccaacatggtggttttcgatccgctgcgggtcagggaactttga

SEQ ID NO: 34084 - DNA, 306 bp, Zea mays
  Peptide Sequence Number=SeqID_77459
atggccaccaccgcggtgtcggtcgacgagaagctcgataagcttcgcgccgagtgtgtttttccgcgcagcgagaacgagaagtccgggttcatcagcctcgtgtcacggtacctcagtggggaggcggagcagatcgagtggagcaagatccagacccctacggatgaggtggtggtgccctacgataccgtcgcgtcgcctcccgaagatctcgaggagacgaagaagctgctggataagctcgttgtgctcaagcttaacggagggctcgggacgaccatgggctgcactgggcccaagtga

SEQ ID NO: 34085 - DNA, 157 bp, Zea mays
  Peptide Sequence Number=SeqID_77460
ggacccatggctgtcgtcgaattcatgcaacatggatgctcatcgcttggcagcgttgtcttctccgattgaggtgtcgaaccaggagctgatgagcagcccgagcctggagttcacgcttgggaggccggactggcagggcacggatcatgactag

SEQ ID NO: 34086 - DNA, 378 bp, Zea mays
  Peptide Sequence Number=SeqID_77461
atgtcgcgcgcgttcgacaactactatatcgaggattgtggcgtcatcttggcgccggaggaaaacagcgccgcccgccccgctccggctgctgtgccaaccacccgggcgaaactgacaacgatcaagttcagcctcgggcgcaacaggaagctccgcctcgcccgaccccagggctcggccttggcctcgggaggaaatctccgcctcgcccgaccccagggctcgggctcggcctcggcctcgggaagagtcgcatcctcgcccgaccctggcctcggtcccagcctcagcctcggaggagtcgccgcctcgcccgacctcaggctcggatcaaccgtgccacaagggatgcatcattaccctactcctagctag

SEQ ID NO: 34087 - DNA, 618 bp, Zea mays
  Peptide Sequence Number=SeqID_77462
atggcacaggtgctgcgatcggtgggtgcgcggagacggggcggacgacgacggcgagggtgtggacgggcgcggctggtcatgggcggcgcggcggcgatgcagccacgggcgccgctaggggccacgggtgaggtggaggcggaaaacaacactatttacctcgttccgactactgtgccaaccaccagggtaagactaccaacagtgagtcacgacctctcccgagttcaacctcgggatcaacagggagctccgcctcgcccgacctcaggcctcggtctcagcctcggcctcgggagaaggtctccgcctcgcctgaccccaggcctcggcctcagcctcggccttgggagaaggtctccgccttacccgaccgcaggcctcggcctcagcctcggcctcaggaggaggtctccgcctcgcccgaccccaggccttggcctcagcctcagcctcgggaggaggtctccgcctcgcccgacctcagcctcgacctcgggaggagtcacaacctcgcccgacctcggcctcggcctcaggagaagtcaccgcctcgcccgacctcggcctcggaccgactacgctacaggggatgcatcattaccctacctctag

SEQ ID NO: 34088 - DNA, 522 bp, Zea mays
  Peptide Sequence Number=SeqID_77463
atggcgtcgtcgtcggatgcggtgtccagaacaacccgagagtcgttgacgttggcgacaaccatgaggccccccctgcttaacgatggaccgcgcagtgcagctgctctggaccgcgtccaagcggcggcttcacgggagcttatcgtacacagcgacacaagcgaccacgtaggactgcttctagaggtcgaactgacagtcgccaagcttcttctcatcatcgatgagcgatgccaacgcgagtgcctcctgctaatggtgtttgttcggggtttcaagttgtaccctttacacacaagtcgtgtatcccgtctagacatggtttgcaagacccttagacacttgcgaggtgaatgtctagagatccactacgagtcatttacaaagttctactcgcttcagaaaatccgctacggtttctgcgagaaggcatcgtccgaaaaaccgtcgcaaaatgatcgacccgagaacttccatatatcggtagctcctcacaccacggttgtcccttttgggtaa

SEQ ID NO: 34089 - DNA, 5115 bp, Zea mays
  Peptide Sequence Number=SeqID_77464
atgtcgtcgtcggcggcggagacgccgcgggagcacgtggagagtatccggcggaagcgctactacatcggccgcggcgagcaaaacccgctggcggaggacttgcaccaggccacgaactacctctcgcaggagctctactccaaggacgtgcacttcctcatggagctcgtgcagaatgctgaagataacgaatacccttctgaagtagcaccttctttggagtttctgattacatcaaaggatattactggatgtggtgcatcctcaactttgctcattttcaataatgagaggggattctctgcaaccaatatcgagtcaatttgtagagtcggaaaatcaacaaagaagggaaacaggcatcggggttacatcggagagaaaggtattgggttcaaaagtgtgttcttgatatcaagccagccccacatattcagcaatggctatcagatcaagttcaatgagaaaccctgtgcagaatgcaatattgggtacattgtacctgaatgggtggaatccacacctagcctttctgacatcgaaacattgtacgggtgctcgaaagtcctgcctacaaccaccatcatcttaccattgaagagcgagaagattgatgcggtgaagacgcagctgtcaagcatgcatcctgaaatgctattgttcctgacaaagatcacgaaactttctgtccgggagaactctgatctcaaccatacaactgttagtgagatctcgataactagtgagaagaactaccaagccaggaagaacatgcatgcggagtcgtacacactccacttatctgctgaagagaccgggaaagaagaagcagaatgcggttactatatgtggaggcagaaattcccagtcaagccagagaacagagtcgataagcgtgctgaaattgacgaatgggtgataactctggccttcccacatggccagcgtctgactcgtgggaagcagctattacctagcatctatgctttcctcccaactgagatggtaacaagcttcccgttcatcattcaggctgacttcctccttgcttcgtcaagggaggctatactgtttgacagtccgtggaacaaggggattctagagtgtgtcccaaaggctttcatggatgcttttgtgacacttgtaaagtctgatgcaccatcaatgtctcggccatctatgttcaactttctacctgtcgactcctcacagatcccactgcttgaaccagttaggtctggcatcaaagacaaggtccttgcagaggatatagttccgtgtgaatcttacgcttcacagaagatattctgcaagcccagtgaagttgcacggctcaagccaacattttggactatccttgccaaagcatgggggctaggagtggatctgaagaatctgtcaacccatggaacttatattcttagctcacattttgacaaaagtatctatgacagtgtgctaaactttctggatgtgaaaaatgtgaaccatgaatggtatgcaaaatgcattgaaggctcaaatcttgtcaaggaggtagatgaacaactttacctggaaattttatattttgttgcagtcaattggcaaaacttttctggtacaaacatgatgtccattcccctgctgaagtatgttgataggggtggtgttctctcgttctggagcatatccagagctagtcagtgtaatgataggttgtgcattgcgtctgaaaacaagtacatatcatggctaatcagctggaatagggagttcctatcttctaaccggttctttctgcctcctagcacacaaacagctctagaaggttgctcggagaagatgaagagctggcttcagaaacatgcaagagttgaggttgtctctatttatagttatggatcagttgttgttaattccttgggttctgatcaaagagctgtcattgccttcgcacactttctttatcactctttcaagaaggatcacatcggggactactacttgtcagaactctgcagcagcatgccagtaattgatagctatggctatgttgtcaaggaaagaaatagcattatagttcctgccaagggaagcaaatgggttggtttgatgggaacaaacccatggagggatcacggctacattgagttgtcagcagaatacaagtcagcaggacattttgctggaaactatacttctgaagaccagctattggaattcctcaagacaaatttgcaggcttcggatgtgccattcatactcccaccagatgccagattctctactgtgtcatcatctctaactgtggacaatgtattcttgctgctggaatggataaagaatttgaggtcacgtggtgtaagattaccagacctgttcttgacttgtgtcaaggaagggaattggctcaagacgtcggctgggtacaagtcgcctaatatatcatttctgtccagctccaattgggggagtcttctgcaaacagcaccttcctgtgttgatataccaatggttgatcaagagtactaccaaaacaggctacatatgtacaaagaggaactcaaggcaattggtgtgagatttgaattccaggaagcttcagcttatatcggaactcgtctcatgtctattgctgctggcaattcgctgacaagagagaatgtgtacacactgcttcggcttattcggtttctacgagagaagtttctatctccgagtgatctgatcgaaagtgtaaaagagggacgatggatgaagagtactcttggctacaggcgtcctgctgattgtatcatctacgattcagattgggaagtggcatcatgtatcagtaaccaaccattccttgatgtatcattctacggtgcagccatcctcgaatataaagtcgagctggaattacttggtgtcattgtggggttcaaagacaattaccaacttgttattgacaacttcaagtttagttcttgtgatattacctctcaagctactgttttaatcctcaagtgcatccgttatgtggcttcatgtgatgattttataaggaagctcaaagatttgaaatggttgaagacaattgtgggatttcatgctcctaacatgtcttttcttgtggatcctgaatgggagtgccttcttaaggtctttaatggagttcctattattgactatggattttatggtagtgtgatcagttcatacaaagaagaattgaggaagactgggttgatcacaaggttcgaagaggcatcaaaagctataacagaaattttcaagcagagggtgttgaattcatcgcttaaaaaagctgatgtcctggctctactaggatcgtatcgtcaactggcaatgcacagtccacttccagttgagctgttcaattctatgcgtactgaaaagtggctgtacacttcactgggattccgatctccatcagatgcaattctatttgatgatgcatgggtatctttgtctccaatagcaaatttaccattcatagatgatggtgactcttgccatggtttaggaatggagatacatggctacaaagatgaactgaagaagttgggtgttactgttgatttaaaagaaggtgctagattcgtcatcacaggcatcagcattcccaatgacccttccaagttgtccaaagctacaatcttgtcactgcttggttgcatcaagagctacttcacctttgcagctggacctcttaagggcttcaaggaaaatatgtgcaagaagaagttgttgaagacatccatgggatatcagtgtcctaatgattgtatcctctttgatccaaagcagtcttctgtctgcatggaagatggccctttcatagatgaatcattctatggttcagagatagcctcattcaaagatgctcttacaagaatcggagtaaccgtggatatcaaacttggaaaagatcttgttgctcggcatctgaggagccacaataaaacagttaccatttcccggatctacttatacctgatgacgagcaaatgggtgcctgcaagtaaaaatagcaattggatttggataccaaacgaaatggatggtggagaatgggtggcctcaggaagctgtgttcttcatgaccggaacaatctttttggcctgcagtttcatgtcctggacaaatattatgacaaaaagctgcatgacttctttttgtacactcttgacgtgagggacggacctggttctgaagattactgcaagctatgggccagatgggagaaatccgtcaaggagatagctgtgtctgattgctctgctttttggaaattcatcgcgacaaactggagccaaaacacccagaaacttctttctggctgtgccaaagttcctgtatgtactgacggaaagatcattttgacaaagaaggaggacgtgttcattcctgacgatctactactcacggacctgttcagcaagctaacccagcattcatttttcatctggtatcctgcttctatcctcccttccatgtctcgagctagacttaaccacatctatgacaccatcggtgtccaaagaatctccaaagcagccaccaggaacgattccttcaccatcgacggacgtcatttcagaacgattgatccaagtaaggtggtcaaggctggtctgctccaaatagtgctctcattcctcgctgaccccgctctcgacattgctgccgaagagaggcaccggatggtttcctgccttctgaatgtgactgtccaagagagtgacgagccaatcacactggggtatagtgtaaggctgtcatccggagaggttgtggatgtgaagtccagccgaatggtcaggtgggagagggaggattctaagctgtacgtgcagagtggcgacggcgagcccagctacaaagagaagatcgagttcgcgacatacttcgcagaggagatctctcagggcctgctctttgagatggaggaccagatcccttccctcgctgagcttatcaagttcggcagcttgctggatttccaggacgccgctgttgggttcttgctcaagtcaaagaacctgcagatgtttcctgaagatgagcatttcctgaagtcttcaatgctaggtctgttccctgattcttattgccctttctaa

SEQ ID NO: 34090 - DNA, 246 bp, Zea mays
  Peptide Sequence Number=SeqID_77465
atggggcccgcccttaggccgtgtaccagcgctctgcacacctctgctctctcgcttcgtgtcgctgcagatgggtccctgctgtcggactcatcccctccgcgccacgcgaattcgtgcaacagaatcactcaaacacaccatcagccacggatgaaggcggttcgtccggcggcgctcgtgcgagtagattggtggcggcgcgtgtgcgagcataacagccgtgttatcaaaggtgatgaatag

SEQ ID NO: 34091 - DNA, 516 bp, Zea mays
  Peptide Sequence Number=SeqID_77466
atggccgaggcttgggctacgctcccgaggtaccctaggacatttccgagaccagtgggaacgactcgtaatggaatcccaccggagggaggcatcgagccctcggaccctgtcgaaaagggttcgggtccagcgaatcacctgcaggaaaacagcgtcgcccgccccgctccggctgctgtgccaaccacccgggcgaaaccgacaacgatcaagttcagcctcaggcgcaacaggaagcttcgcctcgcccgaccccagggctcggcctcggccttggcctcgggaggaaatctccgcctcgcccgaccccagggctcggcctcggcctcggcctcgggaggaaatctccgcctcgcccgaccccagggcttggcctcggcctcaggaagagtcgcatcctcgcccgaccctgggcctcggtcccagcctcggcctcggaggagtcgccgcctcgcccgacctcaggctcggatcaaccgcgccacaagggatacaccattaccctactcctag

SEQ ID NO: 34092 - DNA, 1803 bp, Zea mays
  Peptide Sequence Number=SeqID_77467
atgtccacccttctcgctacgagcttcttctttgtactcctatgcagctcgctacaagtacgtggcgtgaactacacgttcgtgaaggacgcggcgctggcgcccagcgtgtcgtactacgactacatcatcgtgggcggcggcacggccgggtgcccgctggccgccacgctgtcggagcgcttccgcgtgctgctgctggagcgcggcgcctcgccctacgacgacgaccgcatcggggacatggcccgcttcgcggacacgctgtcggacacctccccgggctcgcccgcgcagcgcttcgtgtcggaggacggcgtcatcaactcgcgcccgcgggtgctgggcggcggcagctgcatcaacgccggcttctacacgcgggccagcgacgactacgtgcggggcgtcgggtgggacctgggcgccgccggggcggcgtaccggtgggtggaggacgtggtggcgttccagccggagctggggccctggcaggccgcgctgcagggcggcctgctcgaggccggggtcgcgccggacaacggcttcacgttcgaccacttcgacgggaccaaggtcggcgggtccatcttcgacgccgacggccggcggcacacggccgcggacctgctgaggtacgcgcgcgccgaggggctcgacgtgctgctacgggccagagtggccaagatcctgttcttcaatgtcagagccgaactgactggcggttacttcgcttcggcgccagggaggagatcagggaggcggacagcggcacgcggcgtggtgttccacgactccgaggggcggatgcacaaggcgttcctcagcgcgggccgccggaacgagatcatcctctcggcaggcgccatgggcagcccgcagctactgatgctcagcggcgtcggcccagccgaccacctccgctcgttcggcatccccctcgtgcgcgaccaccccgcggtcggacaggggatgtccgacaaccccatgaacgccatctacgtgccgtcgccttccccggtcgaggtctcgctcatacaggtcgtcggcatcacccaggtcgggagctacatcgagggcgccagcggctccaactggggcgtccgccactctgcctccgggtccgggccagacggtgtccaccggccgcgcaacttcggtatgttctctccacagacggggcagctggccacggtgcccccgaagcagcgcacgccggaggccatcgcgcatgcagcggagtcgatgaggcagcttgacgactccgccttccgcggtggcttcatcctggagaaggtcctcggcccgctgtccacgggccacctcgagctgcgcaaccgcgaccccgacgacaacccgctggtgacgttcaactacttctcgcaccccgaggacctccgccgctgcgtggccggcttgtcggtcatcgagcgcgtcatccactcccaggccttcaagaacttcacctaccccgacttctccatggagacgctgctcaacatgtcgacggggttccccgtcaacctgctgccccggcacgacaacgactccacgtcgcttgagatgttctgcaaggacaccgtcatgaccatctggcactaccacggtggctgccaggtcggcagggtcgtcgacgctgagtaccgagtgctcggcatcgacgcgctgcgcgtcattgacggctccactttcaacgcctcgccaggaaccaacccgcaggcaaccgtcatgatgctcggcaggttgcacatattgtcggagttgtatcatgttgtttgttactatgtggactattatgagtga

SEQ ID NO: 34093 - DNA, 1188 bp, Zea mays
  Peptide Sequence Number=SeqID_77468
gtgaatgacaccgtggggacattagctctaggacattatcacgatgaggatacagtggctgctgtgatcattggtgctggcaccaatgcttgctatattgaacgcactgatgcaattattaaatgtcagggtcttcttacaaactctggtggcatggtagtaaacatggaatggggcagtttctggtcatcacatttgccaagaactccttatgacatctcccttgatgatgagacacaaaaccgcaatgatcaggggtttgagaaaatggtctctgggatttatcttggggaaattgcaaggctggtgctgcatcgaatggctctagaatcagatttttttggtgacgctgctgataatctatgtacccccttcacattgagcacaccactcctcgctgcaattcgcaaggacgattcaccagatctgagcgaagtcaggaagatactgcaagaacatctgaagataccggacactcctctgaaaactcgaaggctggttgtcaaagtgtgcgacatcgtcacccggagagctgcccgcctagccgccgctggtattgtcgggatactgaaaaagctcggccgtgatgggagcggtgttgcttcaagcgggagaacgggagggcagatgaggcggacggtggttgccatcgagggtgggctgtacgagggctacccggtgttcagggagtacctagacgaagccctggtggagatcttgggggaggaggtggcgcggacggtggcgctgagggtgacagtggatgggtctggggccggcgctgccctccttgccgccgtacattcgtcgaatagacagcaagttcacagagagtaccaagctgtcatgggctgggctgacagaggacagggatccttcagtaataagaagcccgatatgagaacagcacataccataacggaagtacgttcgtgggccacgagccacaaaggccgaaagcgtgcgccattcgaaaaacgcgacggtttcttccagaaggctccgaggctccaaccacacgtcggttcctccgactccgcgcgcgtctcccgccgttccgccggcaccgtacacgattttcgcttgtacagttacgacaaggattacacggattgtgcgacgaatgatgcacgggaggaggatagtacgtttggtatggcgtcttggtttatcttggaagaaggataa

SEQ ID NO: 34094 - DNA, 150 bp, Zea mays
  Peptide Sequence Number=SeqID_77469
atgtccaaggtcttcaccctcgacgcggtcgccaagcacaactccaaggaggattgctggctcatcatcggcggcaagaccccctacttcggcaattgcctgcacctttgtgcttgtgatgtcatcttttatcctgatgtctccttgtaa

SEQ ID NO: 34095 - DNA, 435 bp, Zea mays
  Peptide Sequence Number=SeqID_77470
atggcgggggtctctcgcgcgatcagggcctgcgccgccacgtcccagcgcaccctggtcgctgcttcggcggtggcgctgccgaaggaggcgagggtgaaagcggcaacggtcgggcgcagggggcggggtccggaggacgggaggcgcgtgcagtgggcgttcctcgggtgccccggggtggggaagggcacctacgccagccgcctctcgcagctgctcggcgtcccacacattgccaccggcgacctcgtccgcgacgccctggcctcccctggccccttctcgaagaagcttgctgagattgtcaatcaaggaaaactggtgtccgatgagatcatcataaatctgctgtcaagacgcctggaagagggagaagaaaagggtgaattggggttcatccttgatggctttcctcgaaccatgagacaagcg

SEQ ID NO: 34096 - DNA, 1136 bp, Zea mays
  Peptide Sequence Number=SeqID_77471
acgaacttaaagcatagtaaccgctctgtttgcctaaccatatatacgaacgaatgtgtactagcctccacggtagctgctactgctcttgctctgctacaccaccacccacaaggccagcaccgcacagccgtcagccacaacgaccgctgcatctccggggcggggcgcctcatgcccgagaagcctccaccgctccgccgtcgcccgacggcggcggggagctgggtccggtcgctccactgcaagtccatggcggccgacgacgtggccgccagagtagcggcggcgcccaagaagctcctcccgcgcgctggctgcggtgggagctccggcgacaccctcaaccacgtcgtcgtctcgtccaagcccagcaggcccaagcccaagcccaagcctaagccaagccccgaaccgaagacgaccaacaagcccaagccggtgcctgtgccgccgtcgccgcctccgggccctctcggcccggtccctgcgctcacagagctccctgccgggcactcgtcgcggcaggtggtggagatcatcttcctgtcctcgtggtcctctccgccaccgggagcgcccaccagcagcagcagcacgttcccgggcgcggtggtggagatgctgttccgcgtgcacaacccggcgcgcgccgtggcgcgcttcgaggactaccgcgccgcggtgcgcgcccgggccggcggcgcctcgcgcagcgcggccgacggcaacgagatgatgcgcttcaccccggcgccgccgtacggctcctcggccgctgccgcggcggcggccggcgaggacggcccgcgcgtccggacgttcgacggcagcggcggcgcgcacgccagcgcgcgcgggcccgcgaccggccgccgcgccatgttcctgtgcagggtcatcgccggccgcgtggcggagggggccggcgcccacgccgccgcagcggccggaaaggagcacttcgactccgtacgggttggcaggggcggcgagctggtggtgttcgaccgccgcgccgtgctcccctgcttcctcatcatctacaagcttcgcagcagctgcgcaattgcagatactgtgcgcgtgcagtccgtgcgcgagtttaaggcgcgcacagaggctgcgcatgtccg

SEQ ID NO: 34097 - DNA, 203 bp, Zea mays
  Peptide Sequence Number=SeqID_77472
gtcctgctgtgacgaggcgggaggggccctgccggcgtgttggtcccgcgcggtggcggcactcgttgtccaatgagatccgctggctcccgggcgtgacgccaaatctgcttgtagttgtactgaagcatcatgttaccaacgtggagtggcgatctggcactgttcacatcgtccacggccaggatggaggccagcagtag

SEQ ID NO: 34098 - DNA, 432 bp, Zea mays
  Peptide Sequence Number=SeqID_77473
atggaccttatgggccttaacagaagcttgttacagtcttttactcaagtaaatgcactcgaacgcttcaaagatgatgatgatatgctttggagatctcctggcactcctgttttcactgccccggagtgctgtcaaggttcagcctaccatggtagagcatctgatacatgggcagttggtgtaactttatattgtatggtctctgggcactatccatttctgggggatacattgcaggaaacttatgataagatccaggagatcgcatcacactgcgtgctgcggctgagcatccttgggtcgctggggatgaggggccagtccctgaattcatctgtagatgtgggtttggccgcaggaagaggaatgatgtccgggaagaagttcaataacaaagcatcctcggatggtctaataggtctagcgtag

SEQ ID NO: 34099 - DNA, 495 bp, Zea mays
  Peptide Sequence Number=SeqID_77474
atggctccgcccgccgcactgcaccaccgcacgcccctcctcctcccccgccgcaccgtcgccttgggtgccaccgccaccgcgcgcgccgccagggccgcttctctcgccgtcagggcccagccggacaccaccgccgcagccgtctccaccaccgcgcctgagccgacgcccgagttcaagcctccgccggggttcaaggcgcccgagcccaagaggttcgaggtcaagtccggccagctgggcagcgtcctcggcgcctcgctcgccatccccctccgcctcggcaccggcgtcttcgtcctcgggtactcgccatctcttgtttctgcatcagagataccatcagaccagtatgcactggaattcggagcttggaaggtgaaagaggaatcaaaaataggacagtgcaaacgaccagaaaagcctatcgagatatatgaatttgaagggtacagcctatcttgcttcttcctcctgtttatatcatgctga

SEQ ID NO: 34100 - DNA, 618 bp, Zea mays
  Peptide Sequence Number=SeqID_77475
atgtccctttttataggcaaattttgcatggaactgttggtggcttgtcaggcactctgcaacaagttcaggccaggagccctcaacttcctggtcctgctcaggctagtcttttttggtaccctgggtatcaagacagagattaatcccattctgacccctagagctgcaggcccagaagggtcatttataggtgctcaaggatctaatcaagctgggaacaatttgactctgaaaggatggccactcacgggacttgagcaacttaggtcaggaattcttcagcagaagtcgtttatacataatcaacagcaattgcagcagcaaatccagatgctgactccacagcagcagcagcagcttatgctgcatgctcagcaaaatatgtcttcaccaacatctagtgatgtcgacaacagaagattgaggatgatgctaaatagaaatgctgttcttggccgggatgggcagacaaacagtggtagtgatattattccaaatattggctctcctagtcaaagtggtggcgatatagatatgcttataaagtggcaagcctttttactagtggacttaggcgaaagggcctctagcgtaatggttaaggcttccgagtag

SEQ ID NO: 34101 - DNA, 647 bp, Zea mays
  Peptide Sequence Number=SeqID_77476
atgctgagcctgaggtcagtatccggctccaactcctcgaggggcatcgccgccgtggtcggcgtcggccccaggctgggctcggcggtggcgcgcaagttcgcctccgagggctacaccatcgccatcctctcgcgcgacctcggcacgtgcgtgcgcgtggttgcagagaagctgtcgcagctggcggaggagatcgcgcaggcggccaaggcgcaggtgttcgcgctgcgggtggactgcgccgacgcccggtccgtgcgcgaggccttcgagggcgtgctctccctcggccccgtcgaggtgctcgtctacaacgcctgcgagccgcctgcagccaacgaggacgcgcgccccgcgcccttcctcgccgtcacccccgacgccttccaccgcgccctcgccgtgtccgccggaggggccttccactgcgcgcaacaggtcatcccgggcatggtggagaggggcaggggcaccatcatcttcacgggctcctcggcgtcggtcaccggcttcgccggctactccgatctaagcagcggcaagtttgccctgcgggggctgtcccagtcgctggccagggagttccagccggccggcgtgcacattgcgcatgtgatcatcgacggcgtcatcggcgagaggag

SEQ ID NO: 34102 - DNA, 333 bp, Zea mays
  Peptide Sequence Number=SeqID_77477
atgacccgcgtcgtgctctgcgggacccttgccccgacgcctgaagatcttgcgccgccaccctgcctgagccttcgtcaacaaccggagagagagggtggtgggaagaaccgcctgcatcgtcgtgattccggtatacctcttcgaagatcgcactcttctctgttgcgaataacgtcattagaatcggttgaatcgggcaccagtggggtgcgtggctaccgccgacaatggcaccgccatgggggaaacctgtgcgccactgcgctcggcttggctggggaaggggataagtccctgaccgtttgtcttattttgaacggctacgattaa

SEQ ID NO: 34103 - DNA, 270 bp, Zea mays
  Peptide Sequence Number=SeqID_77478
atggcgaaggctcgcgacgagacagagcgtgagccccaggcgccgccgccggcgatgatggcgaagcaaggcgaggaggagaaggaggccgcgccagagcgcaagccggccggggagcgcagcatggcgtaccagatcttcgcgggcctctacgtgtgcgcctacgtcttctgctggaggacaggcgagctcatcttcctgaatgcgcaggatgctctcgacaggctccggcgacacgttcgcgacaagctcttcaaccgaaaacgatga

SEQ ID NO: 34104 - DNA, 432 bp, Zea mays
  Peptide Sequence Number=SeqID_77479
atgctgccgcgcgcccgcgttccggacttttgttccggcgcgcgcgccgcccccgccgcggctgccgcgtgcacgcccccacttttaggccaggaaggacgcgtggtgccgccgcctggctcggtcgcgccacatgtccgccggctgcctgctgcctgctgccgagctttgattcggtgcggtgccccggggcgccggatccacgacaagctaggtcgagaacgacgtgcgagcttcgtgcttgctttccacgccagccagctccactcgcggtcgtccacgtcgctgacgaggagcagcagggccggcggcgacacggcgggcgcgggcgcggacccggacgcggtggcgcagagctactggcacgtccacgcccaggacaagagcgcttggacgcaggagatggacatccggtcgccgtccttcatgtag

SEQ ID NO: 34105 - DNA, 438 bp, Zea mays
  Peptide Sequence Number=SeqID_77480
atggcgtcaacgcgcgacagcgtggccaagaggcccttgatgttgtccccaatgccaagaacgacgcagacctcctggccggcggagtcttccattgacgtcgtgcatcgctcccctttgcttgttccaagttgggcggcggcaggggacatcgccggcgtggattcgaccaacagcggccgtgtttttcctgtcgcacgttcgcttcgtctagaagactgggactgcggttgtgctggccgggcggagccgccgccagtgccgcgaggcaagctacaatggctgaggaaggagtccatccggaaggttcctgacttcccgtatcgtagagagcctgtgtgtgacaggaaatcgatttgtgaacatacgatggttctcgaaccttcacgacatatggagacgccgagccacctgaattttagacgacggatggcctag

SEQ ID NO: 34106 - DNA, 222 bp, Zea mays
  Peptide Sequence Number=SeqID_77481
atggcttttgttatccacttgagatacgcatacgctttggagagcgccgtcaaaaagacagagagaggagctgccgcctgcgtgcctctcacgaaagctcccaagcctccagcgatcttccacggccggcccagcaacggcaacggcaacggcaacggcaacggctggaggtgcgtgcgggcgcgcgttttccccggtcggatcggcggcaaggtcacgtga

SEQ ID NO: 34107 - DNA, 1482 bp, Zea mays
  Peptide Sequence Number=SeqID_77482
atggctgctgatgttgggcttcggttcaacggctggtcatactcggatttgccttacaacgaccacaatgcacaggattcatcagttcaggaaatggtgctcaaccatggctcggtgtcattcggtagatttgctgcagaatcattgtcatgggaaagaaggtcagtgtttgaacataacagacgccaagaggaactaagcaagctcacagcccctggtttggttgcacaaaagaaggctttctttgaagaatattacaagagggcaagacatctcaaggctcagggggtattgcaccaggctggagccgcagtggaggagaacgatagcagccaggcagatgaattgccagcagctatgtctgaagatccagtagccactgctccaagttctagttttgagccttccactgatgttgagagcaaatgccaggatgctcatgagcacgggtacttgacatttaatcctttattttctcagacagcaagcttgccaaacattcaggaggagagttctagctctggtcaaaagcatggattcagttgtgaaactattgagagaaaagttcttgcaccaagacgtgtggcatcaaatgataatgatcaaagcaatattgctggatcaaggattgtcttaccaatagtcagtctacaatcagaatacctcaaagctgatcctgagaagagtgaggcaagcaaaaatgtacctattattaataggtcaaaaaaggtatcaaaggacctggcaacttctgttatcagcatcccaagggtagatttaagaaggaattcagaaaacggaccctctcgagacttggaggatccattccacaagagagttgagatgaaattgcgtgctttatctgatcggatggatgctgacagaactacggcctctagtagatcatcctcttaccaacctcctgagagagctatgacctcagctagatctgcatatcaagatagactagcaatatcttctagatccagtgtgtctcagaacactagtaaagccttggcaccttctaaattagctgctcaagcttcccataaatttcttaaaggtgtgcagcgtttagatgccatgccccgtggtattttcgttaataaaggatcaagtgcttctcttgttgcttcttgcaacagtagtgcaactgggaagttgtctgccaagattttggtggcacccagttcgtctcaagttggtgcaaagacttccaggactgctcaggttacaccgaaaagagcagcaggacctaccagtgtaaacaatgtgtcacacaataaaagaagcagctccgagaatctccctcgtgctgcaaaggcgcctaagatatcaaaagtgatgaatgcggtgtccaaggctgaagctgtgcagaagtcaaaatcatcaagcaatcttgtggaggaagaaatttatcgacaaagcgctccgcaaactgcaatgaagaaaacagaaaggcgatcccgtcgcgcaaggtaa

SEQ ID NO: 34108 - DNA, 213 bp, Zea mays
  Peptide Sequence Number=SeqID_77483
atggggtttgccatcccattgcaccccacagcagcttccgtggcatacgggctgctcacatgccgcgctctgcagcaggagcaagcaatcccacccgcccacgatattggatccaatatgacatgtgaggacggcgaccagacggcatggacgaggcgaggacacatctcagccgcgacgtcgcatgtgcggtgccggctgcgcccgttctag

SEQ ID NO: 34109 - DNA, 435 bp, Zea mays
  Peptide Sequence Number=SeqID_77484
atggcggggatctctcgcgcgatcagggcctgcgccgccacgtcccagcgcaccctggccgctgcttcggcggtgacgctgccgaaggaggcgggggtgaaaccggcaacggtcgggcgcagggggcggggtccggaggacgggaggcgcgtgcagtgggcgttcctcgggtgccccggggtggggaagggcacctacgccagccgcctctcgcagctgctcggcgtcccacacattgccaccggcgacctcgtccgcgacgccctggcctcccctggccccttctcgaaaaagcttgctgagattgtcaatcaaggaaaactggtgtctgatgagatcatcataaatctgctgtcaagacgcctggaagagggagaagaaaagggtgaattggggttcatccttgatggctttcctcgaaccatgagacaagcg

SEQ ID NO: 34110 - DNA, 1005 bp, Zea mays
  Peptide Sequence Number=SeqID_77485
atgcaccgctccttcctcctcgtctgtgcactcgtagccaccgcgctttccaccgacaccaccgttgccgccgcccagagccagagccagagccagagccagaggtcatgggccgaactcagcgggcgggacaactgggacgggctcctggacccgctcgacggcgacctccggcgcgccgtcatccggtacggggagctggcgcaggcgacgtcggacgcgttcatcggcgacccggcgtcgccgtacgcgggcgcgtcgcggtacgcccccggcgcgttcctccgcagggcgcaggcgcccgacccggacgcgtacaacgtgacgaggttcctgtacgcgacgtcgagcgcgcgcgtccccggccagttcatcacgcggccggcgccgccgggggcgtggagcgccgagtccaactggatggggtacgtcgccgtggccacggacgccggcgtcgcgaggctggggaggcgggacatcgtggtggcgtggcgcgggaccaagcgcgccgtggagtgggccaacgacctggacatcacgctggtgccggcggcgggcgtcgtcgggcctggccccgggtggtcgcagccggcggtgcaccggggtttcttgtccgtcccccgcgtgggcgacgaccagttcaagaaggcgttcgactcgacgcccggcgcccggctgctccgggtccggaacgcgcccgacgtcgtgcccaccgtcctgcccaacgccttctacaaggatgtcggcgtggagctgctgctggacacgcgcaagtcgccgcacctcaagaggcccggcccgggccccgccgcctggcacaacctcgagtgctacctgcacggcgtggaccgcgacgtcgcgctggtgaacaaggaggtggacgcgctcagcgacgactaccccgtgccggcggcctggtgggtggaggggaacaagggcatgaccagggacgccagcggacgctgggttttgcaggatcatgaggagggtaacctcgctatgtga

SEQ ID NO: 34111 - DNA, 861 bp, Zea mays
  Peptide Sequence Number=SeqID_77486
atggcatcgttgagctttgcctcgtcccatgcgtccctcttctgttgccaacaatcctccagtgcaatcatccttcgaccagctggagcactgctgcggctgtcccggaggcaaccgtcgtcgcataccatttccaccaccgaccaactgttcccgcggcggtcacgcatgccgcggaacgtggatacgcatgccgccgcggaacgcaactctcccagcacaatgagcagtctggaagcggtggacgagctggagacgaacggcgacagcgcggtcgtcgtcgtcagggagcagcagcagcagcagcacctgctgatgggcgccaccgacgacggcttaccgccgtcgccgtacgacacggcatgggtggcgatggtgccggcgccgggtaacccactggtgccccgcttcccgcagtgcgtggactggatcctgcagaaccagcgcagcgacgggtcgtgggggcccgacggcggctccggcgaccacccgtcgtcgccgctgggcaaggacgcgctcatgtccactctggcgtgcgtccttgcgctcaagacgtgggacgccggcgaggagcacgtcaggaaagggctctctttcgtcgggaacaactcgccgtcgtgcgtgatgacgggtgacgagcgcgacgcgccggtagggttcagcgtcatcttccccggcatgctcgcccgtgccatcgacatggggttagacatcccaatgatgacgcaagccaacgtcgacgccttcatccgactgcgtgacacggagctaaacagaatgagaaatgaaataaaacaagctaagtttgcagcacatgaagagaacctcaactttgtaactcatgacatggatttgaaataa

SEQ ID NO: 34112 - DNA, 321 bp, Zea mays
  Peptide Sequence Number=SeqID_77487
atggagtggagcactgccgccttaggggtccgacccctttgcttgttccaaggggacgtcgccggcgtggattcgaccaacgggggccgtgtttttcccgtcgcacgttcgcttcgtctagaagactgggactgcggttgtgctggccgggcggagccgccgccagtgccgcgaggcaagctacgatggctgaggaaggagtccatccggaaggttcccgacttcccgtatcgtagagagcctgtgtgtgacaggaaatcgattcgtgaacatacgatggttctcgaaccttcacggcacatggagacaccgagccgctag

SEQ ID NO: 34113 - DNA, 83 bp, Zea mays
  Peptide Sequence Number=SeqID_77488
atggatgatctgacccagtgccaggatgagagatgctcaccatttaacaacactaacgtagtgtttatcccaggcaagccccg

SEQ ID NO: 34114 - DNA, 405 bp, Zea mays
  Peptide Sequence Number=SeqID_77489
atggtgttctccaatttctcagggacaactgttgaaacagatagcacacaagctccaatttctcaggttctctacacattccactcagttcatcactctatgcctaagttggagtattcgagttctaaaatggatatggagaaagaaatcaggaaacaagtagatggcgccattgctaaagcaaagttagatgaggcgtccagggctctcctgatgaaggtactagaagatgccacccaggacgttgtgcagaggcaggcaaagatgttggtgctcttcgagacccccgcggggtttgccctattcaaggtgctcgacgaggggaagctcgacaaggtcgaggatctatggaaggagttcacgacgtcggactcagcgagaaagattgcagatgaaattatttga

SEQ ID NO: 34115 - DNA, 507 bp, Zea mays
  Peptide Sequence Number=SeqID_77490
atggactccgtgcgctcgggccccttcggccagatcttccgccccgacaatttcgtcttccagtccggcgccggcaacaactgggccaagggccactacaccgagggcgccggcaacaacaggaaccgcacccgccatccgcgaccgtcaaccacctacctgcatcctctatccgccagcgatgtcggtgcccccaccggcaaccgccaggtgtccctgtgggggtccagcacgaaggagatcacacgtgacacgctgctgcagaaggtctccgaagagaaccagctccacaaacacctttgtcgtgccgccgcggctgccctctccatccaggaaatagaaggttcacaaggatttatgttcaagtttcattcaaataaaaaatgtaacagccgcctcatagtgcagggaaggcttgtcatattcaccaatgattgctatgtgtttgcgctgtgccctttcgcaggacctcaatttcagatgaatttaaaagacgaggagtactaa

SEQ ID NO: 34116 - DNA, 657 bp, Zea mays
  Peptide Sequence Number=SeqID_77491
atgaggacggcgcgcgtgccagcaaccgagcgggacctccaccatctcctgcaccgcgcgctgcaccaccgaaccgacggcgtggctaggtggcgcaaccgtcgatccgaaggggagccgtggcccagcgaggagacaatgttggttggagcagggcacgggcggaggcgccagggagcgggatgcggtatccaggggcggcaagcgccgctagggtttcgtgcccaacgaggaggcggtgatggcgggtccagcgaggcgtgggaacagagtcttagggaggtccagagcgagggggagggtgcgcccgacggcggaggtggaggcggagggagtgagcggttgccagcgtgcgttggagaactgcgaacgggagggggcagagggagcttcgcgcggacggggaaggggcagacgggaggcgacgcacacacgacggctgacgggcgacgcacgcaaaacaacgatgtgggatggacggtggagattgaggatcggcagaacggcagaaccttgggtaccttgtcaattgttatgttcggcaggggcatccccggtgcactagatcttgtgagccatattgaggctagggacaagctcgaaactaagagacagacgaacaaagcattttggaccttgctattggcctcatgttga

SEQ ID NO: 34117 - DNA, 1239 bp, Zea mays
  Peptide Sequence Number=SeqID_77492
atgcagaccgtgctgtcggcccccggcgtcaaggacaagaagctggtctccttcacccgcaacgacgatgcgaccaacgacaaggacgccgtcaccggcctcatccgatccatcgtcggcggcgccacgccgtccagccccgcgcagcggacggccttccacgtcttccacatcaacaccgtcgtcgacctcttctcggcctggcgccgcgggctccccgacgtgcgcccctactacgccgtcaagtgcaacccggagccggcgctcctgggcgcgctcgccgcgctgggcgcggggttcgactgcgccagccgcgccgagatggaggccgtgctggcgctcggcgtcccgccgggccgcatcgtctacgccaacccatgcaagcccgagccgcacctcgagtacgccgcgggtgccggcgtcagcctcgccacctacgacaccgaggacgaggtggccaaggtcgcgcgctgccaccccgggtgccagctcctgctccgcctcaaggctcccgacggcggcgtcagcggcggcgacctcatgaacaagtacggcgcgcacgcgcacgaggtggcgccgctcctgcgcgccgcccagcgcgcgggggtcggcgtggccggcgtctccttccacgtcgggagccccgtgtcccgcgtcgacgtgtaccgcggcgccatccaggccgcccgcgccgcgttcgaccaggccgtcgccctcggcatgccgcccatgcgcgtcctcgacgtcggcggcgggttcacggccggcgccgccttcgacgaggcggcggccgtcatccgcgacgcgctcgaccggtccttccgcgacctgcggccctgcgtcgaggtggtcgccgagcccgggcggtacttcgccacgacggcgttcacgctcgccgcgcgcgtcatcgggaggcgcgcgcgcggtgccgcgcgcgagtactggatcgacgacggggtctacggctcgctcaacaacgtgctcatggaccacaaggctccgcgcccgagacctctggccagctgcccgcgccccggcgaggagacgtacgcgtccacggtgttcggcccgacgtgcgactcccaggacaaagtggtcaccgggtatcagctgccggagatgagcgtcggcgactggctcgtcttcgacgacatgggcgcctactccacaagtgccggatccaggttcaacggcttcgactcgtcggagattaagatctacgtggcctattccagctga

SEQ ID NO: 34118 - DNA, 1002 bp, Zea mays
  Peptide Sequence Number=SeqID_77493
atgcgcctaggggtcccttttatagccccaaggcagctaggagccgttgagagcacatctggaaggctatccttgccttctgtcgtcgggcgcaccggacagtccgtcgccggagaaaaacccgagagcggcctcttcggccgaggcagcctggcgcaccggacactgtccggtgcaccaccggacactgtccgaacccgcctctacccgcaccccgcctgcggagccgcttctcgatctctcgtgaatcgcccgctgcttctcgatctctcgcgaatcgcccgccgctcctccagctccgcgaaccgcccgcccgacgagctcttccacaacgaccatatccggccgctcaccctgcccccactcccggatctcgaccccggaagcgacgacgacgaggactgtgtgggcggccacgcgccgacgcgcggccgcgacctcacgccccagagcgcgtccgtgcaccgccgcgctcggtccatgtccccgctccacagcgcgtcaccgcggctcaagcttatcaatgcgctcgtcgtcccggcgccggatctcggccccggccccgacgcgacgggaacacacggggaggcagccccgccggtaaccgcctcgtcccgctcgtcctcgtcgtcctccacgtcctcgtcgggcacgtcgtcagcgcgcgggtcccggcgctgggtgttcatcagggacatgctcctccatcgcagcaagagcgagccaggcagcggcgcccacgcgcacgacgcccctggggcgcccgtcgctagcaagcccgaacgagcctggtcgttctcctccccgtcctgggtaaccagacgtgcgcagcagcaggcatggggaggccatcgtgctagctgcgataacggcggcgccggcgtcaagaaagggccgtggacgccggaggaggacatcgtcctcgtctcctacatccagcagcacggccccgggaacttgttgctttgctcactcgaccatgtttccgctgaagggatgtaa

SEQ ID NO: 34119 - DNA, 411 bp, Zea mays
  Peptide Sequence Number=SeqID_77494
atgggcaagagcaagaaaggtggtggttcttcacatcattccggcgacaagcgcaagcgcgagccgactcctccctcagaggacttcggcaactcggagtactcggaagaggagttctcctccgagtccgagggctctccggctcctgcctctcccccagtatggacttacattcgggccgtcgagcgcgccgtgctcgagggctcagatgagtcagagtattcctcggacgaggagaattcctccgacccgtccgaggagggcagcgacggcgacagcggtgacggcgacgacgacggaggcaacggtgatggcgacggcgacagcggcaagggcggtgacggcagcggcaagggtggtagcggcgacggcggcgacgacagcaagggcagcagcaaggccagtggctag

SEQ ID NO: 34120 - DNA, 273 bp, Zea mays
  Peptide Sequence Number=SeqID_77495
atggcttcgtacaacgaccaagctgaagcactttcgctcatgaagctggttcatgcttcagaggtcagcattttgtactgtaggactttgaacttcattgggtgcactgaagaggtcagccttgtcttaattttgccttatgctttagagttgactggagtcccaatgggtgtcgtgttacgtgaaacggcgtcagccgcctggcgtgtcttcagacggtttgaattgcatattgaatttttgcgactgttcggtggccgtggtaggaggtga

SEQ ID NO: 34121 - DNA, 453 bp, Zea mays
  Peptide Sequence Number=SeqID_77496
atggagctcggcgtcgcggctacgcagactgagccgacgcaggggcacgagggagctgcgacggccatggagacagaggggggtcggattccaaccattggggtgtcgagcgcccaagcaaggccaccaagcaccatggcttcaaggaaggagaggaggtcggacgctggacgaagcagggcacgccatggagaagaggaaggcgcgctggcgagctggagaatcgccgggcgtcctgggagtgtgctcgcacgtggtcctggcagacggcgaccggtgctggagatggagcctgccacaacgttgatggaggagcagagaccgtgcaccatggctgagggcgcgtggagcagggagcacgcaggggcgaacaccggtggtgccctgcgcgcgatggggaagaaggccagcagagagccggacaccatggatgggagagcgcagagctgctga

SEQ ID NO: 34122 - DNA, 294 bp, Zea mays
  Peptide Sequence Number=SeqID_77497
atgaggcgctctgggctggttccatcagaggacacacctgctgccgaagcaacgcaagctgatgttgaagaagctggttccgaagatgaatacagctgtgggatgccaagcaaacctagtcatttagactttggaaagtccaccatctctgaagctagggagtggaaccgtttggttagggtttctgccgagttcataaactacactatcagactaaagccagaggagatggtcttcatgagaattttggatgttacaactttgcttatcgcaaaactacgaagtttccagtga

SEQ ID NO: 34123 - DNA, 156 bp, Zea mays
  Peptide Sequence Number=SeqID_77498
atggccatgatggattcaacatcggaaaagatgtacctctgccaggtgaggaagcgacaaatttttgttgcttctgctccaaggtggttcctaaggaagagaagcaagagtgaagctgcgggaggacttggtcctccatatggaacttttgtttaa

SEQ ID NO: 34124 - DNA, 264 bp, Zea mays
  Peptide Sequence Number=SeqID_77499
atgaagaaagaaagagcgaaccgctgctcacgacagtactgcgcctcctcggggctgccgcagaacatagagaagacggcgaccagaccatcccgcaggcggcatgcctgtccattccattggcaggtggcacgtccatactgccgaatgcgctacactcatcatgactcgcgcgttaccgaggaagcagccacgatatatcaatattgtatggactacgaacattatggtgctcggagtccgcctaggcgttacaggcattag

SEQ ID NO: 34125 - DNA, 549 bp, Zea mays
  Peptide Sequence Number=SeqID_77500
cgccgcggctatgcagaccgagccaacacaggggcacgagggagctgcgacggccacggagacagaggtgcggccctgggctccggcgcgagctgggcatctccagtgccaactggagtttctgcaggacaaaacaagaaaacaccaggagagctcggatttgaggggaacagggggggtcatattccaaccattggggcgtcgagcgcccaagcaaggccaccaagcaccatggctttaaggaaggagaggaggtcggacgctggacgaagcagggcgcgccatggagaagaggaaggcgcgatggcgagctggagaatcgcggggcatcctaggcttgtgctcacgcgtggtcctagcagacggaggccggtgctggagatggagcctgccacgacgttgatggaggagcagagaccgtgcgccatggctgagggcgtgtggagcaaggagctcataggggcgaacgtcggtggtgcgctgtgcgcgatggggaagaaggccagcagagagtcgaacgccatggatgggagagcgcagagctgctga

SEQ ID NO: 34126 - DNA, 495 bp, Zea mays
  Peptide Sequence Number=SeqID_77501
atgggcaagagtaagaaaggtagcggttcttctcctcactctggtgacaagcacaaacgtgagccgactcctccttcgaaggacttcggcgactcggagtactcggaggaggagttctcctccgagtccgagggatctctggctcccgtctctcccccggcgtcgtctgatgattcagacgactcccaggggattgccgcggaagtctggacctacatccgggccgtcgagcgctccgggctcgagggctcggatgagtcggagtactcctcggacgaggaggactcctcgggctcgtccgaggaggacagcgacagcgatggtggtgatggcggcgacgatggaggcgacggtgatggcggcggcgacagcggcaggggcggcgacggcggcagcaagggcggcaatggcagcggcagcaagggcagcagcaagggcagcaacaagggccagtggctagatgccactggttttttagatgttagtatagattag

SEQ ID NO: 34127 - DNA, 144 bp, Zea mays
  Peptide Sequence Number=SeqID_77502
atgccgcctcctgaccttgcactgccgccgccaatgttgtcgcctccacctccaccacaattccctgtgggctttaagaaacctcctgctttagttgccgcacctggagatgtgtctggtcaagacaacgcctcgacttcttag

SEQ ID NO: 34128 - DNA, 234 bp, Zea mays
  Peptide Sequence Number=SeqID_77503
atgaaggcattccacagtgcggcctcgtccagctcagaggcccacgtagctgagggcacaagcgtccttaacacaaggcgctgggcgttcaggcgcaacaggaagctccgcctcgcccgaccccagggcttagcccccgcctcggcctcggaaggtggtctccgcctcgcccgaccccagggctcggcctcaacctcgaccccggaagatggtctccgcctcacccgaccttag

SEQ ID NO: 34129 - DNA, 307 bp, Zea mays
  Peptide Sequence Number=SeqID_77504
tgtccaacacaagtgcctcagtgtaaaaaggtggacaaagtacaaatcaaggataaaggaaaagaccaactggaaatgtcttggctcgggcagccaagattctgctcagtctggagcaccggattgtccggtggtgcaccggacagtgtccggcaaactcgtcgctctcgggaattcatcggcgacgtacggctataattcaccggactgtctggtgtgcaccggactgtccggtgagccaacggtcggcagggccaacggtcggccgcgcgatctgcgcgggacacgtggccgagccaacggctag

SEQ ID NO: 34130 - DNA, 1139 bp, Zea mays
  Peptide Sequence Number=SeqID_77505
atgcctgtttcttggctcgttagacgtgaaggaattgggaaagttggtgttgtctgtgtgtccgtgttcatggccacggagctagagcctagagctttgcaagaaggttcaggcggaaaaagaataagctggctccaagataatggcatctcttactccaggaatactattaaagaactttggccggaccatgggttctttatcaaagtttcagattcttcacactcaacttatgtttccttgtctaaggaggacaatgaactcatcttatcaaacaaactacaacttggacagtttatatatgttgagaaggtccagtcaagtatacctgttccggttcttgttggggtccgcccagttccaggaaggaacccttgcattggaaacccaaaggatttgatgcaaatgtcaactccctctggagttatggaagcactggatcatcaacggacaacttccaagtcagctgatctgtctgaaagtgaaaaggaaaatttgcagagaaaggtagttatcaaagagcagaagacagttgtcgcttcccgttacatgcttggggtgtcaagcaacaacgggaaaattaccaacctcaactccagcattgatagtgaaaaaagtaatggaggaagtaccatatctgaatcaaataaaaaatctgttgccctgaaagtcagacaagaggcaaaacctcaggaacggtcaaataatacatctcctagtaacgctaagttagtttccacaaagcaagaaattagcaaggacacacgcaagaatattggcacttcacctagtccaaatggttctgctgtagtcaagaagcaaatgccaaaggagagcaaaaaggaagttgctactgagagaagatcaccaccaaagcttcataggagttcgccaacaccagcgaggacttcaccaacaaagctcagtccagcagcaaagcagaatggaaactctggtccagtttcttctgtatctactgttaaaaaaagagttagtgaaactatctcttgggactccctcccaacaagcctaatcaattcaggaaaggctgttgtccggaggaagaacattgctcttattgtagcggctgaggctcaaagggaggctgctgcagctgcgtatcttgtaaaaggccttgg

SEQ ID NO: 34131 - DNA, 51 bp, Zea mays
  Peptide Sequence Number=SeqID_77506
atgaacccctccccgtggccagcccaactcagatcaaatagggaattttag

SEQ ID NO: 34132 - DNA, 492 bp, Zea mays
  Peptide Sequence Number=SeqID_77507
atggaggataggctggtgcttctttggaaggataacagaattatagaaatcgacatgaaggagagtccagaagcgattaccatcaatcctgacatcacaaacacggaatgtaggattctggaagcgcatatcttgaagaagggcggtgacggtattttgggtccgaccgcacacccggggttgcccctcaaggtgctttttaggagtaggacggtgttctcgactgtagttcaatggttcatgccagatgcacgagaaacagtggacaaaggtttacaggttcgggccgctttgaagtgcgtaataccctacgtcctggcgagagtgcttttgcgtgatgggttacaagagagttctctagcaccgaaagtgcagagaattaggtttgtgcttcagaggtcagcatttcgctttgtaggacttcgaaattcattgggtgtaccgaaggtgcacccaatgggtgtagcccctgagcttcgagtagatttttga

SEQ ID NO: 34133 - DNA, 255 bp, Zea mays
  Peptide Sequence Number=SeqID_77508
atggtaggaaatgctctcactgatgatttccatgaccactatggaatatttcaattcatgtggactactggcctgatctctgatcaaacatacaagctgctgaatgttttctgtgactacgagtccttcgcgcattcatcttcacagtgtgataagattatggatattgctagcactgaagctggaaacattgattcatatagcatcttcacatcttttgcctcctcaaagaacaaagtgatgaaaaggctacat

SEQ ID NO: 34134 - DNA, 696 bp, Zea mays
  Peptide Sequence Number=SeqID_77509
atgggccgcacgcatacgcacccacgcgcacgggatgcagaggagacgacccaggagccgcgtctccaactaattttttctgagataagggaatcttctgaagtagatccacaagctgcaatcaccaagtttttcgagctgcacaggcttatcgttcagcaaagtgctgtctggaaagcttacactcctgagcctagcaaagaatctcgaccggagaaggaaaaaccgtcgaggaaagcttctgcatctcatcatcaccagaacaaagctggcacacgcgacacagctaagaatcccgaaggtgcccagggcagtgagaagacggaatgggcccgggaggacggtttcaaggagatctgcaggtcatggattgttctgaggaaagaatcgcggtcgtggtttctgagcttcctggaggatgcacttgaatcaggattcatgtccgagggccaaaccaccaagaacacgagagaacgcgtgcggggacaacccaaacccaagggtggggacgggaggatcgcggtcctgctgtcgcagctcaaggagacgagcaactggctcgatcagctgctgcaggacgaggcggacacttccgcggacggtttggccgaaaccgttgaccagctgaagcagaaggtgtacaaatgcttgcttggaacggtcgaaaccgcggcgtcggcactcggaggaagataa

SEQ ID NO: 34135 - DNA, 582 bp, Zea mays
  Peptide Sequence Number=SeqID_77510
atggtggaggacccgctcggttggtggcccgggtgggagttcttcaggctggccggtgacccggcggttcggcctgaacggttgatgaacatgtcggggtcaccggccttcagggcgtacgaggtcgccgacttcgggtgggggaggccgaggcggacgaagcccatcaggatgaaccacgacgggcagctggcaccggacgcggcgtggccactaggcgcaatgatctgtgccttctcgatgctctacaactggatgctcgccgacccgtcgttcctcttcaaagttggcaccgaggtaagacgatgcctcctaggactaggagggacgaatattcatgttagcccatcagaatctgaagctcatgtgggggaggaatccaatgggaagcggtgcagatcgaccaagcgcggtggcacggaagataacccgagaatggtggaaagaagcaggggaaagacaacgcaacgaagcccccctagctgcccaaggactacatccatgtctgggcaaggcgtggcgagcaaggcatggcgaggcgatggactgccacaacctcgtggagagggtacatttccctaa

SEQ ID NO: 34136 - DNA, 1764 bp, Zea mays
  Peptide Sequence Number=SeqID_77511
atggcggcggcgcagcagcagtcacggagcacgaggcaggcggtgccggcgtcgtcgagggtcgcgatcatcggcggcggcatcagcgggctcgcggcggcgaagcagctggcggcgcacgaccccgtggtgttcgaggcgacgccgtccatcggcggggtgtggaagcactgcgtgtaccggtcgacccggctgcagacgccgcggccggactacgagttctccgactactcgtggcgcaaccgcgacgacccgacgttcccgacgcacggcgagatcgtcgagtacctcgagggctacgccgacaccttcgggctgtggcgctacatcatgctcggcgccaaggtggtcgacgtcaagttcctcggcggcgcggccgctgggttcacggagcgctggagcggcaccggcgaggcgctccaggggaagcccatgtgggaggtcggcgtcgccaccgccggctcccacaccgttcagtactaccagttcgagttcgtggtggtgtgcgccggcaagtacggcgacgtgccgcggatgccggtgtcgttcccggaaggcaaggggccggaggtgttccgggggcaggtgatgcactccctggactactgcaagctgagcgaggaggagaccgtggagctgatgagggggaagaaggtggtggtcgtcgggtacaagaagagcgccatcgatctagcacttgaatgcgcccaggccaaccaagcaacatgcgtgggcaacgaattgggagggagacggagacccaatcgtagagctataccagaaaaggtcactcttgtcatgatccgtcgtacactccatcttagacctacacctactagtacggcaggtgagggaggcgaggcttgcaccatgctggtgaggacccttcactgggtggtgccgtcctactccatctggggcctgcccttcttcctcttctactccacccgcctggcgcagttcctgtacgagcgccccaaccagggcatcctccgctccatgctctgcagactcatgacaccgctgagagcgggcgtgtccaagttcatcgagtcctacctggcgtggaagctcccgctggacaagtacggcctccgccctgatcaccccttcgtggaggactacgccagctgccagatggccatcctccccgacggcttcttcgacatggccgaccgggacatgatccgcttcaagagggcctccggcggctggtgcttctcccgcaacggcgtcctcctcgacgacggcaccgaggtggaggccgacctcgtcttcctcgccaccggcttcgagggcaaggacaaggtccgcgccgtcctcccggaccccttccgcggcctcgtcgtcgacaggtccggcatgatgccgctgtaccgctacgcgcgtccgtccgtacttgaaatcggcattgcacactgcagcggcaccatccaccctctgatcccgaacatggcgttcgtggggtacgtggagagcgtgtccaacctgcacacgtcggagctgcgctgccgctggctggcgggcctgctcggcggccggttcgcgctgcccagcgtggaggacatggtgcggcacgtcgagggcgaggcggaggccatgcgccgcaccacgcgcttctaccgccgccactgcatctccacctacagcatccacgacagcgacgccatgtgcgctgacctcggctccagggttctccgcaagggcaactggctcgccgagctcttcgcgccctacaacaaccaggactacaaggaagactga

SEQ ID NO: 34137 - DNA, 180 bp, Zea mays
  Peptide Sequence Number=SeqID_77512
atggggaaaagcttggacagggaagagagagggctcgggcgtccattttatagagagagggaagagcatcacgcggagaagtattgccgctgcagccaggttctggccgaccccactggaagccggtggcggccttgccgtgacatcgtcggcgatgcggtgctggatgccctggggtag

SEQ ID NO: 34138 - DNA, 465 bp, Zea mays
  Peptide Sequence Number=SeqID_77513
atgccgaagctctcctgcgcacagcttcggctctacgccaaccttcgtattctttgtacttcttcagattgtggttctgatccgagtccgaagggcttggactcgggctcggccccggaagacgacgaactccgcctcgcccgacccagggctcggactcgggctcggccccgaaagacaatgaactccgcctcacccgacccagggcgcggactcgggctcggccccgaaagacgacgaactctgcctcacccgacccagggctcggattcgggctcggccccgaaagacgacgaactccgcctcgcccgaccccagggctcggactcgacctcggcctcagccgacggtctccgtctcgcccgacccaagggctcggactcgacctcgaaagacagactcgaccttgacctcgaaggagcctccgcctcgccctacccagggctcggaccaaccacgtcatag

SEQ ID NO: 34139 - DNA, 204 bp, Zea mays
  Peptide Sequence Number=SeqID_77514
atggcggcgcgctgcacagcggcgttcccccggtcgctccaccctttgcccacaccgatggcgctccatctctcttactcggccagcgagtttacgaccgggatggcggctcaggggccttggtatttatgcgccaagaccagaggtttccaagtgtgggccgacgtagaggaattgggtctaaagcaaggtaaatgcttctaa

SEQ ID NO: 34140 - DNA, 504 bp, Zea mays
  Peptide Sequence Number=SeqID_77515
atgtccaccgcggaagaagccgctgctggtggtggcgacgactatgaccgcttgagcgagctgaaggcgttcgacgacagcaaggccggcgtcaagggcctcgtggacgctggcgtcacgaccatccctgccatcttccgcggccatctcctatcatcctctagcagtagcagcagtactagtcttagcattatcccggtcatcgacctctcggcggcggacgcagtcgcacgggaggaggtggtcgcccagatgctggcgtcggtgaggcggttcaacgaggagccccacgaggtgaagcggccctactacacgcgggacgcccgtcgcaaggtgcggtccaactccaacttcgatctgttccagtcgccggcggccaactggcgcgacacggtcttctgcgaggcagcgctctcggaggccctggggctgggccccgggcagtatctctttggagaagatcgattggcagtcccatgttcagctgcctcctttgaagattga

SEQ ID NO: 34141 - DNA, 360 bp, Zea mays
  Peptide Sequence Number=SeqID_77516
atgagaggaggctctcttgctgcccctggatgggacgtgagcctggctgacgacgtgaccgctgctcccgcccgcctgccaccgtcattactgccggcccactttcggccgtatcgaccgtcgcgccaggctggcgccgctgggtcgcctcgagtcgcggcattggttccgcaaccgaagaggcgcggcggtggcgcaagtggcggtgcagttgcctgcatgcagcatccggcgcgccggttgcgcgacgcgtgggcctgggcctccgtgctggcgcgctgggagtcggagaagcatgtccacttggcgcggttgcatgccgcctgcatggctgcccactccttccacccgttggcctag

SEQ ID NO: 34142 - DNA, 1209 bp, Zea mays
  Peptide Sequence Number=SeqID_77517
atggagaaaaccatcgacgacaagggcctccagatcgtccaccgtgatggtggagaaaggccatgggtcgcgtggcggaacgacggttacccggtcggccatcgccaagcgaagggggtggcggcggagcggacaaggttgcggaaaccaaagcaggaggcgagcagcagaataaagaaccaccaccggaccctcttccggggtaggcgacacctttggcaggcgaagcgggcgacgtttcacctccgccatgatgaccgcgtcaaaaaagggaccgggaaaggggatattttgaaagggatccttctccgtgaaggaagcgggccccgagccctcctactgatcaggggttcgaaggctagccctcggaagggttcgacagccgccccagagcactcgggcttcaggctcattactgatcagaggttcgaaggctggcccctcggaagggttcaacagccgcctcagagcactcgggctccgcgcccactactgatcaggggttcgaaggctggcccctcgaagggttcgacagcctccccagagcacgcagagcgagagatgactctgggtacgtctgatacatggccgaggcccgagctacgctcccgagaggttgatgggtgcaattcaggtcaaggctccgtctactcaagggacgcgatctcgcctcgcctgagcccagcctcaggcgggaacaatagtcccggacggattcacgcctcgcccgagagcctcctcaagcaacgggcgctctctcgactcgcccgaagcccagctcgggcaggctttggagtaaagcaaccttggccaaattgcctcaccaaccgaccgtatcgcaggcgcattcaatgcaaggatcgcctggcgccttatcctgacacgcgtacctcagtcgacagggtcgaacctcaggcgccaaaggaagctccgcctcgcccgaccctgggcctcggcctcaggagaagtctctgcctcggcctcggaagatggactccgcctcgcccgaccctagggctcggcctcgacctcgacctcggaagatggactccacctcgcccgaccccagggcccagcctcaacctcgacctcgggcggaatcgcgtcctcgcccgaccccagcctcggtctcaggaggagtctccgcctcgcccgacctcgggctcggaccgaccacgccgcaggggtacatcattaccctacccctag

SEQ ID NO: 34143 - DNA, 846 bp, Zea mays
  Peptide Sequence Number=SeqID_77518
atgtcttcttcctccctcatgcgtcgtgtctttccatcttccaagcccccggatggggggtacccgccgtctttccgcctcctcgttggaggaacgcaactccgtgggagttggtacctttcagccatcgttcggcttcaaggattttcatcatgcggctcggtcgcttccccccgctggtggtcacccaagacggtgaccgccagttcctgggtggggagaagcaagccgggctgcgatcttggtcccaccctcagcttcaaggatgttcatcatcctcgctggggtgggggccgggctgagccggcgctctacctcccacgcgggttcgcgggtcaccccttcccgcggtgttcgagggagagggcgctcactggccctgcgggcggcccggacttcgacaacgcggggctaggtcggcgacgggcgtcgtcacctccagcgtgtcgggcccgtcggcttggctcccggcggcccctcctgtcggagggcggctgccgcgccgtgtgcacgggaggaccacccaagatgccgcgcgctgctagggcggcgttcgtgttctggggtggtcctgcctttgcaccgggatggcgccctcacgcggaggtcgatgccccactcgcccgggagggtttgagtggggatctgccggggagccggtgggccctgccgtcggtgccgaggcggaggcggctcgagaagtccccgtcaccgacggggtcaccgccaccatccgtgcctctggcccccagctcttcgcacttgtcctcgcccctcgagcgtcggtgtgggcgagggcaagattgcagcagcgcccaccctgaggcctgcgctgctgcagcttga

SEQ ID NO: 34144 - DNA, 189 bp, Zea mays
  Peptide Sequence Number=SeqID_77519
atggcgcggagcgactttttcgaccctctctctctctggttctggcgtttcggcatgatgcaagattttgggcattacaaatcctaccccctttacagaaatctcatcctcgagatttgtaaggaaagggtgtatactcatattgtctcaacacatatgcacaaacaaaaatctcagcatgatgcataa

SEQ ID NO: 34145 - DNA, 1284 bp, Zea mays
  Peptide Sequence Number=SeqID_77520
atgaagctgtggaaggagacttccaggagttccaagactacgacgagttctaggtgtgggttagcggcaacccccaatcggctgcctgtgaaggccacggttatctacgtttcttttccgcactttgatttattgtgtacatttgggtcgggccagatgggccggcccgaagcactgaaaaaaaagcacggcccaggcacggcacggcacgaaataatttattgccaggccggcacgggcccgttatatcgggccggggtttgggccgagatggctcgacttagacacactgcacgaaagtcagtcatccccttcttaccctcccgtcttgctgagcgtccgcttcgccgtcccgtggccggacagtccagccacttggagagactacaccaccgcctgcgtgaggagcaggaacgtcgacgacaggagcagcagagctcttccttctcgctccaccaggagatagagtctgtgaggagctgctcccctgtgcttcctctggaggcgccccctgcaccaccactgggcgccccagcttctggagtagctgctggaggagacccagacgacagaggtggcgacgacagctcgagccacgacaccgacttctctgctaaccctgagccggaaggatgggttgctcgacccatcactcgcgacgctgctcgcgggtgtcacttccacgatgcgctcgacaccctgctacgtcgggcatttaaccggtatacttggtctgtcgagtatcgttgtgtggtctaccagcacagtcgcggggtctacccggaccgctgggaggcgacctgcttggtgcgctgcccggagaatagtttccagggtgcggaggcctgctcagagcactattctatctctgagcgggactcagctgaggcagccatgcaagatgctgcacggcgtgcgctttcgcactactgcttggttttcggtggggcagctgacggtcttgacctgaagtattaccctcgccgtccatctggcagcacaggaggcgtgattgtctcacctgtcggtgagggcaatcctaggttgagcagcacagtcaacctagccgccgtgctaaacacggagctggaccatgcattagacgagctgagtagggctcgtgctgagatcgccctgctgcgggctgagcgcgcggaacgtcgtcacctggacggtggttcccccgctcccgtcgggactcagcacccgtaccgctcacctcagcgtggacaccagtcttatggcaatcccgactgcaagaccaagataactctagaaccatag

SEQ ID NO: 34146 - DNA, 258 bp, Zea mays
  Peptide Sequence Number=SeqID_77521
atgcgtggaactcagctcctacccgggcatccttgcggcaatggtgaggggcggttatggggaggagtagttttatacccagagctgggatccgatcggctagcgccgagctggcacatgggaaagatttgttccaagtttgttgcgatgaaactggaatggatatctactgaggcggcgctaggatctcctctacggtcggccatacggttgccataccagaagggcccaactgctatttgggttcacgccatttaa

SEQ ID NO: 34147 - DNA, 381 bp, Zea mays
  Peptide Sequence Number=SeqID_77522
atggacagcggagcgacggctgacccagcggcatcctgcccggctacggtaccgcgccagcgctccaggccattagcctatgctcgaaaagcagaggaagatatcccgccagaggagatgctcaccgctgatgaagcgaactggttgacgacgatgcgtaggcccacgtcgaggtgcaggcacaacggtcacagcgagctccggcacctgtggccaccaccggtggagggaagatccacgcgccagatgcctgatctcgtgctggcgcatgcgcaagcagtctccctcgcaaattccctagaaggcgagcgatgcgtggaactcagctcctacccggtcatccttgcggcaatggtgaggggcggttatggggaggagtag

SEQ ID NO: 34148 - DNA, 438 bp, Zea mays
  Peptide Sequence Number=SeqID_77523
atgggaaaggacaagaaaggtcagggctcgccgcctcgctccggcgacatatggaagcgtgaaccgagtccttcgttggaggacttcggtgactccgagtactcggaggagttctcctccgagtccgaggggtccctggggatagccgccaaggtgtggacgtacatccggtccatcgagcgtgccgggctcgagggttcggatgagtcagaggtctcctcagacgaggagaactcttccaactcatccaaggaagggagcggcggcgatggtgacgacgagggcgatggcggtggcgatggcggcgacaacggcggcaacggtggcggaagcgacggtggcggcaagggtggcggcgacggcaacggcaagggcgacaacaacagcaagggcggcagcagcagcagcaaggccagtggcaaagcgccactagcttaa

SEQ ID NO: 34149 - DNA, 582 bp, Zea mays
  Peptide Sequence Number=SeqID_77524
atggagcctaagctggcgagcggcttgtcggaactgaggctcggccagcagcaggcgggcgggcggctacaccggcggacgatgctccaggtggttcgatctccaagtggcatgcggggttctaggcgaggagaatggggaggggaaaagcaggactgcgacgtgggtggttttgctggtgagatgggcgtgggcggctggagagcgcagggtgggcgctggccgctgggctgcgcagatcgagcgcggcgtagggccgggcacacggctaggggtgttacacaggtcctgcttaggctcgtatttgtcgacgttggagaccttgaagtttgggggccattaaatggccctaagacgtggagtgagcgcagataccccacatgtgtcttcctgtcgacgaccatagggccggtcccggggaggggagttgccgatgtgctgtctcgaccgtccccgggttgtgccaccagtagaagtcgttgccgacccaactctagtggcctgacttcgtgctgggacgccataatcccgatcgtactcctctcggcgctgtatctcattctcatgtcactattcgcgtga

SEQ ID NO: 34150 - DNA, 741 bp, Zea mays
  Peptide Sequence Number=SeqID_77525
atggcgaggtgctccgacgagggcatgagcgacatcgggtcgagctcgcgacggaagccgaacgcagatgagctgtgcaacgccgacgaacggcggtccctaggcgctgtgctcaagcaagggcgagagtcgggagagagaaaggagtggagaggaggttggcgaagaatgaagcactgcccggcctctcctggcttgaggacgacgtgggtgggcaggcggttttgggagggaggagctgacagcgggcccatgcgtagcgacgacgttgggcaacgcccacgcatgcgcgcgacgcggcagggagcgcgcggccacgggcgagacgtgcagggacgtggcggcggttgggcaagcgcgtgcgggcgcgacgcgctgggctgcgtggctgggcaggcacgacatggagagcgcgcgcggcagcgcgcaggccgctgggccagcgcgcgcagcggcggtgctaggtttgagcgcggggctgctgggctgcgcgcgcagatggcctggtgggccgcgcgcggggaggcaggtgcaatgaagaggatccctgcgcctgccccctgcagcttcagcgagccatcgaaatacatcctccatacttctgcagtctcctggttatctggcccacttggctattcttcaaatggcttctttgttgtggagaatatcccctattggaaacccggtgactactatgactttgtggtcgtcaaagtagtgacggagcttgcgtgcagttaa

SEQ ID NO: 34151 - DNA, 213 bp, Zea mays
  Peptide Sequence Number=SeqID_77526
atggtgcgggatgcggtcagtttgtcgttgatccatcaacccagcggcgcacaacacccacgtgcagcgggccacagtacacctgcttctaccggttccctcggtgtctcggcagttggaaggatcgaagtagagatggcaatgagtacccgaaacccgaatacccgacgggttttacccgatatgaagatactaagttatgtaatcatataa

SEQ ID NO: 34152 - DNA, 330 bp, Zea mays
  Peptide Sequence Number=SeqID_77527
atggacacgggtgatttgttttaccgaggttcggccctcgaaggcctagtccccgttgaggagtccactaaggacggagtcgaccattgcgcgcagatagccgttgctccgctggtgcatcggacagtccggtggtgcaccagacactgtccggtgaattatagcggagctgcgcctgggaaacccgaaggtgaagagttcgagctgaagcaccctgagtcagagcaggcgccagatggtgcaccaaacagtgaacaggacctgtccggtggccaggtctatgtgatgagtagaggtgttaatggagacctgatacagattaatctatag

SEQ ID NO: 34153 - DNA, 931 bp, Zea mays
  Peptide Sequence Number=SeqID_77528
atggcaagcaaagttgttcggtcgggcaatacgcacaagagaacaaggtggcggcacgattttagagctaaacttggctgcgactgcgaccgtgcgccagctcagctggagtccggttggggccatcacctggtcatggacattcctctgagatttatggccctggagatggagataacgaaaaggacttcctccgatcatgtttctcattgtgcaaaaggatctgacagacagatacgcccagcaggaggttataggaagaattattctgctaaccaggggagtggcagtcagaacagaccgtatcatgatgatagctatctaccaactaaattcctggatgaccattttcctgagatagatgctgcaaaacatcagtcttacttatgcgattttcaatcttcaaattttcatgattgctttgatagcagtcagaaattcagaaatgcttataatgacaaggtagtaaaaaggaaatttataaaacaagatttccttggaaacacttacaatggtgcttgtgttggtaaatatgatagaaacagttgcaggaaaaggaatgcatatcattttggtggagagaaaaccaggaagaatgacacaaataaggacaggtctaaaaggcttcgctgcccccttgagcaggaccaacggcaacaggttgagtgcaacgagatgagaaatgatagtcgggagggaaatgttgaaatgaccaggttagtgtgtcaagatggagcaaaacggaacttcaaccaaaagaagaatgctacagctcctgcttctagtgactcaacaaagtgtgatgggaaaaatatattaagtcccaagtgcagcaaaactattgcttcatcacacacaccaaatttgagcgaaggaagtaatgacatggatccaaaatctgacaactacgttgatggttgcactgaaagag

SEQ ID NO: 34154 - DNA, 648 bp, Zea mays
  Peptide Sequence Number=SeqID_77529
atgggcctcctggaacaccccctggaggccgtcgccttccgcctctactccctcccagtcccggaggcctccgcggccacgggcgccgccgccgcctggacctgcctcgcggcggcggtcctggcagccgccgcgggcgtttggcgcctctgcttgtccccgtccccacccccgtccgccgccgttgccgccgccgcgaatgcttcggggccggatcggtctcacgtggcggaggcgtcgccggagacgtcccggcgggcgccggagccggccgcggccgcggcggcgacgcccaaggagcggtacacggcgtactaccgcgacgtcgggtgctgctgctgcggtggtgaaagcgatgacgaggagggcgacgcggaggagcggggagacggcgacgtgttcctttcggacgacgacgggccgacgacggatcctttcgggtgggagtgggaggtggtgaggtcgctgcagcctcctctcagcctggcggcggagacgacggggcggaggtaccggaggagcccgacgacggggctcggcggcagcgtggtgcagctgtgggaccagggcgccgtgcgcggcctgacgcccgcggcgcgcccgcggccgagggcccgggtggtcgtcggcaccgtctcggccttctga

SEQ ID NO: 34155 - DNA, 933 bp, Zea mays
  Peptide Sequence Number=SeqID_77530
atggaaactcatacctatacaaattcatctatacccatgggtatcaaccattttgaccctagcagcaagagaatatacgccgaaagacgtagcagtatttgtatttctcatgaatcatcccgtttagatccgctcgcgatcccagcatcgaacggctcagattcattcaacgcctcctcccactcctactgtccgccatttaaataccccaccgccccttcctctcccccactccactccagtctccactcaccaaacccagcccagagcagacaagcgtcttggtccaaccaaagcaaccgagagctgcgagtccgggaagccggagagacagaggagaagcgcacaggcaccgctcgccggcgagaccgacgacggatgggcctcctggaacaccccctggaggccgtcgccttccgcctctactccctcccagtcccggaggcctccgcggccacgggcgccgccgccgcctggacctgcctcgcggcggcggtcctggccgccgccgctggcgtctggcgcctctgcttgtccctgtccccacccccgcccccgtccgccgccgttgccgccgccgccgcgaatgcttcggagccggatcggtctcacgtggcggaggcgtcgccggagccggccgcggccgcggcggcgacgcccaaggagcggtacacggcgtactaccgcgacgtcgggtgctgctgctgcggcggcgaaagcgatgacgaggaggacgacgcggaggagcggggagacggcgacgtgttcctttcggacgacgacgggccgacgacggatcctttcgggtgggagtgggaggtggtgtggtcgctgcagcctcctctcagcccggtggcggagacgacgggggggaggtaccggaggagcccgacgacggggctcggcggcagcgtggtgcagctgtgggactag

SEQ ID NO: 34156 - DNA, 210 bp, Zea mays
  Peptide Sequence Number=SeqID_77531
atgcggcgagccacactctcggtcgcgctcggcctctccctcatcgccctcctcgctgcccggggcgccgacgcctcaatccatgagtacgccggcggcggcttcgcgccgcgggccaactccttccacggcgggagcgagggtctctacgcatctgacctctcatccaactcctcatccttcatcagtgcgtttgaccaccttgcatag

SEQ ID NO: 34157 - DNA, 321 bp, Zea mays
  Peptide Sequence Number=SeqID_77532
atgggagaggccgagaccgggactacggccgcggcggccgtgagcatgatcaagacaggaggcagcacgattcggatcgagacgaactccatgaacgcgattggcggcagctgctttatacaattatttctacttatgctagattgtgagacattgtatatcaatgtattcatattgattccgttgcaacgcattgcaagacgtgtggcggcccagctgatcagcgggatgcattgcaagatatacagggacactgtcttaggggagctgaaccgccacgagcctgtgcctgttttcctcaaggacacaagtttatcataa

SEQ ID NO: 34158 - DNA, 1404 bp, Zea mays
  Peptide Sequence Number=SeqID_77533
atgcagagcctcctcgtgcccactgctgcatcggccccggtggcggctccgcgggctcggcggaatctccctatgcgcctctccgtccgcgcctccgcgacggcggcagcggcaccgcggcgggagacggatcccaagaagcgggtggtgatcacggggatggggttggtctccgtgttcgggaacgacgtagacgcttactacgaccgcctgctagccggggagagcggcatcgggcccatcgaccgcttcgacgcctctaagttccccacccgcttcgccggccagatccggggcttctcgtccgagggctacatcgacggaaagaacgaccgccgcctcgacgactgcctccgatactgcatcgtcagtggcaagaaggctctcgaggctgccggtattgcccacggctccaagcccatggaaaaagcaaatgatttgtacattcttgatggtagtttcatctgccaaaggattgacaaaacccgggctggtgtgcttgtgggcactggtatgggtggcctcacggtgttttctgatggtgttcagaatctcattgagaagggctacagaaaaataactcctttcttcatcccatatgctataacaaacatgggttctgccctgcttggaatggatattggtttcatgggtccaaactactccatctcaactgcctgtgctacctcgaactactgtttctatgctgcagcaaaccatatccgtagaggcgaagcggatataatgatagctggaggcactgaagctgcaattattccaattggtgttggtggctttgttgcatgtagagcactgtcacagaggaatgatgaccctaaaacagcatccaggccttgggacaaggatcgtgatggttttgtcatgggtgaaggagctggagtcctggtcatggagagcctagagcatgcaattaaacgtgatgcaccaataattgcggagtatttaggaggtgctgtgaactgtgatgcttaccatatgactgacccgagatctgatggtcttggtgtttcatcttgcatcaagcaaagtctcgaagatgctggtgtggctcctgaggaggtcaactatattaatgctcatgcaacatcaacccttgctggtgatctggcagaggtgaatgccatcaagcaagtcttcaaggacccatctgggatcaaaataaatgcaaccaagtccatgataggacattgccttggtgcagcaggtggtttggaagccattgctactgtcaaagcgataactactggatgggtgcatccaagcataaaccaatttaacccagaggaagcggttgaattcgacacagtacctaatgtaaaaaagcagcatgaagtgaacgttggggaagttatgtcagatctgagccggcaacgttacaaatga

SEQ ID NO: 34159 - DNA, 318 bp, Zea mays
  Peptide Sequence Number=SeqID_77534
atgacgcacgcctgcgaataccagacactgttcccccgcttcggtcactgttttcaacaactccagacaggacatacgacgactagacatagttttagcctcgcgaggaaactccgcctcgcccgagctcagccttggccaactttcctggcagtggcgcataaatgccaccaactcccagcgaatcccgcaagaggcaactccgactactgtactccgactactgttctgaccactcccagcatgattgtgtgcccatgcccagactcggcctctggagaagtcttcgtctcgcccgagcatggcctcatccaatag

SEQ ID NO: 34160 - DNA, 630 bp, Zea mays
  Peptide Sequence Number=SeqID_77535
atgttccccaggatttcccggctcggggcgcggctcctgcgcgagtctagagccgagacaagagctggttggcttagtgtctccttatctgttggtgatcgttgctacttttatctggcaggaaacttgctaaacagtcaacgcattttctttcaagatcatgttaaccggcattcgatcccagtggtgactcctgctgtattatcgatgcggaatgcccttttgtcaactgcaacaagtggtgatcaggatgaaagtagtcaggcaaaagataaaatctcggtaacatttgtcaacaaggatggctcagaaaagacaatatgtgttccagttggaatgtccatgttagaagctgctcatgaaaacgacatagagcttgaaggagcatgtgagggctcacttgcgtgttctacttgtcatgtaatagtaatggatgtaaaatattataacaagttagaagatccagcagatgaagaaaacgatatgcttgaccttgcatttgggctcacagaaacatcacgccttggctgccaagtgatcgcgaagcctgagcttgatggcatgcggctggcgctacctgtagccacaagaaacttcgcagtagatggctatgtaccgaaaccacactga

SEQ ID NO: 34161 - DNA, 258 bp, Zea mays
  Peptide Sequence Number=SeqID_77536
atgggagaggagaaaaaaggatgtgtagtagtgacgggggggagctcagccattgagatgtcgtcggggcgagcggcggctagggcgtcctgcagcgagctcgcacacagggaacaaatgcggcttgccggaggcaggaagctggtcggtttttcatgggagctgagcgcagggctgctgctggccgtggagcaggggaggaagggcgccgtccctggaaaaggcagcatgggaaagggcgccatgggagggagctag

SEQ ID NO: 34162 - DNA, 186 bp, Zea mays
  Peptide Sequence Number=SeqID_77537
atggccctgttcagccaaagccagctctgtctgggtgcaccggactgtccggtggtgcaccggacagtgtccgggttttgggagttaagagctcaagaaggtctagggttggttcttctcttgcctaatggtgataattgcataaatgcttgggtaatacttttagtcactaacattcttggttaa

SEQ ID NO: 34163 - DNA, 561 bp, Zea mays
  Peptide Sequence Number=SeqID_77538
atgcagttggtggacgacctgaagaatgatggacttatccagtggatgttcgccaagcgagtgccaccaagcaaacactatctaagtgttaaattcaaggcaagccccggtttatgcatgtcggggaccataattaggggtaccctcaagacgcctaattctcagctggctcagccccagaagacgacgaactccgcctcgcccgaccctagggctcggactccgccctggcctctgccgaacgacctccgcctcgcccgacccaggggctcggactcgacctcggccatggaagacagactcgacctcggcttcggaggagcctccacgtcgcccgacctagggcgtaggccagccacgtcaacaggaagcgccatcatcaccctacccgagccgactcgggccgcagagaacaagaccggaggacatcagcaaggactcaaccgctccgacagctgtccctccgccaggctccgttgctcctccgacggccacgacatcacaccagctgggtgccaagatctctccggctgccacatcggcatgtacttagggcactag

SEQ ID NO: 34164 - DNA, 519 bp, Zea mays
  Peptide Sequence Number=SeqID_77539
atgggagaggaggaaaaaggatgtgcagcagtgaaaggggggagcttggccatggagatgtggtcggggcgagcggcggctagggcgtcctgcagcgagctcacgcgcggggaacaaatgcgtcttgtcggaggcaggaagccggtcggttttccatgggaggtgagcgcagggctgctgctagccgtggagcaggggaggaagggcgtcgtccctggaaaaggcagcaggggaaagggtgccatgggagggagctggaaaaattctaggcgccatccatggggtgagctgctgctcgccagcaaggagcagggaagggcattgctcagtagagcgaagaggagcaggggagtcggcatggatgctctacgcacgcacaggaaaacagaggggaggagagggatgagctggataagcaacccatgggggagatgggcgcagggaggtggggttgctgctcggcgccggccagaggtagaagaaggggctcgcgcccatggagcagctcctccgcgctaa

SEQ ID NO: 34165 - DNA, 216 bp, Zea mays
  Peptide Sequence Number=SeqID_77540
atgccgagaaatatggtaaatcgattgccctcctcatgcgacctgagacgtggtctcccattctggttatggtgggtacaagtgcggtcactgcacgacggtagtcggggttctttagaggacatggttgctggagtgacttggtcgtccatcttgccaccaggttggactgtcgagtgggaccctgcctcggctgaggaggagcatgaggagtga

SEQ ID NO: 34166 - DNA, 291 bp, Zea mays
  Peptide Sequence Number=SeqID_77541
atggccggaatggctcaccggagttactccggcccgcccgaggtcttctcaccgccgttctcccctctctgcccgtggattcatggccccttccccgccattgagttcgctgtggcgttctctccctctctgcccaactccggtgaccccagagtcaccctagctcgcgccagcctcaactctggcgacctcaccgccgcggagaggagcggctccgcccgcagccgtctatttccccctggcctggtcccatccattcgattcagatcgcacgactcagatcacggataa

SEQ ID NO: 34167 - DNA, 795 bp, Zea mays
  Peptide Sequence Number=SeqID_77542
atggcgaggacctcgttcctgcagaagctggagcacagggtggaggcgtcggccgccgacttgcagcacatcgagtccatcgccctcgacaccgtctccttcgaggagctcctcggccactgcggcgaggcgctcaaagtctacgcgcgccacgccgacgccctccagtcgcacctcgcttcctttggctacgagcccccgggtaacctaaccctgtcggttccccagcctcggcctgcagcgtttgtttcgttccgctgggatgagacgcacaacaccccgagatcgatgtggatgtggaagatggagatgtcgggaaggttggggaccctggagatagatgcctcagcgtgtcgcgttcagtgctcaggtcggatgttgcatcttcagatgccatggatccaattggaggcactagtattaggaaatgatgcacttgtaagaatgcctacagagtcactgaaggatcttgggttttcagatgcttgtctagccactctttcttctgaaggcgcacattatggtgagagcccaaagaagctttacaagaatgctgaaagtactgatgatggcgaaaagatcatgaatgaagctgaaattatgactcccctaaatgaaagaaatggtcaaggtaattcttttgaaggagtgataagggcatcaaaggaggattatgagcaactccctccttatatgaagagtctagcatcatgggaggtggttgcaaaattacacatagtcctttttgtcgtcgcattcttgatcataagtggacctgcggtgcatgattcatga

SEQ ID NO: 34168 - DNA, 201 bp, Zea mays
  Peptide Sequence Number=SeqID_77543
atggatgttttgatgattaggaaccatggagaggaccagcaaggacttgggaaaggcctaggtgttgaggaggagcagcaagggcgcctacaacaggaaggagatcaagtccgactcggctgtagctccatctcggggataagccttcgtggcaaggtcattcgtatgtcacgggtgataaccaacggagccgtggtgtag

SEQ ID NO: 34169 - DNA, 387 bp, Zea mays
  Peptide Sequence Number=SeqID_77544
atggatgttgatccggccgccgaggctgaggagcatgcacttgaggattacaatgagcaccttgatgagatggcgttgtttgtccataatgtggatgctgctgtcaacatcgacgcggtggagccacagccaacaccgaccatggccgggacagtgacggggtcttcgagccccgctgccactggtagtggtagcactgttcgtgacacccgatccaggaagaggctacccacgtccagagtatggtctgactttgatgaggtaactggtgtagacgacaaaggtaagaagcccgtgggcgggcactgcacggcccgtcaacgtaaacgtgccgggctagcccggttactattcgtgccggaccaagacgggcccgtgccgggttag

SEQ ID NO: 34170 - DNA, 1017 bp, Zea mays
  Peptide Sequence Number=SeqID_77545
atgagattgatggttctggttatgactatggtactgatggctcgtcttagacacactgcacgaaagtccgtcatccccttcttaccctcccgccttgctgagcgtccgcttcgccgtcccgtggccggacagtccggccatttggagaggctacaccaccgcctgcatgaggagcaggaacgtcgacgacaggagcagcagggctcttccttctcgctccaacaggagatagagtccgcgccccttgcaccaccactgggcgccccagcctctagagtagctgctagaggagacccagacgacggaggtggcgacgacagctcgagccacgacaccgactattctgctaaccaggagccagaaggatgggtcgcccgacccatcactcgcgacgctgctcgcgggtgtcacttccatgacgcgctcgacaccctgctacgtcgggcacttaaccggcgtacttggtccatcgagtatcgctgtgtggtctaccaacatagtcgcggggtctacccggaccgctgggaggcgacctgcttggtgcgccgtccggagaacagtctccagggtgctgaggtctgctcagagcactattctatctctgagcgggactcagctgaggcgtccatgcaagatgctgcacggcgtgcgctttcgcactactgctcggtgctcggtggggtagctgacggtctcaacctaaagtattacccccaccgtccatctggcagcacaggaggcgtgattgtctcacctgttggtgaggacaatcctaggttgagcagcacagtcaacctagccgccgtgttaaacacagagctggaccatgcattagacgagctgagtagggctcgtgctgagatcgccctgctgcgggctgagcgcgcggaacgtcatcacctggatgatggttcccccgctcccgtcgggactcagcacccgtaccgctcacctcggcgtggacaccagtcttatggcaatcccgactgcaagaccaagataaatctagaaccatag

SEQ ID NO: 34171 - DNA, 168 bp, Zea mays
  Peptide Sequence Number=SeqID_77546
atggggaggctagaacctcgggcagaatgggaatcacggcttgtgggtaaagtgtgcaacctctgcagagtattagaaactggttgtccctactgtactcagtgctcaggaggagatgttggcaacatggaggactttgaggagttccaggactacgatgagttctag

SEQ ID NO: 34172 - DNA, 228 bp, Zea mays
  Peptide Sequence Number=SeqID_77547
atgggcgggagcgaggaattggccgccgcggtcgctccctccacgaccatcatccagggcatgagcatgactcgtagagcttcgctgcggcaccaggaaccggggcgcaaccgtatttggttttcggtgaggtttgtgcgccgagtcatcgggcggccgtactccggcaatggcaccgccgtgccgccccgtttaactgggtcgcgcaacctagaagagagtggttga

SEQ ID NO: 34173 - DNA, 114 bp, Zea mays
  Peptide Sequence Number=SeqID_77548
atggggggaacgaagactgggttctcggcccgggtctcccgtgcttcgttgcgagaaaacggggaagaaggacctgaccgcgaggccccacgtattcccaagtgtcaaaattaa

SEQ ID NO: 34174 - DNA, 336 bp, Zea mays
  Peptide Sequence Number=SeqID_77549
atgaagggtgaaacgctcttggaaaagggtaactcttcaggaaagacatctggaaagtctctaacaactcggatgtttgtacccacaaattttccatctactaagaatatggctggtctagtagaggcggttacagtaatctcaacttcaaatatttcccctttggaactggcctcgtcggggtgccagtgggggcagcctgatgagtgggaggtgtccgtggagacccctgtggagtgtacagagctgggcgtggtcctcctcttggacgagttggtgtaccctagagcggcatgtagcgagggcgaacactgctgctaccctgcccctaggtaa

SEQ ID NO: 34175 - DNA, 540 bp, Zea mays
  Peptide Sequence Number=SeqID_77550
atggtgcagctaactccggtgagcaattgcgtgggcgctggggcaatacttggcgaaataaaggcatgggaagggtgctcacctcgagtgcgaactctgggacgcttggagaacggcggggtgcgatggagcctcgggtcgacggcggtggggctctggctgcccaagaaacgctccggtgagcgtggactgggcaaaccagagaggggaagggaaaaccagagggtgccccgagtagctgacggtaaggcggaactcactgaggcaacagacggggcgcgggctcgacgacgggcgcaagacggccgtcagtcgacggtgggcggtggcagacctctctggtcgcgcgtgcagagcgagagagagggtgagagggttcggctgagggcgcaagtgagcggggggaggtgggcgagcagggcgtggggctcaaaaggggtgggacgtgcggaggtggccggagatcacacggtcgtgggcgtgtccacgacgggggatcatggacgggaggttgggggcgagttgacagggaacttctaa

SEQ ID NO: 34176 - DNA, 315 bp, Zea mays
  Peptide Sequence Number=SeqID_77551
atggacacaattaccatgctacctgtagccccgtatttctacaagcatcaaataaatacgtgcctgagctacaagcgggataatcatcgcaacaaggagggagaagcaaggggattcgacgagctggagatggacgctgagctcgcgtgcgtgacgctgggaagacgacgagggcacgctgcaggggcacacgacggccggcccccgaccatcgcggccacggccatgggggcgctccatggacgatcggagctgagcgactgggcagaggggaagtccgagctggggcgggccgtgcgcagggaagaaggctag

SEQ ID NO: 34177 - DNA, 2313 bp, Zea mays
  Peptide Sequence Number=SeqID_77552
atggcagacgtccaggaatgccattatgattcaacgtcacaggccactgacagcttgcatgttgagcctatatatgagtcgttcctatgcccgcttaccaaacaggttatgcgggatcctgtctctattgacagtggtgttacgtttgaacgcgatgccattttgaagtacttcaatgaatgtcttagcagcagaaggaggcttgtctgccctgtaactaagatggagctcagcaacactgagttaaatccaagcatagctctgaggaacactattgatgaatggatgaaccgcaatgaggtggctaaacttgacgtcgctcggaagtcattgacttctgatagcacggaaagtgatatggtacaagcactccagtatgttgatgagatatgtcagagaagtcgatccagtaggcaggttgtgagaagagatgggttgataatcatgattgctgacttgttgaagaaaagcagtacgaaagtacggcaaatggcactagagactcttcgctccatcgcaaaagatgacaatgacaataaggttgagattgctgctggagacaatattcgcacaattgtaaagttcttaaatcatggtcagactcaggaaaaggaacgagctgtgtctctgttgtttgaactttcagagaacaaggctctttcagaaagaattggcagtgtttctggagctattcttatacttgttggcttgtcaagcagtaaagtagaaaactcgctgattgttgacagagctgagaagacattggaaaacttagagagctgcgaaaagaatgttagacagatggctgaaaatggtagattgcaaccccttctgaggctgcttcttgaaggttcacctgacatacaattatctatggctgcatacctcggagagcttgttttaagcaatgatgttaaggtacttgtggcacaaaaggctggttccacactagtcaatatcatgaaaaaagggaatagagaggccagagaagcagctttgaaggcattgaaccaaatttcatcttatgatgctagtgcaaagatattaattgaagcaggtattcttccgcctctcatcacagacctctttactgttggcagtaatcagcttcctatgagattgaaggaggtctcagcgaccattcttgcaaatgttgtggcatcgggtgcacgttttgagtccattccacttgatcataataggcagaccttagtgtctgaagacattgttcacaatctacttcatcttataagcaacacaggacctgcaattgagtgtaagttgctccaggtgctcgttggtctaactgattcttcgacatctgtacaaaatatagttgatgctatcaaaggttcaggtgctattgtcagtttaattcagtttgttgaagcacctcaaagggaagtacgcatgaattccatcaagctcctgaataacatatcaccatatatgggtcaagaacttgctgatgcttttcgtggaaactttagtcaactccgcagcttggtcaaggtcattgttgataacaatgatggggcatttgcaacaatcattccaaaagttttaagaatccgacaaggcgagattcgtggggggcgttttgtgaacccattcctcgaaggtctagttagaatagtctcccggatcacatttgtcttggatgatgatccagatatcattgttgttgcttgtgattacaatcttacttcactcttcactgatctgcttcagatgaatgggcttgacattgtccagatcgtctctgctaatgcgctagagaaactctcacagcagtcaaaacatcttacgaagatactgcctgctcccagcccagggttgtgcttttcaatatttccatgcctcagccagaagactgtagcaactggggtttgtagagttcactgtgggatttgttctgcaagggagagcttctgtctcttggaggggaagtcagtggagaagttggttgcttgcttggataataataatgagaaagtagttgaagctgccctatcagcgttatccactttactggaggatggagtggacattgaccaaggtgtcatggtgctgtgtgatgccgaaggaatcaacccaatacttgacgtattgtgtgagaacagaaatgaggcactgcgccagagagcggtgtgggcagtggagagaatcctgaggatggatgaaatagcatatgaaatatcaggaaaccaaaatgttggtacagccttggttgaggccttcaggcatggtgattccattaagaccgtgctccagctaaatcgctggcaaccagaaacagagtataatgattga

SEQ ID NO: 34178 - DNA, 771 bp, Zea mays
  Peptide Sequence Number=SeqID_77553
atggcggcgtccgccttctccttcgtgggcatggactccattctccatccccatgattcccttcctcgcctgctgttgaagatcattcctgccacaacgccagaggagaacaggaggaggaatccacagcccagcctgacgaatgatggttgggagtgttggtcatcattttcctgcctggttgggtttcctctgcttgtcattcttgcagtcagcgtgaacgaggttgaggcattgtacaggttgttcaagaagattggcagcaccttcattggcgatgggctgattaacaagataaggctagatgaggtggctatatctcacatggatatcgtgtctccgccagtcgtggttgaacggtcgtgcctggccccctcccccacgagattgccaacctcccgcctcgctcgtcgcagtgctgcccccggcgaggctgccgaaattgtcaccatcctccaccccgctcgctatggcgagtctcacaaggcactgaaatgtgtagatgttttcaaggagttctatcaaacaagaacgaagcacatgaagctgacatggatgggaacctgcaacatcagtgtcaagtttgatgctaagcctattgagctcattgttatgacatatcaggccacattactactactgttcaatggatccgacaggcttagatattctgaaattgcaacacaactaaacctgtcagatgatgtattgatgagaagaaaaaaggtgttgaaaatgttgacaaagacaggaggtcgatctggagcataa

SEQ ID NO: 34179 - DNA, 765 bp, Zea mays
  Peptide Sequence Number=SeqID_77554
atggatgctttctcgtcgttgctccggtcgtctccgccacgctcctctctctcccgctgcatcgccgtggatggggcgaggagagagcagggactgcagcgatctgggcggaggactcgccttggagagcgtgggcacagacgggattctggggagagcgcgaagacggggcgcgcgcggcgctcgcgcggcgagattagcgggggtggggggagggcggagccgtggcatgcagctgccctcccactcaccccgcgcgtccgcctgtggctgggcacgttcaacacggcggatgaggcggcccgcgcgctgcgcggggagaacacacgcacgaacttcacggaccgcacgcggcacggcggccccgccggcgcggccagggccacgttgagcaagaacctgcagcacgtgatggcgcaggcggccgccaccggtagggccacggcgtgcgcgggggtgggcgaccagttcgcgctcgacgcggtgttctggcacccggtgacgacgcagcagcaggtgaagcacgcggtggagccgagcttcgtggtgccgaggcggaccgaggcgccgccactgtcattggtgcctgcaggaggtggtgaggtgtggcgtgtggacgacgtcgacaccgcggatgagtcgttgtgcgccgccgaggagagatcgttcaaggtgtcctcgtctgtgatcgtgccgccctccttcagcacctcgtcatccaaatggccaataattgcttcactaactattaagaaactaatgtag

SEQ ID NO: 34180 - DNA, 261 bp, Zea mays
  Peptide Sequence Number=SeqID_77555
atggcccacgaaataataaagaagagcgaaaaagatactcatgacgctagggaagcaacgaaggcagctgaaaaagctgtggaactcgaaaggcggatagcagctgaactatctcctctccccgagcccttcgtgtcactggctgacccagaggcaaaggaatcagcagaaattattagcatggccgaagctattatggacgaagttgttacccaactgctgaccgaggctgcagataaagttttgaaagaagaagaatag

SEQ ID NO: 34181 - DNA, 516 bp, Zea mays
  Peptide Sequence Number=SeqID_77556
atgcagaaagggttctcgaacatccttgatatgacagtagatgcgctttgcagtagatctcaccatcgttggttgatggataagcttgaccacaaggacatgacaattcgtcctagtccaggaaaggaattaaaaatcacaaaggacactatgcactttatccttggtgtaccaaatcatgggggtggaaaaccattggggattgatgaagcagttgctgcaaatcacctgcatgccgctgctgcccctcaaaacaaacttggtacacctcgcataaaatattttgacaagaataccataaaagcattgactaaagctgaaaagaggaagacccgccatggggtcgaaccattcgactattgtgatgttggtaaggcatgcttagccataaaagacacccttagcaagattgttgagaagcaatatgatctagtagacaacttcatagagctgatcgacaaggtactatgtgctgagtcagataatttagagaatgagacagatgtgccacaataa

SEQ ID NO: 34182 - DNA, 1068 bp, Zea mays
  Peptide Sequence Number=SeqID_77557
atgtcttcgcactcccctttatgcattgcgcccttccaccttccgagcccccggatggggagcgcccgcgttgttttcgtcttgctgtcgttggaggaacacaacttcacggaagttggcaacccggttgcatcccctcgccgatggtcacccaagacggtgaccaccagtttgatggtggggagaagcaagccgggctgcggcctctgccccgccctcagcttcaaggatcttcatcatccttgctggggcggagggcgagctgagccggagctctacctcccgcacgggttcgtgggccaccttctccttcagcattcaggggagaaggcgctcaccagcctagcagagggggcggacttcgacaacgcggggccgatcggtcgcaagcgtcgtcagctccagcgtgcccggttcgctggctcagctggctctggcgcagcttccggtgccacctcccaccgctgggcggagtgcggctatctgcccgccgtacgggcggttgttgcgccgcgcgcaccgggggactacccaagacgtcgcgcgttgctagggcggcgttcgtgttcttgggctgtcctgcccttgctccggtacgacgcctctacgcggaggtcggtgctcgctcgtctgggagggcccgagtggggatctgtcggtgggcagatggctgccgtcgttggcgccgaggtggtggcggctgaagaagtcctcgtcgccgacgagatcgccgccaccatctgtgctccgggcctccggctctttggctttgatagcttgtcctcgcccctcgagtggggttgtgggcgagggccttattgcagcagcgtctgccctaaggtcatcgctactgctatttggccgcccgaagcggaggtcgttgtcgctgctgccggagtgggcggcggcgagccacccgggattttgtcgtcccgtaggccctccaatgtggggggttgttcgtacctgcaggggtggaaccggagttccgtttgtaatggcaccttgagtgtcggtgtctgttcattgcggctatcggggcctgaacatctgtgtatttgggcgtaa

SEQ ID NO: 34183 - DNA, 594 bp, Zea mays
  Peptide Sequence Number=SeqID_77558
atgcaggcggcatgcaactgcaccaaggcggcgcaccttttcaacttcgacgcgtccagcatggaggcccaggcccacacgtcatgtaaccggcgcgccggttactacgtgcgagaaactgcactgccacttgcgccagtaccgcgccttgtcgactgcggaaccggtgccgcgactcgaggcaaccctgcgcatggcccaacagtgccaaccgagcacatcgatcacgggcgacacctttggcaggcgaagcgggcgacgcttcacctccgccataatgaccgcgtcaaaaaagggaccgggaaaggggatactccgaaagggatccttctccgcgaaggaagcgggcctcgagccctcctattgatcagaggttcgaaggctaacccctcagaagggttcgacagccgcctcagagcactcgggctccgcgcccactactggtcagaggttcgaaggctagcccctcggaagggttcgacagccgcctcaggccactcgggctccgcgcccactactggtcagaggttcgaaggctggccctcggaagggttcgacagtcgtctcatgtcactcgggctccgcgcccactaa

SEQ ID NO: 34184 - DNA, 315 bp, Zea mays
  Peptide Sequence Number=SeqID_77559
atggacgaatacatccgagctgacaacgatttccgccagagaagggagaaagctgtaacaccccaggtgttacttagggttttcactcaaggctacacaacttcagcaactctccttgtaggagcagggctcaaggccttcatagtcaccaaacttggaaatcaagatcctaagagccaccgacgacctccgccgcctgcactcgtggccaggatcgctccgaccacctctgacgctgacccgcacaccgacgtgactgccgtgacctcccctacgtcactgacaaccccgccggaactctactgccgccggtaa

SEQ ID NO: 34185 - DNA, 177 bp, Zea mays
  Peptide Sequence Number=SeqID_77560
atgcagtacaatggatcaagcagtctcattagctgcgagaagcagacgattcgaatcgagtttttaatccttgcaaggctctggtgctggatccggggctacctcctgagcaactccttgctccggcacgaggacgtattctccgtcagcgaggttggaatctatcgaatgcaatga

SEQ ID NO: 34186 - DNA, 903 bp, Zea mays
  Peptide Sequence Number=SeqID_77561
atgtcttctcgctcccttatgcatcgcgtctctccaccttccaagcccccggatgggggatacccgccgtcttctcgcctcatcgttggaggaacacaactccgcgggagttggtacctttcagccatcgttcggcttcaaggattttcatcatgcagcccggctgcacccctccaccggcggtcacccaagatggtgacctccagcttgatggtgggggaaagcgagccgggctgcggcctctgcccctccctcagcctcaaggattttcatcaccagggctggggaggggactgcagcgtgcctggctttcggacgcgagtggcttcggagccgctcgcggcgccggcgtctgccacggcagctggaagaggttcttccgccggcgagatagccaaggctggccacggaccaacctccaactctacggccttctgcccgtccttgcctcacgagtttgggcgtgagcgggggcctcctagcagcagcacccgccctgaggtcagtgctgccgctgttcggccccccggagcagaagtcatcgtcgtcgctgctgctggagcaggtgacggcgcgccgttcgtcggtcttctgttgctccgcaggccctcccccctggagtggggttgttcgtgccagcggagggggaaccagagttccgtttgtagtggcacttcgaatgccaactcgcctgttgattatctgaaccacttcaccaagcatgagtcgccccgtgtcaaggtgacgagtgagcatgaacagaggcggagttggctcgaaaatgaaaacctggttggccggagcctagccgggttgtccgttagcgggaccgacgccggagttgaccagccgaggcctcgggtcgggctggcgcccttgggagatggtcggccgaggccctag

SEQ ID NO: 34187 - DNA, 588 bp, Zea mays
  Peptide Sequence Number=SeqID_77562
atggcgccgcggggcggcgtggtggggtccggggcaatgctggggctggacatgcacctcgcccagcagcggatgcaccaggccgccgcgttccagcaccagcaggacagccacaacggtgggttccagctgcagcagccgtcgccggtggcggtgaggcagcaacagccgccgccgtcgtcgttcatgccctactccaccaacacgtcgtcgtccagggtcgtggtgagcgcggcagcggtgggtcacgacgacgaaatggtgggcaacggcggcggcgggaagggcggagtggtggtgcagcagcagcagcagcagcagctggcgtcggcggggtgcccgtggacgaggatgaagtggacggacgccatggtgcgcctgctcatcagggtggtgtacagcgtcggggacgacggcgagggcgtggcgacggctggcggcgccgggggagcggccaaggcgggccccggccacgcggcggcggcgcagcagcagaagaagggcaagtggaagtcggtgtcacacgccatgatggacaagggcttcgtggtgtcgccgcagcagtgcgaggacaacgaatcaagctga

SEQ ID NO: 34188 - DNA, 327 bp, Zea mays
  Peptide Sequence Number=SeqID_77563
atggacaagagttgcactcaactcctctcaagtgatccaatgatcaacttgaataccacattgttcttctttctttactcttttcccgtttgcgaggaatctccacaacttggagtctctcgcccttacaataaggatcaaagtgacaacactagaccgaccgttgaagttttggagccgttggcgcaccgaacactgtccggtgcacaccggacagtccggtgcccccatcagaccgttggcctggccacgcgtcacgcgcggattgcgcagccgaccgttggcacagtcgaccgttggctcaccggacagtccggtgaattatag

SEQ ID NO: 34189 - DNA, 279 bp, Zea mays
  Peptide Sequence Number=SeqID_77564
atgaagcacaaaaccgcagctctcaagctcactcaaagatttctctccaaagatttgaaatgggagaggcaagagataggggtcagagaccagctgaactgcccctcaggactagttcaaccggtcttgaccagagagtttaggagagaaaaccccagctcaactgcccggaggcaagttcagctgctgaagaagctcaactcagctgaagtcaagttcagctggaaagctcagctgcagttgaagaagttcagctgcttttcagcaagaacactctag

SEQ ID NO: 34190 - DNA, 406 bp, Zea mays
  Peptide Sequence Number=SeqID_77565
atgtatacctcaacgacaaggcggcacaaggcgggtgcaacggcgctcagggaggcggtcggggccggtggcgacactcggggaggcgatcggaggcgacggcggaacttggggacgacgacggtgatcgaggagccggtcggggtgatgggcgactcggctataattcaccggactgtccagtgtacaccggacagtgtccggtgcgccaagggaggtcgacctcaggaactcgccagcttcgggaaacgccaacggaagtcagaatcgcccatgctggcacaccggacagcaaacagtacctgtccggtgtgcatcggacacccaggcgggcccacaagtcagaagctccaacggtcagaatccaacggcagtgatgacgtggcaaggggcaccggactgtccg

SEQ ID NO: 34191 - DNA, 612 bp, Zea mays
  Peptide Sequence Number=SeqID_77566
atgagcgacaacggggacgaggacgaggacgaggaggaggaggacggccccgtgtaccgcagccgccgccccagaagtcgtcagcacagcggcgggcgcggcaagcgcgggcgtggcatggatggcgccgcgtccgaggacctcgaggacgaggcggacggcggcggtgggagacgctcgaggacggcggcggcacccgacccgtcggcgatactgcggcagctgaagagcgagctcgcggctgcgaccgccgcggcgatggacccgcagcaggccaggagctgggtgcgccgccgcgcggtggaggtggaggagcagcagatcgtcctggagtcccacgcgtactacctggagcgccagcggctgaagtgggagcggttccgcgccagcaaggagcgcgacatggaacgctcccgcctgcagaacgaccgcctccgcatcgagagccgacgcctgctgctcatgctccgccacaaggacgtcgacctcgacatggccgaggcgaactcttcctccgtcgaccaccacaccggcgcgtcgccgctcgcagcacaccagcagcagccgattgggtccagccccagcccgtccaccgccggccacccaaactag

SEQ ID NO: 34192 - DNA, 195 bp, Zea mays
  Peptide Sequence Number=SeqID_77567
atggcggatcgaggagctgaactccaccgtgctagggattttgttgcacgcgcggagctcgggggtaggcaacaggagaaccggaggattccaacgaccgttctagaagaagcttctgccacatgggacccacacacacacatgtctatcaccggaagattaaaattaggccttggcgtcgacgggtactactaa

SEQ ID NO: 34193 - DNA, 405 bp, Zea mays
  Peptide Sequence Number=SeqID_77568
atggatccaccgcgggtgctcctgcgtggggtagccctgctcctactcctctgcccaacgccgatgttctcctcggctcgggcccctcacctcacctgccatggcgcttggcgctcgccaagccctcacccccagccgcctaagctcgtgcgcgtccctgccgaaacaaccgtcggtgtcaccggaatccctcaccggcgttctgctcgtgtcgcggacccgccccgaactgtggacgagctcgctactccttcaatcgcgggtgagaatcttctttccgtgttcgccatcacctcctctaggtttagcaccggtcaactttgggtttggggcgttcgggcgtcagattgcgtgtccgccggcgatgctccgccgtgcttctttgctgcgccgtcgctctggtga

SEQ ID NO: 34194 - DNA, 399 bp, Zea mays
  Peptide Sequence Number=SeqID_77569
atgaggcgatggtccaaaaaggggggtcacgacctcgttttatacacaagaagagtccgacccggcgcagatcgaggagctgaactccaccgtgctagggattttgttgcacgggcggagctcgggggtaggcaacaagagaaccggaggattccagcgaccgttctagaagaagcttctgccacatgggacccacacaaaggccctaataattttgaaaggcattacaaatcctacccccttaacagaaatctcgccctcgagatttgttacaagaagggatacaaaggaattgatatatatgcagatgtaattgtggacattgatccacaacccatcacactcaatcaaagatccaaatcagacaaatatcataagaacaagcatccaagcatataa

SEQ ID NO: 34195 - DNA, 1014 bp, Zea mays
  Peptide Sequence Number=SeqID_77570
atggcggaccggccgtcgcttcctgctctcattattgctatcgccgttcttgctggcagttactgccgcgtggcgagctcggcctcgccggcggtggaagatgagctgcgcggtggaggaggagccggcggtccgacgacgatgcggcggcgcgcggcgtcggtgatggtgcccatcaccatcctcaagtccgctgttagcgacggagctgatttctacaactggaaccgggtcaaggttcgctactgtgacggtggatcttttgccggcgaggccttcgacaaggtgcacgcacatatgtatccagagtgcatcttacaagtttgcaggcatttttatttcgccgtatttgacactgggatctacttccgagggcagcgcatctggaacgcggtcatccggcacctcctctccattgggatggccaacgctgaccaggtgctgctcgccggctgctcctcgggcggtctggcggtgatactgcactgcgaccagctccgcgccttcttcccgtccggctccaccgtcgtcaagtgcatctccgacggcggcctctacctcgacgcgtgcgtaccttgcttcttcccgcagaacataatcgacggcgttaaaaccccactgttcctgctaaatgccgcatacgacttcattcagattgtgctcagcctggcgccagacagagctgacccaagcggcgcttggcgagcctgcaagtccaaccgcacggcctgcagcgcatcccagatgagtttcctgcaagatttcagggaccagatggtagcgtccgtcaaaggcttctccggttccaggagcaacggggtcttcctaagctcctgcttcgcgcactgccagtccgagcagctgggcacctggaacaccaaaccaggtggctcccccaccattcaaaacaaggggatttcaaaatccgttggcgactggtactttgatcgagctgaggtgaaggcggtcgactgccgctatccctgcgacaacacttgccaccacattatatga

SEQ ID NO: 34196 - DNA, 276 bp, Zea mays
  Peptide Sequence Number=SeqID_77571
atggaaatgatatcgggttacaaatatacctttgacttgaaagaagtgccacaagcaaccacccggatcggtcctatgtgggttctacgtgtgcgagttcatgagaatgaacggacgatacatcacgaaccctggcaaggaagcccggagaacttgactgaaggtgcattgtatggcatagttgaggacctgtgcacattcattattgaaagagatcattcccgcagaagggaaatatcacgatgcttccggaacattagctttgccagagtttag

SEQ ID NO: 34197 - DNA, 2169 bp, Zea mays
  Peptide Sequence Number=SeqID_77572
atgttgactgaatggtttgcctgcaactcaagtaattcaaatgctagggacctaacttattgtgagtttccatcgaaatggagatgggatgaaaaaacacggagttggaggccaagactagcaagagagagcaaaatagggcgcttatattatgtccatccatcagcaggcgagagatattatctaaggatgttgttacttacagttaaaggtgcatgtagctacgaatctcttcgaacttttaacaatactgtatatccaagttttaaagaggcatgtcaagcacgtggccttcttggtgatgacaatgaatggttacaagcttttgaagaagcagcaacttgggccacagctccacagctacgccaactatttgctacaatgcttctatattgtcaaatcagcaacgagcattcattctttgaaaagatttggaagctaatggctgatgatattggatataacatacaaagagcacttagttgccctaaatttcaaatgacagataatgaacttagagatgaattactagagcgattgactattctctttaacaaaagtggtgggaatatacatgagtttaacctgcctcaaaaggtacatggaacacaacaacaagaattcaatcgtttaattgaagaggaaacttcttatgatcgtgaaaatcttcacaatgaatcccaaagtctcttctcacaacttaatgctgatcaattaagtgccttcaatacaattgttgaatgtgtcctttctggtcgacctggtttatactttgtatctggatatggtggcactgaaaaaacgttcttatggaatgcaattgtgttatacttacgatctcaaggaaaaattgttttaactgttgcttcttctggagttgcttcccttctacttcctgctggccgcacagcacactcacgtttcaaaattccatgtgatctagattctaacagcacttgcaatatcaagaaaggaacaatgcttgctgacttaattaaacgtacctcattggtcatttgggatgaagcttttatggctcataggatgacatttgaggcgttggatagaagcttccgtgatatattgtcgtctgaatcatctaatagtgaaaatatgccttttggtggtaaagtaattgttttaggaggtgatgcaagacaaattctacctgtgattgaaggcggcactagatcacaggttgttggtgcagctataactaattcatatttatggcactctatcaccgtgttatacttaacacaaaatatgagattatcttcaactgcccttagcattgatgctaaaaaagaggtcgagtcattcagtaaatggattttagcaattggtgaaggaaaagtaccagcaaaagcaagagagaatgaaacagaaaaatgttggataaaattacccccggaaatacttcttatgcccatcaaagacaatctatcatgcattgtccaaactgcatatccaaatatagaaacaatgtataataatgttgaatatctaaaggaacgtgccatattagctccaacaaatgaagttgtcgacgttgtcaataactatatggtttcaaccctacctggtgacacaaaggaatacctaagctgtgatagcattgcaaaaggacccaatatgcatgcatcctatgatatgctatatccaatagagtttttaaactccatcaacggtaacaactttccttcacatagtctgattttgaagaaaggaacaccaattatgctgctacgcaacattaatcaatctcagggtctttgcaatggtacaagattgattataacaactttgggagatttagttatagaagcggagattatgaccggaaagcataaaggaaacaacgttgtcatacatcgaattagcttaactttgaaaaatccaagaaatgtgtttgttttagagagaagacaatatcctataaaagtatgctatgcaatgacaattaataagagtcaagggcattctctatcagaagtggttgtatatttgaaaaatccagtgttcacacatggtcagttgtatgttgcattctctcgagtcacatccaaaaaaggcttgaaagtgttaatagaagatgaagatggtaatccatcagatgaaacaaagaacattgtctacaatgagatattttctcgctttatccagtga

SEQ ID NO: 34198 - DNA, 192 bp, Zea mays
  Peptide Sequence Number=SeqID_77573
atggggattggattcgtatatgggaaacagccgaagcggaagccgagagatctcatccgtgctgctgctgagtggcgacaagttcttcatgtgaagcgcacgcccccgtggtaccggatccgtacaggtgtgcagtgttatgacaggctaaacctagtgaagaagaaaacaagtagctccagcccgctttga

SEQ ID NO: 34199 - DNA, 573 bp, Zea mays
  Peptide Sequence Number=SeqID_77574
atgaccttggaaccaacacctatggataaaaattacaaggcagggctcatcggcgtcgtcactccacgttatatggctactcatgaatgctgccaaaactcagtagacgacttagatggagggatacctcaagatgaagcgccgagcgtgggaatcagaattgtggacatgagatggggcgacagcatctatggtgtagttggtgctagtcagggcgacgtggaggtcagcatcggggcaacctcgaagccgaggagccctacacagtgcagcacgcaagtgaaggtgctaggcctggacgccgcgggcgggaagctcttgagcgtgccgatgttgaggatggacttgagggcgtccgggtggcacaggaactcgctggcgccgacgccagagacatcgtccggcagtggcacgcactgctgtcgcctcgctgacagccgggcacaccgccccattggtgactggccctacggtgacacggcgggcgtgatttccgggtggcggacagcgaggcttgcgcgaggaagggggcgggggcatggtgaaatggtgtggacgcctacactgaaatag

SEQ ID NO: 34200 - DNA, 243 bp, Zea mays
  Peptide Sequence Number=SeqID_77575
atgagccctgcctggacatccaagcaacatagaggttaccctggagttttttcacagcctataatatttcttcaccatatgtacaattttgttggtccattttggcaaggtagaatgtggtataagaaaaggatggaggagggaggatgggcagaggaaccatcggtgcaatggtgtgcatttccaaatgcagcagatattgcatttatttcaagaaatggtaactccacgctacagacatga

SEQ ID NO: 34201 - DNA, 303 bp, Zea mays
  Peptide Sequence Number=SeqID_77576
atggcggtgcagctcactccagctcttcctcgaaggcacggggaagcgcgtttcttcacagatttccgtgcgcggcatgggtgcccgtccgcgcgtgcccaggcgacagcggatcctccaggcagggcagagtcagacggacgggagccagccgagaatattttgaacctgcgtgcgtcggtgcccaggccagggtgcgtgtgtgggtcacctcacctgctagccgggtaccgggtgcgagtgggagcacctacgtcggtgcacgccacctggaaaacgagccagaaccaagagcggatataa

SEQ ID NO: 34202 - DNA, 198 bp, Zea mays
  Peptide Sequence Number=SeqID_77577
atggccggcaacgcgcaacgattattcggcgtgggaggaatcgagtctgttgcggctagagatggcaatgggtacccgaaactcgaaacccgatgggtttttaccgcattaggattttggatcatgatatcattaatcattacgatacttattgattatgagaagaacaagtatattggagatgaaacccgcgggtaa

SEQ ID NO: 34203 - DNA, 792 bp, Zea mays
  Peptide Sequence Number=SeqID_77578
atgtcttcttcctcccttaagcgtcgggtcttcccgtcttccaagcccccggatgggggcctggccacaccccaccaccggcggtcacccaagatggtgacctctagttcgacggtggggaaaacgggccaggccgcggcctctactcctccctcggcctcaaggattttcgtcatccaggccaagatggaagatgaggcgagtcggggggccgcttccaccactaagtctcgcctgtttgattatctgaaccgctttaccaagcatgagttgccccgtgtcaaggtgacgagtgagccgacgccaaagtcggtcagtcgaggcctcggatcgggctggcgcccttggaagccggttgaccgaggccccaggggtaaccggttgagccgcctgctcgggccggattcccggaggagcccctggaccgcggcgccgcccgaggctgggtcgggctttgctgaagacgtcgtcgatgccgagggtgctacggctcccttcggcgtgaagacccgagcctgcaggatcagatcatcttgtagcgtgtgctttctgcggccgccgaggccagaagaacacgccctcgccgcgctcgcgaagctgcgtcttttttcctcctgttccgagcatctggactctgtcggtaacagggatgtttgtgtgagcgagagttgcttttcgcggaagggacgagtgaggtatccgtatcccagaggcgtgggaatccctcggctcggtcggccttgccgcttacgcgtattttcacccgtccatgaggccctgtccccgacttag

SEQ ID NO: 34204 - DNA, 725 bp, Zea mays
  Peptide Sequence Number=SeqID_77579
atggactacgagcggccaccaccagccatcgccatgcatcaccaaaacccataccacgtcttggaggtggagatcgaggtacatgagagggccatgaagcacttgagagagatcggggaggagaggcggacgaggagcttattgaagaggaggctgatgatgaggctcaggaaagacggctacgatgcgtcgctctgcaggtcttcttgggtcgctaccgccgagcacccgggaggcgactacgagtacatcgacgtggtcgttgcgggggagcacggcgggggcgcggcctcgtcgtcttccacttccagcagcagctccaggatcgtggtcgacatcgacttcagttcccagttccagctcgccaggccggccccgtggtacgcgcagctctgggcccggctgccgccggtgttcgtggggccacgcgcgaggctccggaaggcggtgtcgctgctctgcgaagcggcgcagcggtcgctgcgggagagcgggctgcacgtcccgccgtggcggaggtccgggtacatgcaggccaagtggctccccggcgggacctcggaggtggtggcggcggcggcacagaggtcggtggcgatagcgaggggcgcgggcggcgggacccggaggccaggcgcgggcgcgggcgcgggcggcctctcgatggcgctgctgtccagctccggcgctgaggccaacggctgtcaaggccaagctgggtccat

SEQ ID NO: 34205 - DNA, 1497 bp, Zea mays
  Peptide Sequence Number=SeqID_77580
atgcctttccatggcggaagagtggtgcgaagtcccgccttcgccctgaatctgcaaaaccgcgatccgaccgcctttgtgcgtgaggcagaggatgcggcggtgcggctcgttggacgttacgtgccgaggacagagggccagcgcagctggtatatccgcgggtcaaatgaccgtttgaacagggtttttgaattaaatcaattgccatatgatggctaccctggtcaagacgatgtggaccgccgcgggaagaaaccggcggtggagactggagacgaccctgcgccggcggccgccccatcctctaaaaagagaaaattaggtactgctatgggaggacttggggtttctgatggttttgctagagagttgatgaggacgtgcgcggccccgggggaaaggatgtcttcgcccgagctccgggagtctttggctcggatgctgagggttaccgggggttgttggcctaggaacgttcctatcccccgcgcggctggcgaggacttttttacatctcgcatggttcgtgaatggagggtttttccttacgggcggaatattgctgctgttgtgtcagcagtgatggacaaggatcgccagggagcggctcagaagcgccaggcggctgtcaggctcgttgaagccaggccgaagaggcagcggggggctgcaaaggctgtggcccccggcggaggccggccgccgctagcggcgaacggagtggaggaggtggcgaaggcggcccgagcgttgccgttgtcgggcaaacgtgtcgctgacttcgccaccgacattagtgtggaggactatatcggtgggtcgggcgaaggccaacttgctatggttttgcccgccgcggcgaccacgacggttgccgcagtgccgaaggcgaagggcgaggctcttagcgccggaggcgaggtgacggccctcgcggttgttatggatgaggcgggcgctacgtcccgccggctgaaggaggtgacggaggcgctaagtcaggtggctgacttcgccagccgcactgcgtcgggggccctcacggcggttgtggctgccgaagtcgagagacttcggacacaacgtgctgacgccgtccgtgagaaatcggccgccgacagcaagtgtcgcaagctggcggacaaggtggccacactggagggagagaaggctgccctccggcgccagctggcgggggaaaggagggagaccaacgaggctcttgccaaggcgcaggctgcgcagacggaggccaacctggcacgggcggagggcaatcttgccagggagcgcgccgagcagctgcaggagcggctcaccgctctggagagccgcgtggagagggccgaggccgcgtcacgcgtggaggcggagcggacgcgccaactgcttgtagatacataccgcgggctgggcgcggggaccggtgatttcgaagtgccggaccgagagcccggacttcgctgcctggagtgggtgcaggaggagttgtag

SEQ ID NO: 34206 - DNA, 846 bp, Zea mays
  Peptide Sequence Number=SeqID_77581
atgaatgcgctctcccgggaagggtgccggcacttcgaggtcttcgaccaagtcgaagaagattttaagcaagatatctttaaggttgaggaccccgtagtgaaggaatccgccggagctatcttcgaccggctgtggggtccacatggtcgcgaggtggtcagagagcgggccgagacggcgagggctcaggcggcgcgtggcgagagggtcgacgactttggggcgttgaacagcatgctgtctgacccggagccgaccccggcggaggccgtgcctgggttcgccctggagctgaccctggagactgggggagacgcgtcgggtgcccccgcatctgctgcggccggcgaaggcctgcccccagaggtcgccgaaggcgcacctgatgcctctgcagctgctgcgccgagtgctgaagatcccgcagcggtggcggcggagattacagcggaagcaacggcggagccaacggcggaggctcccgcaacgtcagggccgtcgcaggttcaagattttgggcctgcgcacacaaccgctactactaaatttttggcggcttcgaccgcggaagatggtaatgaatgtggtgggtctgcatctgagttttttgattgtgctgactctgggagctcggttgagtggactgaggagtcgtcagaggaggacttggactactttgcggccttggatgtggctgcggcagaggcttcgtcgcacgtcacggacgcaggagatgtgccaggtgaaggggaactgcgaagtctttttgcgggtgaggagcttaggataatgttatttaattatagggagatgggaattattcctaaggttgagccgatgtag

SEQ ID NO: 34207 - DNA, 1335 bp, Zea mays
  Peptide Sequence Number=SeqID_77582
atgggtgcatcggggtcaaatggtaatgcttatattgttaatttgtattataggtgtatctctcagtacacattttggatgacagcgatggtagttaaaacacttactgaattgtctctgcaagacaaagatgtaaccgttcaggttgaagtcaacagaagatgggaatttagaggaattggcgatgatggtcctgttttacatgttgacatgattctaacagatgcaacgggaaatgcaatctatgctgaattacctgccaaattattggaacaaaaaggttcattgttacagtcgaacaaagtgtactacatccgacgctttcgagttgcaaatgcaaagtcacaatacaaagttatcgatgcccctctcatgatctacttcactgtttattcgataattgaagtttgtcgtgatcctccatctacatttccactttacgtgtataatcttattccatatgaggctattgatgcaaatggaccaaagagtaaagacttccatgtttctgagataaatccaatacaactaagcggaaagtcatctatctaccggaatgtgttcatcaagaacctcagtaatgacataattaaagttactctttggggaaatcaagctctaaaattttcatatgaagctatatatgatcagaaaatacaacatgctgttgttgttctatttgttggatgcttaccgaaggaatacaaaggatctgtatatctaagtggtggtgcagcttgccactggtatttcaatccatccattaatgaagctcaaccatactatcaaaggattcataatgaaaatgtaacaatcaagctccctccactaacgaacgaacaagcggcgtttgttaaccctcctgaaacacaacacaaggatttaaaagagctattagagtctgaaccattgacactaccagaggaaggttttaaatgcactgtaaccattacaagattgcttgatgatcatccatggtggtacaaagcatgtaatacatgtccaaacaaaccatccatgcggtcatcagtgtcatcatgtcctacatgtggctcgacagatgctattctaagaaaaagaactcctaatcaagtcagtcatagcttcacatggaagagacctatccttgccatcaaccaaattgagcattccaatgcatccgtcaactccaacaaaacttctatcgagaacaagacagacaatttcaccctctacggcattgtccaacctatctacatccagttctctagaggatctattgtccatggaaacaaaatgatggggctggtgttcctaatattagtcactaagcgcaccaacttttgtctaacatag

SEQ ID NO: 34208 - DNA, 189 bp, Zea mays
  Peptide Sequence Number=SeqID_77583
atgcaacttataagagcaatcggcttccaggctaaaacaatcgacgtagttggccataagggcggagaggcggtggtgtggtgcggcaagccccgtgcgatggatctgagcagggcgcacgacggggccgggggcggggcgcgcagtggagaagcaggtgaagtcgtgaaggtgaaggataggggctga

SEQ ID NO: 34209 - DNA, 453 bp, Zea mays
  Peptide Sequence Number=SeqID_77584
atgtttttgaggaccttcggaggacgaaggcccccaacaccagcgttataccagaccgatccatcgggtaccatctctgcttggaaggccaatgccacgggaaggaactccaactctatgcgtgagtttctggagaagaactacaaagacctccggcaggagaccatcaagcttgctatccatgcacttctagagttcattggccatgtgtcaacgtgcttccggtatgcttatccatggtggaaagaaaaagtgattgactcagacttgaaaagaaaagatggactttgcccattgacgcctaaggagactgctcttgtcctcggagcacttgacatcgacagagagaattccttgacatatgatgaggataaaggagcttggtttctggagaaagagttgactgtgaatgtttatgctaggaaccgtctcaaggttcatcaatatccatga

SEQ ID NO: 34210 - DNA, 402 bp, Zea mays
  Peptide Sequence Number=SeqID_77585
atgaagattgtgtctccttgtgacttaacaccattttcactctttcaaagcatacttccgaagatcaatattgtgtccccttcttgtgccatatgcaacatgatgtatgatgcttatgctatgcaaaatgatgtgatgatgttatgttacgtagatgacatttgttccgaaagatacacacatatccccacacaatatttttgtatcagcgctgattcttcgcttccctttggtgtggagcatattggctcccttctggctgttggccttgttgcagcggtggtggaggtggaggttgttgccaggaagcttgaggttgacttgccgaagcaacagaaactgcagggtggttacctacgtattctgggatgtaaggcacatggtacgaagcagtatgcatga

SEQ ID NO: 34211 - DNA, 810 bp, Zea mays
  Peptide Sequence Number=SeqID_77586
atgaacgcgctctcccgcgaagggtgccggcacttcgaggtcttcgaccaggccgatgaagattttgagcgagatatctataaggttgaagaccccgtagtgaaggaatccgccggggccatctacgaccggatgtggggtccgcacggtgtcagggtggtcagggagcgggccgagacggcgagggctcagacggcgcgtggagagcgggtggacgacttcggggcgttgaacagcgcgctgcctgacccggagccgacctcggcggaggccgtgtctggggtcgccctggagccaaccccggagactgcggaagacgcaccggatgcccccgcatccgctgcggccggcgaagacctgctcccaaaggtggccgaaggcgcgcctgatgcccccgcagctgctacgccgagtgctgaagatcccgcggcggtggcggcggaaacaacagcggaggcgacggcggaggctcccgcaacgtcagggccttcgcaggttcaagattttgggcctgcgcacgcaaccgctactactaaatttttggcggcttcgaccgtggaaggtggtaatgaatgtggtggatctgcatctgagttttttgattttgctgactctcggagctcggttgagtggactgaggagtcgtcggaggaggacttggactactttgcggccttggatgtggctgcggcggaggcttcgccacacgccgcggacgcacaagatgtgccaggtcctagcaccgggtgccgacgacgaagggcggtcgcgaagcgtagggttagtggggaggagggggctcggcttcgt

SEQ ID NO: 34212 - DNA, 129 bp, Zea mays
  Peptide Sequence Number=SeqID_77587
atgcaggaatcccttgcaggaccgccatcgcagcaaaatcctcccgagggcctccctacactgaccactcccctactgcccttgcccctttcgggtctctggttcgcgcgcataaaaacagaagactag

SEQ ID NO: 34213 - DNA, 306 bp, Zea mays
  Peptide Sequence Number=SeqID_77588
atggcccgtgatgggtccaacatcagaaaagatgcacctctgctagaagagagtctcagtgtagtgtctctgtctgagtcgcttaaggaccgtgccgatgtaggcttgctgatcgaggaccttttaactggtcacatgcctcatcatggtcttaagaaccccggtggcgagttgacatatgcaagggttaagtgctacatatgtcgcgtgattggagatcaccagctgggtattaatcgattcagatcgccgttacttctcggacatgaagacttggtcactgccctacacgtagcattccagtga

SEQ ID NO: 34214 - DNA, 126 bp, Zea mays
  Peptide Sequence Number=SeqID_77589
atggccacggaggggtctgatttggtgtctgccgctcgggagcatcagtcgttgcgtgaatctaccggcataggctcaccggagttcgtcctcgtgctgttcgttatcgtggacctggggcagtga

SEQ ID NO: 34215 - DNA, 678 bp, Zea mays
  Peptide Sequence Number=SeqID_77590
atgacctcctttgctatgccaaagccaaagaggacaaaagttgtaactcaccggcagaagtcgtattttttagaaagggctgctatactgcctactctaggggtttcaaagacagaggctattgaagctgctgaagataccttctcagcttcgaagccgaagctacagagttctcccatggtgcaagggctgtcaaggatagcatccacttcagtagcgacaccaaagaaagggagaaggatggccaacgttctagacgttgttctgacgccttcgaaaatggctactcctgctcctacaaggatttccaaagacaaagctagagaattggaaaaggctaaagatgtaagtactgctcctgattgcgcaaaggctggaccttcaaaaagtaggccaatagagcaaccgaaggggtacccttcatttctggccgccagatcacgaggcgacggccacgattacattggtgagggttatgaatggaaaccattcccgattaaagcgacggtgacagtgcaccagagggacgttgttttacctcggctcgcggtgatgataacccgcaccacggtacggggcggcgcggacatcgatgggaactccggcaaggaattcccggtgctgcaggggctaatccagaccgcgatgctgtggagatacttcccctgggcttggtga

SEQ ID NO: 34216 - DNA, 357 bp, Zea mays
  Peptide Sequence Number=SeqID_77591
atggttgcggcctcgctagagaagctccactgcggcgaggcagggtcaggtgacaaagaaaaggaggtggcggggagggatgatgccgaggttatgtcgccgcagctctcggatgagccgctgcgggagaaagcgcagcgcatccaggtcatgctcaccggaggcatgtccgaacgcctccctgaccgcggcaagaagctgctcaccacactcgatgccatccatcgggagcaagaccgccgccaggcccgaggcgacggggcacgagcgccgctgggatctctgactagtggaaactggaatgctgtaattgtacaatatagtgacggcttgggtaatgaagcatgtgaaagatag

SEQ ID NO: 34217 - DNA, 312 bp, Zea mays
  Peptide Sequence Number=SeqID_77592
atgtcgacgagttggagacttattcctgggactcgacaagctggccagagcagagagccaaccccgcgttgcatcgacggcagcgtgactctagcgagatcccgtgtctatacgggtcgacagcatggacgagcagacacgacacggagggtgcgagtctgccaaggacacgaacttgaagggcggtgcagcttagaacgaaaccttgctgagcgaagaacgacgaccgacaaggcgaagctcgacgacgaggtcgagcaggggatggcgagcgcgagcgcacgctggggcttgccaaaaacacgaaaatga

SEQ ID NO: 34218 - DNA, 576 bp, Zea mays
  Peptide Sequence Number=SeqID_77593
atggcgcgtaccaagaccacccaacgaaaggcaaccggacctcattgtgtgccccgacatcagctggcccctagacatgaaggaagcagcagtggaagaaacgacccaataggggatctggaggccagggtggaacgacttatgtcagaactacgccacgggagtagggagcgtgcacgagatagccgccgcattgctgagctatcggcggaggttaatcgcttgcaacaagaaattgtggaacaagacacggtcattgactgggccgtaaattcgcgcgctttcgcctgggatagtgaggcaaatgttctagcccgggtagcggaactaagcgcatccctagaaaatctgcaagcatattgtaacaccctgcatgaagaggtgcacatgttatatgaccggctgcatccgagtgtgccaccagaggttgcagcaataggagccggaccatctggagcaactaatggaggacctgatggggagttggacctttttggagcccctccttccatgaacctcgcagatgaacgttctcccgaagctgtcagtggagcggccaaggatgaagataattag

SEQ ID NO: 34219 - DNA, 264 bp, Zea mays
  Peptide Sequence Number=SeqID_77594
atggggatcacaaaggaactgtttggatgcgggaccctccccatggtcggatctctcatgattgagcgggctctgaaactcaggcaagaactctcgtgtgcttccctgtttccttcacctaatcacaagcaggtccctggtttttacaaaatcacccctgagtttctgataaatagtggccgcggtccgaagaacatggagaaccacccgggaaaacagttctaccacaatggtggtatgggacgcccatggctgactaattag

SEQ ID NO: 34220 - DNA, 128 bp, Zea mays
  Peptide Sequence Number=SeqID_77595
gtgatgacgaggatgatggttatgattatgcttacagtaatggttgtccacgttgcaactactgctcaggagaagatgaagtcgtggaggaagacttccaggagttccaagagtacgatgagttctag

SEQ ID NO: 34221 - DNA, 159 bp, Zea mays
  Peptide Sequence Number=SeqID_77596
atgcatcaaatcaatgttgtggcaaatttccatatccttccagtatgggaggttcctcaatctaagatcaatgctgaatggttagaaagagatatggtttccaccggcgtggctaaggttgcggtgcaccacaagcggttcctggaaccacctgtgtag

SEQ ID NO: 34222 - DNA, 2175 bp, Zea mays
  Peptide Sequence Number=SeqID_77597
atgccatcctcttcttcttccgccgacgccacgccgccggccgccgcctcgtctgaggagacgttgagtaacgtgatggtggaggagttgcgtgccggcgactctgttgaatttggtgtgtcacggatgacgtcagcccgtattgaagatatgcagcggttgggctactttggcggcggagtcgctcgtgctccggggacggaggaagtccccgagccggagggcgagttggttgttttcgaggcgttcttcgtcgccggactcctcttgcctgcgcaccgggtcttcgaattaaatcaactgccgtacgacagctaccctggtcaagacgaagcggaccgccgtgggaagaaaccggcggtggagactggaggcgaccctgcgctggtgaccgccgcctcctcgaaaaagagaaaattaggtactgcgatgggaagacttggggtgtctgatagtttcgctagagagttaatgaggacgtgtgcggccccgggggagaggatgtcttcgcccgagctccgggagtcttcggctcggatgctgagggttaccgggggttgttggcctaaagacattcctatcccctgcgcggctgaggaggactgttttacatctcgtatggttcatcggtggagagtttttccttatgggcgaaatatcggtcatgttgtgtgggcaatgatggacaaggatcgccaaggggcggcgcgaaaacgccaggcgactgtgagggttcacgaagcccggccgaaaaagcagcggggaacggcgaaggctgaggcctccggcggaggcaagccgccgctgccggcgaaggtgggcgcctctgcgcctggcaaggcaccggaggtgacggtgggcgccggaggccccaagctgacgaaggtggcgccgtctgtcagtggagtggcggaggctgcgaaggcggcccgaacgttaccgccgcccggcaaacgcgttgccgacttcggcaccgagattaatgtggaggattatcttggggggtcggacgagggcccgcttgctctggttgtgcctggcgcggcgatcgcgacggctgcgccagcgccgaaggcggggggagagacccttggcgccggaggcgaggtgtctgccctcgcgctggtcagggacgaggcgggcgtggcgacccgccggctgaagggagcgacggaggcgttgagtcgagcgacggaggcgctgagtcaggtggctgacttcaccagccgcaccgtgtcgggggcccttacggcagctttgtctgccgaggtcgagagacttcggacgcaacatgctgacgctgtccgtgagaagtcggcctccgacagcaagtgccgcaaactggcggagaaggtggccgccctggagaaggagaaggctgacctccggcgccagctggcgggggagaggagggaggccaacgaagccatcgccaaagagcaggctgctcaggcggaggccaggctggcgcgggcggaaggcaatatcgccaaggagctcgccggggagctgcagcggcggcttactgccctggagagccgcgcggagggggccgaggccgcgatgcgagcggaggccgaacggacgcgcacgcagctcatgactgcatatcgcgagctgggtgtgcggacgggtgacttcgaggtgccggagcgagaggccggacttcgctgtctggaatgggtgcaggaggaactgcaggagctccccactgtcttggcggggttgatgtcgttcacctccctggtcacctgcgaggcagcgatgaacgcgctctctcgcgagggctgccggcactttgaggccctcgaccaggcagatgaggattttgggcgagatatctttgaggtcgaagaccccgtggcggagcgcggcgagcgggtggacgacttcggggcgctgaacagcgcgctgcctgacccggagacgacccctgcggaggccgcgactggagtcgccccgggaccgaccccggagactgcggaagatgcaccaggcacccctgcatctgctgcggccggcgaagaccttcccccaaaggtggccgaaggcgcgcccgatgcccccgcagctgctgtgccgagcgctgaagatccagcggaggtgggggcggaggcagcggcggaggccttggcggaggctcccgcagcggcagggccttcgcaggtggcatag

SEQ ID NO: 34223 - DNA, 204 bp, Zea mays
  Peptide Sequence Number=SeqID_77598
atgacgaaccagatcatcattggtcgagcggacgaagcgagcagtcacgagtacgctccccaaaacctgatcgcccacacacccgtgcaagtgtacctctgcggacgacgatttaagaggcctgctctcccactctctgtgtgctcgcagaaggtggaaagggaatgggctaaatgcaacgcgtctgagagactgttcgtgtaa

SEQ ID NO: 34224 - DNA, 192 bp, Zea mays
  Peptide Sequence Number=SeqID_77599
atgtcgagacacgccgccacccgctgcgtgcccagtcaggccagccctgtgcagctgcacaaccaacaacaagcatcgcctcccctccaacacaggtccgccactgggtacaagtgcggtcactgcacgacggcagtcggggtcagtggggcattgtacgccaaggcggtactctttaggatgattggttga

SEQ ID NO: 34225 - DNA, 261 bp, Zea mays
  Peptide Sequence Number=SeqID_77600
atggccaaaagaccaaaggtagttagagttgacaaagaaaggtctttgcattcaaaatcgaggactccaccctcgaaaagaaaaggagtggatgctcctgacagcaaaggcgagaagcccttaaaggtagacaaaaaggacattggaagcacatcagcatcatcacttggggctacacagatgctggagggtgatactcacaacagtttgatggttgagcctcaaaactacccagtgctatggatggcgggttttgactag

SEQ ID NO: 34226 - DNA, 258 bp, Zea mays
  Peptide Sequence Number=SeqID_77601
atggccgagctgaaggctaacgaggaggaaaacacccccaaagagaacgcctctggcgctgaagataatgctaaagaagatgacaatgaccttcgatccaccaatccaagctatattgactttggaaagtctactattaagcctactaatcttgttgtcatgccactctgcaacatggccttaagctcggcatcccatgcggcccacgtgggcttcaacatagtggtagagcacattgacacccgtgacttggtataa

SEQ ID NO: 34227 - DNA, 213 bp, Zea mays
  Peptide Sequence Number=SeqID_77602
atgccaattacccagtatgaaaaggagagggctttaaaggtgatcaggaacaacaaaatgttgatcagccttggtatagctggattaacatcacttactcgatcaggccaaacagatgccatgacaaataaatggataaggggaaaaagtatgggcatgcaattggaaggaataagccaaggcttaaacacagattccactggtcatcgctga

SEQ ID NO: 34228 - DNA, 536 bp, Zea mays
  Peptide Sequence Number=SeqID_77603
atggaaaaagaaaaagggaaagggaatagagtgggccgcgcgagggattccttcagccccggcggcggccctgctcatgccccccccctcgcgaccctgctcgcacccccacgcgcccctgcccggcccccggtggcgccatgcgcggcctcctgcgtgcccctgcccggccccccggcggcgccccctgctcggccccgacgcggccccgcggccccgcagccccggcgtggcccctgcatggcccccgcacgcccctgcctggccccccggcggcgccccatgctcggccccggcgcggcctctcgctcgcacccccgcgcacccccgctcggccccggctgcggcccccttcccggcggcgcccacgctgcccccggcgcggccccccgctcgcgcccccgtgcacctccgctcggccctggcggcggccccctccccggcggtgcccaccctgccccggcgcggctgcgtggccctagcgcggctcgcatggccctcggcgcggcctcacgcactcccggcacgcgcaccac

SEQ ID NO: 34229 - DNA, 717 bp, Zea mays
  Peptide Sequence Number=SeqID_77604
atgaatcctgagttcattgccaaggccctcaactaccacttctgtggtagtcctgaatccttcatgattgtcccctttttcgacctcatcttctcttctcaagtcgcttccgtctctgtccaacatctattctgcaagattggagtttttgctttggatgtgatcatctttcacattcatggtgacgccgcctttgccagatggccattcgacagtcgatcaacagccaggtggattcgaattttgaagataaaagcactaaggacgaggtttcagttgtcaaaaagagtccaaaatgaggaagttcccatggcagaggaagctctggcgatgatatcacaatcatttaggcaggtcgttcttgatgtgaaagttggacccccttcatttgagaaaggtttagctgaggatattttgtctcttgttggctatgttgtcatggtggataaatttaccaatagaagaacggagttagtgaggattgaaggggctaaagttgctggcatatatcatcctttgatccatgagaaggttatgaaggtcatgcgcaggcatgacaggagagtttttgcatggactgttgatgatagcagctccatgaagaagatgctgtatgagcatgttgatgccattgtgaccagtaacccttctcttctgcagcagcttatgcaggagaccagagctgagtgtatggaagatggttttgccttaccatag

SEQ ID NO: 34230 - DNA, 312 bp, Zea mays
  Peptide Sequence Number=SeqID_77605
atgacgatcaagactatcaaggcccctacaaacaaagtgcatgggaaattagaaagtgaaatgaaataccatgttgaaaacagggccaaactatttatcaacaacattcatcaaacaataggcagtagatttggagaacttctccctggacaaattacagattggagcacacaattctggttgatttccccacttaaggatgcaaagattcttcgaagcaactttatgatttatctgttaagttatgaggacaattcgtgtcgatatgccatcctttgcaaacatacaatagagacttatcgatatcactaa

SEQ ID NO: 34231 - DNA, 597 bp, Zea mays
  Peptide Sequence Number=SeqID_77606
atggcccctcgccctcggcctccaggctccatgcgcgtgttcatcgcctgctgtcccaagccatgccaccacacaccatgccagccgcgagctccccgcacaacaaaccccccacacactcctgttgtgctcggctgggatctgatggtgccagcatgccaggatcattcgagtgatgctgtctacgtggagctgccagaagttggcgtcagtgtatcccaggggaagaacttcggtgccgtcgagagcgtgaaggcgaccagcgatatcaatttgccagtgtctggagaggtggttgaggtgaacgggaagctaagcgaggagcctggattggtgaatgcaagcccgtacgagaaggggtggattatcaaggtcaagcttagcgattctggcgagctcagttcgctcatggatggtgacaagtactcgaaattctgcaaggaagaagacgctgggattccacatcttaagtggttcggggttgaggggcagtacaatgtcatggtgattgatctgcttggtccaagtctgaaggacttatttaactactgcagcagaaagttctcacttaaaacagtactaatgcttgctgattag

SEQ ID NO: 34232 - DNA, 264 bp, Zea mays
  Peptide Sequence Number=SeqID_77607
atggcgccgtcgtcggttgtggtgcccagaacacaccgagagttgtcggcattggcaaacgaccatgaggtccccctgttcacgatggacagcgtggtgcagccgtgtgatatcctggcccctgggatgggatgtcctggcccaaggcttaatagaattaatagtgtaatcataccaacaaggtgcatcttctttttcggaagcctatctcgaaagaacctccaagttaagcgtgcttggcttggagcaatttgggatgggtga

SEQ ID NO: 34233 - DNA, 2034 bp, Zea mays
  Peptide Sequence Number=SeqID_77608
atggcgccgccgtgggcgctctggcgccaccacgcgcgtggtgttaggggagagtcgtgcgcgctggtgctctgcgggtcgtcgatccgtagatgggtggtgcatccgggcgccttcttcctccaccatcccccgaacgccttcttcctccaccatcctaccagtatggcggacgagctccacgacaacctcatggatttgatactcgtccgcgtcccgtgcaaggtcgaccgcgccagcatctccctcgtctgcagggcgtggagagacacggttgcccgcctcgggggccaggccccgcccccgctcccgtggctcctcctcccctcgcgcttccgcaacgaccccaccttccgcgccgcttgcgttctcagcggctgctccgtccacccccagcacaacctcctcaccaccatcccgcccggggcgcgcttcgtcggctcctacgacggcgcctggaacttcctctacttcggtgagacgcgcaggcacaggctcttcaacgcccgcacacgccaagtccgcaagctccctctaggggttcactcggcaaagaaccaagacctgggcactggtataggttctttgccgagtgtaatggctctggcactcagcaaagaagcacgctttgccgagtgccataccaagcactcggcaaagtacctgacatggggacccctctggaggattctttgccgagtgctgtcaggcagacactcggcaaagcatccgggcgccttcttcgtccaccatcccccgaacgccttcttcctccaccatcgtaccagtatggcgcacgagctccacgacaacctcatggatttgatactcgtccgcgtcccgtgcaaggtcgaccgcgccagcatctccctcgtctgcagggcgtggagagacaaggtcgcccgcctcgggggccaggccccgcccccgctcccgtggctcctcctcccctcgcgcttccgcaacgaccccaccttccgcgccgcttgcgttctcagcggctgctccgtccacccccagcacaacctcctcaccaccatgccgcccggggcgcgcttcgtcggctcctacgacggcgcctggaacttcctctacttcggtgagacgcgcaggcacaggctcttcaacgcccgcacacgccaagtccgcaagctcccgctagggatctatgtcaatcgcgacggacaccagactatctgcattatggtcatcctcgccgccacgctctcgtcatcgccggacgactcgatgtgcgtcggcgctgccatcatcgcgcgggatcaaggcccacacgaggtgttgcagccctacaatcgctggattgcgttatggcgaatgggctgggaaatggctgtggaactggacatggtggatatgggtatgtaccttgcggaggacgttgtctaccactgcagagccagagccttctattttctgctcatccatggcgtaagttacgaaatcctcgtgtgtacgccaaacgcgagtcctgaatatcctaggaagttgcacataagttttgagactcaccacttcttgccgctggcgcttgaagagcgcatctcgccgcttcatagcgttatcgctcgatacctcgtcgtgtcccgtggcgaactgctcatggtcgtcaggatcaaggctgttgctgatcagcagacgtgcgagttcaaggtgttccgggcgaaaagacggccgcagatgcctgactaccaccactaccccgtggctcagtacccctgggaatggatcgacctggacacgctggatggccggattctgttcgtcgggtatggctgctccaggtcctaccaagcggacgcgtacccaggcttcaagcccggcatctacttcttggatgatggcatgttctacgaggtaccctacttcggcggcgccaacaccaggccgtacccctgcacggacaatgggatgtggtccgaaggccgtatccagaggtttattttcattggctaccgtgtagtcctcgactttgatttgttcgagatcgtgttaattgacattacaatcttttag

SEQ ID NO: 34234 - DNA, 115 bp, Zea mays
  Peptide Sequence Number=SeqID_77609
acattatggtacaggtggctatgagatcgatggttttggttatgactatggtgctggcgaagatgaagttgtggaaggagacttccaggagttccaagactacgacgagttctag

SEQ ID NO: 34235 - DNA, 615 bp, Zea mays
  Peptide Sequence Number=SeqID_77610
atgcaggccattgcttgtcagttttttccttcccaggttgcgggggttgctatctcaggttcctcttggattaggaatcacatgggttgttgctttcattctcacagcaactttgtgttagcctttactgctttctaccttatggcacaggtttccagtcccgcgtcttcggcgagtcactgccttcgtcttccgaggtttgttagtggttcacgccatcgatggaaggcctgtggtggtgtcgctgagcctgccctcctacgggctcaccggcgtgctgtctcggccttcgggaacctcacgttcctgcagatgctgaacctgagctacgattggtttcgtggggaagtcccggcgaccatcggctgccttgcgcatctacaagtgctagatctgagctacaacgccttctccggtacgttgtcctccaacctcagctcctgcgtcagcttactggtgctaagcctcaatagcaaccatatccatggtcgcatccccgtcgagctcggcaacaggctctccaacctccgggggctcctggtggccaacaacatcctggcggtcgccatcctaggatcgcttgataacctttgttcctcgagtaccttgatctga

SEQ ID NO: 34236 - DNA, 1593 bp, Zea mays
  Peptide Sequence Number=SeqID_77611
atggagtgctcaaaacaaccaacaatatctcgctctagtactgaagctgagtacaaggccgtggctaatgcaactgcggaaattatttggattcagagtgttcttggtgaactcggtattcctcagtctcgggctcgggctagaatttctgcgttcaatcgtctgggctcaccttctcgtaatttggctccggttcgctgcaataagatgttctccgctggagggttttctcgtcgcagcttaaccctgagcctcttggcgacgttcatagcggtggaattcgtggacgttccaaatttcaaaattcaaattttaactggacttggcctcgcaaccttcaatggtgtcccgttcggagccgggggcctgctgggccgctgggcccgcctgcctttcgctgtcacttctataaggcatgttgatcctgagcccttccttccgtcgagcttcagcgcttcggtggttctgcaccgtgaggttatggccagagaatatttggtggaccatcggcggcttgcggtgcgggatatccagcggtcacacctggagccagttgtcccggaagatggtcaacagctccctctcgcattatttggtctgggccaacctctgcctgctgctggttgggatcttaatttcccgccagaagacaatgttcaagttcagccagcagacaatattcaaggggattgggaccagtggattgttaatgacccacctgcgcagcagccccagcaagacctgcaacctgacgagcaacaagtcagcaatcagcatttaggcctgtcctcggatagttcttctggtcccatcctgggtgttccggtgcagaatgggcagattcttgagggccaagatgtggttgggccggtgctgcactttaatgctcctgaccttcctgctttgggtgatgttcctatgaatgggctccaggaggttgacggcccacccaaccagggagacctccatgtgccgggggatattcttatccctgatgcccaacctgaggaacaaatcaacaatggtcccaacaatgtggctaactattttgctcctgctggtaatccagacttctctgtgcaggtccctaagaagtggtctccttttttcctgtcaaacctgctacatgaagattccttcagctggtcgaaatcattctggtctttagacattccttctgctttgctggaccctgagtctgagattcactcttttgccatccctaagaaatgtcctgatggcaagttccttgagtctgtcctctcagaagaatcaactggtaaagtctctgatccgacatattcggtgtcctccccctccaagcctaccattgtggagtctgacctgaggagaagtaagaggctgcgtgaagctagggctgggttcaggcagggctcctgtcagaaaaagaactgtttgatgtgtcagcataagtttgagggccctccctccttatctgccagggtcatcagaaacctagggggaaaattctgcgatctgtcagaagtggatctatccgataaagcccttaagaagaagaagaatcccactggctatgttggtcccaataagccagggcaaaaaagacaatga

SEQ ID NO: 34237 - DNA, 372 bp, Zea mays
  Peptide Sequence Number=SeqID_77612
atggcgaaccggcggtggaagctggaggtggagccgttgtcgaccgtcgtggattggagccgagccgccgatgtggggagggcggcatgggcctgcgacgaacctgtggagtgtggtagggcacaagcagggggtgaagaggttgccagatcctggatccgtgttggacgcacgtcgcgaagggtgctagcagtccggttgttgagctcgtcaccacgggtaccgatgaccagccatcgagctcaaccaccaccaggcagcagcataagacaggacagagcatcatccaccgccatggattgctggggcgtgacggccgcaaaactatgccgccgaggattgaggggcgagggtttcgggggaggggcgtag

SEQ ID NO: 34238 - DNA, 174 bp, Zea mays
  Peptide Sequence Number=SeqID_77613
atggagcgtcgagcaccatgcacggtggaagagcgatgtgccgctgtcgtggacctgcagtgtcggcgcctgctaagccgccacaagaatgcggaggccgagccgctgccctcctgcttcaccagggagcgccgtgaggtgaactacaactacaaggatagtgggagtcattga

SEQ ID NO: 34239 - DNA, 114 bp, Zea mays
  Peptide Sequence Number=SeqID_77614
atggagagcggctgccatgggaggagaggggcggccaaccaaggggaaagggtgtcacacccggatttcggggcaccaagacccgggcacgaacataatcaccagggcctctaa

SEQ ID NO: 34240 - DNA, 408 bp, Zea mays
  Peptide Sequence Number=SeqID_77615
atggttggagggagcagcggcgctggcagacgatttctgcccctgcttctctctctctccacgcgacggcggctgacttcctccatggcggcacaagagctcgccgctggcttttatggcctagaggcgagtccgggtaggtgccaggagtccgaccgaagcgggttgttgcggatttggcggcgaagtcagaatcgccccagatcgcaacagcccagcagcgtagctcgagttcgttgcggtagcgacgtggagaagaagaccctggaatgcgaaccccagatgtcagcgctgccgagcgggccccggccgacagcgacgcaaaacgcgtcaaggagcgaggaccggctggcgaagcgggcccgcgcgacagtgggggatcagttgagacggcgcgcggcagagtaa

SEQ ID NO: 34241 - DNA, 1989 bp, Zea mays
  Peptide Sequence Number=SeqID_77616
atggccgtgataaacgggcgctcgaagcgtgttcgggtgacggcggtgccgcgccctctggagctgcggtcgttcccggccgccggagaggggccgcgcccgctggtcctgctgtcgttcccggccgccggagaggggctgccgccgcgtggtgcgtttcgcgactgtgtacggtcgttcctggctggatccgcggtgccggcggacggcgcgtggcaggtagcctttggagtcgggaacggggtggtcgtggtgatggaggtggtggaagaggacgtcgctaaaactgggatcgagcggatctactgcgatcactgtaccgtcgccgatgccaatcggtgcccgacatgcaaatatgtgatctcctctgatgatccggaagattgggactataggcagttggataatccacgtcacttgctgcatggtattgtacatgacaatgggtttggtcaccttgttcggataaatggcagagagggtggctctagtcttctgacggggattcaactgatgggtttctgggattggctctgcagataccttagagtcagaaaggtctccttgatggatgtctctaagaagtatgaaacagattaccggatcttacatgccatcactactggtcattcatggtatggccaatggggattcaaactcaacaaagggagctttggaattacatcagaagaatacttaaaagctatggacaacctttccttaactccattatcacacttcttcccgcactcccgatatcctcgaaaccagctacaagataccatttcattctaccgatctctttcaaagcaacctctcaccacaattcgtgaactgttcctctatgtgctgggccttgccaccagcaagagttcaaatatgcactatggatcaatgcataaggagcactcacatacccatgtgcaagacacatggcctgacgaggaaataaaacgtgcaacagaaattgctataaaggttcttcgtgctgttgagaaaacaaggtgggtgaccatgcgaatcctaaaggcagccatgtaccattcaattggttcaccgcagctagtggactactgcctcaagacccttggtactagaacaattgatggaatgatggttgcagttcgatgcaacagcgatactaacaccctagagtacaggcttatggatgaacccatcgttctgcccaatgtatccatgccaactcaagaccatcttcgccgtgacataaagttcttgcatgatgctctcctccacccacatacaatgcatccatacaaaccggaaaactgttatgagcatggcaagaggtctgccatggtccttttggactgcaagcaattcacaaagcactatgacctggaacaggagttcttgcctcaaaacccatccatgttgcacctgtggtgtcaagtagaggtgttagaccaggttggcgatccaccttgcataccaccagagctcctaactcttccgcagacagcaactgtgtctgatctgaaggtggaggcaaccagaacattccgtggcatctatctaatgttgcattcctttgtagccgatcggcttgttgactgtggaacggcaagtgagtcaactcaactaaagctcttgtttggggcaaatggaactgttcgcgtccaaggcaggtgtgccagtggtgaacgcagggttgggatttaccggatggagagaggcgtggataaatggacagtgcgttgctcttgtggagccaaggatgatgatggtgagaggatgctgtcttgtgactcttgccatgtgtggcagcacactaggtgtgttgggattagtgatttcgatcaggtgcccaagaaatatgtatgtaactcatgtaaattacttaacaagcgtaagagcagaggtcacggaccagtttataacattggcccaagcaaaagattcaagattggcgcaggtggctttagctctaggtgggggatttttttgaggcctccagctgacatgtaa

SEQ ID NO: 34242 - DNA, 492 bp, Zea mays
  Peptide Sequence Number=SeqID_77617
atggctatgacaccatggttagctgctggagggcagtttctggcatcgaaatttgagcagcatgatgtgaggagtttattgcccatggaaagtgagctctcctacgtgttcgagaaaaagtgctcactttgctacagtgctttgcatatgctcaaggtcaccagaatactgtttgcttcaatacagaaactggacatgttgaagccttatgaaccttgggcggacgggatgtggcctgcgcggaagccagatgcacccgaggttccagaagctccacgcgcgaccgatcggaggacgcggatgcgggagctcgccggcggtttgccttttatgctacacatctgcggtgcagcaaggtcacctcgaaatctggcaccgatcgggatcctgctcacccgctgcctgctggtgcttgaggagcactgcactggagcagagacgatagccggtgctcaacttcaaatgtcattcggctcaaagatgcaccattaa

SEQ ID NO: 34243 - DNA, 936 bp, Zea mays
  Peptide Sequence Number=SeqID_77618
atggcaaaactgcattgccaatgggagtcagagggccgaaaccctaactcgtccacttttcaaatccacattccccccttatgcctctcacccgtcacccctcgccgtctccggcgagacccggaaatggatgtcgctgccaccccctcaaggtcaaaatctaagcccagatcctcgctggtgaatcccgtcgcagcccccgccgagtccaggatggacctctgcaccccatcgaagcccacgcccaggcggaactccaaatcgacggcctcgccggcgccaatgtctccgtcgacgccctacaccgtccggcgctcgcgccgcctcctcgaaacccccaccaaagccgccctggaggtgcaggtgaaggctacgctgacccctacctccaagggcaagcgcgccgcgccgtcacctaaaacccctgctcagcacgagcccaagaggcagaaacgacacccgaggaagagggcatactaccggaaggtggtgtatgacggcggggagttcgaggtcggtgatgacgtgtacgtgaagcggcgggaggcggcggagtctgacgcggaggaccccgaggaggaagagtgccgcgtatgcttccgcaccggtggcggggttatggtggagtgcgacgcgtgcctcggcggatttcacctgcgttgcgtgcgaccgccgcttcggagggtgcctgaaggtgactgggcatgtccatactgcgaggccgagcgcgccggaaaggtggtcgagcggcccaggccgcctgagggcaagcgcatcgtgaggactgccaaggagaaactcctttccagcgatctgtgggctgcacgcatcgagaggtttgcttgtgtcatgtacggccgcacttacaggcgccgttgtgacgccaggagggctgcagatcgcgcagccaaggcaggcgccacaatcagtggctaa

SEQ ID NO: 34244 - DNA, 1347 bp, Zea mays
  Peptide Sequence Number=SeqID_77619
atggcgcgagaccacggtgtggagtgtgggtctcgcatcgcacgcgaggaggatgtaggctgtcgacgcccgggagaaaaggtgaaggtggagcgggtgggcaatgagccggcacctgcaccgctgcttcgcgtccacggggaccatgttcctgtgggcgctcttcctggtggccatgacggccacgtacctgagcgtgcactccttcgtcgacagcacctccccgcgctactttcgcggcgtcctggggcgggctgcactgggagcgccagatccgggcgtcggcgtcgccgcggcggcggtcggcgcctggggcgcccgcggggctgtccgtgctcgtcacgggcgccgcgggccttcgtgggcgcgcactgctcgctggcgctccgcaagcgcggagacggcgtcgtcggcatcaacagcttcaactcctactacgacccctcgctcaagaaggcgcggcgcgcgctgctgggcagccacggcgtgttcgtcgtggagggcgacatcaacgacggccgcctcctggccaagctcttcgacgtcgtgcccttcacccacgtgctccacctcgcggcgcaggccggcgtgcgctacgccatggagaacccggcgtcgtacgtccactccaacgtcgccggcctcgtctccctcctcgaggcctgcaaggacgccgacccgcagccggccgtcgtctgggcctcctcctcctccgtctacggcctcaacgaccgcgtccccttctcggaggcgcaccgcaccgaccacccggcgtcgctgtacgccgccaccaagaaggccggcgaggagatcgcccacacctacaaccacatctacggcctctccgtcaccggcctccgcttcttcaccgtgtacgggccgtggggccgccccgacatggcctacttctccttcacccgcaacatcctccaggggaagcccatcacggtgtacaggggcagggaccacgtcgacctcgcccgggacttcacctacatcgacgacatcgtgctcggctgcctcgcgtcgctggacacggcgggccggagcaccggtaccggcggcaagaagcgcggcccggcgccctaccggatcttcaacctggggaacacgtcgcccgtcacggtgcccaccatggtgtccatcctggagaggtacctgcgggtgaaggccaagaagagtgtggtggagatgcccggcaatggcgacgtgccatacacgcacgccaacatcagcttggcccgggagcagctcggctacaagccgacgacgagcctggaggtggggttgaagaagttcgtcaggtggtacctcaactactacggatacaagtatacaaccggctga

SEQ ID NO: 34245 - DNA, 303 bp, Zea mays
  Peptide Sequence Number=SeqID_77620
atggcacccaagagagctaactcaaaggcagccccatccgttgacgaagcagcgaaggcagcgctgctggccaagaaaaagggcaaggcccatgcagacaccgcccaccaagaagcctacgaagacgatgcgctcaacaagagacagcgcaatgatcaacctacacccgaaggcaccctccgcacctgcagctccggaggacaaccacaaccacccccaagcttcgctccactagagggcgaagacgccactgaggacggcgaagtcatcggcgtttcagcagaggaacagctacaactgtga

SEQ ID NO: 34246 - DNA, 672 bp, Zea mays
  Peptide Sequence Number=SeqID_77621
atgccgtcaggtgtacaggatcgacggactgccctgtttgtgtggtgccaagttcattccgacattaaagtatcccctacattggacttgaaggacgatagcaaatctgaaacttggaggatcaagatgctctatgacggtgattgcgctctctgtatgcgtgagggcatccgaagcggagtcgtcggaggacttggttacgacttctcgttcttgatgctgttcttcacgtatggcctttgcttctacgtcggtgcgcagtttgtgcgccaggggaaaactacctttctagatgttttcaagggttttttcgcgttagttctggcagctattggagtcccgcaggcgagtgcgctggcttctgatgcgaccaaagcaagggactctgctatttccatcttcggcgttctggacagggagtccaaaattgactccagcagcggcgacgggatgacgttggagaatgtcagtggcaacatcgatttcagcaacgtcagcttcaagtacccactgcgtcctgacgtccagatattcagcaacttcaccttgtgcattcctggaaaggtacagttagtcatagaccctagtgtaccaataacaggtctcaactcagctacaaagacaacaagagtgttaagacatttggtagacctcataggaaatcataagtga

SEQ ID NO: 34247 - DNA, 150 bp, Zea mays
  Peptide Sequence Number=SeqID_77622
atggatgttggcccgtatatcgtgttggagcccattagggtcgtgccacacccggttttagaaggcaaatcgaatgtgaaccatgtacgtgccaggatcaaccttcctcacatttgggtgaacatcctcatatcctcagtcatatgttga

SEQ ID NO: 34248 - DNA, 204 bp, Zea mays
  Peptide Sequence Number=SeqID_77623
atggagagtccaggtctgagatattggacaacccaagctcgtagcgcggcaacagtcgtcctatgctatagagttggtggtggtggtgacgatggctcgtggatcctacaaaaatatgtgttaggatttggagatccatgcgggcactaccagagagtgctcgtcccttgtgttcttggttctcatgcattaggtcgtttctga

SEQ ID NO: 34249 - DNA, 312 bp, Zea mays
  Peptide Sequence Number=SeqID_77624
atgcataagctacaggggaaggacagctatgacatgaacaacatgtcccagtgcagtgccacccacgagctcaggacacccacgacgttgcacccatcgttgctggtgaggaccacgagatcaccttttgaatcgaatcctgcctgctggagtggaggtgatgaacctgattgccaagatgctaataaaacaaaaggacaaaacaaaaagagagtgagaggattagggccactgccatccaagccatgggaacactttgatcatatagagcagcttgacagatttattttctatcagaattttagcctataa

SEQ ID NO: 34250 - DNA, 318 bp, Zea mays
  Peptide Sequence Number=SeqID_77625
atgtacaagggttgcactcaaccccttttaagtgatccaatgatccacttgaataccatggttctcttctttagagttgttttcccgtttgtgaggaatctccacaagttggagcctctgaccctttcaaagttgatcacaacaaaagcacaagaaaaagatctcaccggtgataagaaagccaccgcggttggggatgggtctgcagccacgctaaagatcatccgcgacgtggcgttaaaaggctgcagtggcaccgcccggttaatcagcggtcaccggaccatcgccgtggctctgaccgtgcggttcctatag

SEQ ID NO: 34251 - DNA, 186 bp, Zea mays
  Peptide Sequence Number=SeqID_77626
atgggtgggatgttttcgaaagtaaaacttgatggtggatccatcatggccatgatgggttcaacatcggaaaacatgtacctctgccaggtgaagaagcgacaaacgtttgttgcttctgttcaaaggtggtacccaaagaagaaaaccaagactaaagttgcgggagggaaggccctccgttaa

SEQ ID NO: 34252 - DNA, 243 bp, Zea mays
  Peptide Sequence Number=SeqID_77627
atggcgagagtagcgtgtaccctccgtggcaaaaggctggacggtggatccactttagcaagcatttctgcaaacagagtcattgataagtcttaccttgactcccttaaagccagcacatccttgagagtctttttactttgtcgggtgaagaagcgacaaacttttgttgcttctgttcaaaggtggtacccaaagaagaaaaccaagactaaagctgcgggagggaaggccctccattaa

SEQ ID NO: 34253 - DNA, 363 bp, Zea mays
  Peptide Sequence Number=SeqID_77628
atggcccactggtcaggctcttctgacgcgcatgctcgtatcactctcaccggctggtggggtatcgcagtcaggtgcgtctccttcaccatgccgcaaggactggactccgccgcgcacgcccgcgggattcggcatggcgcgcagatcgtccgtcttagtcgctacctggtgccactcgccgcgcgcaggaaggcttcgggatgggacccaccggtcgagtctatcatctccctcttcttctcccgctgtctcgttgccgccttggagctcgttgtggccgttgcggccaaccccgcaagcccgtccttcctccgctataagcctctaatcgcttgtgaccgtgcccctaccttcctttga

SEQ ID NO: 34254 - DNA, 461 bp, Zea mays
  Peptide Sequence Number=SeqID_77629
aggaggacccgggattgccaattaaggtggccgaggggcgacggccatgcacacggcagcccccacaaaagtcgacgatgacgtggttccagatgctggccagggaactgcactggagcttcgttttcgacatggaggccacatacggcatcagcccagggcctcggggcggcatctcgcacgtcgcgtccgactactactggaaggacgtgcaacgggtgcagccgtcggtggcgcaggtgtaccagggcgtcacgtccatcccctggaaggtcaagccgctttggggcctgctcaccgacgtgctccccgttgccggataccgccgccggccctactttattcttgcaggcttcatcggagtgattgcaatgcttatactcgctctccacagcaagcttcatgcattgttcgctttgttggcattgatgaccggaagcgctaggcgtggcgatagctga

SEQ ID NO: 34255 - DNA, 1239 bp, Zea mays
  Peptide Sequence Number=SeqID_77630
atggcgcttcctgttgacgtggcgcccgagtccgagccctggggtcgggcgaagcggagtttcgtcgtcttccgggtcttagcccgagtccgagccctggggtcgggcggagcggagttcgccgtcttccgggtcttagcccgagtccgagccctggggtcgggcggagcggagttcgccgtcttccgggtcttagcccgagtccgagccctggggtcgggcggagcggagttcgccgtcttccgggtcttagcccgagtccgagccctggggtcgggcgaagcggagttcgccgtcttccgggtcttagcccgagtccgagccctggggtcgggcggagcggagttcgccgtcttccgggtcttagcccgagtccgagccctggggtcgggcggagcggagttcgccgtcttccgggtcttagcccgagtccgagccctggggtcgggcggggcagagttcgccgtggcgcctttggcggcgctgtccttctgtcagactggccagtggagcggtggagtgacggcggtcacttcggctctgccgggggcgcgtgtcaggatgaagctttatgctgatgggggttaccagctgagaattaggcgtcttgaggcccccgagcctctgcacagggcgagagggcaatcagggacagacccgactttttacatacgcccctacgtcgcctttccgcaaggaggagggggggagtgcgccatgttaccctcgatgggcaccgaacatggtgtctccggtgagctgcaagcggcggagccgacgccaaagtcgatcagtcgaggcctcgggtcaggctggcgcccttggaagccggttgaccgaggccccaggggtaaccggtcgagccgcctgctcgggccggattcccggaggagtccctggaccgcgtcgccgcccgaggctgggtcggactttgctgaagacgtcgtcgatgccgagggtgctacggctcccttcagcgtgaagacccgagcctgcaggatcagatcatctcgtagcgtgtgctttctgcggccgccgaggccagaaaaacacaccctcgccgcgcttgcgaagctgcgtcttttttcctcttgtttcgagcatctggactctgtcggtaacagggataaggtgatgagtgaggtatccgtatcccggaggcgtaggagtccctcggctcggtcagccttggctgcttacgtgtactccgtcgtttccaggatccgctttccgaagtag

SEQ ID NO: 34256 - DNA, 402 bp, Zea mays
  Peptide Sequence Number=SeqID_77631
atgcccaatcatcccaaagcaggggacggcgacaagttatcaccggcggagctaatccccggcatggttgagccctaccccgattcaatggccctacttgttgctctaacggaagtgaacacgggtaaggaatatgtaccaaggattaccggcgccggcgagttgtccacgggaaggggaagctccgcccctgattcgcactccggtgaggaattcacttcgattcgggacacacggcttgattcgggggcacggacggacttcacgagcgctggcgaaacccacacgaccacgcgcagaggacggaacaccagcgcagacggttttcactggcggcgcaactgtcgtgactcgacccccccccacggttccacggcaatgaggctgggctacggggcatag

SEQ ID NO: 34257 - DNA, 561 bp, Zea mays
  Peptide Sequence Number=SeqID_77632
atggatcaccggctgtcttcttcctccccacgcccaatcatccccaaagcaggggacggcgacaagttatcaccggcggagctaatccccggcatggttgagccctaccccgattcaatggccctacttgttgctctaacggaagtgaacacgggtaaggaatctgtaccagggattaccggcgccgacgagctgtccacgggaaggggaagctccgcccctgattcgcactccggtgaggaattcacttcgattcgggactcacggcttgattcgggggcacggacggacttcacgagcgctggcgaaacccacacgaccacgcgccgaggacggaacaccggcgcagacggttttcactggcagcgcgactgtcgtgactcgacccccccacggttccacggcaatgaggctggactacggggcatagaggaaaccgatcccagttctacgtcttatagcctcggagaatcggtcccaggtgcccgcaacgtcccccacgatcgacgcagggagctccgggttccactgattcgagcgcgcgtgcaacggagaggataa

SEQ ID NO: 34258 - DNA, 585 bp, Zea mays
  Peptide Sequence Number=SeqID_77633
atgcgcgaggcacgcgagccaggtgctcgatcctgccctagcgttggcgtagtcgtgtgcgagacgtttaggaatggcaattggacccgtgggtatggatacccacgggtttcgtacccggtggacatgggacatggatacgagtttgaaatctcatccgtggatcctatcgggtcgggtattcgaaatacgtcgggtaggatccgcgcgctcaaacagcagcgtggtcagcggcgcactcaaacagctgctctgctcagatccgcgcgctcagacaccttgtctgcgggctgcggcctccgggcgagcggcaggccggtggctggacagtgccacagcggcgtccgtggacgcggtctgcgcctctgcgggtcacgcgggcagcgggcacgcggctcgggcgctaggcggctggcggctagaatgatggagcgtcgatggagcgagcggcgactgaatttgctgcatttactggacctatttgctgcgtttactgggccacgaccgggcgctgcagccaggcagccccggtcccagatccgccactgtggatatccacttgatacccgaaatattaattcataa

SEQ ID NO: 34259 - DNA, 399 bp, Zea mays
  Peptide Sequence Number=SeqID_77634
atgccacctcggggacgacgcccgggcgccggtggcaggctaggctcacgggcgcacggggcaccgccggccgggcctggtgctggtctccaaggatccagacaacatccgcgacatcgccactggaatggtaaaattaaaagagtctatgagactgacattggaattgtatctcagtgttgcttgccaaagcatgctagcaggccaaacaagcaatacttggaaaatgttgcactcaaaatcaatgtcaaggtggtggcatcaatggactggcctgaaatcaccaagtacagaggtctggtttctgctcaaccacaccaagagataatagaagatttatttactattagtaaagatccacagatggggtacaacgttaatggtggcatgatcaggtaa

SEQ ID NO: 34260 - DNA, 378 bp, Zea mays
  Peptide Sequence Number=SeqID_77635
atgggaagatttgggaggcacgaagccgcggtggcggggcggtactgcgaggagagcaagtcgagcaggttctgggattcattttggggaaaaaaattggacccaaccgaattgaatgaatttcaggaaatttcagttgaatttcagactcaacccgggaataaggccaagtatgttggtcagtacagaattactgatgaagatgcaagaaaggctgcaatggatgtaggtggtagaatacgattgacaatagaagctaaactttctcctggtcctccaatgttaaatcttcgtaggcatggtgttattggacgctggcatggtcttgtggatagcattgcaagtggcaatttccttggtgcattatctaactactga

SEQ ID NO: 34261 - DNA, 552 bp, Zea mays
  Peptide Sequence Number=SeqID_77636
atgattaagggactcctgaggtgtttcactgattatgtgaaagatgatggagttaaactgttgattatgaaggggaatggaagcgcattttgtgctggaggtgatattgttgcgggtgtccagtcaatatataatgaaagctggaaacggggcgctgatatgttccgagatatatattcgttaatctacataattgcaatatatatcaaacctcaggtttctcttcttaccggaattgtcatgggtggaggtgctggtgtttctttacatggaagatttcgagttgtcactgaaaacacgggcacggaccgggcggtgaaactgggtggagacccaggcaaagaagtgtgtgcgggtggtgagcgtgtcagacttcaatcgaagaggaaaagtccaaagaaaatgggagaagtcatccaaaatcaccaaatagtatttataaccagaaagactgagtacaggagaggtccagagatcacaatgaaccaggtcaaaagcctgctcatcctgagaagaagaagtggtgaatgggagacgagtatgccggcctaa

SEQ ID NO: 34262 - DNA, 204 bp, Zea mays
  Peptide Sequence Number=SeqID_77637
atggagaggacccaaaaaaatgacgaggaaagagaggaagctctagccgagcgctggccgagcgctccagcagcaaggagaaactcactgggttcacgcgatggagaggacacaggaggcgacgtggtggcgtctggtgatgtccagggacaagaactaatgggagggagccagcacatgatggggataggattaaagatatag

SEQ ID NO: 34263 - DNA, 465 bp, Zea mays
  Peptide Sequence Number=SeqID_77638
atgagcaagaacacaaaagatataagatttatcccgaggtttggtcacaccacaaaggtgtcctacttcctcgttgaggcgcccacaaagagctgggtctctttcaaccctaatcctcccttcgccgaccacaaagctgaagtccagttcaactcaactgaagtcaagttcaacttagctaaagtcaagttcaactcagctgaagaaaagctcaactcagccgaagtcaagttcaactcaactgaagaaaggctcaactcagctgaagaaaagcttaactcagcagaagtcaagttcaactcagttgaagaaaagctcaactcagctgaagtcaagttcaactcatttgaagaaaagttcaactcagctgaagtcaagttcaactcagctaaagtcaagttcaacttttctgaaagaaagttcagctgcttctcaatgggaagactctccatctctcaaacctaa

SEQ ID NO: 34264 - DNA, 1482 bp, Zea mays
  Peptide Sequence Number=SeqID_77639
atgtcggatttccatagtagccgactcacgggctatcctaagacatcctcgttagctcaaggctcgggggctgggccgttgtccgcctcgccgactcgctacttcgacagctcgagggctaggtcgtcgcccgcctcgccgactcgctacttcgacagctcgagggctgggtcgtcgcccgcctcgccgactcgctacttcgacagctcgagggctgggtcgttgtccgcctcaccgactcgctacttcgacagcttgggggctgggttgtcgcctgcctcgccgactcattacttcgacagctcgagggctaggtcgtcgcccgcctcgctgacttgctacttcgacagctcaagggctgggtcgtcgcccgcctcgccgactcgctacttcgacagctcgagggctgggttgtcgcctgcctcgccggctcactacatcgacagctcggaggctggtttgtcgcccgcctcgccgactcgctacttcgacagctcggaggctggtttgtcgcccgcctcgccgactcgctacttcgacagctcgagggctgggttgttgtccgcctcgccgactcgctacttcgacagctcgagggctgggtcgtcgcccgcctcgccgactcgctacttcaacagctcgagggctgggtcgttgtccgcctcgccgactcgctacttcgacagctcgagggctagctcgggggctgggtcgtcgcccgcctcgccgactcgctacttcgacagctcgagggctgggtcgttgtccgcctcgccaactcgctacatcgacagctcgggggctgggttgtcgcccgcctcgccgactcgctacttcgacagctcgggggctgggctgttctctgcctcgccgactcgctacatcgacagctcgggggctggtttgtcgcccgcctcgccgactcgctacttcgacagctcgggggctgggtcgtcgcccgccttgccgagtcactacttcgacagctcgagggctaggctattgcttgcctcgtcgactcactacttcaccggctcgaaggctgggacatcgcccgcctcgccgacacgctgcttcaccggtttgggagctaggccatcgcctccctcgccgactcgctacttcggcgactcgagggctgggtcatcgcccgcctcgccgattcgctgcttcgtcgactccgggaggccacgccaccgcctcatcagctcagggttgcgttacgacgcacctcgtcgaccactttgtcagctcgggtgctgcttcccacctcaccaagaccacttgaaggaaaagcagaatttggatcttcaagctgattgtttctcaagtcaacttgaagctcgagggcttgtgggggatggatatcccctgggtccaaatgagacgtattatctacatgggccgaccgaccgactcgggcccgaggccaatgggctaaacaaacttagcgcacgaaacaaggactctattgtaatctaa

SEQ ID NO: 34265 - DNA, 312 bp, Zea mays
  Peptide Sequence Number=SeqID_77640
atggagaagaagaaccctcaggtgagccggcagtacaaccaggccatgtcccagatctcggcgctggcctgcgacaagttgctccagctactctcccagcggtgcaccggcttcgacggcgacgcgccatccgcaccgtcgttgacatggcgtggagcacgtgggcgggaacatgctcatgctcgatcaagtcacagtggcgacgccatctttatgaagattcgatgtcacatcactacaggaatccggctctttgtcgagtgctcggcgcttcgcaaagatccgtactcggcaaaatcctaccctcggtaa

SEQ ID NO: 34266 - DNA, 312 bp, Zea mays
  Peptide Sequence Number=SeqID_77641
atgaggacgaggctcaagttgatgaagaagaagatgagcctcctcaagatgacggcaatgatcaagggggagatgcaaacaatcaagataaggaggatgaagaaccaaggccgccacacccaagagtccatcaagcaatccaacgagatcaccctatcgacaccatccttggcgacattcataaggggggtagaggaagcactccaagattcggattgggtgatggcaatgcaagaggagctcaacaacttcactaggaatgaggaaccaagtgggtcttccgcaacaagcaagacgagcatggtgtggtga

SEQ ID NO: 34267 - DNA, 363 bp, Zea mays
  Peptide Sequence Number=SeqID_77642
atggcgaaatcggttcacgaccagtcgtgggtttcggttgagaaattcctgggtgacaggcgcttctccaccagcgctggtgccgcgaacgtgttcgcctggtcgccgcgacccagttcgcactcgacggcggtgactggcttctccctcgctctccctggcgcggattcggggaaggaggcggacctggccagtgggccccaccgcgtcagcgaccgagcaccaggcgagcgcgtgggtcagaggggctgcaagtgggacccgcaagccagcgcatgtgtgagcgtgaggaggagttattgggccgcgcgggagagtttgcgaggtgggccgaaagcaggttttgggcccgcgcgggtgtaa

SEQ ID NO: 34268 - DNA, 897 bp, Zea mays
  Peptide Sequence Number=SeqID_77643
atggcgcctcctgtcgacgtggtcggtccgcgccctaggttgggcgatgtggaggctcctccgaggtcgaggtcgagtctgtcttccgtggccgtggtcgagtccgagcccctgggtcgggcgaggtggagaccgtcggctgaggccagggctgagtccgagccctggggtcgggcgaagcggagtttgtcgtcgtctggggctgagcccaagtccgagccctgggtcggggctgagcccgagtccgagccctgggtcgggcggagcggagttcgtcgtcttccggggctgtgcccgagtccgagccctgggtcgggcgaagcggagcttcctatggtgcctgaggtcgggcctgactgcctctctgtcgactggaggacgcgtgtcaggataaaggtgtcaggccacctttgcattaaatgctcctgcgatctggtcggttggcgcggcgatttggtcagggttgcttcttggcgaagacagggcctcgggcgagccctttatgttgatgggggttaccagctgagaattaggagacttgaggggcagactgtctgccagtctgactgtcagactgacctgcagactggtcaagttgaccaagaccagttcaaccgcctggggcaggctgacagacagtctgccagtcagactggcggactgcaggtcagactgcaaaaacaggtcctgacaccagttgaaccgcccctaaggccggttcaaccgcctgggggtcagactggcagtcagtctgccagtcaggaggtcagaccgatcagaccccggttgaacttgccctggaccctggttgaacctgcctggaccctagttgaagttgaagttcagctggagttgagaaagctcaactcagctgaagttcagctcagctgcggctga

SEQ ID NO: 34269 - DNA, 855 bp, Zea mays
  Peptide Sequence Number=SeqID_77644
atggctgaaaggtaccaactcccacagagttgcgttcccccgacaacaaggcagaaagacggcgggtatcccccatccgggggcttggaaggtggaaagacacgacgcataagggagcacgaagacatggtcgccttcaaagggggtcaccctccttttaaaggcaactctccctacttgcgtccccagccgtcgcgggctgagtcttctccaacacgctccaaggtcctcccctgcggcgcgggggctgggtcccacacgtcatgcaagccggctcagagcagaagaagccaaaccgccatgcgcggtgcgcacaaccgcccagcggttacaagtgaccctccacttttgcccagaccaacgggcgaaaggggcgggcagccatgcaggcggcatgcaaccgcgccaagtgggcgcacttctccgactcccaacacgcccggcatgggggcccaggcccacgcgtcatgcaaccggcgcgccgaatgcttcgtgcatgcaactgcaccgccacttgcgccaccaccgcgcctcctcgactgcggaaccaatgccgtgactcgagggaccgggaaagggggataccccgaaaaggatccttcccgtgaaggaaccaggctccgagcctccctactgattagaggttcgaaggctggccccccggaagggttcgacagccgcctcagatcgtgtgggccctacacccactactggtcagaggttcgaaggccggcccctcggaagggttccacggccgcctcaggctactcgggctccgcgcccattactgatcaggggttcgaaggctggcccccgaagggttcacagccgcctcagacgccgagcaagggatga

SEQ ID NO: 34270 - DNA, 381 bp, Zea mays
  Peptide Sequence Number=SeqID_77645
atgaatactaagggaaaggggatggtggtcaacgacaaggagaaggagtccctcttcaacgagccaagggacgacaagctgaaagggaaatgtgcccttgggccatttctaagtattttggtgaaaaaatcaagttgggagaagagatggctcgagcagccaaagactgctcagtctgggtgcaccggactgtccggtggtgcaccagacagtgtcccggtgcgccaggctggctcaagcaaagtggctgctctcgggacttcgacggcggtgtacgactataattcaccggactgtccggtggtgcaccggactgtccggtgggcatttcacaggcgaactcatcgctctcgggaattcatcgtcggcgtacggctataa

SEQ ID NO: 34271 - DNA, 1614 bp, Zea mays
  Peptide Sequence Number=SeqID_77646
atgccatgcacgaagaatgtgtcggcactagggggaggagatgatgaggaccctcctcgcgcctttaggcaggtcaaggggaagactgtctacttggagcagcaggaaggccgcaagaagcggcgtttggatagagtagcccgagcagctctagcagcagcagcagcagtcgctgagcagacagagaggggagatcagctgcggatttcttcagatcagattgcttatcgcgttcgtcgtctcgcctctcggcctcgctcctccgcacctaccactcccgccactgctgccactccacctcccacttcgcccgctctagtcactcctgcgccatccaccacctcagccatacctaccacctctaccactctagcttccactgctcctcctcccgctcccctttccgctccacctattccacctgcctgcttccgggagcgagatgagaccgaggtgcgcccactggctgccgatccccggttgtttgaccttcagcatgctacagcggcctgggtacgtcggttcagacatgtacccgtggagtcttggttacctgcacagagagaccctgcagtggcagacctattcaacaccaggatacatgagtctttctttagagcacagttgtcagctcagattgctctacgagcgcaccagctattggatctccctgccttcctgctagcagccggtgcggactctgaggttcacctcttatatttgcttggacttctgactcttctgactactagcggtagatatgttgaggaatgggtccgagttttctatgcttctgtatggatcgaccctgatcaccagtggatgagcttgtgctatggcacctctgatccttctcgtcgccctcacggcggagttgctccaggtacagctcacgttgcggctttgttacgccctcccttctcagatggatcacgacattatccggcagatttcactacagcgtccaagtacgaagatcagcttatgagacggacgcttctgacacggatgggttacagggaggctgctactaatattcagctccggcttctcggtgccctgatctctcattcagagtttgatgttgttgacttcctcatttgtgagatagaggacactgtgttggatggacttcgtgcctggcgccagctgccatatgctcacaatctctgccacatcttcgcacagctgatctggccacgacagttccagggcacccttgaggcctctcccctcctctttggctcttatcgtccaatccctgaggatccagtgccagcacctgatccagtgattgacactcaggcagaggatagcgcttaccatcagtttgagactcagggcgcaacagtccctgatgatgatgactttgggattccgcctccgcctccctgctcacatgatcatgaagctcggagttccagtgctattcccgctactcctcctacggttgaccctgctctggctgctatccttcagactcttacacaacagcaggctcttatggcgtccgagcaggctcgactggtagctgagcaggctcgtcaggcagcggtccagcagcagatgttcgagaggatgctttccctatttcagactattcaggataggtag

SEQ ID NO: 34272 - DNA, 858 bp, Zea mays
  Peptide Sequence Number=SeqID_77647
atgcgggatcctcgcccaacagccatgcgcgccgactacgcctccaccggatccagccttcctatagtcatcctgtcatccaacagggatcccggccacatagagtttcgcccgaatcgatcgccgattgactccgctagggccgaggcgtgggacgtcaccttcaagaaagttttggcgattactgttcctttttcccagcagattatggctggagagtgtaaactggtgggctcggcaagttgctgcgactacagggaaatcttgtggaagataatggagcaagtaaaggcagaatctgatcaatggactgagatgcaagatatgttggagcaggaatccggcaaggaggagatcaagaagcacatcctcgtctgctgcgtgaagcgctcactcagcaccgtgctctcgaagcgatcgccgttccaggagataggcaacatcagcctgccgcggcatcgccgcctccgcccaacaaccatgcgggatcctcgcccaacagccatgcgcgccgactacgcctccaccagatccagccttcctatagtcatcctgtcatccaacagggatcctggccacatagagtttcgcccgaatcgatcgccgattgactccgctagggccgaggcatgggacgtcaccttcaagaaagttttggcgattactgttcctttttcccagcagattatggctggagagtgcaaactggtgggctcgacaagttgctgcgactacagggaaatcttgtggaagataatggagcaagaatccagcaaggaggagatcaagaagcacatcctcgtctgctgcgtgaagcgctcactcagcagcgtgctctcgaagcgatcgccgttctag

SEQ ID NO: 34273 - DNA, 123 bp, Zea mays
  Peptide Sequence Number=SeqID_77648
atggaggcagttcggacttcggagtcggtggtggagtacgtggcgcaggaagaggcggaggagaagaaggaagcgctcaacccaaactcgtggtcgtccaccagcaagtgccaccacgtctga

SEQ ID NO: 34274 - DNA, 303 bp, Zea mays
  Peptide Sequence Number=SeqID_77649
atgacaaggaactatgctggttgcatctcccaatggttgaaccatgaagaacaggaaacatgcttagctgctaaagatgttatgtcgtttgatctacttaagaagagtctaatgtatctattgaacgcgatgggagttcgtatccgaaaagtgtatgatgaggaatggtcctacatttctgttggatggtccttaccaaacacagatcagaaaaatcttgcatttggtgctacaacaagcatggtgcatcctgcaaccagtacagacgaatcatcaagtttttacacaccagtttccacctag

SEQ ID NO: 34275 - DNA, 381 bp, Zea mays
  Peptide Sequence Number=SeqID_77650
atggctgttgggcgaggatcccgcatggttgttgggcggaggcggctgcacgcatggcggcgggtcgagggcgggagcgagaatggatggcagatgaggtgtcaaaggttcaacacaaaccaagaaaaggtccaagatagggttcaaaaagaaaggagcaaaaccaaccgaaggctgccctggtctggcgcaccggactgtccggtgtgccaccggacagtgtctggtacaccaggaagatcaactatgaactgctcagcttcgagtttctggaaaagccactccgctataattcaccggactgtctggtgtgccaccggactgttcggtgtgccatatggagcaacggctacagcgccaacggtcgtctgcaaaaagtga

SEQ ID NO: 34276 - DNA, 1029 bp, Zea mays
  Peptide Sequence Number=SeqID_77651
atggccttgctagaccctcgcgagcgcttccagcccgaggtggcactcaacttggtgcgcaacccgctcggatggggtgtgctggcgtttgccgggaggacctatgtcggtgtctctcctctcggtgacctcgctgccgaagagtttgtgttctttgtttccaaactccccagcgggcggccatcattgcctacctccgcggaatgtccatggaggcgacgctccttcccgcttcttcctccagcattcgggggggaggatgattaccagcctcgtgatggtggacagcgggctgagccacggctccatccctcgcgccccaactcttttggggtgggaagagagccatgctacagctccatcttcttggctttgatggcttcggtgccgcctctaatgctgcctcacgccgccaagcagggcgcggttgtccgtccaccgcacgggcgacggtcgcgtcgtgcacaggtccgccgcacccgtagcgtcccctacgccgccggccacgctgctctaacgccgctcggggggccgtacaagacgtcgtacgccgtggaggtggtggccgcgttcttggatgaagtggtcgcctccgctggtgagccgctcggagctagctacccacgtgatcctactggtgtggaggtactaagacacccgtcgcagagtggtggagcgtgcaggcccacggtacggaaccaggctgagcggctacacggctccgaaccaccccaggagacaagctttcgggtacgggaccaggctaagcggccacacaggctccagaccaccccatggaacgggctcgtgctctttagagccgaccaacaggtcgggcttatgagggtagacctcaccgggttggcgtacacagatgctccagtggtcaggaagaggtactccttcagtcatagcaagatagtcacccccgggtcggcgtattcccgtcaccttgaaggccatttctgcatggacttgtcagaagcctggacccgtggggtgtccagaagggtttccgggggaaggtag

SEQ ID NO: 34277 - DNA, 1080 bp, Zea mays
  Peptide Sequence Number=SeqID_77652
atggcctgcttggccggaaacgccttggatctcgttggccgtttctgggtcagtcagggaagctcggtgctatcgtttctaccgtcgctgtcgctggccacgcggtgctctcgagcgtgcggtctcgagggggtgcaggcgtccacagcatcactgttctgccgccgcgatcgtcctcccgcacgcgctgctccaaacccgccccgccatcagcgccagcacaccgcgccgccggcaatcaacgcccgcggatctcccacccttctccccaccgccgccgcaatcaacgcggtcctccccacgcggatccacgtgttctccccaccgccgccgcaatggaagctcagcaggcgttccttccccggcagcccgccacctccgcgcgccccaccaaaccggaaggcgagatccgccgccagccgtcacaggttggttcttgttcctccaggctactgcgttgtgaaatccatctcctcctcttcctcttccccctttcttgctcgcacgactcggcgcgccaatggagtcatcgcggccgcggccatggcacccgcgtcctcatcgcgggccgccagggacccgctcctcttcgctcgcttcgacctccccgccgtctgggggtgccgcaagcccttggacttttgccgggaggcccgggacacggacaacgcccccgtcgcgtccgagcccgacgccacagccacccccaccgagggtgtcaaagacagcgacgggacccgatcgccgacgcgagcgaccgcaatggtgcagcaggcgcccgtggcgggggaggtggcgcaggaagctccccggaaacagtggaacctaagggagcggacgccgtggcaggattatagtaacagagcggacgacttgcgtgcacggcaggccaggaagctcgggagcgcggacgccggcggcaaccgccggttgtcgctgtcggtgaagctgactcggcaggagatcgacgccgacttcgccaagatcaccggcagcaaggcgccgcgccggcccatgaagcggagcaagaccgtccagcgcaaaatcgagacactttgcccagggagttcgctggtgtag

SEQ ID NO: 34278 - DNA, 1143 bp, Zea mays
  Peptide Sequence Number=SeqID_77653
atgacggtggcaggcgggcaggagcagcagtcacgtcgtcagccaagctcacgtcccatccgagggcagcgagagaaccctctctcacggcgtgaagacaacacgcccgtgttccgtcctcgaacggctcgcgcatgcgcaacggctaccctgcaaactactcgccccgtcgcattaactccgcggcgggacacgcagcgcctctggcaggaggagcgggcgacgcttcgccttcgccatgacaaccgcgtcaaaaaaaggctccgagcccccctactgatcagaggttcgaaggctggccccccggaagggttcgacagccgcctcagatcgcgtgggccctacacccactactggtcagaggttcgaaggccggcccctcgaaagggttccacggccgcctcaggctactcgggctccgcgcccattactgatcagggcgggaacgatcttgtaacagaatcccatcagagggaggcatcgagccctcggaccctgtcaccaggggaccgggtctggcagatcacccgcagctcatcggagacaccatgttcgacgcccatcgagggcaacatggcgctttcccccctcctccttgcggaaaggcgacgcaggggcaggctcgggggctgctctcgcaaacccggctctggccgaaccgttgacagcgtcaacataccagcccaagaacttgggacccgaccgtacacctgggctatagccagctcgcatgagggaatgaccagaccagccgaagcactacgtgaggcagtaagacctcgaaggagtgaaaccactcctccgaggcctcgggggctacacccggcgggtgcgctcgcgcgcacccaccggaacaaaacgcaatcgagaaaggctggtccccttgcaaaaaagtgcgatgaaagcctccaagcgagtgcaaacactcccttcgaggctcgggggctactgtcggggaccataattaggggtaccctcaaggctcctaattctcagctgccaaggggctgtttcggtctgggcaccggactgtccggtggtgcaccggacagtgtccggtggtgcaccggacagtgtccggtgcgccaggctgcctcggccgaagaggctgctctcgggtttttctccggcgacttcggctaa

SEQ ID NO: 34279 - DNA, 1257 bp, Zea mays
  Peptide Sequence Number=SeqID_77654
atgtcttcgcgctcccttatgcatcgtgtctttccaccttccaagcccccggatgggggatacccgcagtctttccgccttgtcgttggaggaacgcaactccgtgggagttggtacctttcagccatcgttcggcttcaaggattttcatcagtcagcccggctgcacccctccgtcggcggtcacccgagacggtgaccaccagcccctgggtggggagaagcaagccgggctgcgatcttggtccgaccctcagcttcaaggatgttcatcatcctcgctggggtggaggccgggctgagccggagctctacctcccgcgcgggttcgtgggtcggcctctccttcggcgttcgagggagagggcgctcactggccctgtgggcgggtcggagttcgacaacgcggggctggtcgacggcgggcgtcgccagcctcagcacgtcgggctcgtcagtttggctcccggtgcccccctgccggaaggcggttgccgcgccgtgcgcacgggaggaccgcccaagatatcgcgcgctgccagggcggcgttcgtgttctggggcggtcctgcctttgcaccggtggaggcggctcgagaagtccccgttgccgacgggatcaccgccaccatccgcgcttcgggcctccagctctttgtacttgtcctcgcccctcgagcgtcggcgtgggcgagggcaaggttgcaacagcactcgcctgttggttgtctgaactgcttcaccaagcgtgagtcgccccgtgtaaaggtgacgagtgaggagtccctcggctcggtcagccttgttgtccgaggcttctcttgcttagttaaaggaacccctcggccgctcttcgatgagccgaggccaggggtagcggtgtcagcatggacagaggcagagttggctcgaaaagaagacttggtcggccggagcctggccgggtcgtacgttagcgggaccgacgccggagttgatcttccgaggcctcgggccgggcttatgtcttcgggggacagctggctgaggcctcggggtgaccagccgagccttctgctcgggccggattctcggagaagaccctggcggcgatggcccgggcgtggtgatgatgtcgtccttcagagtggagatcctcgaaccgcgtcaccgtccgaggctaggtcagacctcgccgaaggtgttgtcgacgctgagggtgctgcggctcccttcaactgtccagatccgagcctgcaggatcggattatcctgtag

SEQ ID NO: 34280 - DNA, 543 bp, Zea mays
  Peptide Sequence Number=SeqID_77655
atggatatacttctacacttgaggctgttcttgctgaaaggttaccaaatagtgggatatctgcagttccacacattgactctagagttaggaattttagaaaaaaaaattggagcaataaagttaatgctgaaaaatagtggcttcacctgggatgacaataagaagatgatccaatgtgaaaggagtcaatatgaagctcattgcaagaaacatcctgaagctagaggcctatatgacgtcgcattcccatattttgatgcattgtcgaccatatatggaaatgatatagctaccggtgaaggtgcggaagggattgatgaagccgttgggaacttagaacaagagcttgctactgggtatgcatcatcaagtgtgaagaggaggaggacatctgggaaggagaagagtggatcaagtgaccctcttttggacatgttaaatgaagtccaaggtgatctaaagggtgtggctatgaatgttggaaaaatgacagcggttatggagcgcgaggctgaacttcaagaaaaaattaagggataa

SEQ ID NO: 34281 - DNA, 1853 bp, Zea mays
  Peptide Sequence Number=SeqID_77656
gcctcggcggccgcaaaaaacacacgctacaagataatccgatcctgcaggctcggatcttgacggctagagggagcagcagcaccctcggcgtcgacaacaccttcggcgaggtccgacctagcctcggacggcgacgcggtccgaagatctccactctgaaggacgacatcatcgccacccccgggccatcaccgccagggtcttctccgggaatccggcccgagcagacggctcggccggtcaccccggggcctcggccagctgtcctccgaggacgtcagcccgacccgaggcctcggctggtcaattccggcgtcggtcccgctaacggacgacccgaccaggctccggccggcaagcggcaacaacgacccccgctccgggtggccgaactgcagcagcgagggcctcagggcgggtgctgctgcaatcttgccctcgcccgcgccgacactcgaggggcgaggacaagtacaaagaaccagaggcccgaagcgcggatggtggcggtgatcccgtcggcgacggggacttctcgagccgcctccacctcggcaccaacgaaaggggccgtcagccctctagcagatccccactcagatcctcccggacaagtggggcaccgacctccgcgcggaggcgccgtaccggtgcaaaggcaggaccgccccagaacacgaacgccgccctggcagcgcgcgacatcttgggcggtcctcccgtgcacacggcgcggcaaccgccattcggcaggagggggcaccgggaaccaagccgacgagcccgacgcgctggggctgacgacgcctgccgtcgaccagccccgcgttgtcgaagtccgacccgcccgcagggccagtgagcgccctctccctcgaacgccgcaggagaggctaacccacgaacccgcgcgggaggtagagctccggctcagcccgacctccaccccagcgaggatgatgaatatccttgaagctgagggtgggaccaagatcgcagcccggcttgcttctccccacccaggggctggtggtcaccgtcttgggagaagcggacgacgcttcgccttcgccataatgaccgcgtcagaaaagggaccgggaaagggggacaccccgaaaaggatccttcctcatgaaggaacctggctccgagcctccctactgatcagaggttcgaaggctggcccctcggaagggttcaacagccgcctcagagcgcgtgggctccacacccactactggtcagaggttcgaaggccggcccctcggaagggttcaacggccgcctcaggctactcgggctccgcgcccactactgatcagggcgagaacgatcttgtaacggaatcccatcagagggaggcatcgagccctcggaccccgtcgccaggggaccgggtccggcagatcacccgcagctcaccggggacaccatgttcggcgcccaccgagggcaacatgaggctcgagggctgctctcacaaacccggctccgaccacaccgttgacagcgtcaacataccagcccgagaacttgggacccgaccggctcggactcgggctaagccccagaagacggcgaactccgctccgcccgacccagggctcggactcgggctaagccccagaagacgacgaactccgctctgcccgatccagggctcggacttgggctcagccccagaagacgacgaactccgctctgcccgacccccggggctcggactccgccccggcctcagccgtcggtctccgcctcgcccgacccaggggctcggactcaacctcgaccacgggaagacaaactcgacctcggctcggagggagcttacacatcacccaacctag

SEQ ID NO: 34282 - DNA, 384 bp, Zea mays
  Peptide Sequence Number=SeqID_77657
atgatgaatgaagtgcaaatcaacaagaagacaaacacaggtgttgtgtgctcacttggatcatattttcccacaaatttcagtaatcttgctggacatgttgacagtgaaagaatgtacaacgaactggtgtcaaacactatttatgaaggagggccttttgattcaaaggcatcatctataaaacttctaaggcgtacctcgaataccaccagatgcctcaacctgggctcctacaactaccttggctttgctgcagcagatgagtactgcacaccacgtgttattgagtctctcaagaaatactcagcaagtacctgcagtgttcgtgtcgatggcagtaggatacattatcaacatgcttatatgtttacaactttttaa

SEQ ID NO: 34283 - DNA, 363 bp, Zea mays
  Peptide Sequence Number=SeqID_77658
atgaatgctgtggtaacttcacacctacccgtctgtttatatagtgctgcaggtaagaaggtgaatcgtcaggatttttacaccaggcaaacagctgcttacacccgctgcgcggtggaccatagaggccaaatagtaaccctgcagggtgggaccactacgcgttcggaaactgaatcgtttctcgacaacgagctcagggaaggtgtttttcggaccttcggcttcctgaagcctaagagacttttttcggaaactgaatcgtttctcgacaacgaaaaacgatctagcaccgcgaaggggctactgttgggatcatgcttcgtcgccgaaggtcctgcaggaagaaacagcttcggctga

SEQ ID NO: 34284 - DNA, 213 bp, Zea mays
  Peptide Sequence Number=SeqID_77659
atggtgaaaaagttgatgaagataacaagaggaggaaatggtgagcagtcatgtcgagtgctccccaaaaggccttattcacccttctggcggtgcagcatcactaaggatgatggttctagaggccttctctaccattcaccgatgcccgctaatgattggaatgaagtagtgtacaggacaacgcgactggacatcgtcgttgctacttaa

SEQ ID NO: 34285 - DNA, 624 bp, Zea mays
  Peptide Sequence Number=SeqID_77660
atggctgctatattactatcttcagacctgaataagagaagtgggtgtctgttatacaaaaatgaaaaagaagttgactctggaagcccatcagatgttgagatattagaaaacccaacatattctaataagaggaaactactccacgtgcttgatgatagcgaagtagtgtatgaagatgaggaagaccctattactcaagcagacttgcaaaggatgacatgggtgagaagtttcaatccttttaagatagtaatatctgtcaaagacctgcaaaacatattaacgataaatcaagatatgattctaagatgttttgacatggttgttcggctgcttgccaataaagagtcacgtatgccgaaagaagaaatcataaataatagaaagcattatatggacatgcgtttttggagaaaggttggttttggtaaacttccaaagtaccatcaggatcctacaacagaatggttagccaaaacactcgatagttggccatcaatgaattattatatcacgcgttgtagatatgatgcaaagattcttcaaaggaactttgtgattgatctgttaagttatgaggacaattcgtgccgatatgccatccctgcaaacatacaatag

SEQ ID NO: 34286 - DNA, 78 bp, Zea mays
  Peptide Sequence Number=SeqID_77661
atggctcgtagacgatcccgcaagaacaagaagactcaggagaactcaactcggaaggagtgtgctaaatgcttttag

SEQ ID NO: 34287 - DNA, 1746 bp, Zea mays
  Peptide Sequence Number=SeqID_77662
atgcagctgccgcagcatcacaagccgtccgcccactcctgctgcccgtcgtggatccggaggtccccgccgtcgccgccgccgccgccgcacaagaagctgggcggcgggaggagccggtatgcttgccgcctcgtgcccctgctcgtgctcaccgtgtacagcgtcgtcaccgtgcttcgcatccccagcgcctccctcgtcgtctccaccgccgattcagagcgcgtggacaggcgggaggacttggaggcgctcaagacccacctgccgtcgaaccagaacagcctcgaggcccgcgaggagacgcggtcggtggcctccctcccctgctccgccttcatcagcggtgaggcggggcacggcgaggagggcgtcctgtgctgcgaccggagccactaccgcagcgacgtgtgctacctgcgcggcgacgtgcgcacggacccgtccacctcgtcggtgctcctgtacaacgcggcccgcgggagcggccccgagaaggtgcggccgtacacgcgcaagttcgaggacagcgtgatgagcagcatcgacgaggtgaccatcgtgcccgtgccgggcggccacaacgcgagcgccagcgccctgcggcggcggtgcgacgtccggcacccgcgcggcgtgccggcggtggtgctctcgacgggcgggtacacgggcaacgtgtaccacgagttcagcgacgggctgatcccgctgttcgtcacggcgcagcggttcggcggcgaggtggtgctggtggtgctcgagtaccactactggtggctgggccgctacggcgccgtcctggagcagctcaccaactacaaggtggtggacttccgctccgaccggcgcgtccactgcttcgacgagatgatcgtcgggctccgcatccacggggagctcgtcgtggaccccaagctcatgcccaacgcgaccgatcatgggcgcgaccgcgaggtagcagtgacggaggatcattgcgcggggcaggaggaggggaaagcgggggtggcggctttcgcaaaagcgtcagtgcaaaaaaagcgggcaagagcatcaaggatttccaggcgctactccaccggagctacagccggacgacgacgacaccgtcggcgtcgccacccgtgccagtgccgcttcccctggcgccgccgtcccggtcccggtcccggggcgtgcccgcgcccggccgccaagccgaagctgctcatcttcatccgcaagcagaaccgcgtgctgctcaacctcccgcacgtggtgacggcctgccggcgggccgggttcgcgccgcacgtgatgaacctgcggcggcagaccccgctggccgcgatccacgccgcgctggcgtcggcggacgccatggtggccgtgcacggcgcggccgtcacccacttcctcttcatgcgcccgggctccgtgctcctccagatcgtgcccgtgggtctcgactgggcggccgacgccttctacggcaagcccgcgcagcagctcggcctcgagtacctcgagtacaaggtggcgcccgaggagagctcgctggccgccgagtacggcctcgacagcaccgttctgaggaacccctgggtgatcagcagccgcggctggtgggagatgaagaaagtgtacatggaccgccagaacgtcaccgttaacatcaagcggttcggcgagctactcaggacggcgcggacgcacctcaagaacaccacggcgtgcgccgccgccgcggcgctgaggtag

SEQ ID NO: 34288 - DNA, 384 bp, Zea mays
  Peptide Sequence Number=SeqID_77663
atgggcaagaaacgcaagcgcgagccgactcctccgtctgaggactttggtgactcggaatactcagaggaggagttctcctctgagtccgaggggtctccggctcccatccctctgcgcgagtcgtctgacgattcagacaactcccaggggctcgcggcggaggtctggacttacatccgggccgtcgagcgctccgggctcgcaggctcggatgagtcggagtactcctcggatgagcaggactcgtccgaggaggacgacggcggcggtggcgacgacgacgacaacgacgacgaaggcggtggcggcgacgacgacggtgacggcggcggtggaagcagcaggggcggcagcaggggcggcaacatgaccagtggctaa

SEQ ID NO: 34289 - DNA, 303 bp, Zea mays
  Peptide Sequence Number=SeqID_77664
atgacgaaggagaatgcagagcaccgggctcacatggaagacaaggagaaacagggtgttttgatgacgtgtgctaaacttcctcccctctgtctgcagctaatccgtgtagttccaactggtcaaaagtcaaagccatacggtgttctccgttctcacacaacaggcctagtgtggcttcgggctgggcatgggcctgagcctgaaacagcctggtccaaaagcaccaggttatacctctaccttggcaaaggttggttcccgaatgatgcgattgccattaccagaatgcgtgaacagtaa

SEQ ID NO: 34290 - DNA, 1284 bp, Zea mays
  Peptide Sequence Number=SeqID_77665
atggggagcgctcgcatcgctttcgtcttgctgtcgttggaggaacgcaactttgcggaagttggcagcctggctgcatcccctcgccggtggtcacccaagacggtgaccaccagttcgatggtggggataagcaagctgggttgcagcctctgccccgccctcagcttcaaggatcttcatcatcctggctggggcggaggccgggctgagccggagctctacctcccgcacgggttcgtgggtcaccttctccctcagcattcagggaagagggcgctcaccgacctagcggaaggggcggactccgacaacgcggggctggtcggccgcgagcgtcgtcagcttcagcgcgttgggctcactggctcagctggccctggctcggctcccggtgccccctcccgccgtacgagtggtcatcgcgccgcgcgcaccggaggactgcccaagacgtcgcgtgccgctagggcggcgttcgtgttcttgggctgtcctgcctttgctccggtacgacgcttctgtgcggaggtcggtgctcgctcgtccgggaggatccgagtggggatctgccggtgggcagatggctgccatcgtcggtgccgaggtggtggcggctggagaagcgaggaccttatagcagcagcgtctgccctgaggtcatcgctgctgctgtttggccacccggagcggaggtcgttgtcgctgctgccggagcgggaggcggcgagccacctagggaaccctcagccgctctgtgatgagctggagccggaggcagcggtgctagcacgaacagaggcagagatggctcgaaaagaagcttcgtcggccggagcctggccgggccgtccgctggcgggaccgacgccggagtcgggttgccgaggccacaagccgggctcatgtcctcggggggacaactggctgaggctacggagcggccggtggagtcgtctgctcgggccgggttcccggaggagaccccgacgacgatggcccaggcgtggtgccaacaggatccttcgaggtggagatcctccgaccgtgttgccgttcgaggtcgggtcggattccgccgaaggtggagtcgacgccgagggtgctgctgctcccccactgataattgtttgtccgagcgagagttacttttcacagaaggtgatgagtgagaaggtgatgagtgaggtatccatatcccggaggcgtaggagtccctcggctcggtcggccttgcctgcttacgtgtactccgtcattttcaggatcccactttcgaagtag

SEQ ID NO: 34291 - DNA, 840 bp, Zea mays
  Peptide Sequence Number=SeqID_77666
atgaagtcgaagctgctacgtcaggggatgtggctcggcaacgatgacgtggggcgaacccccttctttgtgggctggtctgcttcgaagatgaggcatttggcggaggcgaggcagtggatcaaggttttggaagtctcgctggtgaagattcggagctgcctcgagtggggtgcctcgtggcttggcaacaacggtgtgccgcagtcttccttctcttgtgctggtgcccccatcctcctcgtccctcgccggtcctgtgggctcgtcgtctccctcccacgggaggacaacatcgtcgaatccggcggccgcgaactggagatcgggccgcacctagtcccggtcgagcaggtcgccgaggcgttcggtgtcgtggggggcgcggcggccgtggcagcagaggttgaggcggagggatcgtcgtcgtcggagggaaccacccacgccacccaatacaaacagcggaaagcacggctgcagggactgggctggggcacggcggagaggcacccaaatcccaatcggcaatcgctaggcgtgcgcggcttgctggcgggcgctggctcgacggacgcggactgggcgtctgggatgccggctgggccgctgccgcgctggccgctgggcgagcgctcggcctcggcggaccctggacgcctggacgggatggcgccacggtggactggggcgcggcgtgcggcggatggggcgcggcgcgtggcgtggcggcgcactggaggctgggccgtggcggacggggacggggcgcggcgcgcggaggacggggacggccggacagggcgcggcgcgcggcgagccggcgaagtggcgaactag

SEQ ID NO: 34292 - DNA, 477 bp, Zea mays
  Peptide Sequence Number=SeqID_77667
atgcctgccctgcctcctcctccgtcagcggggaaggtgacgggacatacccggatgttgctcttccgccacgaggggaagacgtcgtcgattccgccgccggcgggcgggctgacggccgccattgtcattgtcgcgcagcggaggaaggagtatcatggcgtagctgccgtcgagggacatgaactccagactcccgaaacgaagcatcgtcccaggttgaagaggttgctggagactacccatctggagcttgacgggaagctgttcgtcaacacgcagcaggcccctacctggcgcgccaactgtcggcatttcgaccccggggggcccctggaccgacgagtaaattgtcgccgcgtgtcccagcccagatgggtcggcgcgagatggagcacgaaggggggagaaacggcaagaggggaaacccgcggccttcgtgttgccctatgcccaggtcgggtgcgcttgcagtag

SEQ ID NO: 34293 - DNA, 762 bp, Zea mays
  Peptide Sequence Number=SeqID_77668
atgcaggcggcatgcaaccacaccaagggggcgcaccctttcgactccgacgcatccagcgtggaggcccaggcccacacgtcatgtaaccggcgcactggttactacgtgcgggaagctgcaccgccacttgcgccagtactgcgccttctcgactgcggaaccggtgccgcaactcgaggcaaccctgcgcatggcccaacagtgccaaccgagcacatcgatcacggggaccgggaaaggggatactctgaaagggatccttctccgcgaaggaagcgggccccgagccccctactcatcagaggttcgaaggctggcccctcggaagggttcgatagctgcctcagagcactcgagctccaagccctcctactgatcagaggttcgaaggttggcccctcggaagggttcgacagccgcctcagaacactcgggctccgcgcccaccactggtcagaggttcgaaggctggcccctcggatgggttcgatagccgcctcaggccactcgggctccgcgcccattactgatcaggggttcgtaggctggcccccgaagggttcgacagccgcctcagagcacgcagagcgagggatgactctgggctcgggggttgctctcacaaacccggctccggccaaaccgttgacaacgtcaacataccagcccgagaacttggaacctgactatgcacccgggctacggccagttcgcatgagggaacaaccagaccgaccgaaataccacgaaacgcgctaa

SEQ ID NO: 34294 - DNA, 582 bp, Zea mays
  Peptide Sequence Number=SeqID_77669
atggccgtcgtcgcgctcctcctctcgccgcggagtgtctctttcccacctcatccgagcctcgccccaggcttcaccaagagaccaccgccctacctcctcagcggtcatggcgccggcgcgaggttccgggccgtcggggacgggcccggcgcggggctaccacctgagcaggccacgatctaccacccggcgcggggcgtcatcctcacagttgagggtctggcgcgacagcagcggatgagcggccgacatcgggtcactaggcggaagagcgtcaccattagcccggagctgatgcagagacggaaccgcatgtacctctgtggcatcgtgccacagcaaggacctcctcacgcacaagtaggtacaggaaagccttgggaacccgttggccgttgcgtcaagccggacaacgacttcacctgctttctgcatgccctcctccctgttgccaagcgatcatgcactgccatcattttcacggaccgaaaaccacgacttccctgcaccacacaaaagcagcctggcaatgttagtagtattttaatattaaaaggagacctccgtgacaataaataa

SEQ ID NO: 34295 - DNA, 165 bp, Zea mays
  Peptide Sequence Number=SeqID_77670
atgacgaactacgacaactctggcaaaccgaagtcgccggcggccggcgtcgacagggatgggatctcaacaggtgacacagcacgatgcatggcgattgccatgccaagagtacttcgacaagtgaagctcgtggatagcattgccttgcttcgtcgtagttga

SEQ ID NO: 34296 - DNA, 495 bp, Zea mays
  Peptide Sequence Number=SeqID_77671
atgaagagggaactctacaccgcgtcgcagatccgccgagaaagaagcctcctccaacaaactccgaaaataccggagaagcgcaatctccagctctccgaaagaagatcgccacgacagccacgccattctaccccgacgttcttttcatcaggagagtggagtcacctcccatctctgacgacgagccgactgcgcctggggaagaaccacctcagtgggaatcctgtcgacgaagaaatcggcgccgaaacatctgaagacatcaccaagccggagaacgggatccggagcagcctgtctcgcgagacgaggtctcggagatgggagaaactccggaagaacgcgtcttcagagaacgaaggaactcccgacggcgcgatcgtcgacgagctcaggaacaagccgagcaagacgcgaggcaacgccgggaaaatccactcttcgtcgcaacctgaaccccgacttcgcccgagccatgaacatgtcgtctga

SEQ ID NO: 34297 - DNA, 339 bp, Zea mays
  Peptide Sequence Number=SeqID_77672
atggcgcatggtccatggaaggaaggaagaagccggccgggattcgctgacagggtttacacatccacgaggcacgagcaagaaccactgctgcactgcgtttctggctttctgcgcgtcgttgccttcaaacaaagttcagaaacgtactgctatccatttccatgcacgcgaagagctgcagcagtgaagaagcggaagtggaggaaagcagaaaaaaggttgaagagaatgagtgatgtgacggtggtgatcacgcagaggccctcggtgtgctgtgtcctcaagggattgtttggcattggacaagttgatacagcaatggtgctgatcctgtga

SEQ ID NO: 34298 - DNA, 423 bp, Zea mays
  Peptide Sequence Number=SeqID_77673
atgggcaaaaacaacaaacgcaagcgcaagccgactcctccgtcagaggactttggcgactcggaatactcagaggaggagttctcctctgagtccgagggatctccggctcccgtctctcccccagcgtcgtccgatgactcggacgactctcaggggattgccgcggaggtctggacttacatccgggccgtcgagcgctccgggctcgagggctcggatgagtcggagtactcctcggacgaggaggactcggacgacagcggcgaggacgaggacgacgacagcgacgacgacgacgatggcgacggtgacagcggtggcagcggcaggggcagcaacagcggcggcggcaacggcggcagcagcaggggcagcggcggcggcggcagcagcaagggcagcaacaaggccagtggctaa

SEQ ID NO: 34299 - DNA, 234 bp, Zea mays
  Peptide Sequence Number=SeqID_77674
atgtacaaggattctagaagatcacgagttgatagttccattatcaaaattatggatgtagtgatgtggatcttacaggaaggagctgatggcgatgatggccacgagcctagcggccttctccctgaagacgacactagtgaagccacacttgtggaggttgcacccgccgcggcgggcatggagcggggcatcgcgatttcacgagtgtggcgtcgtctctggttggcctaa

SEQ ID NO: 34300 - DNA, 603 bp, Zea mays
  Peptide Sequence Number=SeqID_77675
atgaaacttatatatgatcttctaaatgaaggtatggctggacgcgttcaagacttcatcacgcttcgcatcggttcgctttggctggatgtgccactgggacctctccatgctagcgatagtgctggctccctgcgtaccacagctgcatcaccagccatgattgggcttgagcaggaggtcaactccaaacctcatgatggtttcattccagttgtgtctaaagctgcaaagcgaagggcaaggaggatggctgcgaggtcaagagtgtcagtctcccaagaacaccctaacaaggtgcacaaggttgcgtcctccagctcaggtcctcctggtttctccaagccgaaggtcaataaatctgtcggccacaagacagaagcaaggtttcgtcagactacccttggggagtggcctgtctgcatcaagaagatgcctccaaccaagtttgtacagccaagggcttcctctacatcaactccaaaagagacaactcctactttgacacctcccaatatgctgggggtgcggtcattcaaacttgctccaagcatacttggggcaccaccaacaaaaacagtgacaataacaaaatccaattag

SEQ ID NO: 34301 - DNA, 288 bp, Zea mays
  Peptide Sequence Number=SeqID_77676
atggccaatcaagctagatacatcgacggcgtcgccaatgggagtctcccccactacaacgaaccgcaacccatcgtgctcaaagcgatgaacaacgtggaggcgcttcccgacaaggtggcccttaagaatgataatgatgatttgaatgctaggatagaaaagttgactgttgctagttcatctttagagcattattcaatttgcaatagatgcaaggatgttgatattgattcatgtgttgcaaatgttgctctgatcgctgacttgaatgctagaattgaataa

SEQ ID NO: 34302 - DNA, 495 bp, Zea mays
  Peptide Sequence Number=SeqID_77677
atggcgtcacccgaatccatggtagagctccgccggagacaagggcttgggcacggccaggggccctggggcgctgggaagggcttaggtgggttcggggcactgcagcgaacacaaccatgggcacgacaccggtgcagagacactggagggtggcgatccgcggcgagggggctcggcggcggcgcaactcaactccggcgagcaatcgcgcacacccaagggcagggaaggagaaatcaggggcagggcgaggttggttacctcaagagagggctctcggaccttcgaacgagagaaatagagggggaaggggcaaaccgaggggcatcctgggttgctgacgttgaggcgaagctcaccggggcaacagacacgacagggactcaacaacgaccacggaacaagcacgagaccacggcatacgacggcggggcttccctggtgtgcgcacggtgcgaggcgagtgttggagctctgcgagtgcgcgagtga

SEQ ID NO: 34303 - DNA, 192 bp, Zea mays
  Peptide Sequence Number=SeqID_77678
atggtgtacgtggattcctgggacgagttcgtggagcggtccgtgcagctcttccgcggcgaccccaacgccacccgctacgtgatgaagtaccggcactgcgaggggaagctcgtgctcaaggtcaccgacgaccgcgaggtactaccttgtccaagctgtatttactcagagcagattagattggcttag

SEQ ID NO: 34304 - DNA, 366 bp, Zea mays
  Peptide Sequence Number=SeqID_77679
atggatgggagtgccgccggtaatgaacgggaccgactcgccgccgggagggagctcgggcagagaagaccgtcgggccaggagctccaaccaatcagcgatgacagggtcgaggaccagggagaggagcgccgaggagcaccgtcggacaagactacagaggagctccagcgccgggagagaagagcatcgggagaggaggtccagcgtcgatctgttctaagaaacgaggcagtgagatggactaccgtaacagcgactgcgcgtggacatattaacgggctggaccgacacggctaccaggccgacgtgccatgcctgagccgcggctgcggcacgcgggccagtcgcccacaacccgattag

SEQ ID NO: 34305 - DNA, 309 bp, Zea mays
  Peptide Sequence Number=SeqID_77680
atggtgtccgccccgcctcaactcaatctgcctccccaggagctgccattgggccctagcctcttgtggagcgagcagcccgcgcggcgaaaagataaggaaacctatgggggtaacgaggcgaccacaccaagtggtgggacgacaatgccccacgatgacaaaggcccaccattgcctggtttatggcaggggcacaacaccgcgtttccccaggcgagccaaaatgttgcagctactgtcgcgcttctggacaagctccccaaggcggaaacaccaagcgaatggaagacccaccaggagatctga

SEQ ID NO: 34306 - DNA, 1437 bp, Zea mays
  Peptide Sequence Number=SeqID_77681
atggagcgaatatttgactatgccaaacctattagggcaactgtcagtgtttcctcttatcatgtgcttcaagacagccatgtctttgatcttttggatcctaagaacaacgaggtccttgtgcgagaggatgctgatggaaggactcatctgaagggcctctctatgaatggcaaagaatcctctgtatcaaaaatgcattttcttgagttggcagaccatatcaatgataagcaaaagagccatggtgaaagatttgttcaacaaaattccaagaagtccttatatgccgtgatggatgttgtgcaagctctaaacagccaccagagcttcataccctatagaaaaagcaaaataacccatattttgcaagactctttatccaagacaggtggtgctttattaatagcatgtttggatgaagtctcatgccaagatgcaatctctactctaagcttggcttcacgctcaagccaagtggtcaatgaacaacgatctgaaacaagcacacattcagcaaaaaagactgtaaacttagtctctgcttcgattaatttgaaacactctggtgctaagtctattctaagggaaagtaccactaaaattgacattttattgaccaggaacttctttattccaactactaattcatcaaaggaagataagaaaacttttgtgacaactgcggtaaggaaacatgagagcgatatgcaggagaatcacaatggcacaaaaaatattgtagtatcatctgaaatgcaagtagtaccttgcagcatgaaagagatagtatcaagtgacatgaaagaagaggatcattcctctccaggttttcttgcagagaacttatttgctgacttgggctttacatgttcatctaatgcagctgataaaacaactgaggaaaatccagccaccgttctccaatcttctccgaagataagcgaccaattgagaaagatatcaaattcactgaagcttcttaattctatggcacctagtatagtaaaacagaaaacagatatagttcgtccacaatcctttgacttagttgaagcagaaccaaaaactcctgaggtcaacttaaaactttggcatgctcaagatgcacaagaatcacttaaggctcgtagcacagggattaagaaatctctagctaaggagtgtttgttgtttctaaacagcgctaataaggagcagttaaaaagtttaaagggtattggagagaaaagggcaaactatatacttgagcttcgagaggagtcaccattgaaagagattgatgatcttaaaagcataattgggatgagcaaaagagaggtagatcgacaagatgatgtcaaagttgatttcggactcggagatgaacgagtaagggttgtattgatctcttcccacttaggaaaggaggagaagatcgctgtggaatccagatga

SEQ ID NO: 34307 - DNA, 462 bp, Zea mays
  Peptide Sequence Number=SeqID_77682
atgtccggtgcaccagccacgtcaccaaggtcgttgggttctgaccgttggagctctgtcttctgggcccgcctggatgtctggtggcacaccggacatgtgaccgttggcgcgaagtattcgttgctctgctggttcaccggacagtccggtgtacaccggacatgtccgatgaattatagcggagcaaattcccaaggttggcgagttccagagccgctcttccttggagcaccggacactgtccggtgtacactggacagtccggtgaattatagcggagcgcctctggattttcccgaaggtgaggagttcagcgtgaagtcccctggtgcaccggacactgtccggtggcacaccggacagtccggtgcgccagaccagggcacacttcggttatcccctgctctctttgttgaacccaattcttggtctttttattggctaagtgtgaacctttga

SEQ ID NO: 34308 - DNA, 246 bp, Zea mays
  Peptide Sequence Number=SeqID_77683
atggcggcctccgcgcctgcggcggcagcagcgagggagagtgacctggaggcggtgggcgagccgatgagccccgcggggcggctgttccgcgagacgcacttcaactgctacatcgtggccgtgatcgggctgggcgcggcggtggacgtcgcggcggcgcgcgcggggctggaagtcacgctcgtccgccacccacgcttctccagcgtccagtggtgcaaaaaatcaagtagaggtagttga

SEQ ID NO: 34309 - DNA, 645 bp, Zea mays
  Peptide Sequence Number=SeqID_77684
atgaggaaaaaacacggctccgtgccaaaattacatacatgtttaggcctcgacagccacaatgaacaaaaacattggcattcaaagtgccactacaaacggaactctggttccgtccccgcgggtatgaacaacctcgagcctgcggggcgacgaacaccgggggacccgccagcgacctctgcagcagcagccatggtcccaggttggacgcagccgccggagggctctcattcgcgttcccgctcaagggacgcgaaccagctattaaagccaaagagcgggccgctcccaagcacaccggcaggcggcgcctctggcaggagaagcaggcgacgcttcgccttcgccataataaccgtgccaaaaaagggcccgggaaagggggataccccgaaaaggatccttccccgtgaaggaaccaggctccgagcctccctactgatcagaggttcgaaggctggccccccggaagggttcgacagccgcctcagatcgtgtgggccctacacccactactggtcagaggttcgaaggccggcccctcggaagggttccacggccgcctcaggctactcgggctccgcgcccattactgatcaggggttcgaaggctggcccccgaagggttcacagccgccttag

SEQ ID NO: 34310 - DNA, 57 bp, Zea mays
  Peptide Sequence Number=SeqID_77685
atggaggacgcggatggaagtttgtttctggcgtacgggtcagacgcatatgattag

SEQ ID NO: 34311 - DNA, 696 bp, Zea mays
  Peptide Sequence Number=SeqID_77686
atggtgctggaggtgggcaccgccgtgggaatacgaaccacctccacttgggctgcaggtccagccgcccggcgcagatcacggggccaggtcgtctccttcgccctcgctcccgcgtcgtcccgccgggtccggcaccgttgccgcgcgatgcaacagcacgaggaggagcaggagcggccgccgaccgtccgcgcggtcaccatccccttcgccgacctcagggtaatcttccccggtgttgagtgttgccgtctcgggagggagggaatgattgcaaaccttcctgaagaggtgaagaaacagcttgaagatccagatagcagatataactttgggtggagtcatgggaaggagaaactcgagtccgggaaacttgacacatttaaaggttccttttatgcgaaccctgttttggatgtccctactactgatgatgtgcttgtaagtaggtatccatcatattgccgaccaaatatatggccaaacgataatcttcctgagcttgagatagcatttaaagatcttgggaagctgatgatggaagttggtttgatgttggctcatcattgtgatcgctatgtaatgaggcaaggagtagggtcatatgatggtgacagtcttgagcagacaattgctcgttcaaggtgtcacaagggtcgtctgttgtactatttcccacgacagtttaggtga

SEQ ID NO: 34312 - DNA, 3166 bp, Zea mays
  Peptide Sequence Number=SeqID_77687
atggagcgctgcagtagcaccatggcctcgagcgaggactcgaactcggggtccagatctggagccaggtcagctggtggaggcgcaggaggcagggcgagcgcgtgcttgtggccggcggccccgacgttgggtgagggaggaggcgcggtgcacgacgacggtgagcttgggcgcggtgggggcgaaaactgtcgcgacggaaccagcgcctcatctcctttcccccctgatacgacgcttcctctcccccttctgggcagcgacgccttggggagccgccgccgcacgccctggcaccagcgcccccggtgcctggagcagtgcagggaggaggagcgggagaagcggcaagagcggagcaggcacgaggccgacgaccgcagcggcgagggctcgtcggaggatgagcgcgagcgcgagcaaggagaaggaggagaagcagaaggaccggcggtcgagaaggaggagaagcagaaggaccggcggtcgtacgagcagtccggctcctgcaagccgccgacggcgtgccagtacagcggaggcatgccagtcggggcgcaggacgaggactcctaccggtggaacgccccggacatcctctgctaccggtgcgactcgtgcagggccggcgtgatggagcaggtgcgccaagactggcacaagatctttgtgctcgacgtcgccgtgctcgccgctctcgtctgcatctgctcatgcgggtgttgtgccttcaggaacgctcgccactcccggtcccagtacccatacggggacagaagtggttccataaccagcgcctcatcccctttcccccctgatacgacgcttcatctcccccttctgggcagcgacgccttgaggagccgccgccgcacgctccgctcctccctgcacctcatccccttcccctgctccccctcacacgacgtgcggcggtgcgaggaccggccctggcaccagcgcccccggtgcctggagcagtgcagggaggaggagcgggagaagcggcaagagcggagcaggcacgaggccgacgaccgcagcggcgagggctcgtcggaggatgagcgcgagcgcgagcaggagaaggaggagaagcagaaggaccggcggtccggaggcatgccagtcggggcgcaggacgaggactcctaccggtggaacgccccggacatcctctgctaccggtgcgactcgtgcagggccggcgtgatggagcaggtgcgccaagactggcacaagatctttgtgctcgacgtcgccgtgctcgccgctctcgtctgcatctgctcatgcgggtgttgtgccttcaggaacgctcgccactcccggtcccagtacccatacggggtaaaccaaacgtccaagataaacccacgctgggactactggccacagctcgagaccaacgaccgacgcctagacgcggctgggcggtcggcctcacctcgttcccccgcctcccttcttcctgctccgcgtctcgatctcgactcccccgccgcgtcgcgcgacccggccagatctcgcccaccctgcgccgcggccatggataacttgatcaccctcgtcaacaagctgcagagggcttgcacggctctcggagaccacggagaggagagcgccctcccgacgctctgggactcgctgccggctatcgccgtcgttggaggacaggtgcccttcttcccttcccgggcacgttttttcgcgttggttctgattggatctggtgctgtcgccccagcttcgtgggtgtggatctcgcgggttgctggtggaaccgcgaggagctctggtaaatcatctgtgttggagagcgtggttgggaaggatttcctaccgaggggttcaggcattgtaacccggcggccgctggtgctgcagctccacagaattgatggtgacagggaatatgcagagttcatgcatcttccgagaaagagatttacagattttgctgctgtgagaaaggagatagctgatgaaactgaccgagaaacaggccgttcaaagcaaatatcaactgtccctatccatttaagcatattttctccccatgttgtgaatcttactcttattgatcttcctgggcttactaaagtagcagttgatggccaaccggagagtattgtacatgacattgaaaacatggttcgctcatatattgaaaagccaaattgtatcattctggctgtgtccccagccaatcaggaccttgctacttctgatgcaatcaagatttcacgggaagttgatcccaaaggtgaaaggacctttggtgtgctcacaaaaattgatctgatggataagggtaccgatgctgttgatatactggaaggaagatcttaccgtctccaaacaccatgggttggtgttgttaatcgatcccaacaagacatcaacaagaatgtggacatgattgctgctaggcgtagagagcgagagtattttgcatctacaccagaatataagcacatggcttctaggatgggatctgaatatttaggaaagatgctttcaaagcatttggaacaagtgatcaaatcaaggattccggggatccaatctcttataacaaagacaattgcagagctggaaactgaacttaatcgtcttggaaaacccattgctaatgatgctggggggaagctgtacacgatcatggaaatatgccgtatgtttgatggtatttacaaagagcatctggatggagtgcgccctggcggagagaaagtttaccatgtcttcgacaatcaatttcctgtagctattaaacgattgcagtttgataaacaactctctatggaaaatgtgaggaagcttataacagaggctgatggataccagcctcacttgatagctccagaacaaggatatagacgccttatagaatcttgtcttattagtatcagaggtcctgctgaggcggctgttgacgcggtccatgcaattctcaaggaccttgtccgcaaggctatcaatgaaacacatgaactgaagcagtttcccacccttcgtgtggaagtaggcaatgcagcttttgagtcattggatagaatgagggatgaaagcaagaaaaatacattaaagctagttgacatggaatgcagctacttgacagtagatttcttcaggaagcttcctcaggatgttgagaagg

SEQ ID NO: 34313 - DNA, 96 bp, Zea mays
  Peptide Sequence Number=SeqID_77688
atggctaccggggcggagtactcgcgcaagcgctacttcgtgctcgaggacgccgcgcttcgctgcttcaagtctgcgccgtcctccaagggcgag

SEQ ID NO: 34314 - DNA, 270 bp, Zea mays
  Peptide Sequence Number=SeqID_77689
atggctaccgggacggagtactcgcgcaagcgctacttcgtgctcgaggacgccgcgcttcgctgcttcaagtctgcgccgtcctccaagggcgagtatctgatggtgaaacctcgaaacaatcttagaacagttcaatatggccagcagctccagcagggtgagaaagatcgtcatcaggttctaaaggatttctcaaagttgcttgatgatcaggtgacatccccttccacagcggctgcaatgttgggcttatggatgagggaatag

SEQ ID NO: 34315 - DNA, 150 bp, Zea mays
  Peptide Sequence Number=SeqID_77690
atggccgagcgagccaggtccgcggcagcctggctgtgcatcgcagagaacacttttcaacgtaagactatctccaacagtttacccatctccataactatatccaaactctactatgtgaacagtgtactctacaatgtaaaacggtaa

SEQ ID NO: 34316 - DNA, 219 bp, Zea mays
  Peptide Sequence Number=SeqID_77691
atggcgcacagcgccgccgaggggacgccacggcggggcggtaccggcgaggacgctggccaaggggaggaggacggagcggtgccaaacttccctgtgcggcaggatggcagaggggaggacggaggcgacgcccggaggggtaccctcaaggctcctaattctcagctggtaacccccatcagcataaagctgcaaaggcctgatgggtgcgactaa

SEQ ID NO: 34317 - DNA, 174 bp, Zea mays
  Peptide Sequence Number=SeqID_77692
atgagccaatggtcaggtggaaagagccaacagaatgatactagaagcactcagaaaaaagaagcagtgcagcctactgatctaatcttcggggggccgaggttgactttcgaaaacatagctgaggcagaagcaactaggctagaagacattgatgtgctggaggaagaatga

SEQ ID NO: 34318 - DNA, 165 bp, Zea mays
  Peptide Sequence Number=SeqID_77693
atgggacgacctcgtcatgggccttcgtccagcgacgcgtgggacgaaggcgaggctggtgaaggcatcgagcgaagggtggcgtcttcgccttcgccccaacacagtgccactgtgtaccgagtatggaaattcttgcacagtggctcctgtgtttctgtttga

SEQ ID NO: 34319 - DNA, 312 bp, Zea mays
  Peptide Sequence Number=SeqID_77694
atggcgggtggaaatctggagagacaggggcagccgaaaggaaccaacgaggcactggcttaccaggatgtggcgggaggcagcactggaggcggcgctaaagccatccaagccatggagccagacacgcgacagctgacggcacctgcagccggctggctccgcgtagccgaagttcgcctcctccgcaaggctggtgaacatccttctcctccaaatgctggaggaagaagtgggtcaccagcccatgcggaaggcaggaccccaactcggctcgccttccgccccagtgaggatgatgaacatccttga

SEQ ID NO: 34320 - DNA, 942 bp, Zea mays
  Peptide Sequence Number=SeqID_77695
atgaccactggcgggagactgcagccgggctacatgatgaaaatccttgaagtcgagcgatggcagaagagcgtcaacccccacaaggtcgcgctcctccaacaacagcaagaagaagacaagatcggcagcgccaccgcgcaggaaatgaagagcgaaaactccccagcggtgagaccgctggagggggcggccctgacatggatccctccagcgaacaccggcgcgccccatgcagaagcccggaaggcagaagggcgcgatgaatgcaagagaagcgagacatggctatttccctgctcatgcccgaagcgtcacgggcaaggtctcccccgatgcgcaccagggttcccatcctatgacatgggggccaggtcccacgcgtcatacaagctggcccgaagcgcgaagaaggtgaatcgtcgcacagggagcgtgcaaccgccctgcggttatttgccctcccatcttcgccgcaaccagcggtcaagaaggcgaaccgccatacgaggggcatgcaaccgccttgtggttattcgcccttccaccttcaccgcaaccagcagacaaggaggcgaaccgccgcataaggagcgtgcaaccgccccgcggttgtgcgcccccttggcttcgaccgatggtccaacctctggcatggggggcccaggcccacatgtcatacacccggtgcgctggtttctgtgtgcagaaaaatcgcaccaccactcgcgccaataccgcgcctcctcgaggccgttgcagaaggctgaggagataaattttcaaaaccaatgcagcgactcgaggcaccccgcgcatggcccaacaaaggcattgagtgcagaggtcacgggccagtcagccgcggggataggcgtggaagtcggcgtgaccatgggcgggccggcagtaactgcatcaacaggcacgcaggagcagtga

SEQ ID NO: 34321 - DNA, 345 bp, Zea mays
  Peptide Sequence Number=SeqID_77696
atgaacactgttggtcaccgtattcctagccatcaccaccgctggctggacatcgcgcgccgccgccatgggaccgtgtccctgttgccgttcgaagcgcgacctcgcccccgggcgccgccgcacatccgccccttctcgtggacgaagctcacccctgcgctgatattggtaataaccctctcaacttgctcactttcaacctcacttcgagtagagcactgcgaatgtgagaatagggcgtctggggcgggatggcgtgtcgccggtgaggtttccgtcgtgggggccgacaccaccgtggctggtcatatccggattggagagataaccgccagccattga

SEQ ID NO: 34322 - DNA, 387 bp, Zea mays
  Peptide Sequence Number=SeqID_77697
atggccgcctcaatgcgtgcgccattacaaagaggtcctcgcccccatcctcctacggggggcgacaacgaggccattaaagccaaagagttggaggctcggtggcaggtggtgctggtggtctcgccagcggaggcaaccacctctgcaacgggcctcaccagcggcggcaaccacctcagcaccgacgatagcggccaactctgcaccggtggcttaccagcaacgacggccgcctcaccgcgtgcagaaaggtcctcgcccctatcctcctacgggggtgaggacaagaccatccaagaacgcggccgccacctccgcggcggtctctttagcaagaatccagagccgaaggggtatgacgccatctcggccgtccgattatag

SEQ ID NO: 34323 - DNA, 363 bp, Zea mays
  Peptide Sequence Number=SeqID_77698
atgtggccggaccgtccgacattatattcggactgtccggcgtcatacgcggacggtctgaatgggttatctagggtttgcacgctgctcctggcgctcctcgaacaggagatgttcttcagccggcaaggtttcccatgtcggcgtgatgatattgctggtggaaacttcagagctatatttgaatcggccattgagggaccgatctcgacaggtctatatgaaattgtcctcagcggagtcgccaaaagtatgttgacacctttttcggacgccaatcactcaacacgaaccgtggcagtgctctctgcacagggaccgaaaggtccgcggcctggcgcagggctaaggtttcctgcctga

SEQ ID NO: 34324 - DNA, 330 bp, Zea mays
  Peptide Sequence Number=SeqID_77699
atggcaagtaaagatattgttatggccattgcagcgaacaaaagtgatttggtcagattgaagaatatagacactcaagatgcagcaagttatgcagaaagtattgcgacaaatctctttgttacatccgccaaaacagggactggaatcgatgatgtcttcagtgatatagccaaacgattattagagaagagaaaaaacagcgctgatgcgttgtcaccacctcagccaaagaagggaatcctgattgtcgatgatgagcctgagaaagaacctccacctaagggcttgttcggtataacattgcaaaaaccttcgtgctatttgtaa

SEQ ID NO: 34325 - DNA, 246 bp, Zea mays
  Peptide Sequence Number=SeqID_77700
atggcgccgtgcacttgggttcgcctgtctcagttaccagaggagcctaatcccatcgtcgctcgatggctctgggtgcggatgaatgctagctccatgttccgtcactttttgtttgtgcggttcttcactgactttgagtctagtcttggcgttctaactaaagaccgtcatgttgcgagtatacatgcaggtgttagagtagccgttcctcgtgcatgccttgcatattgctcatcatattaa

SEQ ID NO: 34326 - DNA, 501 bp, Zea mays
  Peptide Sequence Number=SeqID_77701
atggcgctctcggggatgcgagggctcttggtcttcatcagcgacatacgcaactgccacaataaggagcaggagcacctccgcgtcgagagtggacaccacacttcacccattccttctcggcgctcgcccaggaagactatagccaggcactgtgttcagagaaccaatcatctgcaaaaatgtcccatagcttgttgtagatatggaaggaagaccacaatcatagagggaaaagaagagcaagttgagctggaggtgttcaacttcactggtgtaggaggagttgccttatcaatgtacaacactgacgaggttcaagtatctccagtttcttgttttaccatatccaatccaatttgtgcatgggcctccgacgatgccacggtgatcaaggtagacatcgtcaatagccatgacacgctgctcgccgtcgtccaggtcatcgccgacctcaacctaataatctggaaggcatacttctcctctgatggcagctga

SEQ ID NO: 34327 - DNA, 411 bp, Zea mays
  Peptide Sequence Number=SeqID_77702
atggagagttggggctcggtcgtcgcgccttccatggagagctggggctggatcggcatggtaaggcgaggacgtgttgattgcgggagcgaggagagtggatccacgtggtgggatagtggatcgtgccttccatggagagctggggctcggttgtcggggtgtccaaggcgttcgggtctaagatctacgtcgatagggagaaaaactctgactaccaccagaggctggcgcacgtcgcgccggagatcctcgtcgccgacgacgccgcgccctcacccgcttccacgtcctgccgttcccgtggctgtcggagcgggccatgagatcctcacgcaggcgccgcgccgcgcgccagctggagccctcatcatcaggcctcctcgcagtgtcgcgctccacagctcatga

SEQ ID NO: 34328 - DNA, 177 bp, Zea mays
  Peptide Sequence Number=SeqID_77703
atggggacgttggaggctggagataatcggaatcacccagactggaacaagattgcagagtttctggatgatgttgctagaaggatgcggcaagaaggccatgatcctaagaaaaagtatgctctgatgggtgccgatgatgcagtgcatgacgaggcactatgtgggcacaactga

SEQ ID NO: 34329 - DNA, 360 bp, Zea mays
  Peptide Sequence Number=SeqID_77704
atgtcgcagtctttcggcaacccccggtcacacagccctgggttccgctggaggaacacggcgggaagctcggtgatcagagatggcggcatgtggctggagagctggttgtacagtgggatcgtgacagagagtgcgttgcgggaggtgttgatgatgctcatcgcgggtggagaaacggtacatggtgtggaccaggctgatgctctgaggtatcccgccggagaagttgttgtcaatctgaacctgctcgagccggagaagattggtcagggtacatgcagcaatcaacctctgaatcagttacctccccttcatcagagacagtgtagaatggtagatctccaagacattgtttaa

SEQ ID NO: 34330 - DNA, 780 bp, Zea mays
  Peptide Sequence Number=SeqID_77705
gttcagattgacaacaacttctccggcgggatacctcagagcatcagcctggtccacaccatgtaccgtttctccacctccctcaacgagctcaacggcagcttgccaaacaacctctgcatctcacccgcgatgagcatcatcaacacctcccgcaacgcactctctgtcacgatcccactgtacaaccagctctccagccacatgccgccatctctgatcaccgagcttcccgccgtgttcctccagcggaacccagggctccccgacgacaaccctccccgctgtcttctccccggtgaggatctgctctcttccttccctctgctctcgctgtcccaaactctcgccctcgatctcgctcctctccgctctcgcaccgcgacgctgcgactccgctcccgtcctcgtgctcactgctacagagtcggatctagttggggtcatcacaggtcgtcgggccctctgtcgcggttacaggagggtgaagggctcgtgcttccacttcctctgctccatccggcaccgatgtcggcaggtcagggcttcctgctggtggggtcggggcctaggatcaggtggtgttggaggccatatgcgtgcgcggtgcgcgccagccatcggcaccggtcggtgcgccgcgacgtgtggacgcgtgatctcgaagacctcacgcatgagacacacacgcatctgatgtggatcgcggcagctaaaccatatagaaacaatccaatcacgaagaggttattgggattcttctccgattcatttccataa

SEQ ID NO: 34331 - DNA, 993 bp, Zea mays
  Peptide Sequence Number=SeqID_77706
atggcggctttaggtcgcctttcacgtttgcttagttctaccgtccaccgctctggaggccttgtgcgcgtcttctccatgttggtcgaggtcgtcgatgtcttcgatctgtacctgccacgtgacgcccattgctactacatctttggaaagcatgggcctctaaagttatcctctaccaaagtgatcagcattcccgagtattttaaggaagtgtatttgctagacaggtcacataggaaccgtctcattgaagatattgacgatgacttcccgttcttaattcatgatagggtttgcaagctactgagatctggattactctcttcgtatttcagcaaaacctatggcttatcaattcctgacactgatttcattaaagaaaaccttagtgtgctgcctgagttggatttactggtattcagatcactgaacatgagtcactctgagtctgaaatagataattgctacaagtcattcgtgaagctcttcaaggctcttgtaggtatgtatgctgactatcgtgtgatatatggtccagcttttttccccaagcttttgatctctataatgtactgcgaagtgcatcgacttttgagggagcagtgcccagcacgtggacagggtgctgcagccaatgcaatcatggtgacgattgaagagaaaatttttgacttcatgaagtcatgcagtacaaatgctctgctaattagctattctggtgctcatggtgagagggcaaagaagcacattgtggtcagtgaagatggaggagatgagacactgacatctgaagttagtgatgacactaaagatttcaaagcgtcgaatgtctcactgaaagttagaaattttatgggcaacaaggagctcagtgttgaggccaaaagaactaccgcagaaggaaatgttgagattgttccaggagatgagctgacagctactctattggacgttgtgaatactattcagcgcactactggatattattag

SEQ ID NO: 34332 - DNA, 783 bp, Zea mays
  Peptide Sequence Number=SeqID_77707
atggtgacgattgaagagaaaatctttgacttaataaagtcatgcagtacaaatgctctgctaattagctattctggtgctcatggtgagagggcaaagaagcacattgtgggcagtgaagatggaagtgatgagacgctgatatatgaagttagtgatgacactaaagatctcaaagcgtcgaatgtcccactgaaagttagaaattttatgggcaacaaagagctcagtgatgagaccaaaagtactaccgcagaaggaaacgttgagattgttccaggagatgagctgacaactactcttttggacgctgtgaatactattcagcgcactactggatatggcttcttaagctgctacaagagaaagatatgcacattccaaactctcgccctcgatctcgctcctctccgctctcgcatcatgacgctgcgactccgctcccgtcctcgtgctcactgctacggagtcagatccagttggggtcatcaaggccgccggaccctccgtcgcggttacaggagggtgatgggaagggctcgtgcttccacttcctctgctccatccggcaccgatggcggcaggtcagggcttcctgctggtggcgttggcgatcctgacagtgcaggggcgttcatgagcctgaggtcggggcctaggatcaggtggtgttggaggccagatgcgtgcgcggtgcgcgccagccatcggcgccggtcggtgcgccgcgacgtgtggacgcgtgatctcggaagacctcacgcatgggacacacacatctga

SEQ ID NO: 34333 - DNA, 393 bp, Zea mays
  Peptide Sequence Number=SeqID_77708
atggcggctttaggtcgcctttcacgtttgcttagttctaccgtccaccgctctggaggccttgtgcgcgccttctccatgttggccgaggtcgtcgatgttgccgatgtctccgatctgtacctcccacgtgacgctcattgctactacatctttggaaagcatgagcttctgaagttatcctctaccagagtaatcagcattacagagtatttcaaagaagtgtctttactggacagggcacctaggaaccgtctcgttgaagatattgacgataacctcccgtttttaatccatgatagggttcgcaagctactgagatctagattacttcctttgtatttcagcaagacctgtggcttatcgattcctgacaccgatttcattgaataa

SEQ ID NO: 34334 - DNA, 336 bp, Zea mays
  Peptide Sequence Number=SeqID_77709
atgggctggtcgcctgagcgcgctatgtatcagctcatcgaccggcggaaaggccgccgggccctccgtcgcggttacaggagggtgatgggaagggctcgtgcttccacatcctctgctccatccgacaccgacggcggcaggtcagggtctgacagtgcaggggcgttcatgagcctggggtcggggcctagatcaggtggtgttggaggccagatgcgtgcgcggtgcgcgccagccatcggcaccggtcggtgcgccgcgacgtgtggacgcgtgatctcggaagacctcacgcatgagacacacgcatctgatgtggatcgtgacagctaa

SEQ ID NO: 34335 - DNA, 573 bp, Zea mays
  Peptide Sequence Number=SeqID_77710
atggcggcgcgaagggcaggaagggcggttctctcttctctggctagatctctcgggttgcgaaaacctaaggggcaggcaggaagcagagcaaagaaccatcaccggaccctctccggggtatataaagaccaaggcgaagacagttccaacgttccgcccggaccggacgcgggattcaaaaacgcgaagcgaaacggccgctcctcgaacggctcgcgcacgcgcaacggcagccccgccaactactcgccccgtcgcattaactccgcaattggacaggtggcacttctggcaggagcaacgggcgacgctttcgccttcgccgaaataaccgcgccaaaaaagggaccgggaaagggggataccccgaaagggatccttccccgtgaaggaaccaggctccgagcctccttactgatcagaggttcgaaggctggccccccgaagggttcaacagccgcctcagatcgcgtgggcccgacacccactactggtcagaggttcgaaggccggccccccgaagggttccacggccgcctcaggctactcgggctccgcgcccattactga

SEQ ID NO: 34336 - DNA, 684 bp, Zea mays
  Peptide Sequence Number=SeqID_77711
atggatgaggaagaggacgacacggccaccatcgtcgtcgcttccgcttcaacggtcaggagaggagcggacggatctccagtgcttgggcttgggctgcgctggtggggagcggtcgtcctctcgatcccccattggtggagcatctcgatcccaggctgcctgcgtcgaggccccagagctacgtccaccggatcaggatcccgcgggagcgagtggcgcggcggtggcgacgacgttgggggaggggcggtggaggcaaagggaggaggggaggcggagagaggtcgcgtcggcggtggaggggctgaatttggagggtgtgtacggcctatggggcccacatgtaggaggcgtatagacagaacaggtcccacggttcagaggcagaacggccgttggcagaacatgtcagaggcagaacggcagactactattgcttacttaataagtagtagagattacatggagaagctagcgacgccggcgaccttttacttcactaactatgttagagtagagcgcgtgtctttggctgtgtgcgtattagagaggagcctatcgacaaacattggttcacgtgtcagtcctctctcggtttatgtacgcggtataaaagaggccataaccatagaagttgttgcgccttcaatcagaaaacgcgtgaaaaagattctagattaa

SEQ ID NO: 34337 - DNA, 594 bp, Zea mays
  Peptide Sequence Number=SeqID_77712
atggcactgggcgacggcgcggaggtggcgaacttcgtgctgccagatgagctcctggcggcgctgccgcgggacccctacgagcagctggatctggcacgccgcatcaccacgctggcggtgtccgggagggtgtccggcctggagcggaaggtggtgcgcctgcggtcggaggtcacggggaaggaccgcgagaacgccgagctccgggagcgagtgatgctgctcgataccgcgctgcaggagaccaacgccaggctcggcgccgcgctcgaggacaatgtgggtcgtgccgtggccgtgccgggagctggccccgctcaatctgttcgcatctggcatatgcgtccgcttggatttctgaacctggcgattccgttgtggtgcagattaagctcagcaaggagtgagactcgctggcgcagacgtccaagaagctggcgcgagacctgccccgccccaatccccatcgcccccaagacagatattcgctgccaccccaatcccaatcctcggcggcggcgctctccaatccaacaagtggctctccaatccccatcctgttttggtgaggaatcttcgtcgggattgtag

SEQ ID NO: 34338 - DNA, 453 bp, Zea mays
  Peptide Sequence Number=SeqID_77713
atggattggaggaaaacagggcatattcgactttcagagctcacaaccgacaaaagggggagagattctcggagaaaacgagcaattggatctgatcggatcgtcactccatctccacgccagtggcgtctcaggggacgagggcacgcggacaccgatggggcgagggatagagggacagggcggtccaaaagggggtacctcggctcggatggctgtggcgcgcctaagaaggtcgcctccgccgtgagatcgatccactgccctgagatcatgatgagcagcagcgatgacaggacaacgagcatgtcttttctgaaaccgctaacagaatgcatcacaaagtaccgtagagaagtttgcaagattttggaggctgcctgtgattatttcctcaaatctgaggcaaatagccatgacagtgatgagattgtgatggcgtcttcaccatga

SEQ ID NO: 34339 - DNA, 504 bp, Zea mays
  Peptide Sequence Number=SeqID_77714
atgaacctgcaccgaatccgcacccgcccccaagcccaaccggagcgccgagtggtgtcgccgcggccgccgctcccctccactcgcttcccgcgcggggcccgcccgtcgccagctgtcgcggtccacaagaccacaacaatggaaagagcgggcgcgcctccagctcggcgccctgacgtgtaccgctctttcgcggcccccccgcggcgccacgggaggccgagcaacccacgcccaccgacgtgtggggtcaggatgccgaccggcgttgccttcgcgcgggccccgtgcctgccacggcgtacatggtgtaggagcaggggggcccggagcggagaccggaggagggagacgtcgcttgcgatgtcaccggcagcatccgccgccgaaaccgccgtcgtcgtcgtcgtcgcaagcgtcccgagccagcagcagagcagccaccgcgccgcggcgccgtccgtcccgtcgtcctacgccgtctgggagaaggagcggtaa

SEQ ID NO: 34340 - DNA, 567 bp, Zea mays
  Peptide Sequence Number=SeqID_77715
atgggcttcgccaccgtcggcgccctcctcgtctccgcgcctgcctccggccccagcgacagcggcggggcgcccaggtatgttcttatgtgcatcaacttcgtgcagctatgcgagccaaagattctaccatgcacgtctacacaagatgtgaagtttatacaattccaactaacggtcaacgtcgcagctctgataatcaatgtagttgctgctgtcagttctggaaacgtgccgttgaatgctgttcagaagtatgctgacgtgatcattcctcgaggtggtgataaccgtgtagcagttgatctgattgttcaacatatccgtacaaaacttggtaatggagcatggtcttggacatttgccatttacagaaaagcaggttattaccccaacagatataagaaaattccagtgaactactccaaggcagaagcaccaagttgtcaactgaagccaactaatacattcagtaaagaaatggttcccttctttgatttggactgtatccaatctgattatagaaataaggtgtcattggaattcagtcttcagtttgacaaataa

SEQ ID NO: 34341 - DNA, 1035 bp, Zea mays
  Peptide Sequence Number=SeqID_77716
atggaggcccaggcccacgcgtcatgcaaccggcgcgccgaatgcttcgtgcatgcaactgcaccgccacttgcgccactaccgtgcctcctcgactgcggaaccaataccgcgactcgaggcgacccagcgcacgacccagcagcgccagcctggcgcgacggtcaatgcggccaaaaatgggccggcagtaatggcagtggcaggcgggcaggagcagcggccacgtcgagaagcgggcgacgcttcgccttcgccataatgaccgcgtcaaaaaagggaccgggaaagggggataccccgaaaaggatccttccccgtgaaggaaccaggctccgagcctccctactgatcagaggttcgaaggctggcccctcggaagggttcgacaggcgcctcagatcgcgtgggccctacacccactactggtcagaggttcgaaggccggtccctcggaagggttcaacggccgcctcaggctactcgggctccgcgcccactactgatcaggggttcgaaggctggcccccgaaggctcaccggagacaccatgttcggcgcccatcaagggcaacatggcgctttcccccctcctccttgcggaaaggcgacgcaggggcggctcggactcgggctaagccccggaagacggcgaattccgctccgcccgacccagggctcggacttgggctcagccccagaagacgacgaactccgttccgcccgacccagggctcggactcgggctcagccccagaagacgatgaactccgcctcgcccgaccccagggctcggactacgccccggcctcagctgacggtctccacctcgcccgacccagggactcggactcgacctcggccacggaagacagactcgacctcggcttcggaggagcttccacatcgcccaacctagggcgcagaccagccacgtcgacaggaggcgccatcatcaccctaccccgagctgactcgggccacgggggacaagaccggcgtcccatctggctcgctccgccagataggcaatga

SEQ ID NO: 34342 - DNA, 54 bp, Zea mays
  Peptide Sequence Number=SeqID_77717
atggagaacggaggtggaggctgtggggcggaggggattttgtccgtaaattag

SEQ ID NO: 34343 - DNA, 102 bp, Zea mays
  Peptide Sequence Number=SeqID_77718
atggagcctggcggagggacagctgtcggagctgttgagtccttgctgacgtcctcttgcttccgaatcttgtttcttcccaacgtgggtgtgaccgcctga

SEQ ID NO: 34344 - DNA, 660 bp, Zea mays
  Peptide Sequence Number=SeqID_77719
atgtcttcgcgctcccttatgcatcgtgtctttccaccttccaagcccccggatgggggatacccgccgtctttccgcctcgtcgttggaagaatgcaactccgtgggagttggcacctttcagccatcgttcggcttcaaggattttcatcaggcagcccggctgtacccccccccccccgccggcggtcacccaagacggtgaccaccagcccctgggtggggagaagcaagccgggctgcgatcttggtcccaccctcagcttcaaggatgttcatcatcctcgctggggtggaggccgggctgagccagagctctacctcccgcgcgggttcgtgggtcagcctctcctgcggcgttcgagggagagggcgctcactggccctgcgggcgggtcagacttcgacaacgtggggctggtcgacggcgggcgtcgtcagcctcagcgcgtcgagctcgtcggcttggctcccggtgccccgccgggaggcggctgccgcgccgtgtgcacgggaggaccgcccaagatgtcgcgagctgctagggcggcgttcgtgttctggggcggtcttgcctttgcaccggtatggcgcctccgcgcggaggtcggtgccccactcgtccgggaggatctgagtggggatctgccggagggctga

SEQ ID NO: 34345 - DNA, 525 bp, Zea mays
  Peptide Sequence Number=SeqID_77720
atggcttaccggcggcgagagaggtcccgcgaggggcggggttggcttcgagaggtcctggcggtcacagcgagggaatcggaaaatggtgcggagacttacccggtctacgttcaccggcgattgggtgaagtccggcgaccgtggactggcttctccggcgaggcaaagtctgattccttgctcgaggagcttcaccgaggcatgcacgtgcacggtctcttccgagggtcgggcgtggatgggaaaggctctgcaggccggtctaaggtggcgggggatcaagcggccgcgggcacgccgtttgcagggcaaacgccggtgatctctggctccggtgaggtcgagcgtgcgcagaggagtacggtcgacgtctatgggggatttataggcgcgggcaacggcgccggctcggctttggcgcgatgcagggcacacgggggcgcgcgcgggcgtgctctagcgagctcagagcgcgtcgaacacgtggctctttgcttctgttcgtgttctatcctctgctga

SEQ ID NO: 34346 - DNA, 252 bp, Zea mays
  Peptide Sequence Number=SeqID_77721
atgggcacgtacacagggaggagatggggagctggagcttgtggcagccatggcgagcagcaggtcaccggtctgggcatcccagcgggagtggagccgagggtgcagggcatggaggccaccatagctggggaagaacgacgatggggtggtcgccgacggaagaagacgacccaggtgccatggctgcagagagccagagaccagggcgccgcggccatggggaggaatggagaatgggctcggacctga

SEQ ID NO: 34347 - DNA, 339 bp, Zea mays
  Peptide Sequence Number=SeqID_77722
atggcttaccggagagctcggtacacgtgcggcggcggacgaccgaagtccggcgagggcgatcccgggcttccggtgaagttctaccgggtccaaggacttggaaagcttcacgggctaatggtgaagctaaccgaggggttggcgcggcttggacgcggctggagggagctggccacggcggtcgaggctcggaaagcttggcgggcggtggcgcggcgtgctcggggcaaatttccggtgatctctggcttgggcaagacttgtgagcacgcggggagggatggccgaggctcagggctgctttataggcatggcgtggtgcacaggcggccgtaa

SEQ ID NO: 34348 - DNA, 453 bp, Zea mays
  Peptide Sequence Number=SeqID_77723
atgacgcaccgccgctcctccatgccagaatgtcacgcgcatgcgcagggccacgacttctctcgcccaaccactcgcccgacatccgcatccctcatgccgctcaagtttctccctccatatgtgtccatgctgcaaaggttcacccctgccccgctatgggagatgcagcccccgacacaatggtgcgaggagtcctcgtggcgcaatgcgatgtcgatgaccacgactgtggcgcccttctggtgggcggcggggatgacctacataggctactccaacgcctgcactgcgctggcacgtgactgcccatggagcccttcaagtccgaggtcgcatcccgcgagaagatccatttctccatctccaagtgggcggacgacgagcatgagaagcccagggagtgatctactccctcccttctattttgataatgcacatcctttgatttag

SEQ ID NO: 34349 - DNA, 276 bp, Zea mays
  Peptide Sequence Number=SeqID_77724
atggagacgatctcctctgcttcacccgtggcgggtcctgggttgggctcgacgggatggtatggctctggcgtaccgtattatatagccgtggaggaggacgccaatgcgtttgttgaagcgcggggccaaaatcctcggagcaccagtgttctcggcagctttgttcccagggatgcctcagccaaggagggcccaccagtcggcgagaaagcttgcgcgcgtaggctccgtgtggctggcgcgtgggaaagggaagctgggccgcgatactag

SEQ ID NO: 34350 - DNA, 177 bp, Zea mays
  Peptide Sequence Number=SeqID_77725
atgacttatgagcccctcggcctatggcgcactcatgacctattaagcctaggcttagcacaggccatctacaggacccgcaacacgatgagccacgccaagacccaggctacggaggccaagggtcagcacgacacaaaggaggtatcttcggactcaagtcaggcatcacagtag

SEQ ID NO: 34351 - DNA, 1047 bp, Zea mays
  Peptide Sequence Number=SeqID_77726
atggctgacacccttggttcacgtccgttcgcgcacccgcgctcctccgtgcacgcccgcgcgcgctcgccgcccgtgaagcttttcaagtactcggacccggcagaagttcaccgggaagcccgggatcgccctcgcccggacttccggtcgtccgcccgccgcgcgtggaccaagctctctgggccagattcctcaccgccgacgagcatctccgcctgtgcacgcggaccggccgactccgaccatccccgacggcgaccggcgcatcgccgtgatccccgagacctcccctacgtcctcgaccacctcacaggagcaacctcgccgccgatgaattcacccacccccgccagcggaggagacactcgtttcagctctgacttcctttctcatgatggctttccttccatcttgtgggaagtgcttaactccgctggttaccctacgccccctttgtacacggtgaagttgtatgaggagcatcgggtaccttgttgccgagtcaggctgactttggaggctcatccccttcagccgggttggcgttctcttaactccaagacgattggattcagggcggacgacaccactgaagtagtagccatgaagactctgacgactttatgtggctaccatcccctggagatggtgatgcaccccttgggacttttccctgctgagaagaaggatgaccccatgtggtgtaaccgcgtgagccatgtgaaggatgtgtgggcaatgtatcctgacttggttgggagggtggaaaggctgagccagcgtatcaccaccttggagcagcatgtgaagatccgagacaacactattgatgtcttggagaaccagctccacgatgtgcagcgggaactcgaagaagctaatgaccacttggacatgcaccacttggagatggaggccaatgaagtcgaaagcgagggagaagaggctcccgacgagttaggaccagcccctggtgccaatgggactacctccacgatgcccccttcacccgcatcgagcgtcgcttccaccgctcagggttga

SEQ ID NO: 34352 - DNA, 243 bp, Zea mays
  Peptide Sequence Number=SeqID_77727
atggcgggcggaattgagctcgccggagctaagggaaagtggctggccggtgagggaacatctgctcgatggacatcgggggcgggggcggcagttgctgttgctgaggcacctcatcttgctgagcggcttgctcctgttgagcacgccttcctcctctgcgcctgttctctgacatcagcagaatgcaatcacacatcagaactgatcttgcaaatcttgcagcataagaaaagagtatag

SEQ ID NO: 34353 - DNA, 1506 bp, Zea mays
  Peptide Sequence Number=SeqID_77728
atgaacaaggaggtgcgcgacgcggtctacaagttcgaggccgacttcgagttcagcaagatggagacgatgatccacaggttccctgccggagcagggctaggcgacgggctgcgcaccaggtacccgcacatggtggcgccgaggttcgtcgccatcggcccgtaccaccacggcgagaagcgcctcgcgaagatggagggggtgaagagcgccgccgcctactacgtctgcctgcgcgccgaactcgcgccggagatggcgaggcaggcggtgctcgccgtcgcggacgaggcccgcggcaagtactacgactacgagcacgacgacggcagcagcgatggagggggaggggaagaaggtggtaaggcctgcttcgcggccatgatgttccgcgacgcctgcttcctgctgctgtacatggacgcgtacacccggtcctacggcgacacggaagacgacgtggtgaacaagtcgatgcggcgcttcctcttcgccaaccgcgagagcatcaacagcgacatcatgctgctggagaaccagctgccgtggctggtggtccaggctcttctgggcgccttcccgggggacgaagtcaagacggacatgcgccgcgcagtaggcacgttcgtcgcggccatggggaactcgttcaggatcagcgagccctgtaagctcgtgcggtacgagtgggacgacgagcgcgacccgcccgcgcacctccttgcgctcctccggcgccacaagaccgagaagccgccagaggctggcgacgacggaacgcacggcaacggcaacggcaaccacaacgcggagacgatgcgccatccactcatcaccccaccaccaccagcagcaacagcagcagcaggtcgccgcaaggacgacgacggcgacgaagagaaccccaggccgcgcccccaagcggccgcgaaggctcccgtttccgtctcagcgacttctcccgccgacctcgaacagatcggcatcaagctgacgcccagctggacggcgtcgttctcggacatgggcctggagaaagggcggctcttcgtgagccgcctcacgcttgcgccgctgtcgctgagcgacgcgcgggcggcctgcctcgtgaacatggcggcgctggaggtctgctgcgcgtccaggttcggggaccgggccggcgcggccgccgtctgctcctacctcgcgctgctcgcgttcctcatggccgggccggaggacgtgcgcaggctgcgggccctgggactccttcacgggccccgcggcgacggcgacacgctcgccttcttcagcgccgccgccgagcacctccccagctacggcaagcggttcgcgctcctcatggcggaggtccaggagtacaagcggacgaggcgcgtcaggaccgcgctgtacagatgggttcacaaccacctggccaccgtcgtcaaggtcgtgtctatcattgctatgctcgttggcctctaccagggtctcatcttcctcacgcggaacagctag

SEQ ID NO: 34354 - DNA, 2406 bp, Zea mays
  Peptide Sequence Number=SeqID_77729
atgacaagaaacggatacaagagtggcaggccattagagacagatgtggaagaaaattattatgggagagtgacatgcaagatgcacgatttggttcatgatctagcccactccatacttaaagatgaaatcttagtgacaaggttcccggaacgttgggaacgaggaacgggaacgaggaacacggagggaaccagtttgacagagagctacagatacttttctctaactaagcagtcaagaattgttccatccaaacgtccttttggaaaggcacgtgctatctatgttagcaacagtgatgacacaatatttggaagcacaatgcagaatgcgagacatctgcgtagtatcaccatggaatccatgtttgtggcaacaattcccaatgccatattccaggcgaaacatttgaaatatcttgagatttcgaggctaagatgtgaagtactcccggaagccatttcaaatttctggaccctacaagctcttcacctggcatccagtgatctccttgatttgcctgaaagctttggtaagctaactaggttaagaacattgaacctatccaagtctgagaagttcaagcgtttaccagactccatcggcgactgtcaaatgatgtcaaccattgatctttgcggttgtaacagtcttacagtgttgccagacactattggcagaattgaaaggctaagagttttgagattaagttacacaaagatcgagaggcttccatcaaacatcataacattgagaaatcttgagtgtttggatctctgcacgtgtcaagagctggtagagttgcccgaaggcattgggaatctagataggcttcaagtcttgaacctcaaaggttgtaaatcattgggaggcatgcctgtaggtgttgggcggctcagtcggctccaaaagctgggcttgtttgttgtaggtgacagtgaaaagtttgcaggaatctcagagcttgcaaatgtacctcggattagtgaggaactgagtattagaggtattccacatggtatggacccagacgatgcacagatggcatgcttgcaacaaaaaacaagcttacagagcttggacctagaatggatggcacataaggcatgtgaggtggacctggaatggatggcacatgaggcaggtgaggcgaacatggacttggaacggatggcacacgatgcaggtgaggtggacctggacctggaaaggatggcacttgaagcaggtgaggtggacttggactctgagtggatgccacttgaggcaggtgaggtggacactgagttggagcaggctgtacttgatggtctagagccaccgtcacagattaaagagttgaaaattaatgggtattctggaagccaacacgcatgctggatgcagaatcaagtgagtggcagaagaggaccacaagagcttgttcacttcccatttctgagggtggtgaagctatctgatttccctaacttgaagcatctagatgggcttgtggagctgccttgtttggaagaccttgagctgcgagcgatgccttgtctcgagagcatgagtggaggcccatttccttccttgtcgaggttagaactggacacgctgcctagtctaggagaggtgtggctggtagccgagacaacaatcctacctagtggtgaaggagcaggccacaacgtccatgacactggcacgcctggctctggacgacaggtccgtgttggtggtcgcttgtcatatctgtttatacaagactgtcccaggttgaggctcaggccgcacatgccttcgtcgttggagagcctgcacttgtccgagagcagcgagcaactgctgcaactgcctgcagaccaatgcctggggtcttcctcttcctactccaatttcagccacctgaagaagcttgggctatgggggatgacaggactaggatctggacgccggtgggagcttctgcaacacatgacggcgctcgagtcattggagatcaactcctctctggtgctaagagagctgccagaggggttgcggagcctcacgtgcctccagtcactaatcgtgttcgcgtgctcagatcttctcgtgctgcccgagtggataggggagcttgcgtccctgcagcagctgtgcatctggacctgcgatgtcttaagcagccttccccagtcactggggcagctcacatccctccagatgctctccatagaagcatgctacgagcttcaccggctgcctgaacgcataggggagctctgctctctacgcaagctcaggatcagggattgcccgaggctggcttgccttccgcaaatgtccggcctcacctcccttcaagaactcctgatcagcgactgcccaggcctcacatcccttaccgcaggggatgatgagcggcctcgcttcccttga

SEQ ID NO: 34355 - DNA, 723 bp, Zea mays
  Peptide Sequence Number=SeqID_77730
atggcatcatcatctgctgcatatacatcaatgttccagcttcaggcactcctggatggagtgcaatgcaaccttttcatcaagataaaatttgcttcatgtccagcgaagaagcagcggcaggcggcagccctgcggccgtgcgggtcggcgcctcggcgggaccaagcggcaaacagcctgcagccggccgccgggtgggacaagacaaccggtcaaccggacaagcagatcagcggagcgccggagcgggtggctggagcgtggagcgacggagcgtggcgaatccgaggctccgagcggctggaggcctggaggctggagcgccggcaggagcggccggcggccgagcgggcagttgtgcgggacgccggctgtgcggcagtgcgaaacgtcgtgacgaaccctaatctcaagttgtgtgggacgccggctgtgcggttgtgcggcagtgcggaacgccgaaccctaatatctattctattagtgggccagcctaaggatgacgacactatgcaccccgttcagaccactgtgccaaccaccggggtaagactgacaacagtaagtcaccgcctctcccgagatcggcctcgggcgcagcaggaagttccgcctcgcccgaccccagcctcggcctcggagggaatcgtcgccacgcccgacccaggcctcggcctcaacctcagcctcgggaggaggtcttcgcctcgcccgacctag

SEQ ID NO: 34356 - DNA, 112 bp, Zea mays
  Peptide Sequence Number=SeqID_77731
atggcgtgggagcggccgcaaggtccggtcggcactcggcacacgcacacagaacagaagcaagttaaagctcggcggccgtcagccagcatgcagtacacggccaagacag

SEQ ID NO: 34357 - DNA, 474 bp, Zea mays
  Peptide Sequence Number=SeqID_77732
atggacaccccgcgagtcggccgtcccgtcgcattaactctctggcatgacacgcgtcacccctggcaggcgagcaggcgtcgtttcgcctccgtcatgatgaccgcctcaaaaagggttcggcaaccgccccagaacacttgggctccgagccctctactgatcaggggttcgaaggctggcccctcagaagggttcgacagccgccccagagcatgcagagtcagagatgaccctaggtacatccgttacatggctgaggctcgggctacgatcctgagggatcacctgcaggggcggacccagcgggtggtccatatggataacaacactattcaccccgttccgaccactgtgccaaccaccggggcctcggtcccagcctcggcctcgggaggaatcgtcaccacgcccgacccaggcctcggcctcagcctcggcctcgggaggaggtcttcgcctcgcccaacctag

SEQ ID NO: 34358 - DNA, 1359 bp, Zea mays
  Peptide Sequence Number=SeqID_77733
atggctcacttcgtcgtcggcatcgcggcggcgctgctccttctgcagcagctgatggcctcgtcgtcgtcctaccccagcagtgcggtccttgcagactctgtgctcggccggaaagctggcatcgtcgtcgacgaggcgtcgtcggcgactgagagttcacccccgggggctaggactgggaggtacgccgtgatcttcgacgccggcagcacagggacccgtgtacacgtcttcaggttcgacaggaagctcgagctcctcgagatcggcgacgacggcatcgaggtgttcgccaaggtgaagcccgggctgagctcatacgctggacatccccaagaggctgcaaattccatgctgcctcttcttgacaaggccaagagcgccgtccctaaacagctgacgaaaaggaccccgcttagactcggagtcaggaaccttatccacactaagagcaaatttcagtacaagcccgagtggatcaatgttattgagggatctcaagaaggatcatacctatgggttgctctgaattatctgttggataaattgggaggggactactcacagacagtagctgtgcttgacatgggcggtggatcagtgcaaatggcctatgccgtttctgcaaatgccgctgcaagtgctccggcgccgactcatggggaagacccctatgttacaagagagtatcttaaaggaaaagattacaacatctatactcacagttacttgcactatggtgcttttgcatcacgagcagagattttgaaggcaaaggatggaccattcagcagctgcatgttacgtggattcattggtcaatacacctacaatgaggagcaatatgacgcgactgccgcgccggaaggagcagtctatggcaagtgcagggaagagatcggcagagcactgaacctgaacgcgccatgtgaaatgaagaactgcaccttcaatggcatatggaatggcggcggcggagcaggccaaggcagcatctatgttgcatccagcttctacttcgtggcgtcagaggtcggcatcgtagatggcaacgcaccaagcgggaacactacccctggcgcattcggagcttccgcggagaaggcttgccagatgagtgttgaagaagccaagatcgaatacccaaacgtcaacgatgtcgatgtgccctacctgtgcatggaccttgcctaccagtatactttgctagtagatggctttggtgtggagaggaccaaggagatcacagtggtggacaaggtgaagcacggagagtactacgtcgaagctgcatggcctctaggctctgctattgaggctgtgtcgtcaaccaaagaatggcgtcaagataaatga

SEQ ID NO: 34359 - DNA, 450 bp, Zea mays
  Peptide Sequence Number=SeqID_77734
atggccgacgctatgccattgatggcattcatcactgggagaggtaatggggaagagaaacggacgcaatcaaacaccattaacgacgaagacgaacggacggcgcgggtgtcggttcctggctcgtacgtggctctgggcgcggggctgcgcggccaggtcgggctccggtgcgggtgcgcgggttggggaagggagcgatggggtagccgggcgtcggggcgcgcacggcgcgggcgcaggacgggtcgcgcgtcctcggcttctggcgcgtcgcggtggggcgggttcgatcgtccctggcggcttggcgtgcagcagagaggcagggaggaggagagagggaagaggtggcggctgagactccaccaggggcgcgcggcggcttcaacagggaaggaaaaggggagggagaagagagaggcgcgggtggggcccacacacgagtga

SEQ ID NO: 34360 - DNA, 5121 bp, Zea mays
  Peptide Sequence Number=SeqID_77735
atgtcgggtcagcgccaccaccacgcaaccagtgtaaagcacatagatatgtatggaggcctccatcctaatcgttttccttttgcccaacacagcagggagaatgcaccggaagataatggttaccatcgcactccccatggtgcggatcatctcgagcagagccaggctgcagatacagataataagcatataaatcatctgtccacagatgacaatgttccctccagtgcttcaggccacaaacatggtgctatcagccgccatccatctacatcttctgttgatgatcgctccatcaagtccggtgatgattctgatggggccgagagtaccagtggcagaagcagtaatacagagatctcatttatgaataatgataccatctggataccacctcaagcggcagataaggaggatgaggcccagagttttgctacgagcattgcttatgacgacgacgatgacgattatagtgatggtataaagtggggccagtcaagtttcccatcccctggtaagcagcatgacgccgacactagcaatcatagggaggaacgagaaaaggcaatgctagaagctatgaatggccagctgaaggtacttgtcagtcggtttctcgcatctgctggcattccatcttccaacgaagagggtagcgatagctggcttgatattgtcacctccctgtcatgggaagcagcactacttatcaaacctgatggtagcatgggaaaggaaatggaccctggctcttacatcaaagtcaaatgcgtagcatctggtactcgccggcaaagtgaggtgatcaaggggttagtcttcaagaagaacactgctcataagcacatgccgacaaattgccacaatcctaggcttctacttctcaaaggagttcttgggcattctgatattggtttgtcatcatttagttcaatggatcaggaaaaggacctgttggagagagctattggtaaaatgatggagatatgcagtcccaatgttgttctggtcgagaaaactgtttcacgaaacattcaagaacttcttctgaaagaaggtgtcactctaattctcgatatgaaactcaaccggctacaaagaattgcacgctgtacaggctctcccataatttcgttttcagaagttttggataaaccaaagctgaagcaatgtgactactttcatatcgaaaaatttatcgaggagcacaacaacgccagtgagggtggaaagatgccatctaaaacattaatgttcttggaaggctttccacgtccactcggttgcacgatactgctaaaaggagcaaacagtgaagaattgaagaaagtcaaacaagtaatgcattttacggtctttgcagcatatcacttgatccttgaaacatctttctttgaagatcaaagggtttttctaaatgataaaagtacccccaaagaaatttctgttactgctacagaaggggcatcaccaactgcttatgatgttgctgctcttagtggtgctatccctagctttccttcacatggtgaccctccagcacttagactattccatgccacttctaatagctatgctgatgtgaacaaacctttgacatatccagaaaatggggatgcattcagttcagtatccagcagctctgcaaatgaccttgaacaaggtacaagtatcaggcccaataatgctgagaggttaacatcactagtccaagggccactaagaaaactgttcactgacatgttacgtcaccagaatatttacttacctgttacatcattgcaagaggcaaatgatattagtaaggaagtcagggctgaatcaagtcaagaaactgttattaatggtttccataggccagagatagaagagtctgtggtttcaattgaaaatggagattccataaatgatgcccagaaacaagaaattgctcaagcaataatgccaagaggttcttctgcaaatgataaagatgcagaatcgtctgttatgggagacaatggggcacatagtacaagtatcattatcaaagagaaatatgtcgatgatgatcaagctgatgatgcacttgattctcacagcatactgattttgatgtctagccagtgcccggaaaagcaggttatctgtgagcaaagtcatttaacccgtataaaatactacgggagttttgatgtgtccttgggcagatatttgcaagatattctgcagaatcagaaactgagttgctcctcatgtggagagcctccagagtcgcacatgtactcttacacgcaccgcaatggaaatttgaccgttctagtgaaacatctggtgccccaacaccatttgcctggtgaatctgaaggaaaagtatggatgtggactaggtgctcaagatgtgatcatgaacatggggtatccaaaccaactccaagagtactaatatcagctgaagcgcgtaacctctcgtttgggaaattcctggaactcagtttttcgagccactctgcagcaagaaggctgggctctaaagttgctatgtttcggtactcatctgttgagatctacactacctgcaaaccacaacctactctccagttcgtcaaccccatcagacaggattggtttgaaggacaaaggaggaatgttcatgctaaaggtatggcgcttttctctggggttgcaagatttctacagaacttgaagaatgaacatcctgatgcaataacgttagcaatccattgtggccttgcattccctgttaaggacttcactgaactagaagagttgttgataaaagaaaaggcccagtttgagagttctgtggacaaggccactgatcaaaatggggtaccaacctcttctgtgcatgaactgttgaatataaattggtactatcaggaccttctacttgagctttacatttgggaccgccgtctacatcaattattctattgtaaatctgtcaaactagaaagtgtttctaattacaagaatcttgctgatactgttgatgggatctgtggtgataaattcggtgttgataagaaaattgatgaatttacatatgatgaaactacggcagctttgggggtagccagtaccacagaacctgcaagtaacaaacttgaccatcaatcaggggatgctgcagcatccttacttgatgaaagccaggaagctgggcactcagaaattccttgcaatggaggtagtaaagctgagaaatcttccattgctcatggtcaaataaaggtagatggcacaacaaaaaccggaaatgatccttgcttcgaaatatccaatgataagaaggtccaggtcaatcttacagtagcagatccaatatctatggaacaggagcgttgtagcactctccaacagttcaaatatccttattgggatgacagggaaaggtggatttggaattcaatttctgagtcacaattggcttacaggaatgacattcaaattggatatttggaaaaattcgaactcattaacaattatttgccacattaccttcctcccttgtttgaacaacatgatgatgcggactctccgcatttcgcggtaggtcctggtggtaatattctgtgcataatggaagatgagatatccagcataatagctcgtgctcttgccatatctgacgaacgccgccatttgatagatttaaaatttgagaatggaatggattactccaagggagagcatgctaaagcaatggagaaatcctatagttttctgtctgaaaattctttcacctcatcaccatggtcatctacagattctgaagcaagcttgtcatctctgtcttcattttcatcattttcatctgatgacttttctggttatgatagctcttctttattgtcctcgatgcatccagaaatgactgtgaacgggaaaataactctgaaaggcaaatattcagtcactgttgtatatgacaatcaattctttgcactccgaaaaaagtgttgcccatccgagcttgcatatattacttccttaagccgctgcaagaagtggaatgctcaaggtggaaagagcaaggcctattttgcaaagacaacagatgacaggttcatcataaagcaaatcaagaaaacagagttcgattcatttattaaatttgcacctgattactttaggcatgtttaccattctctggacactggaagccaaacttgccttgccaagatattaggaatatatcaggttaagcagattagacatggcaaagaggtaaagatcgacttgatggtgatggaaaatcttctctttggccacaatatttcacgaatttatgatctcaaaggtgttactttttcgcgacgcgtcactgactcaaatgatcatgatactgtttacctggaccaaaattatgttgaggacatgggtttttctccaatctatattggtggaagaacaaagcatcttttgcagcgtgcaatatggaatgacacgtctttcctcacttcggtgaatgtcatggactattctctacttgtcggagtggacaaagagaagcatgaacttgtgtttggcatcattgattatctgaggcaatatacttgggacaaacaattggaaacatgggtgaagacttctctggtagtacccaagaatgtttcaccaactgtaatttcccccaaggaatacaaaaaaaggtttaggaagttcatggcaaagtacttcctgtcagttccagacacatggagctctgataattcatctaatccatgcaaatcctttggtcagagcaatcacaagttagcggaagtccacaatggtgatagcctgcttcagcacccaaatgaagctgaggggtgcacctggaccatttatgaacaaccgaacaaacccttaagagggaggcgaccattgtgtccgtttaaggaagaggttggatttggtgagctgatgaagctgagcttttcccaccagaggcagggtcctaacccaaaatatggaatatggattgccctgctgcttaccattattccgcttgcttctggccctgcgaggcagatcaatcaatttggcattgcaacctttgcctgcagtgcttctcttcatccgattgaggtccagaggatgattctggctcaaatgacgtccacagagtga

SEQ ID NO: 34361 - DNA, 459 bp, Zea mays
  Peptide Sequence Number=SeqID_77736
atgaatgtgtggctccagtatcaaataacacttctgcaatatgggagtcgactagaaacatacctactgtcatgccgggggtttcctgaactgcttcagcctccaagtgattcagtctcccatggttgtagcgtggctgggagcgcttgcctgctccaggctggggcacattctgctttgctggggcactggggcctgactgctgttgggctgccttcttcgggcattgcatcacccaatggccttgctctccacaatggaaacatgctctgcttccaccctgaactggtgctgcttgactgctctcattggttgctggggtgggaagacgaggtgcctgctgattctgcctctagaactgacctcctcctgactgattgttctggtgattctgctgctggtgctgagggtactgcctttgaaactgctgctgttgaggtgggcattggttctatctaa

SEQ ID NO: 34362 - DNA, 1677 bp, Zea mays
  Peptide Sequence Number=SeqID_77737
atggcctccgacggtgcccccagaggccgccgtcccaagcgccccgcttcgggaggcctggtccaacccgacgtcctcacctacaagagacgacgccgcggcaccggcgccaacgccggccacagcgccgtcacgtcgggccccgaccccgatcccgtcaagaatcagatgagcgcggtggtgcacgccaccaattcccagcaaggtgggcgccaaacgctggacaggcactggagaagctggagggacacgctggagggcgtccttcgatccactgctgtgaaccagagcgccggagggattcagaactgcatccgagatgcgctcagatataatggttggcatcccacagaacatggaaacttagttgatgaccgaggaacagacgaagaggacgctactggagctctacattctgaagagagtagtggtgccttggttaagttagaagatggaacagttgcatctttggaagccaacaaggcgatgtgccacgacactctctttgacattctaatctccgagaagtttgccatgttgtgtgatctgctagctgcaacattccacggcagtaagccagacgacgttattggtttgcaaataattgatgccaagatgagaaatggggattatgcacagaaccctgcgctgtttgaccatgatattaagcagatatggaagaagtttgaacacgttggccaagaaatggctggtctggcaagcagtctcttactgatttcacaagcttctaatcaaaagcaggcttctgacatttcagaaattgatgtggctgaacacaagatagaggaaacaagtctggttggtgtcacccgcaaagccctaaggaagttcactcccccatgcgattctggctattctaccataccaagacgaactgggacatctggatcggatggaatttgcaaggattgtggtagaaaggcagacagcaaaggaagaattatctgtgacaggtgtgaagccgcgtaccatgtttcatgtctcaagcttgccattgatgaagaggccccagcaaaatggtactgtcccacctgcgtcgaaccagacgtacctttaaagagcaacaaccatggcagagcacatgaaggctgcgatgtatgcgagtggcttgaggtggagaagccagaagaacctgccgaagaacctgaattggccgtcaaaacacaggagagctcagtgtcaagcattgtcgaagacagtgaaccagacctctcgataaccgctctagcaaacttgtgcaagctttgtggcacgtgtgaagatgagaacaagaagttcgtggtatgcgggcatggctactgttctttcaagttctatcatgccctgtgcctgaaagaaagccagattgcaagcgagaagcagaggaatctaaaatgctggtactgcccgtcttgcctgtgcagacgctgcttcaagaacaaggacgacgagaaaatagtgttgtgtgatggctgtgacgaagcttaccacacttactgcatggatccgccgcgcagttctgtcccgagaggtaaatggttctgcacgccgtgtagtgcatggaggtcggcgaacgggatgcagaggtatgagaagtcgatcctgcagagcgtcaagcgtgttcctgatgccaaagggcccaaggtgcaggcagcagctgctgctccaggaaaataa

SEQ ID NO: 34363 - DNA, 459 bp, Zea mays
  Peptide Sequence Number=SeqID_77738
atgtctttgccgagtgccgttgccaaggcactcggcaaagggactggcaaaggggcccactggagggttctttgccgagtgccagtccaccagacactcggcaaagaaacctcctttgccgagtgcctactagggctctcggcacagagactggctgtggggtccactagaccagtctttgccgagtgtcgccgttggcactcggtaaaggatccgtcaccgtcacttggcgccgtgacggtgacttttctttgccgagtgccaaatggcactcggcaaagtctttgccgagtgcccgacaaaaagtactcggcaaagaagctgttgccgataacacacggcaaagaagctgattccggtagtgcatccccaggttgtcaacattgcaaccactgctcaggagaagatgaagccgtgaaaagagacttccaggagttccaagactacgacgagttctag

SEQ ID NO: 34364 - DNA, 267 bp, Zea mays
  Peptide Sequence Number=SeqID_77739
atgtccctgatctcttggtccaactcctcctcctggagtgttggactggtggccttccttttctggctccgagcttcttggagagaaagggtttcctggtttgggtccagtggttgcagtgcagcagcccctgtcgctgaggctttcttcggcggcatgacgaaggtcagtgcttgccgaaggtggccaaaaagggttcaccggagatttaatgaactccggacgaaggttaaaaatagcacaattacgaaggttgaatcttcgtaa

SEQ ID NO: 34365 - DNA, 525 bp, Zea mays
  Peptide Sequence Number=SeqID_77740
ggggagttgatgcagctgcagctctttcttttcttgtactggtctgagctcaagggtaaggttactactggcctggcgttggttctgagcccatatggtggcaccccggtcgcctctgatatctttcgagaaggcctgatccctgaaaaggatacaaggaggatcatggagctcatgggccttggagcacgcctcacacatgttaagacaaaggactgcatcaccaagcacaaacttcccgtcggtgagctcttcaaaggacttcatcgatgtgtcggcagccatggtggtcatgggcttacggccctccacctgcggctgcactatggggagaggagcaccgggctggtgacgaggcgtgatgccgaggtgcctgggttggtggtggtgaggcccgagagaaggctggaccacgcgtggatggtttaccccacgcttaagatgtgtagcgatgaggccgatgcaagcgagatggtttgggtttctcaaagaacggtaaatactgacaaatttgttgtcgtctga

SEQ ID NO: 34366 - DNA, 486 bp, Zea mays
  Peptide Sequence Number=SeqID_77741
atgggcaagagcaagaagggtggtagttcttcgcatcactccggcgacaagcggaagcgtgagccgactcctccctcggaggacttcgacgactcggagtactcggaggaggagttctcctccgagtcagagggctcaccggtccatgcctctcccccagcgtcgtctgatgactcagacgactcccaggggatcgccgcagaggtgtggacctacatccgggccgtcgagcgcgccgggctcaagggctcggatgagtcggagtactcctcggactcgtccgaggagggcggcggtggcgatggcggtgacggcaatgacgacagaggcgatggtgacggcggcggtgacggcggtgaaggcgacgacaagggcggtgacggcggcgacaaaggtggcagcggcgacggcagcgatggcagcaagggcagcagtaggggcagcaacaagggcagcagcaagggcagcaacaaggccagtggctag

SEQ ID NO: 34367 - DNA, 144 bp, Zea mays
  Peptide Sequence Number=SeqID_77742
atggggaagcctgtcccatcactcctcatgctcctcctctgccgagtgaccgcacttgtacccaccatagcaggaatgggagaccacgtctcaagtcgcgtgaggagggcaatctgcgggcaggttcactcagggtgggtttga

SEQ ID NO: 34368 - DNA, 87 bp, Zea mays
  Peptide Sequence Number=SeqID_77743
atgggagaccacgtctcaggtcgcgtgaggagggcaatctgcgggcaggttaactcaggttgtggatcatgtggattgaaggattag

SEQ ID NO: 34369 - DNA, 78 bp, Zea mays
  Peptide Sequence Number=SeqID_77744
atggcgccgtcgcatgggctaggcggcgtcgcctctgctcagtttagtcctggaaactatttaaggtataaaaattaa

SEQ ID NO: 34370 - DNA, 168 bp, Zea mays
  Peptide Sequence Number=SeqID_77745
atggcgccgtcgcatgggctgggcggcgccgcctctgctcagtttagtcctggaaactatttaagcagtgaggacacgagtcacttgaagagcaagtcagtacctggaatctcaagtcccaggcaagttgtgcccttgatcacttctttttacccagccatgttctga

SEQ ID NO: 34371 - DNA, 306 bp, Zea mays
  Peptide Sequence Number=SeqID_77746
atgagcaagaaatggagtaatcaggacttgggtacctccacaagtcgagtaattgatgacaacccgattaaaggactaacaagtgtgctaagtgttgaacaggtgattaatgcaaagctaacagggttcaacacaaagacaaccgatcaagccaaggatggaggcaagaagagcttcgaggtaccgagtgcacgggataaggtcaaggagaccaggaacccaaagccaggggtgaagaagaagacttgcaaagtcaaggatgatcgagttaagaagagttatggtgcatcaaggatcactacataa

SEQ ID NO: 34372 - DNA, 2022 bp, Zea mays
  Peptide Sequence Number=SeqID_77747
atgccctcccatggtgggaagctggtgcgaagtcctgtcttcgcgctggatctgcagagccgcgatctggtcgcctttgtgcgcgaggtggaggatggggcggtgcggatcgttggtcggtacgtgccgaggacagagggccagcgcagctgggatatccgcgggtcgaatgaccatttgaacagggtttttgaattgaatcgactgccgtatggcggttatcccggccaagacgacgtggatcgtcgtgggaagaaaccggtggtagagtctggagacgaccccgcgccggcagccaccccgtcctctaagaagaggaaactaggtactgctatgggaggacttggggtttccgatggttttgctagagagttgatggggacatgcgcggccccgggagaaaggatgtcttcgcccgagctccgggagtcttcggcgcggatgctgagggttaccggggctaggccgaagaggcagcggggggctgcgaaggctactgcccccggcggaagccagccgccgctggcggcgaagtcggccgtccctgcatccagcagggcaccggaggccgcggctgacgccggtggcaccaagtctgcgaaggctgcaccgacgtccggcagggtgccggaggccacgaaggcggcccgaggtttgccgccgggcaagcgcgtcgccgacttcgccaccgacattagtgtggaagactaccttgtcgggtcggacgaaggccaacttatcgttgtttcgcctgccgcggcgaccacggtggctgccgtagtgccaaaggcgaagggcggtgcccttagtgctggcggcgagatgccgacactcagtgctgtgagggacgaggctggtgctgtggcccgccggctgggtgagatgaaggaggcgctaaatcaggtggctgactttgcaggccgcgcggcgtcgggggccctcacggcagttgtgtctgccaaaggggagaagactgacctccggtgccaactggcggaggagaggagggaggccaatgaggccctcgccaaggcgcaggctgcgcaggcggaggccaatttggcgcgggtggagggcggtcttgccagggagcgcgccgagcagttggaggagcggctccgcgccctgcagagccgtgtggagagggccgaagccgcgacgcgcacggaggctgagcggactcgcaaacagcttatggattcataccatgagctgggcgcgcggaccgctgagttcgaagtgccggaccgagagcccggacttcgctgcctggagtgggtgcaggaggagttgcaggcgctccccaccatcgtggaggggtttatgtcttatgcttccctggtcacctacgagggggcgatgaatgcgctctctcgcgaagggtgccgacactatgaagtcttcgaccaagctgatgaagatttcgagcgcgatatctacaaggtcgaggactctgtagtgaaggaatccgccggagccctctacgaccggatgtggggtccccacggtcgagaggtggtcagggaacgggccaagacggcgaggggtcaggttcaagattttgggcctgcgcacgcaaccgctactactaattttttggcggcttcgaccgtggatgatggtaataagtcggatgggtctatatctaagttttctgattttggtgactctgggagctcggttgagtggactgaggagtcgtcggatggggacttggactactttgcggccttggatgtggcagcggcggaggcttcaccatgcgctgcggatgtagaagatgtgcctggtccgagtactgggcgtaggcggcgaagggcggttgcgaagcgtagagtgagtggggcggacggcggtcggctgcgtgtgaatagggccggccggcaggaactgttgtccttgccggccgccgtgggtacaggtgagggggaattgcggagtctttttgcgggtgaggagcttaggatgatgttattcaactatagggagatgggaattattccgaaagttgagccgatgtag

SEQ ID NO: 34373 - DNA, 801 bp, Zea mays
  Peptide Sequence Number=SeqID_77748
atggaagaatcaagccagactcagctatgtgagatacagacacccaatcatccctcatcacctgttggtcaagcaaagttgactcgcaaagaactcaaagcaagaggtgcttgtttctactgcaagaatgaagaacgtattattcgcgaataccctaagaagcgtctggaccgactagagaagaaagctgccaagaaagacccaaacaataatccagaagaccaaccagttataaggtccgggccactcacaacaaggtcccaggattctaggacaaagaatacccaggccttgaccaaggccaggcggggctccggagctaacacgtgtccggaccataccgcgtacgcttccgctccccgctcaggcggagacccgatgctgctgcgtggccgactgctcgtgacgcggtatgctcgtgctgtggcatacactgtgctcatcctcactcgtacgttaccagggatgcttccgctgcacgccaatgctacgcagaccgcggatataagggcacatggagattgcactgcagcatacaactgcgtagacatcccggactctgtcgagggctgctccgggggcattgtctgcggccagggagttgctgcgccaccctccaagctccacggcctcaccggggtcatgaagcagtggcatgacgacgtcgaccaactgctcggcatggcgcactctggcttgaccaggtctaggtcgcggtcatcccggcgcaaacatgaggcgacaacgtctgtgcgctcaccctcggtgaggggtgcacagaccgacgacctccgggcatag

SEQ ID NO: 34374 - DNA, 2613 bp, Zea mays
  Peptide Sequence Number=SeqID_77749
atggggcacagtcgcagcgccgccacgacggcactcactgcatgcgcgatagactgcgcacctaacaacaagcagctggcttcttcgctttggagcagcacctcagatgctctgacgacgagacggcatcaaacaacagaatacaaataccaattcactgagaccccgtctagctctcgtcttccttccgtcttcctagctccaatctctgatctcctttcttctaccttctgtggtgctaacaatatggtatcagagggaccgatcctcgtggagaatgattttgccacgctgcttgcggagcttgcggcgtgtgagaagcgtctcactgctagcatcgaaggtgcgcttgccaggtgttcggcacaatgcccgaacaccttcggcggcttcacggcaactgcaactcctgttccagcacttgccaacgacgaagcggtcttcgatgcgtggcctatcttcgacgaggaaagcatcttcgatggagagcctcttttcgacgaggagcccaacgaccacatcatcgattacgtcgacgtcttctcgtcctggtacgatgtgtcgttccacggcaacggatccgtgcagagcctgcagctggagcgcctctgtctggcggggcgcacgccagatcccgggcgagaccaggatggacctcctccagtgaaacgcggcacgattctgcacgctcgtgctgccgctggtggagcagttctccgacgcgctactgctcgtcatgctcaaccccgtggacgtgtttacccacatcgccaggatgctgccgagcttccccatcagcagcgtcatcgactccggcaccaacctcgactcctccagattcaggtttctcctcgccgagcacctcgacgcgaccgaatggccgagagcgcgagagccgacggtctggtggtgaacacgttcgaggagatggaagccgtcatccagatgttcgacatccgtgcgtccctcccctctctagagtcgccatggtcccagtacactcgccgcgacggattcggccacccgaacgcctacggcgccaccagcatcctcgtcatcgtcaagtgcgtgctccacgaacccgcactcggtggctacgacggctccctcgatgatgacccgaagtccggtgtcacatacaatgacgactcgggcgccgactacatcttcatcaacactggcaccggctgcgttgaggaagacgacgccaccccctccgccacgctcgacccgctgcgcaccgtcaccaacaccaccaccgacgtgttggacgaggacacgagcggcgacgcggctcactcgacttccgcctccacagtgggggttgccacatcacaagacgtcgagacgcagctccacgctaatctggaacccttcactccgcgcagccaccccctgctacaggatgcctcagccaccagcaactcgcccaccaagtgctcgacatatcgcctcagccatgacattgtcttgtggaggactatcagcgctgcaccaatgttcacgctcgtgtcttctacaccaagtgtagaggtcgaggtggccaacatctcgctcacaagcgaggaccgcgcgttgcagcgaaggctcctcaaattcttcgccgcgcgacacgggtggcggaggactggtggacgggaccacatcggtctcgagcatcaccccagcggaatgctcgacgcacgctacatgttctggccctgcgtattcatgctctgtaatttcggaaggctcccatccagcgtcaagctgccactgcgagtccatgtgctcttcacacacatccagaaaatgatgacaggtgatagtgtcgtgatggctgagaccggtgattcttggttcagctgccataagctcaagctgccagaaggctatggatatgaattccaaatgcagtatggtttaattggatggtcaatgggtgcacttcttggctatgctcagggtgcgaatcataagctcttctcaccagtgactgccttgcatcctcttgtcgtcgtttgctgtgaccatggtagcataatggatgatgctgccggttttagtgatgagctggtggtcactagcatgggcgttgactgccatattattgcctcctaccacatgtggcctttcggacagactggaactggtcatttctccccaattggtggctaccatgtcagacatgatatggtgctcatcttgtatgttgctcgtttcattccattgcattttttgtggaaagccaggaatacaactaatgactcaactggacttctaagagggtccatgcttatatcaagaaaggttgcaaagtcttcattgttgtacacagtgagttgtagagatgaaaactggaaaagcatgtcaaagttttgtgttgaagatttaccaagtattctgaaggcagggatcggtgctggcgtgggcttggttacctctggtctgagtgctgtcagcagtggccaaggcattttttcagtatttgtttgggatcctggtgatagcggcttggttacctctagtctgagtgccgtcagcagtgaccaagacaatttttcagtctttgtttgggatcctggtgatcgcggcttggttacctatggtctgagagttgtcagtattgcatga

SEQ ID NO: 34375 - DNA, 393 bp, Zea mays
  Peptide Sequence Number=SeqID_77750
atgtcgtcaacgctgacgcccccggcgccgccggcgctcctggtgccggtggcgtacgccgccgtaggcgcgcccgtggaagcggcagggagagggtcgtcgtcgtacggcccggtgatcgcgatgctggccgtcgtggccgtgctggcggccgccgcggtggccgtggggcggctctgcttcgggcgccgggcgcacggcggcgcccgcgacctggaggcctgggtggagcgcacctgcgggccctgcgtcggcgccaccgtgctcgcccaggcaacggacgagggcggaggcggcgccgtcgctggcgctggcgctggggccgcggcggcgacggagcccggcggcgcgcccgaggggacggacgacggagacggagcgaggagacagtag

SEQ ID NO: 34376 - DNA, 345 bp, Zea mays
  Peptide Sequence Number=SeqID_77751
atggaccggaggccgccggcgaggaggagaccaggcgatccccaccgcaggggcgcagcaatgcacggcgccgtcgagcagcagaagcagcaccgcgggcggcggccgcagggaacggtgccgccgccgcccgcgggctacttcaccgcggagctgctgctggcgttcgtgttcgtggccgtgtcgctggcgttcctcccgctcgtgctgccgccgctctcgccgccgccgttcctgctgctgctggtgcccgtgggcctgctggccgtgctcctcgcgctcgccttcgtgccgctcgacgcgcacagccacctcgtcgtcgtcggctccggctcgtcccgctga

SEQ ID NO: 34377 - DNA, 1482 bp, Zea mays
  Peptide Sequence Number=SeqID_77752
atgaagcttgacgtgaatgcccttcgctacctcgccaaggacgacttccgtgtcctcaccgccgtcgagatgggcatgcgcaaccatgagattgttccagtagaacttattgacaggattgccagattgaagcatggaggcacatacaaagtgctgaggaatcttttgaggaacaagctggtgcatcatggtgccactaaatacgatggatatcggctcacctatctgggatatgacttccttgccatcaagactttggttaatcgaggagtttttgcttcagttggccgccagattggtgttggaaaggagtcagatatatttgaggtagccacagacgatggtacagtacttgccatgaagcttcataggttgggcaggacatcttttagagctgtgaaatctaagcgtgactatctaaggcaccgaaggagctttaattggctgtatctctcacgactcgcagccttgaaggaatttgcctttatgaaggctttaggagatcatggtttccctgttccaactgctgtggattgcaaccggcattgtgtgatcatgtcacttgtgcagggatatcctcttgttcaagtgaaaaagttacaaaatccggatgatgtttttgactcaattcttggtcttatcgttcgtttggctgagcatggactcatacactgtgactttaatgagttcaatatcatgattgacgatgatgaaaaaattacagtgattgactttccgcagatggtgtctgtttctcaccgtaatgcccaaatgttttttgaccgagacattgaatgcatctacaagttctttaacaaaaggttcaatctgaggtcagtgaaaaatgaagaacaagctggatctgaaaatgatgatgaagggaacagcagaccttcctttttgtccgtggaaaagggtgctggttccttggacaaggaactagctgccagtggatttaccaggaaagagaaagtggatatggataaggttgttttccggcttagttctcaggtaccgtttttttggcaaactttcttacagtacatcgaggaagttgttgaagggcatgattccagctcagatgatgataatgatgaggacagttccgatgagcctgattgtgatcttaccccaagtgattcagacgcgcctggaactttttctgaagagcatggaacaagttgtagcggcgagaacagattggaaattcctccctcggatggcaatggagtggttatggcaccgctcgaatctgggatcaagacgttttccatggaagatgatgataacgatgatggctcgtcagaggatgctgatgaagaagaagatgctgagctcacgaaacaattgaacaagcaaaggagaaaagcaatcgcagctgcccatgggcggagaagaccaacgtcatccaggaacgcctacaaggacaagggtaagggcaccatgaactccaagatgcagaggcaggcgtgcaactggtga

SEQ ID NO: 34378 - DNA, 789 bp, Zea mays
  Peptide Sequence Number=SeqID_77753
atgttctacgcaagtacaaccgatcaagccaaggatggaggcaagaagagcttcgaggtaccgagtgcacaggagaaggtcaaggagaccaggaacccaaagccaggggtgaagaagaagacttgcaaagtcaaggatgatcgagttaaagaagagttatggtgcatcaaggatcactacataaggacatggcttacaaccaatgagagtccaacattgacctcaaacataccaagtgttaaagagatgcaaataaagagtaaagctatcgttgaagtgcagggtaatttgagacaggaacttctattccgctgcaacctactcgaagggtctttcattccactgcaatccaaccttcgagtagagcgacatccagatcctgttctcgggcatagggaactttcaattggtattagagctaggcctctccagtgtgggcttagccgtccggagatgacgatgtcgtcacaagagggagaagaaaaccgattgcaaccaaatgatgaatccacctcaccgataggtttgtcttccattagttataaatttcttattgctaacaatgatagtggacacgaaagcgatgatgaggaggaatatgaggatgatagtgaggatgagtcttcatcaccacaaggtacattttcctgtattgcttccactgataataatgatagggaaaatgagaccgacgatgtggaagaagaggagattcgcccgttctacacccatctcaacaaagaagacaaagtgctcttggttaagctgttgaggaggaacaaggaataa

SEQ ID NO: 34379 - DNA, 456 bp, Zea mays
  Peptide Sequence Number=SeqID_77754
atggattgggcgcctggcgagcagacagagggaggaagcgagggcgcttgggggaggagagtgactgcacgcgcaggaagctctgctggaggagacggaccacatctgggcaccagagacgagcggctgggcgaacagggagggtggtcgagcgccatgggaacaggggctgggcgccgagcggaagggagccggagcgcggctggagggagaactcgacgagctgcgcgcaggggaattccaggggaaagagagagccgcgagcgcggagggagagaagctgggcgcggcctgcagaggagcgccgaggacagggaagaagacgcgcagatttttccacaaaagcggtcacggtggagaagacataagaatgacgcgcacgcacgaaaaaatcagcagagggcagttgagcggatgagatcggcagtggctgagaaaaatcggagaatgggatag

SEQ ID NO: 34380 - DNA, 1170 bp, Zea mays
  Peptide Sequence Number=SeqID_77755
atgaaggcgcgtgtagcccagaggcatcacgtcgggttccgcccgttggcttatgccgcgcacagtatgccacgtggcagcatcggggctccgcctgagcggggagcaggagtaagtcagatggaggttcgctgccaaaccagcttttgccagaatgaagatggtttccccaagttgctgagagcatgcacagttcgcctcggaatcaggagccagccagagtatgatggtcgtgaattcgtcgagcatgaaacagagaagtgtgtcgtgactgtatacattggatctagtccacaccatgtggaatggagtgtcactgctgctgggcacagattcaaagacacctgccaagtcgtcgctctcaaggcattgagggccctgtgtcagatctatgaagaagaagtggtcgacaccccactcagattctttccgccctttcagagagaccgtcccgcttggatggccaggatgcgtgcattggaggagcagcagctgcttgaggacgaccccacagtcgtgtacctcactgcatacctgctcacccttgatgcacagtatgatttcttggctcggcaccaccgtcagatgattgcccgagcagaagatgcagagaagcgcaaccgtcagctgcatgtggatctcaccacagctcaagcccgggcaactgccttggagagtcgtgaagtcattgctgttgaagccctgaagcaagccaaggatgagcacgtccagaagttgatggaggcctacttggtaactgtaacaccccagctcgtcgagttctccctccagccgcgctccggctcccttccgctcggcgcccagcccctgttcccatggcgctcgaccaccctccctgttcgcccagccgctcgtctctggtgcccagatgtggtccgtctcctccagcagagcttcctgcgcgcgcagtcactctcctcccccaagcgccctcgcttcctccctctgtctgctcgccaggcgcccaatccatggccgactgttcctgctcgctgctctccagccgagctcccctgttggccgctctctggtgcatgcgttgagcttcctgccgtcgctcagctcgccggtgtgcgtcctgctccttacgcgcccagcaccgtgcgccgtgaagtccctgcgcgcaagctatctgttggccgcgcctga

SEQ ID NO: 34381 - DNA, 285 bp, Zea mays
  Peptide Sequence Number=SeqID_77756
atggaggggctcatcccgttcatctacaaggccatcaaggagcggcggggcccggagctacagctactactactcgcgcagaagcagtgggagtccgccgccggtggcaaggcgccggcgggggcggcggcggagcgggagattgcgcaggcgcaccgccgccaccgctccctcgacgagctggcgggggaggtgggcgcctcgcccgggtggcgccgccgccacccgggcgcgccgctcagggcccgcagcgtcaggatcttctcctgcatcggcggcgtgtga

SEQ ID NO: 34382 - DNA, 321 bp, Zea mays
  Peptide Sequence Number=SeqID_77757
atgtcgatcatagccaggggcaggatgatgaggagagctggagagaataaaggggtgggggacgggacgctagggcaaagcgggcatatcgacacgtcggtgtggagagtcggatctcgacgtggcgatgagctgacgagtgacgaggagactaagtcagacgattcattcgccactattctcaccaacagtgaactctaccatactaaaccacagttatcggagcgttcgtgtcatctcgtgaaggccagttctgcaagtctacgcctgacggtggagccagaagccagttctgcgagctctcaccctttcaccggttaa

SEQ ID NO: 34383 - DNA, 1500 bp, Zea mays
  Peptide Sequence Number=SeqID_77758
atgcaatttcataatcaaagagagcgaaaaagtagaacgaatgatgatattgaccatgagcgaacacgtgaaaattatgatttgaaaaatgataaaaatattgattacaacgaacgtgtcaaagaaattattgaatcacaaaaaacaggtacaagaaaaacgaggaaagatgctgttcttgtaaatgagttgctagtaacatctgaccgagatttttttgagcaactggatccaggagaacaaaaacgattttttgaggaaagttataaattattttccgaacgatatggcaagcaaaatattgcttatgcaacagttcataatgatgagcaaacccctcacatgcatttaggtgttgtgcctatgcgtgatggaaaactgcaaggaaaaaatgtgtttaatcgtcaagaactgttatggctacaagataaattccccgagcatatgaaaaaacagggttttgagttgaagcgtggtgaacgtggctctgaccgtaaacatattgagacagctaaatttaaaaaacaaactttggaaaaagagattgattttctagaaaaaaatttagcagttaaaaaagatgaatggactgcttatagcgataaagttaaatcagatttagaagtaccagcgaaacgacacatgaaaagtgttgaagtgccaacgggtgaaaagtccatgtttggtttgggaaaagaaataatgaaaacagaaaagaaaccaaccaaaaatgttgttatatcggagcgtgattataaaaacttagtgactgctgcgagagataacgataggttaaaacagcatgttagaaatctcatgagtactgatatggcgagagaatataaaaaattaagtaaagaacatgggcaagttaaagaaaaatatagtggtcttgtagagcgatttaatgaaaatgtaaatgattataatgagttgcttgaagaaaacaagtctttaaagtctaaaataagcgatttaaagcgtgatgtgagtttaatctatgaaagcactaaggaattccttaaggaacgtacagacggcttaaaagcctttaaaaacgtttttaaggggtttgtagacaagaatacagaaaactacgtgaatcaaaaacaatggattcaattttggaaaaaggcaatgaaattagactatgatccaaatgtaaaagttcaaatgattcgaccgaaaaataaatataaatcggatatacaatcggcaattgacgaaactgcaaaatatcctgtaaaggatacggattttatgaccgatgatgaagaaaagaatttgaaacgtttgtctgatttggaggaaggtttacaccgtaaaaggttaatctcctatggtggtttgttaaaagaaatacataaaaaattaaaccttgatgacacagaagaaggcgatttgattcatacagatgatgacgaaaaagccgatgaagatggattttctattattgcaatgtggaattgggaacggaaaaattattttattaaagagtag

SEQ ID NO: 34384 - DNA, 799 bp, Zea mays
  Peptide Sequence Number=SeqID_77759
atggtggacctcaccctcagcaacactgtggacttccccaacaccggcatcaaaaacgtcgtccttggcagtgtggtggacctcgccctaggcggcacagtggacttctccaacgaagacattatggacctcgcccttggtagcgtggcacaccccaatggcccgcggatagcatatccggtcgccaccaaactacgcctagacagaccgcgcgggctcatttcttctccgttcgcacaatctctgcccgaccgccgcccctgctcgaccgccacgctgccggaccgccgcccctgcccgagcgccgccggcgaggccgcccctgcccccgcccccgcccgagccgccgcctacccgagcggcgccctggccgagcgccgccgccgcttgagcgccgccgccctgcccgaggccgccccgcccaagcgccgccgccgccgcccggagtgccaccacaagctcccgagctcctcgtaccccgagcgtcgtcgtccccagcccgtcgtcgtccaccgtccgctcgtgccccgacgggaatcattaactgagcaacagggcatgacatcaaattttccaccaccaccacaatggagccaatttgcaaacacaccagttccaccaccacagttcaccacccctccgacacatatacctgcacctgaagatagggttacgcctgaagcgggtggtagtgggtctgatcccgcagcagggactggatttgttgactcgctcttcgcgttccctgctcctggtggtggtggcggcagcgatcaaagctctaaccacccaagtggtg

SEQ ID NO: 34385 - DNA, 207 bp, Zea mays
  Peptide Sequence Number=SeqID_77760
atggtggtggccccctgggtgaagtaccttagccaagaatacgaccccatgttaacgtgggctgccagcacctaccgctccccctcttgcccatctttcaggtacaaacagaatatgcagagggagaatccacttgccttgctcaaaagcgtcttgcgggtcgtcctcgaacgagttcggatcgcctaccgcacaatccgcttctaa

SEQ ID NO: 34386 - DNA, 102 bp, Zea mays
  Peptide Sequence Number=SeqID_77761
atgggagtgaggagagggcgtcggatttataggggagagggagcgttaatggagagcaaatgggagaggaagaagaaacggtcgcgtgaagagctccattaa

SEQ ID NO: 34387 - DNA, 1113 bp, Zea mays
  Peptide Sequence Number=SeqID_77762
atgccgatgcgccctgcagcctctccgtcgccgacgggccaccgagccccgccgcagctcccgctgctgctgccgtcggccttggtgcccatgaagaagcggcggacgccgcgcagggccaggccgccggccaccgtccccgtccccgtcccccctccggcggccgccgctctgatcccagttccagtcccatccgccccataccagatccccgcgcccccagccgccgccgcggctctcgatgcccattacctcatgctcctagcccacaccgtggtgtctcaggccgacgcggaagaagcagcacaagcctggtctccttctcctcccgcggctcccgtgggcgagaaactctcctcctccccgccaccgctacctccgtccgccgcggacgaggagaaaccccacgcgccgccgccgccgcttcctcctctagccgtggacgagaacccgtcgtcctactccatctccatgtaccatcatgggcatggccacgccgccaccgaagaaagtgcggaagactgtaaggaaaccgcttgtccccaactcggagggaacgccggcggcggcagctcgaaaggagaccaacgcggcggaggtgtgccttcgcctgccgccggagcgtcgccgccgcggccggggaacgaggacgacgaggagctggaattgggcgagattccgcctgagaagaacccggccgctgactgcaatgcgggttctgcgcatgaatcctcgctggggctgggcaaggaggaggcgacgggtggcagtggtcgtcatgcggcccctgtgcatgcggctgtgactgagatgtctgctgcggagcagaagagggtgagggaggtgttcgtcggcgggatcagcagggacgccggggaggcggacgtccgggcggcgctctcggcggcgggtgagatcaccgaggtccgcatgatcagggataggacgacgggcaagaaacacaaaggctactgcttcgtggcctaccgtgacgccgccatggccagcaaggccgtcgccgaattcccccagtgtggaggttgtgctagcttgccccaattgcttcttttccatcatatttcccgctcatcagctctgcccgttttatggtaa

SEQ ID NO: 34388 - DNA, 660 bp, Zea mays
  Peptide Sequence Number=SeqID_77763
atggtcgggcgaggcggaggctcctccgaggtcgaggtcgagtctgtcctccaaggtcgaggtcaagtccgagccccgggtcgggcgaggcggagaccgtcgtctgaggccagggctgagtccgagccctggggtcgggcgaggcgcagttcgtcgtcttccggagccgaggccgagtccaagccctggggtcgggcgaggcggagtccgtcgtcttccggagccgaggccgagtccgagccctggggtcgggcgaggcggagtccgtcgtcttccggagccgagggcgagtccgagctctggggccgggcgaggtggagtccgtcgtcttccggagccgagggcgagtccgagccctgtggtcgggcgaggcggagtccgttgtcttccggagccgaggccgagtccgagccctggggtcgggtgaagcggagttcgtcgtctgaggccgagacgggggccgagccctggggtcgggcgaggcggagcttcctatggtgcccgaggccggacttggctactgtcagcctcactttgtcgagcggcacagcagtcggagcgacgcaggcgacgctgtcttcttgtcaggtcggtcagtggagcggtgaagtgactgcggtcacttcggctctgtcgactgaagagcgcgcgtcaggataa

SEQ ID NO: 34389 - DNA, 546 bp, Zea mays
  Peptide Sequence Number=SeqID_77764
atggtcgatgccggcgacataacggccggagggccgccgcgcgctcacgaggaggagcaagcgggaactccggcatacggttcggtggtcctcggcggcacttttgaccgcctccacgacggccaccgccgccttctcaagttattggaccctgtggtgattcacagtcggtttattgattctgttgggcagtatgcggagcttattgagcccgttgacaagcgcatcaagggtgtggaggattacatcaagtctataaagccagaactgatagtacaagtggagcctattgaggacccttatggcccatccataactgatgagaagttggatgccattattgtcagtaaggagacattaaatggtggactggctgtaaataggaaaagagaagagaaagggttcccactgttgaaggttgaggttgttgatctcctttccggcggtgtggagggggaaaaattgagttcttctgctttaaggaaacttgaggcagaacaagctcaacaaagtgaaacaaaatctggtagccttgaagcttcttag

SEQ ID NO: 34390 - DNA, 474 bp, Zea mays
  Peptide Sequence Number=SeqID_77765
atgtcctcatcacatggtgtcgacgccgaggcgagcggtaagggtgctgagtcccgatgggggtgggagagccatccgctaggtgacagcgctctgcgcgctcagcccgcaattgggcgatctcagcatgagccctactcagctcgtctaaagcgtgacctccgcaccccgaagaccatcctccagacggcgcaccaagcaagtcgcctctcagcggtccgggtatgccccgcgactgtgttgatagaccacgcaatgatactcgatggaccaactgctgtcgtcgccgtctccgtcatcagggtctcctccagcagctactccagcggccagggcacccagtggtggtgcagggagcgcctccagtgggggcacaggagagcaacgcctcacaaactctacctcctactgaggcaaggaggaagagccctgctgctccagctcctggcgctgacgctcctgctccttgtgtag

SEQ ID NO: 34391 - DNA, 126 bp, Zea mays
  Peptide Sequence Number=SeqID_77766
atgcaggatgtcacacggcatgcgctttcgcactactgcttggtgcttggtggggtggccgatggtcttgacctgaggtaccttggagaggaccagaaaggacttgggtgtcacacccggatttaa

SEQ ID NO: 34392 - DNA, 588 bp, Zea mays
  Peptide Sequence Number=SeqID_77767
atggcacaccaattacctctaatcgcggcgaagaaccccctggctacaaacgcgcccgagcacggcggcttcaccgaattcggtgaagaattcccggacacccagtgcaccacctccaaattgcgccaacgtatggcttctttgcgggcagatcaatccacggaggaccagcttagggcctgggttgtgctaccggcagcaatcaacggcgatgcaaatgaggcacataaagttgaggagatctctctattattctttgtatacaaccttaagtattacattgggaaaggccaagggataagccttcatggcgaggtcattcgtgtgtcacagtcaaccttcctagaactccagctttctctcgagcagaacaggtactcctttgcaatcacacccacgctcgttggacagtcacatcggtcactgtttgccacctgcagtgctggaccaaagaatcaaatggataaggacaaggggcttaagcttaacgacgatgagtgtgtctctcagctggaattgaaggagatgatgcgcgtgatgactgaagcttttaaaaaaataccaggactctgcggcgacatcctatga

SEQ ID NO: 34393 - DNA, 525 bp, Zea mays
  Peptide Sequence Number=SeqID_77768
atgcattgtccaaagaaggcagctcagcagcagtcggcccctaatgccccagcaaggcagaatatacctcatcaaggggcaagcaatcgtgttcagacgcgctacaaccatggtaggctaaaccatctggaggctgaagcagtccaggaaacaccaggcatggtagcaggagaagtggagactgagctagtctcacccaagccaaagaaaggaggttgtcaccagatgactattgatagcaaagaggtcgatacactcgaggctatcaaggttgtgtcaaaatttctggatgtgttccctaaagatctaccaggggtttcgaagattgtgagacccatgacaaccctgttagctaacaaagttgagttcaagtggacccagaagtgccaagatgcctttgaagcactgaaagagaatgttgggatgaaggcgaacacgccacccttcgctcgacgacttcgtcctcgccttgcacaggcgaaggctggatccacagaacccgccaggacaggccaagggcgctaa

SEQ ID NO: 34394 - DNA, 624 bp, Zea mays
  Peptide Sequence Number=SeqID_77769
atgaagtcttcgcaacacaactttttgaggaaggttaggcttcgctcagcagatttagagatgaatctgttcagggccgccagtcttcctgtcagtcgctggacatctttggtggactacggggggtgccatgttgatgattgcttggatcttggttgggttggcctcgatccctcggtcggccaggtggtcctctttgcttttgcttgcgacgacaatgtcgtctacataagtgaagatgttgcggcctacttggttttcaaggaccttcttgcccgagaagcaatcaaggagggacatgacttcgtagcctgctgcactgttgacaattttgtcaattcatggcagagggaaattgtccttggggcaggccttattgaggggtactgccttcgtcccatcgttgctttggagctgggccttgactttttcgtctgcgactgggcgagtgctctcgaagcctttgcgctctgccgtgatgcagtggaaggtgtccttactgccaaatccgtagaggggattatttgcaggcttgaggaggctgtgactgattcccatatgatcgaaggcatgcagaaaaatgatatcagcctgattgccgttgtcgacaagcactttgtgtag

SEQ ID NO: 34395 - DNA, 486 bp, Zea mays
  Peptide Sequence Number=SeqID_77770
atgacgcccgagcagaagcaagacgagctgaagaagctgcagagcgcgaaaagccacctcacgccgccggtgatcgccggtgaccacgggagcattacagcatcgtcgagctcctccccggcgccacgttcagacgtccgtcgagcggtctgtgccgccgcgccgaggtgcacccctgctcgctgtttaggtcgagcgcccaagctccgccacgccccccgcctctgccccgctcttgttcgtgcgctgaggtgcgcccctgctccctgtttaggccgagtgttggatcctgggcagcgagtcgggcttctgggcgcggtcagcgtagtggagcgagcgccgccagagaaaaaccccaggtacgagaagcttgagttcttgaattttgaggggtcacaggtgattgtggtagtggtgacactgagggtacttcaccaccccaagaactctcaccctcctcacctgtaccagaaggatacaacatag

SEQ ID NO: 34396 - DNA, 141 bp, Zea mays
  Peptide Sequence Number=SeqID_77771
atggccatgatgggttcaacatcggaaaagatgtacctctgccaggtgaagaagcgacaaacttttgctgtttctattccaaggtggtctcaaaagaagaaaaccaagagcagagccgcgggaggaaaggttcctccataa

SEQ ID NO: 34397 - DNA, 474 bp, Zea mays
  Peptide Sequence Number=SeqID_77772
atggatcctggcacacatatgctatgcgctcggttctaccccctggaaccgggtgtgacagaagtgatggttcgcactctccaaaccactcgcgtcaacaccaactacgcccctcaaccccggcagatcctggtctacccagtggtagtcgaggaagctccagcgaatctccctcccgtccgagtagagaacgtgatcaacctggaggacagctcggaggagcagctgccgacccccaccccgttggccgagtccctggccttcgcagctgggtcatcgacgtcagcatcgtcggcaccagccttccaagcacctgcacctggaggcgacgaccccgacgactccggagacggcgatgacgaggatgacgacgacgaagacgatggagaagacggacacatcaacgaggaagctgactacgcccagcaggacaacttcatggggtttggtcctgttgtcgaacattacacataa

SEQ ID NO: 34398 - DNA, 315 bp, Zea mays
  Peptide Sequence Number=SeqID_77773
atggacaaaggtagtgtttcccctcgcctaggcggctaccagcgtggcggcttggcttgcagccagtgcgcaggccacgtcgcgcgccaggccggctcctccgcgccgagcgggcccaccggcggccccaccgcgacgtcgcggcgccttgccctgcaccggccatcccgcgcgcctcaggccgacgctgccgcgccgagcgagcgagctcaagccgagcgactccgatcgttcgcttcgttgattaatggagctcttcacgcgaccgtttcttcttcctctcccactagtgcgtacgcgcgcctgcgcgcgtaa

SEQ ID NO: 34399 - DNA, 309 bp, Zea mays
  Peptide Sequence Number=SeqID_77774
atgaccccgagcccctgcgccgtgacacccgcctgcgcccaggacccggccgagccgctcgcgacagaagccctaaaatcccacgccgtccattcatcactcgacgcgcgccaccaggagcacccgctgccgagcgctcgccaggacctggcgcccagccctgcgcagctgccgcgaccttcctcgcgcgaccccgcggccgagcgcatcgcgccgagcgcccagcccgacgccgcgctcagaagcctgacgcaccctgtgcctcgccgccccgaagccgcccgcgccaagactgcaggaacgcgctag

SEQ ID NO: 34400 - DNA, 234 bp, Zea mays
  Peptide Sequence Number=SeqID_77775
atggatggccgagcgcgggtggccgggttctggcgttgggtcggcttcctggcgcgttcctgcagtcttggcgcgggcggcttcggggcgtcgaggcacagggtgcgtcgggcttctaagcgcggcgtcgggctgggcgctcggcgcgatgcgctcggccgcggggtcaagcggggaaggtcgcgggaagaatacaataaggtgagcggcttggataacgccaagcagatctag

SEQ ID NO: 34401 - DNA, 291 bp, Zea mays
  Peptide Sequence Number=SeqID_77776
atggcgtcgtttggcggggagaccgacccaagtatgggcgatttctcgccggtgataaggccgcgtcagggaaccttgctgctccgcggatgtggcaccggtcgtgctgtgcttcatcccggtatcctggacgcaggctggtgcgtgcgctggaccataccgggtgcgtgctggtggtcacggggaagcagggatgaccggaggacaggtgtctttgcaccaatggcgcgccaccgctgcgttgccgcacctcgtggtgtggggagctcgtcgatctactgccgatggtga

SEQ ID NO: 34402 - DNA, 1218 bp, Zea mays
  Peptide Sequence Number=SeqID_77777
atggggagcgctcgcgttgctttcgtcttgctgttgttggaggaacaccacttcgcagaagttggcagcccggctgcatccccttgccgatggtcacccaagacggtgaccaccagtttgatggtggggagaagcaagctgggctgcggcctctgccccgccctcagcttcaaggatcttcatcatccttgctggggcggagggcgaggcgagccggggcctgccttcgcgtgggccagcgtcccgcttccttcagcttctgggggtggaaaccatcctccagctctgcggaggaggcgccctccagccatgccggggaaggcgaactgttgttgcccagccagggtgcaacattccgtcctttgtccgggcgacggtggccagccgcaccgggggggggggggggtctcccaacacgtcgtacgccgtgagggcggcactcgtgttctgggacggtcccattctcgttttcgtgacgaggacgggagtgaggacctgccggtgcgctttggggcggccggtgcccgctggtgcggtgttggcgggcaggtggacgtcaccgtcggtgctgaggtggtggcagctggagaaagcttctccgccgacgagaccgtcagcgccacccgtggaccgacctccggctctttggctttaatatctggttctcgtccccctcgaggggacgcgaacgagagccttccggcggcagcgtccgtcctgggaccatcgctgctgctgcagaggtcgctggcgagtcgcccggagttcatcgtcctgcacgctctccgatgtggaggttgttcatacccgcgggagtggaaccggagttccatttgtaatggcaccttgagtgccggtaggaaccctcggccgctctacgatgagctggagccggaggcagcggtgtcagcatggacagaggcagagttggctcgaaaagaagacttcgtcggcccaggagcagatcctccgaccgtgttgtcgtccgaggccaggtcggatttcgccgaaggtggagttgacaccgagggtgctgctgctccccctattgatgacttatttgtcggtaatagaattgtttatccgagcaagagttacttttcatggaaggtgatgagtgaggatcccactgtcgaagtggtcgaaaagcacgaaaggtgttctggcagaaagattttttccgaggaaaattttgacgcagagggggcccccatctag

SEQ ID NO: 34403 - DNA, 204 bp, Zea mays
  Peptide Sequence Number=SeqID_77778
atggcgtcgtttggcggggagaccgacccaagtatgggcgatttctcgccggtgataaggccgcgtcagggaaccttgctgctccgcggatgtggcaccggtcgtgctgtgcttcatcccgacgagcaagctactgtggattctgaggttcagcaagtagaagtagctgagcaggagctcattgaagacaagttgtgcccttga

SEQ ID NO: 34404 - DNA, 750 bp, Zea mays
  Peptide Sequence Number=SeqID_77779
atggcggcagcaagcgagcggaagcagcgatcaaatcgactgcaggctcacgtcccctcctggagcagcaggagagccctctcccacaacgggaagacgacgcgcccgtgtttcgttcctcgaacggctcgcgcacgcacaacggctgcctcgcgaaccactcgtccagtcgcattaactctgcggcagggcaggcggcacctttggcaggcaaagcaggcgacgcttcacccccgccatgatgaccacgtcaaaaaagggaccgagaaaggggatacttcgaaagggatccttctccacgaaggaagcgggccccgagccctcctactgctcagatgttcgaaggctggcccctcggaagggttcgacagccgcctcagagcactcgggctccacgcccactactggtcagaggttcgaaggctggcccctcggaagggttcgatagccgcctcaggccactcgggctctgcgcccactactgatcaggggttcgtaggctggcccccaaagggttcgacagccgcctcagagcacgcagagcgagggatgactctggatacgtccgatacatggctgaggctcgggctatgctcccgaggtaccctaggacatttccgagaccagcaagagcgattctataatggaatcccactagatggaggcatcgagccctcggaccctatcaaacgggaccgagtccggcaaatcacctgtaggtacttttggagtgcgcctctgggccactag

SEQ ID NO: 34405 - DNA, 573 bp, Zea mays
  Peptide Sequence Number=SeqID_77780
atgtgggactattcccaacaggaggctcctccgaggtcgaggctgagtctgggcccgggggtcgggcgaggcggagaccgccttccggagtcgaggctgagtccgagcctcgggggtcgggcgaggcggagaccgtcttccgaggtcgaggctgagtccgagctcaggggtcgggcgaggcggagtccgtcttccgaggtcgaggctgagtccgagcttaggggtcgggcgaggcggagtccgtattccgaggtcgaggttgagtccgagctcaggggtcgggcgaggcggagtccgtcttccgaggtcgaggctgagtccgagctcaagggtcgggcgaggcggagatcgtcttccgaggtcgaggttgagtccgagccctggggtcgggcgaggcggagctttctatggcgcctgaggccggtcttggcggctgtcagcctcaccctgacgggtggcacagcagtcggagcagcacaggcggcgctgttttcctgtcaggtcggccagtggaggggcgaagtgactgaggtcacttcggccttatcgactgaggagcatgcgtcaggataa

SEQ ID NO: 34406 - DNA, 693 bp, Zea mays
  Peptide Sequence Number=SeqID_77781
atggctgaaaggtaccaactcccacggagttgcgttcccccaacgacaaggcggaaggactgcgggcagcccccatccgggggttcggaaggtggaaagatacgatgcataagggagcgcgaagacatggtcgcctttcaagggggtcaccctccttttaaaggcgactctccctacttgcgtccccagccgtcacgggctgagtcttctccaacacgctccaaggtcctccccctacggcgcgggggctgggtcccacgcgtcatgcaagccggcccagggcagaagaagccaaaccgccgcgcgcggtgcatgcaaccgtccagcggttacaagcgtccctccactttcgcccagaccagcgggggaagcgagcgacgcttcgccttcgccataatgaccgcgtcaaaaaagggaccgggaaagggggataccccgaaaaggatccttctccgtgaaggaaacaggctccgagcctccctactgatcagaggttcgaaggctggcccctcggaggggtttaacagccgcctcagagtgcgtgggctccacacccactactggtcagaggttcgaaggccggcccctcggaagggttcaacggccgcctcaggccactcgggctccgcgcccactactgatcagaggttcgaaggctggccctcgaagggttcacagccgcctcagacatag

SEQ ID NO: 34407 - DNA, 840 bp, Zea mays
  Peptide Sequence Number=SeqID_77782
atgagatctcttcttacccgcctcttcacctcaactcacattgtcatggcctcgtcttccttctcttcctctccatctcggcggttggtccacctcacacgccatctcgtctcctcttcttccggcgagctttcctcagtcggcgcccccgccgctgccgcctcagatgccgaccccgtgaaaagcccacgctccactgcctccagggttcacgccgcggtgctggtctgcctcttcgaggaccctagcagtgggccacgggtcctgcttacaaagcgcgcttcctccctctcctcccactccgatccgaaggccacagctctacgggaggcgaaggaggagattggactggatccggcgcttgtttctgttgttacagttcttgagcctttcctatcaaagaatggcctcactgttgttcctgtcattggtatggtcccagataaagccttatacaagcctgtcttgaataaagctgaagtggaggacatctttgacgcacctctggagatgtttctaaaggacgaccaccggaggacaagacagatgaactggatgggcatagatatccccgtccagtttttcgactacgaggcagatggcaagaagttcgtgatttgggggcttgactgcgcacatcctgacacgcgcagcggcagtcattttcgggaggaaaccatcattcgtcgagcttcccagacccaaatatgcaggctgcacatctcgtgcatctgcacgtgctgcctctgcgtgacggtggtgctggaggtggcggtggagctcatcaagccgccgctgcacgttatgcctggttcacctccatccaagataccccgctag

SEQ ID NO: 34408 - DNA, 879 bp, Zea mays
  Peptide Sequence Number=SeqID_77783
atgcaggcggcatgcaaccgcaccaaggggacgcaccctttcgactttgatgcgtccagcatgggggcccaggcccacacgtcatccgcgggagaaggcgcgacgggtgatatggccaaaagtgggccggcagtaatggaggcggcaggcgggcggaagcagcggtcaagtcgtctgcaggctcacgtcccctccggggacagcgagagagccctctcccacggcgtgaagacgacacgcccgtgttccgttcctcgaacggctcgtgcacgcacaatggctgccccgcgaaccactcgtcccgtcgcattaactctgcggcaggacaggcgacacctttggcaggcgaagcaggcgacacttcacctccgctataatgaccgcgtcaaaaaagggaccgggaaaggggatactctaaaagggatccttctccgcgaagggagcgggccccgagccctcctactgatcagaggttcgaaggctggcccctcggaagggtacaacagccgcctcagagcactcgggctccgcgcccactactggtcagaggttcgaaggctggcccctcggaagggttcgacagccgcctcaggcccctcgggcttcgcgcccactgctggtcagaggccggcccccgaagggttcgacagccgcctcagagcacgcagagcgagggatgactctgggtatgtccggtacatggccgaggctcgggctacgctcccgagcctcgacttcgtaacgatggactctgccctcgccccgaccccagggctcggactcagcctcgacttcgacgatggactccgcctcgcccgaccccagggctcggactcaacctcgacctcggacgacggactccgcctcgcccgaccctag

SEQ ID NO: 34409 - DNA, 981 bp, Zea mays
  Peptide Sequence Number=SeqID_77784
atgaacaatcgaatcaataatcaatttatctcgcattatttcttgagtctaggtcggcctgccgagcctagacaacacccaggatctctcctccccgacggggtccctcccgggagtgagatccaggcgccgtcggcgaccttcgccgcccctacgcacgcgcggaccatccggctcgtcaggcaggaaaccctagccctgtcccaagtcgcggaccgtcccagcccctggccgcggaccgtccgcgcctgtgcagagagcaccgccgccagttttcatagagtgataggcgcccaaaaaggcaccaacacacttttggcgactccgctggggacaacacatatagactcatcagatcggccctcaatggccggttcaagggatagctttgacgtctcccctagcaatatcatagagttgacttgggagaccttgccggctgacaaacagttccagttcgaggagcacaaggagcagctgatccaagaagcaaaggcgaagttcctgaccaacttcaagatggacaggaacaacaaagtcgttcggcaacgggcgacagatctggcttcgcttcgaccttccatgactacccccaaggtgccaaaggttcaactcaaaccaataaaaggtccaagtcagggttcaaaaagaaaggagcaaaagaaaccgaaggatgccctggtctggcgcaccggactgtccggtgtgccaccggacagtgtccggtgcaccagggtggatcaactcgaactcgccaccttcgggtttctggaaaagccactccactataattcaccggactgtctgttcgcgcagagtcagagcaggcgccagaaggcgcaccggacagtgaacagtgcctgtccagtgcaccatcgaactgtccggtggcccaggctgtcagagctccaacggtcgaaccctaatggagacaccaagttgtggtggtccttgtggggtctaagtgacccaattgattga

SEQ ID NO: 34410 - DNA, 264 bp, Zea mays
  Peptide Sequence Number=SeqID_77785
atgggggcgtatggcatgccatcagccaccaacaatccagatgcctctggtcagtccttcagcgaagcgttgaagagttcgaggaagcatctgttgcagtacgatgccttcgaatctgcagacggtggtccaggcgagactccatctgtgcggtgcgtcgacaccgactaccatggcaccggcaccagcaactccatctatgcggcggtgcaaggtggcgtcggggccggggctcgggccggcggggttcgatgggtgctctag

SEQ ID NO: 34411 - DNA, 351 bp, Zea mays
  Peptide Sequence Number=SeqID_77786
atgggcaagagcaagaagggtggtagttcttcgcatcactccggtgataagcgaaagcacgactcccaggggattgccgcagaggtgtggacctatatccgggtcgtcgagcgcaccgggctcgagggctcggatgagtcggagtactcctcagacgaggagaactcctcggactcgtccgaggagggcggcggcgacggcgacggcggtgacgacgacgacgatggaggtgatggtgacatcggcggtgacggcggcaaaggcgacggcaagggcggtgacggcggcggcaagggtggcagcggtgatggcggcgatggcagcaagggcagcaacaaggccagtggctag

SEQ ID NO: 34412 - DNA, 351 bp, Zea mays
  Peptide Sequence Number=SeqID_77787
atgaagttagtcctgccaactgaagggatgatggaatatgtgtcaccgtcacctcccctcaagatactttctcatgcacaaaatttggcgtgcggcagaatcagctgggtcgacgatgtcgaagtagcgaatcaacagggtcgacgaggtcagaagatcacgagcagtcgcgtgaagacgcttcccaaaaaccttattcgccctctcccggtgcaggatctagaagacgaagggttccggagacctgctctcctgatcgcagatgcacctctgcggtcgggacgaagggaactaaaaggcggctcagctatgaagagaggcgaacgcgaactgggatctgggatgatctag

SEQ ID NO: 34413 - DNA, 144 bp, Zea mays
  Peptide Sequence Number=SeqID_77788
atgaccgttggtggaggttgtctgtcgtatggtgcaccggacagtccggtgcacaccggacatgtccggcgatcgttggcgcgaagtagccgttaccccgcagttacaccggacagtccggtgtacatcggacatgtccggtga

SEQ ID NO: 34414 - DNA, 486 bp, Zea mays
  Peptide Sequence Number=SeqID_77789
atgtcctgtttccaaggatttttcttctgctcggaagtggcgtctttgctgctacacaacttctgcgtctaccacaccaatccccaggggcacgaggtcagtgatgctggttcaatccctgtgataagagtcctacagatgggagcagctccaatgtcgtcagatgtgccggtgccatgtgttgctgatctcgctgatcaagtcgcagatgtgcttcatttcttcagattagtccagttgcaattggatttatgcttttttccttttgttcgtggcatcttgtttcctatggtttttatgcagcaaacttatgtgggtaatagcactgatcttgatgatgaaccagatggagaaaatccttgcggcgtaaagaaagacttggaagcaatggtgttccacccagaacaagctggctcaaggtatgacatggtcttgttggccccctgtggtagcgcaaggccttcgttgctagctgcactgatgtga

SEQ ID NO: 34415 - DNA, 657 bp, Zea mays
  Peptide Sequence Number=SeqID_77790
atggacaggccgcatcggcatcggaatgaggacttgaccggcgggcgcgccggggttcgtcgcggcggcggcggcggcgcgatggaggcgagccggcgcgggcggttccaccgccacgatgggcccgccgcgcccgtcccggtggtggaccaggcggactgcacggcgcagacgtgccggtcctgcgtggcggtgacgctggcggacgccatcgcgctcggctgctgcccgtgcgcggtggtcagcctgctggggctggcgctcgtcaaggccccgctcgccctggcgcgccgctgcctgcggcggctgcgcggcgagctgcggcacaggaagcgggtgcgcgacatgcacggccccgccgacaaggccaagtgccgcagctccgacgccggcgccgcgtcgaggggcgcgtgggccttggaggcggccgcgcgggcgagggcgagcaactcgtcgtcgtcaggctcaggcaggctcgacgcggagaaggtgtggatggaggagatgtaccgggtggggcactgggggttcggccgcctgtccgtctccgtctccgtctccgtcacccctcccccgcccgtctggcccggacgcagccccgacggcgacggcggcggcggcgggagaaaggacgtggacctgcggtgcgagtcgtga

SEQ ID NO: 34416 - DNA, 207 bp, Zea mays
  Peptide Sequence Number=SeqID_77791
atggatctcttcgtcgtccgccggccgataccctgctgccgcctgacccaggggtgggcccggcgtggagcagtaaattgccggggtttggagagtgaatcagcaatgcggctaaagaccttcttgcttgaggaatcctcggcggcagggacggcacctgccagcgttgcggcgcgggtctcgctgcagactgcaggcagcggctag

SEQ ID NO: 34417 - DNA, 561 bp, Zea mays
  Peptide Sequence Number=SeqID_77792
atgaagagcactgtcacaggcctcccacagactgcaaagaatgggctcgcgcagaagctttccatcgcccgcccacccgcccctacttccgcgactcaatctggatccttccgcagatgcagccaaccattacagctcgtcagtatccttccgcaaatgcagccgcttatggtgactcgccccttccacgactgcatggtggctccttctcccgagcggggctgcaactacctccgcctatggtggctccatgatctctgcaagcgtcttgagaaatctaggcgacctataggcatagcatcggtcggagcgagggtgagcaggagaccctatctacagagcggcgcgtcgtccagagcgagggtgagcagtggagaagaacatacgacggccatatcgcacatcactacatcagcacgattttttccaaattcatgtgtcgagattttacaatgtttagtcgttgagttccctactattcatgctggcaagcctcccaatgctcgtgtatcagtttatagtgcactgatgctcggaagtttatcaacatgtattagttag

SEQ ID NO: 34418 - DNA, 1206 bp, Zea mays
  Peptide Sequence Number=SeqID_77793
atggattctttagacgagacaaatgaagtacccgttgatgatagccaattggacaagcattcaacagttgataatgaatcacctctcgatggaaaaatagatgagcataccagacttcctatacatcctattgaagaagatatatttggaacacagataaattatctagcgccaatagatgaatgcaaatttgcattgcatcataataaaccaaaaaaggacatggcgactgtaattgttcaagaagattatatgtgtaatcaaggagatatgacccttatcgaatcaattaaaaacattccttatgcgacaatggatgttgaacttgtatgcattggctctcaagtaatttccaagaaatttatggaatgtctatttcaaccggattcttatttgagggatgagatcataaattcttacatatacttattgatagcacaagaacatatgaagcagcgtcctggtggtacagtccacatagagattacatttctaaagggtttacaaaagcaaatagatggtgtgtcgcattacatgaaacttaaagaccataattggctagaccttcaagttgtctattggccttggaaacttatagagtttaaagatgccaagcagacagatatgccaaaattgaccgctattttattgtcttcggatttgaacaagagaaagggatgtctgttatataaaaataagacaaataaaagtacagaagacaatgagactaactccagtggtgttgagattttagaaccctccccaaatcctaacaagaggaaacgaagccctccgattagccccgaagatgatcatatatcattatattttgaagaaatatgtgccaaagaagagaatgatgtcatccctaatccaaccttcgttaatgagtgtggccaggactctttaattagtggtctttccacgaaggatatgccagtaagaaaagcagatatgatagagtttctatgcgattatatcatgacaattcaagatgccacaattttagatgttaatactggtcattttgctctgcacattatggagtggtgggaaagtgggttaaaagcgcaatttagtatggatggtgcgactctgcataggaacttacttattgatctgttgacatacgaggggaacacatatcgatttaacattcctgtaaatatacgagagtaccttgatcgtattatggaaaaagattag

SEQ ID NO: 34419 - DNA, 240 bp, Zea mays
  Peptide Sequence Number=SeqID_77794
atgggcgtggtggtagggaggcagcagatccagcgtgcagactgcagagacgacgtgtgtgagggagaggtgggaagggagagtgagggtgaggacgaaccgacgaattctcaaaggtactcgtggagcgcgacgagcgagccgaaggtgatggcggtgtcggagcagacggcgtcgaagaagggccacagcgtggcggcggggaccgcggcggcggggagggagagggggagaaggtga

SEQ ID NO: 34420 - DNA, 510 bp, Zea mays
  Peptide Sequence Number=SeqID_77795
atggcgcctcctgttgacatggctggtccgcgccctcggttgggcgatgtggaggctcctccgaggtcgaggtcgagtccgtcttccatggccgaggccgagtccaagcccctaggtcgggcgaggcggaggccgttggctgaggccagggcggattttgagtcctggggtcgggcgaagcggagttcgtcgtcttctggggctgagcccaagtccgagccctgggttgggcggagcggagttcgccgtcttccggggctttgcccgagtccgagccctgggtcgggcggagcggagttcgccgtcttccggggcttagcccgagtccaagccctgggtcggctttatgctgatgggggttaccagctgagaattaggagccttgagggtacccctaattatggtccccgacaacaacagtcacagagaaagcaacacaagagacacacgatttttatcctgtggtttggccaagtaacacttgcctacttccacgttgtggcgtcctaa

SEQ ID NO: 34421 - DNA, 240 bp, Zea mays
  Peptide Sequence Number=SeqID_77796
atggttcgcccaaccgagcatgtccccgatccacaaaactatatagttgggaacctcacagctcgtcacaaaatgaaggaggcgaggaaccactaccacacacggggctcctcgcgaggcggcggcggcaccgctgccgagcgcgacctggtgttacagtggggcaaccagaagcgcatgcgctgtgtcaaggtgcagcgccgcgacgagaccgccgccgagaagaccaccatcagctag

SEQ ID NO: 34422 - DNA, 234 bp, Zea mays
  Peptide Sequence Number=SeqID_77797
atggcgcaccggacagtccggtgcacaccggacagtctggtgccccctgccacgtcatcactgccgttggattcgaccgttgaagcttctgacttgtgggcccgcctgggtgtccggtgcacaccggacaggataagtttctctttgaaatgtcaagcctatcaaaagctaagatggaaattcatgactataatggagaccatgtggcatagaacaaaggctcttacaagttag

SEQ ID NO: 34423 - DNA, 591 bp, Zea mays
  Peptide Sequence Number=SeqID_77798
atgtggggtccgcacggctgggaggtggtccgggagaggtctgaccgggcaattgatcagatggcacatgccgaggaggtcgaagaccttggtgatctggacagtgtgttgcccgtgacatcgggggtggaggcggcgccgccatccgatgccagcgaggacccctcaacggtccctgcaccgacagtgccaactggagccagcgaagaccccgcgccgacgggcgaggacgccttgaaggcggtggttctgaggtttgggcctgcgcacgcaaccgctactaacaatactatttttgtggcagcttcgaccgtggctgccgatgatgatttgtttggctctgtgtctaagtgttttgagtctgatgattctgggagttcgattgcatggacggaggagtcttcagatgaggacttggattattttgcagcgttagatgtggctgcagcggagccttcgccgcgcgtggagggttctgaggggctcccgggtgaagaggagctgcgaaatctttttgagggtgaggaattgaggataatgctgttcaactacagggagatgggtatcatcccgaaggttgagccaatgtaa

SEQ ID NO: 34424 - DNA, 327 bp, Zea mays
  Peptide Sequence Number=SeqID_77799
atggaggccgagaagggggaactccgacgccagctggtggaggagaggcgggaggcgaacaaggcctttgccgatgcgcaggctgcgcaaaccgatgccaagcttgctcgggcggagggcagtctcgcctgccaacgcgccgaggatttggaggcaaggctcaacagcctgcgcaatcgcgtggataaagccgaggcctcgacgcgcgcggaggtcgcgcggacgcatgcgcagttcgtggatgcgtaccgggagttgggtgcgcgtaccgccgcctttgacacgcccagccaagagatgggtctccgcttcctcgagtggttatag

SEQ ID NO: 34425 - DNA, 111 bp, Zea mays
  Peptide Sequence Number=SeqID_77800
atgaaggcccacgacgaagtcccgccatcccacgtcctcacccaacctggaggcccacgtgtctgtaaccctccattatgggaatattctagggataatccaggtgcctga

SEQ ID NO: 34426 - DNA, 471 bp, Zea mays
  Peptide Sequence Number=SeqID_77801
gaggaaagggatgacggccaagctctccaccagtgccgacaccctagccttggtgcggctctccgcagcagcgcaggcggctgcgatccagccctcctccccgcgcttcttcttctcctcgctggccgggaccaaccgggcccgcatcaccgcatcgccattgccgtcgatctcttcgacgagtccgccttcaccgtcaagtgggccgtgcagaactacctccgccccggggacgccgtcgtgctgctccacgtgcgccccacctccgttctctacggcgccgactggggttccatcctagtctccatcgctgacgaggctgacgctgccgaggacaccgccgcctcgctccttgatgtaggtgaggacgcagagggagacgaccatggaggagggaggccgcccccgggagggaaagatgagcctcccggggggccgggtcagctagtgtgggttggaggcggctggtga

SEQ ID NO: 34427 - DNA, 249 bp, Zea mays
  Peptide Sequence Number=SeqID_77802
atgtacatgtacggagtcatgaagaagcttggggaaagtggttatatcatggccgtccaccagctcaggatggctagctccgcctataactgcgtgaacaacatcctgcccaacatcatctcccagctcctcgcattctccaacaagttctgctatgagggcatgaagccaacctacgacaaccaggtgttcctatgggagaccctgaagtcgcttacccacctagacatcacgcgtgttgttattgga

SEQ ID NO: 34428 - DNA, 267 bp, Zea mays
  Peptide Sequence Number=SeqID_77803
atgtgcagttgcttcgatcttaagtacatgcatacaggtgatgaagcagcagaaagaaaagagggtcaagtcatgtataacttgagcatgcacaaaacaaaatggaacacgcaagaacgtgtgagcagcgccaccaccgtcaccaatccgggtaagaaatgcccagatctgttcaccgtcgtctgtgcttcgtttagcaccaggttaattcacgtttgggcgtcggtcggggtgagctgggtccgcgccggcgaacctccgccgtga

SEQ ID NO: 34429 - DNA, 561 bp, Zea mays
  Peptide Sequence Number=SeqID_77804
atggggtacggacctagagctatgctcttcggtggaggacatcaaatgcttaagtgtgtacctaatcccgatgaatcaaaaattggactaatattaagcaaggctttaagaatacaacaggagaaagaagaagttgagatatcaaatcttcaatacaaagttgaaacacttcgaaaatctctagaagaaaaagagaccgaagtaatatccttgaaagagaagacaaccgagaagatcttctcaactagtgcgatttcaagggcaatctcatactcccatgaagacactaagagagaacttggttggatagaaaaggagctaggagaagtcgagtcaataatcaatgctcgtagtgattactgtgcaatgattacttcaatgctcgagaatgccgactatcaacatgttaaagtcataggagaagcaaacttcggcatggtcgtggaagatattagggctcctttgaagaacatactcagcgttgtgaaaagatttttcttcgagttgtggaacaaagagcaaagaaatgaagaagaagacgaagaagctgaagaagtatga

SEQ ID NO: 34430 - DNA, 432 bp, Zea mays
  Peptide Sequence Number=SeqID_77805
atgcctatattcagattcagtatatattcagtacatgtgctagactcgaacgctgcgctctatagccgacagaagtctgcggaggcgaagttgtacgagacttggatgatgcccaccatgtgttcgttgaaatcccctcaagttgcaaagaagtatatttatgatgtgcacataccggataaggaggaagggctcaaggccaggtgccactaccggagcggtaaggtgagtggtgctgccgacccattcatccatcaactgcagtctctaggtcctattcatattgttcgtccatctatcgcgatcgcatccaggacggctggctccacctacaactgcgtggacaacatcctgcccaacatcatctcccagctcctcgcattctccaacaagttctgctatgagggcctgaagccaacctacgacaactag

SEQ ID NO: 34431 - DNA, 471 bp, Zea mays
  Peptide Sequence Number=SeqID_77806
atgtaccggtatgaaacacttctaattagagccgcccaacgtcggatggacggtggcgagttcatcgtccccacagccacccatagtcacgatggtgaaagggaaatgtgcccttgggccatttctaagtattttggtgatttagtgtcaaaacaagtgcttaaatgtaaaatggtgaacaaagtacaaaccaaggataaaggaaaaatccaattggaaatgtcttggctcgagcagccaagaatctgctcagtctcggagcaccggactgtccggtggtgcaccggacagagtccggtgcgccagactggatcgagcgaagtggccgctctcgggaattcaccggcgacgtacggctataattcaccggactatccggtgtgcaccggactgtccggtgagccaacggtcggccgggccaacggtcggccgcgtgatctgcgcgggacacgtggccgagccaacggctag

SEQ ID NO: 34432 - DNA, 306 bp, Zea mays
  Peptide Sequence Number=SeqID_77807
atgtacatgtacggagtcatgaagaagcttggggaaagtggttatatcatggccgtccaccagctcaggaaggtttataagttgctaccacaacttttggttggccgatatggcagtcttcaccgcgcggcagcctcatccccgccggcgagcctccactaccctccgccgaaggcgaaggcgtcgaaggtgaagatggcggtcatccatgacgcactccaccgcctgcacatcgccaatgagaagggcaactcgttgtgcctagcagacgccctccgcgcgcaccacaactgtgatagacactag

SEQ ID NO: 34433 - DNA, 735 bp, Zea mays
  Peptide Sequence Number=SeqID_77808
atggcgaatactgtggtggcgtcaatttggtgcgccataggcgtaccaggcacaaccacggcagcgcaagcacggacccatggcggcaactacggccagcgcactacatccatgaatcaagtcccaaattccaaattcgatcaacgctgcgccatgcttagggaagggcaaattgtaccacagtccacgcggcggcgcgacttttcagcgaaccttcacgacgacgacgaggttcgtccgccccgaaccgtcttcccagtacgcccgcggctcccacaccacaggcaggaccggcggacatcagattcccccccccccaatccgagcctagctggcgccggcgatgagccaataactctgcggcaccagcggattcctagcggcgaacttgagcctaggcaagcttcggtgcgtgagaaatttcaaacgggggtagctgggctgaggacgggcggttatggtgatcttatgcccccaatcccccgcgagaatcggtcccccacaacaaatcccggcgggtacggagttcggcgcggtccgcgcgggttgttacagggcgccgcgtcgggtggaagacggcactgctcggacgggcccacacgtcactggagccagtcaccgcgccgtgcaacactcgggtctctggagttctgggcccgcgcgtcagcacaagcgccttcagcaccagcgcacgcggagagtgggagaagtgggccgcacgggtgcaatggctaa

SEQ ID NO: 34434 - DNA, 846 bp, Zea mays
  Peptide Sequence Number=SeqID_77809
atgtcttcttgctcccttatgcgtcgcgtctttccaccttccaagcccccggatgggggcccggctgcacccctccaccggcggtcacccaagatggtgacctccagcttgatggtgggggaaagcgagccgggctgcggcctctccccctccctcagcctcaaggattttcatcaccaaggctggggaggggactgcagcgtgcccggctttcggacgcgagtggcttcggagccgctcgcggcgccggcgtctgccacggcagctggaagaggttcttccgccggcgtgatagccaaggctggccacggaccgacctccaactctacggccttctgcccgtccttgccttacgagttttggcatgggcaggggcctcctagcagcagcacccgccctgaggtcagtgctgccgctgttcggccccccggagcagaagtcgtcgtcgtcgctgctgctggagcaggtgacggcgcgccgttcgtcggtcttccgttgctccgcaggccttcccccatggagtggggttgttcgtacctgcggagggggaaccggagttccgtttgtaatggcacttcgaatgtcggtgtctttgtccattgtggctgtcgaggcctgaacatccgaggcctcggaccgggctggcacccttggaagatggttggccgaggcccctggggtaaccggtcgagccgcctgctcgggccggattcccggagaagtccctggaccgcgtcgccgtccgaggctgggtcggacctcgctgaaggtgtcgtcgatgccgagggtgctacagcccccttccagcgtgaagacccgagcctgcaggatcagattgtcttgtag

SEQ ID NO: 34435 - DNA, 741 bp, Zea mays
  Peptide Sequence Number=SeqID_77810
atgacggtggcaggcgggcgggagcagcggtcacgtcgtcggccagactcacgtcccgtccgggggcagcaagagaaccccctctcacggcgtgaagacagggcgcccgataagcgggtgacgcttcgccttcgccgtaacaaccgcgctaaaaaaggaaccgggctccgagccccccctactgatcagaggttcgaaggctggccccccgaggggttcaacagtcgcctcagatcgcgtgggccctacacccactactggtcagaggttcgaaggccagcccaccgaagggctccacggccgcctcaggctactcgggctccacgcccattactgatcaggggttcgaaggctggcctccgaagggttcacagtcgcctcagacgccgagcgagggatgaccaggggtacgttcgatacataaccaaggctcgggctgcgctcccgagctcaccggagacaccatgttcggtgcccatcgagggtaacatggcgctctcccccctcctccttgcggaaaggcgacgtaggggcgtatgtaaaaaagccgagtctgtccctgatcgccctctcgccctgtgcggaggctcgggggctgctctcgcaaacccggctccggccgaaccgttgacagcgtcaacataccagcccgagaacttgggccccgaccgtgcacccgggctacggccagttcgcatgagggaacaaccagaccagccgaagcattacgcaaggcattaa

SEQ ID NO: 34436 - DNA, 309 bp, Zea mays
  Peptide Sequence Number=SeqID_77811
atggcgcttcctgttgacgtggcgggcctgtgccctaggtcgggcgacgtggaggttcctccgaagccgaggtcgaaggccagggcggagtccgagccctggggtcgggcgaagcggagttcgtcgtcttctggggctgagcccgagtccgagccctgggtcgggcggagcggagttcgccgtcttccggggcttagcccgagtccgagccctgggtcgggcggagcggagttcgccgtcttccggggcctagcccgagtccgagccctgggtcgggcggagcggagttcgccgtcttctggggcttag

SEQ ID NO: 34437 - DNA, 432 bp, Zea mays
  Peptide Sequence Number=SeqID_77812
atggatccatttaatggtctctatgtgggagcatttagtccatatggaccagaaattgtgcagctccgtcagaagttcggccactggaatagttccgatgacgttgagtttttcgagtatgtcgaagcagtaaagttgactggtgatctgagtgtccctgctggccagataacatttcgtgcgaagattgggaagggcaagcgacttgagaatcggggcgcgtatccagaggaattcggtgtgattgccagttataaaggtcagggtagaatagctcagcctggattcaaaaatcctcgatgggtggatggtgagctgttggtgctcaatggcaaaggtagggtaatatataagaaatgtgttgaaactccggggcaagatgcccttaaactcactggatttctcaagacgttaatgcagaggagaaattaa

SEQ ID NO: 34438 - DNA, 1341 bp, Zea mays
  Peptide Sequence Number=SeqID_77813
atgccggccgatgccgctgccgccgcgcccgcccccgcccccgcaccgcatccacctccggcgatcctggacgctcgcacgggcggccgcatcctacgccgcgcggcggggcatctcgtccacccagcctctctcccgccgctcctcctcgcggcgctcctcctcctcctcttccgctccgctctcctggctggcacgctccgtctcgcctcctttgctgaccgcgacccggccctccgctcccttctcgcccgcctctcctctcccaatccgccatcgccgccgcctcccccacaccacctcccgcgacgccgctcgccgttcacctccccctcgtcctctctctccgacgatgatatcctggtcagccccctcgatcccaccgcctcaactccctccagccgccgcaacgcctcctaccaccatgtccaattcacctcctactccaccgtgcccaaaccctatacgttgccgctcccggcctccgcttcccccttcttcatcgccgtctataatgagacggcgcctccgaagcccgcctcgcggcggggcagcgagcttggcctgcttgacttgaccaggcgggacgcagcggccatcgtcaacctcctcgcgctgctgtcgtccgcacatatcttcgcgatcctcgggtacatcgccgtgcactccattgcgctgggcgcagtgtttgcgtccgtggcggggcaccacagacctgggcagcgtctagtgttcctcctcaccggtgctgccaagggcgctaagagactcacagggttcgcgttcctccggtgggccacgagggacgccgttgtgcagatgctctgcctctggttctttgccgatgtgcacgaccaggcccagctgttcaggctctttgtggtcgccaaactcatgccattctccgcttctgttaatccgtggcttggtgcagcggttgcaggcccagagctcggtggtttctttgttgcctgggctgtttttgatgcagttgtatcggttttgttcactgtggtgccttgggtggttgtcatggaccgtgatccacggccgcctgggcgcaatgctgtgaaggaagggtgctatcttgtatctctgatggcaactgatgccacaatgctcaagtgctgggaaacagttgtttgtggcagcatggggcggctcatcatggtgacatttggtggaaaggtttttggtggatttctgcattcaattgcgcaggtctacttcatggtggtatggctgctgttctactttgcagcaaggtgtaaggaggtgaggctgggtggtcgtcaatttggactggaggatgttgcagctgctcttgatggatttaggtag

SEQ ID NO: 34439 - DNA, 792 bp, Zea mays
  Peptide Sequence Number=SeqID_77814
atggaggacgacgtgttcgacgggcgcggccgctgcgggcagctgctcgcgccgccccctctaatccctcctccgcaaaccagacagagaccagcgttccctcatgcatccacgggacggacggggagcaaagcctcagcggcgagtgcgggcgatgaggtcttcggaggtgttgtcgcggctcgtgcaggagctcgtgctgtacgccgccggcgtcgcgctcagctgcctcgtcctcccaaccgcgccgcttcccagaaggcgcagcagcagaaggagatcgccaagcgctttggcggacccctcgtctccaccacgccctatgaggtccgttcgcctccccctccccctatcgagggttcacctcacttggcctcaaccctcctccgttggcgtctccctcaccgacaggacgtgattgcgtgcgacatcatcaaccccgacagcatggcgctgtccgcatcggcgatgtcaaccggccgcgggttgcgggcggagaaggtgaggaggatcttcgagcgcttcgacaccaatggggacggcgggctggaccgcaacgagatggccgccctcgtcgtcgccgtcaaccctcgggtcaagttcagcgaggaccagatctctgccatcctcgacgagttgttccgcacctacgccgagttcatcctccccgacggctgcgcgcatggcggctgcgcggggaaggaggtgggggcggctgtgcggggggcggctacggtagcgggagtgggatcgaacggtggggatggatgcaatcggacggttaggatatag

SEQ ID NO: 34440 - DNA, 333 bp, Zea mays
  Peptide Sequence Number=SeqID_77815
atggccgccctgccaaccactcgccccgtcgcattaactccgtggcgggacaggcggcgcttctggcaggagaagcgggcgacgcttcgccttcgccgtaataaccgcgccaaaaaagggaccgggaaaagggggataccccgaaaaggatccttccctgtgaaggaaccgggctccgagccccctactgatcagagaggttcgaaggccgcccccccgaagggctccacggccgcctcaggctactcgggctccgcgcccattactgatcaggggttcaaaggctggcccccgaagggttcacagttgcctcagacgccgagcgagggatga

SEQ ID NO: 34441 - DNA, 219 bp, Zea mays
  Peptide Sequence Number=SeqID_77816
atggcgaaggtggacacgatgctgacgagcaggggcaactccgggtgcgggcggtttcatggcacaagctacagcttcggggcttcgggcgtggatacaatggaccggtgcaaggacgacgacacgacaagggacatcgaggcgagcttcagctcgatgtcgcggcttcatcaacgacacggcaagacagcggggtgggcgcgcctagaaggcgcatag

SEQ ID NO: 34442 - DNA, 918 bp, Zea mays
  Peptide Sequence Number=SeqID_77817
atgtcttcttcctcccttatgcgtcgcgtctttccaccttccaagcccccggatgggggcccggctgcacccctccaccggcggtcacccaagatggtgacctccggcttgatggtgggggaaagcgagccgggctgcggcctctgcccctccctcagcctcaaagattttcatcaccagggctggggaggggactgcagcgtgcccggctttcggacgcgagtggcttcggagccgctcgcggcgccggcgtctgccacggcagctggaagaggttcttccgccggcgtgatagccaaggctggccacggaccgacctccaactctacggccttctgcccgtccttgccttatgagttttggcatgggcgggggcctcctggcagcagcatccgccctgaggtcagtgctgccgctgttcggccccccggagcagaagtcgtcgtcgtcgccgctgctggagcaggtgacggcgcgccgttcgtcggtcttccgttgctctgcaggccttcccccacggagtggggttgttcgtacctgcggagggggaaccggagttctgtttgtaatggcactttgaatgccaactcgcctgtcgattatctgaaccgcttcaccaagcatgagtcgccccgtgtcaaggtgacgagtgagccgggttgtccgttagcgggaccgacgtcggagttgaccagccgaggcctcggaccgggctggcgcccttggaagatggttggccgaggcccctggggtaaccggccgagccgcctgctcgggccggattcccggagaagtccctggaccgcgtcgccgtccgaggttgggtcggacctcgctgaaggtgtcgtcgatgccgagggtgctacagcccccttccagcgtgaagacccgagcctgcaggatcagattgtcttgtag

SEQ ID NO: 34443 - DNA, 774 bp, Zea mays
  Peptide Sequence Number=SeqID_77818
atggcgaaggaggaatcaaccctgggttcatctgcattggctggcacagatgagtgcgcagctacggcgctcaggtctcggatcagcatcctgctgctgcttccggtggtggcggttgtctccggcgagaccgccgcgcacccgggctacgcgcacgctgaggaggcatgcggcggtgtgctagaggcagaggcggagaaagcaacggtgctggtgcctgcgccggagcggcgcaaggagttcgacggcgggcggatcgtggacatcatccactactaccgcgaggacatgccggagtgggagtcatcggagggctccggcgagttcctgcagctggcgtggtccatgcgcaatggctccgacatcgctaacttctcggagctccggctcactgcgcactccggcacccacgtcgacgtgctaggacacgtcttcgagcactactacgacgcctgcttcaatgtcgacaccctcgaactcgccgtcctcaacggaccagcgttgttggttgacgttcccagagataagaacatcacagaaaacttgtggaagaaagaatttgatacaagttatgttggcttcatgaaggatggtgcacaatggttggttgataatacagacatcaaactagttggagttgactacttgtcggtgggcgcatttgatgaatgcattccagctcatctagtatttcttgaaaaaaggggatggtgtgaggacccaataatatggagctgggctagtgctgatccaatcgacactaatatgagctga

SEQ ID NO: 34444 - DNA, 90 bp, Zea mays
  Peptide Sequence Number=SeqID_77819
atggccctggcggaaggaaaacgtctggaaatggaaagtctgttggaggtgatggagggtgagcggaggatgatcctccgctcctgccag

SEQ ID NO: 34445 - DNA, 822 bp, Zea mays
  Peptide Sequence Number=SeqID_77820
atggttcgcatccagtttgccttccaaaacgggtgtgacataagtgccacctggagagactgcatcgtcgcctgcacgaggagcaggagcgccgccgctaggagcaggagcagcaggactcttcctcctcgcctcaataggaggtggagtctaggaggcagccttcccctgcacccagccagagatgcccctgcaccaccacagggcatctcggctactggaggataccctgacgaagatagagacggcaataacagtggtagttcgagccacaacatggagatcttggaggagcaggagctggagggatggatcgctagagccatcactcatgacgccgctcgcgggtgtcacttccacgacgctctcgacaccttgttgtgtccggccttcgaccgatacacttggtccatcgagtaccgttgtgtagtctaccagcatcgtcgcgggttatacccggaccagtgggaggctacttgcttggtgcgtcgttcgggtgatgatctccagggtgcagaggccttctcagagcattattctatcactgagagggacactgtcgaggcagtcatgcaagatgttgcacggcgtgcacttccgcagtattgcccgttgttcagcggggtagctgacgaccttgacctgaagtactaccctcgctgttcgactagcagtgctatagatgtaattgtctcaccagttggtgagggcaatcccaggctgaacagcatggtcaacctgcacccttaccgcttgctgccccatggtcattttacttatggcacccctgtctgcaggacccagatagatttggagccatag

SEQ ID NO: 34446 - DNA, 291 bp, Zea mays
  Peptide Sequence Number=SeqID_77821
atggaagttgtccctaaattcctcccagatgatggctttagggtctacatgggtggcgaggcatctgtggcatatgaacttgcatctaaggttgaggtgggggttgctgttgctgcacctactgcattgctgctaaagtctagccaatcgcttggactgcttgggtttgcatcaggaacttctgctcaatggtcatcgggggtggcggtggcaactgctgctgcggtgcctcctcctggggtgtctgctgctcttgctgagcacaccttccacctttgtatatgtttttag

SEQ ID NO: 34447 - DNA, 216 bp, Zea mays
  Peptide Sequence Number=SeqID_77822
atgtcgcagctcggggcctccgttggggtcgtgatccttcgccgatgcaccctgagagcgagggtggaggttgcggacatcggtgtaggaggctttcttgggaattgctcgccggagctctcaccaccgtgcggttcctgggtctgccgcgggctgagctactgcacgcgccatccttggtatgcgggggaggagacgcagcctggggccatctag

SEQ ID NO: 34448 - DNA, 318 bp, Zea mays
  Peptide Sequence Number=SeqID_77823
atgggcggaggcgccgataggtggggcccgctgagcagagaaggcgcaggcgcacggacgcgcaagggacggcgccgacacgcggggcccagatggcagagggaggaggagagagtgggcgtgagcgaggctgttgggacaaaggcaaacatgcccccttcgctcgactgttgctgcatcaacgtgtcaaagattgaaggccccgaggataagccccgcaagccgggctcgaggacgacgcccatgcgaaggctcaagtgctcccttcgctctggtgagccgaagcgaagaccatcgaaggctttggggctcagatga

SEQ ID NO: 34449 - DNA, 357 bp, Zea mays
  Peptide Sequence Number=SeqID_77824
atggcgaaggcagcgctcctggcagagaagaaaggcaaggctcttgcagacaacacccttcaggaggccttcgaagatgacgccatcaatagcaagaggcaacgccaggacaaccaccctacgcccgacgacactgtgtgcacctacagttccgagggggcactgcgagcacccccaccaggcttcgctcctccagaaggcgaatacaccatagaagacgatgagatcataggcatctcggccgaagatcagttaaagctgcgagccctgcgcatcaagaacaaccaccttcaaaagcaaaaagaaatactcgaagccaaacgccagcgcatcaccatgcaagccaaagtgcgataa

SEQ ID NO: 34450 - DNA, 249 bp, Zea mays
  Peptide Sequence Number=SeqID_77825
atggaaaaggaaaaaccactttgcactaggaaaaaccactttgcactagtacccatggtggagaaaagggcggcggggcttaccggcggtgagatagctctggtgaagtgtccagggaggtcggggaggttacgacagtcacgtcgaggtacgggtcagcgtcggagatggccggagttggtcggacctcgtgcgcaggcggggaagttcatcggcggcaaggattccggcctaaccacagcggaataa

SEQ ID NO: 34451 - DNA, 1566 bp, Zea mays
  Peptide Sequence Number=SeqID_77826
atgcctccgccctcgccctcccgccaatctcgtagcagcgcccgccccatccccgcagccgtcaccagcgcgtacatagaagctgaacaccggcaacgtgttcgcggcgctcgagtccctcaagaagaagaagaagggcggcaaaggcaaggcagccgggaggaggacggcgagggggccgcgcagcggcaagagccaccgcagaagaagcagttctgggctcccgcaccacttaccaccaagtcatgggcggacgtcgaggacgacaacgactacttcgccaccaccgcgtcgccacgcctcgtctggggcactgccggtgagcccgccaaggaagaggacgacatcgatgatgttgtgcgcgccgcccttcaggaggtagcaaccttgggcaacaaagttgagaaagagatggaggacatggccttcttctttgctgaattggcgctgatgcaatacggatacggcttggtgacacgtctgccttctctggttgctgcttctgctgtctacgcggtcaggctcactgtcaagagagctccctctggaccgacgccctcaagcaccacactgttgtgtaccaggtgctcggaggagcgacccgcgaagggcagcggcagctggtcttcacctgttggttcagtgccggctggagggcaaccaagagcagacaatggatccactacaattgaaattgctctgaagattgcatttcgtaaattttctcttgatcatggaattatggccagtagtgaaaatagtacaagaaatgaaagaaacattaagttgaaggtacttgttctaaatggttcctatcatggtgatactctgggtgttatggaagctcaagctccatcgtcttatacatctttttcttcagtagccatggtccacgttcagaggcggatctgcgcggcccagttactacagcgaataggcggcccatcagttattaccacaacattaaaggagatgccttcactccagaaagcattgcctccagaacttgctgataatgtgctcaggttatatcgtgaatgcttacggagggcgaagtatattggccatcagaaacacaatacagaacttttagtcgccatggtgagacaacaattcaagaaaaacatgcatgaaactgatccagagaagatacagaaaatgaaggacgatgctgcaaggggccttatcaatcatattctatatgagtccgagaagattacaggacgcaagttttcagcatgggggcagtttctacagctaaagcttcgcaatcttagaaagtgtctccttatcctggcagaagagtcatccatggacctggacctgaagatcctcccgccttttgccgccacgcctttgaattccagccgctactttctcgtgagccctcgcatcattcaccagatccttctgctgaggccactcctttcatctttcagcacagtttcatcgcctgtatcagctactcccatcaccagtcctagcgcacgggctctcgaggaaaattgtcgatccgggaaaggaagacggacggccataattgccgacaaggggcgtgtcgtttag

SEQ ID NO: 34452 - DNA, 558 bp, Zea mays
  Peptide Sequence Number=SeqID_77827
atggagcttgctcagaggtcactaaagtcaggttcgccacctagcagcttcgcggacccgcaaggacttggtgggaccattttcttgccatgcagccagaggatcgagaggtggaatggagagagttcaaggcagctttccgaggacaccacataccagccgggattatggaccgaaagctcaatgagtttctggcactcactcagggcaacaggacagtgttgcaatatgcccaggcttttaatgacttgtgccactcgacaggcagaaaagaagaggaagatccctgtggcaggaccttcagctcagccacaatgcttcaggattgtgtccgacattcagagcaggggaccccagcagcagcaagggagatgggtgatccgaccacagcagcagcagcaggcacccaaccgtacccagtttcctgctcagaggaacaaccagcagcagcagtaccgccaggcaaatgacaacaggtgtttcacgtgtggcaacaccggacactatgccaagaattaccccaggaaccagcagaggcaggggcagaatgttaactag

SEQ ID NO: 34453 - DNA, 135 bp, Zea mays
  Peptide Sequence Number=SeqID_77828
atgggagaccacgtctcaggtcgcgtgaggggcaaagtctgcgggcaggttcactcaggtatccgcacgttaatccttattccattttcccatctcgtagacaaccaatccccatggattgttgtctacaactag

SEQ ID NO: 34454 - DNA, 192 bp, Zea mays
  Peptide Sequence Number=SeqID_77829
atggcgataaacttacactacaggatagcgaacatctttaataaccccttaccgacgattgatgacgcggagtcccccagccacgtcggtgtgtggttcccgggatccgatcgtaacaaccatgaccccaacccgttcgcccgcgatgcattcgcgcctgatgaagcttcaggcggagggcacagctggtaa

SEQ ID NO: 34455 - DNA, 642 bp, Zea mays
  Peptide Sequence Number=SeqID_77830
atggcccagcaagcccttcgcgagcgcgctggcgtcatctgtctgcttggggttggcgtgttgcggggaaatgacactcgtcgttgtctcaggcatgaggtcaacgcccgacatgtcccccgctggggtgccggcgtcgtcgactcgctcgacagccaacgaggtgccgcctcctgcttggccacggttgccccacctcctcctcctgcggcgaggaaggcaacgggacaaacccagatgctgctcttccgccacggggggaagacgtcgccgagtgcgccgccgccgggcgggctgacggtcgtcgttgtcgctgccgcgctgcggaggaaggagtaccatgtcgtagctgccatcgagggacatgaactcgagactcccgaaacggagcagcgtcccgggctgaagaggttgctggagactacccatctggaactcgatgggaagttgttcgtcaacacgcagcaggcccctacctggcgtgccaactgtcggcgtttcgaccccggggggtccctggaccgacgagtaaaattgtcgctgcgtgccccagcccagatgggttggcgcgagatagaacacaaagagggggaaaaccacggctcgtgttatcctgcgccagagtgggtgcgcttgcagtag

SEQ ID NO: 34456 - DNA, 273 bp, Zea mays
  Peptide Sequence Number=SeqID_77831
atgacgaaagcaaccagaccagctgagaagactcgcgggaccagctggaagaggctcaggacgtggccttgctacactcggcgcgatatcagcagtctctgcgacgctaccacgcccgaggggttcggccccgagacctccaagtgggagacttggtgcttcggctacggcaagacgcccgagggcgccacaagcttactcctccctgaaacatctttcgcgcctttcaactgcttcgatagcgggatcctgaaaacgacggagtacacgtaa

SEQ ID NO: 34457 - DNA, 1005 bp, Zea mays
  Peptide Sequence Number=SeqID_77832
atgcaggtggtgtgcaaccgcaccacggagacgcaccccttcaacttcaacgcatccagcatggaggcccaggcccacacgtcatgcgagcggaagcagcagtcaaatcgtctgcaagctcacgtcccctcctggagcagcaggggagccctctcccacggcgtgaagacgacgcgcccgtgttccgtccctcgaacggctcgcgcaacaaccgccccgcgaaccacctgtcctgtcgcattaacttcgcggcagggcaagcgacacctttggcaggcgaagcgggcgtcgtttcatctccgccatgatgacagcgtcaaaaaagccgccccagagcactcgggcttcaggctcattactgatcagaggttcgaaggctggcccctcggaagggttcgacagctgcctcagagcactcgagctccgcgcccactactgatcaggggttcgaaggctggcccctcggaagggttcgatagttgccccaaagcatgcagagcgagggatgactctgggtacgtccgatacatggccgaggctcgggctacgctcccgagggtgaggctgacagcagctgagtccagcctcaggcgccacaagaagctccgcctcgcccgaccttgggcctcggcctcaggagaagtctctgccttgcccgaccccagggctcagcccccgcctcggcctcggaaggtggtctccgcctcgccggaccccagggctcggcctcaacctcgacctcggaaggtggtctccgcctcgcccgaccccagggcccagcctcaacctcgacctcgggaggaatcgtgtcctcgcccgaccccggcctcggcctcaggaggagtctccgcctcgcccgaccttgggcttggaccgaccacgccgcaggggccccttacggaagcaaggagacgtcagcaaggtcccaacagccccgacagctgtgcttctacagggctcaaacgctcctccgacgaccacgacaccgcatacacagggctctag

SEQ ID NO: 34458 - DNA, 1278 bp, Zea mays
  Peptide Sequence Number=SeqID_77833
gcaggtcctctggtgcaggctctggtgctggatctggggccacctcctgagcagctccttgctccggcgggtgttctcgtcgccggcgagtgtaccggccaaaccacggcgatttggttcaatccaagggcacggcgagcttcacggggtaacgtagtgactgtgtgtacaaggaatcggaaaatggttgagcggattacccggtccacgtgcgcgggcggggggaagaactccagcgagcacggtttcgctattccggtgacgcgggtcctcggttcaagcttgagtaagcttcacggcctcaccaggaagctatctgaaggcttggatcgaacggaggaggacgggaaaggggctggccatggtggttgctctcgggcggcactggcgggtcgcggggaggtcgccggagctaagggctggctcggggaagtcaggcgaggtacggaggaggccacggggaaggcagccgagcactgggacgggctttatagccgtggcgcaggcgtggtcacgggcggccgcggccctgttgctcccacggtggagcacagcagcggcaaggagctggtgatggggatggaggatgaggtcgctgaggcgacgacggtctcagatctaaggattcgtgagagaactcttcttggtgcgtggccccgtgaaggcaccctcgctgtagtagccgatgccgctggcgtcgatgagaatggacatcggctgcttgtacactgctcgcttcagggcggcctcgtcggcgttgttcatcacgtacctgctgtcgatgttcaccaccggacgaaggattcgcaatccatggagaggctggggcgaggagactccacggattgcatcgatctgtgccgaggaatcgaaatccatggagagcgcggcgatgaaagggcgaggatgggggcgcttatggaagggatcgtgggggcggggacgaggatcacggggcatcctaaaatggcgcccgtcggagttggagagcggggcgggggcgagaatcgcgggagcggggagcttgcggcgtggtgtgcgcgggcgggcgggcatcacagcgaggcgagcggttttcgtcgggggtttgtggtgtggtctgcgtcgttcgcggcggcgttggcggcggggtttgcggagaccacccctagcgccctagaagccccggtctacttcgtctcgggcaactgcgctgccgcgggcgcgtatggggctgcccctagccggccgaagaaggtgaagtgtcacacccgggatttaagggacaaagccgggtga

SEQ ID NO: 34459 - DNA, 486 bp, Zea mays
  Peptide Sequence Number=SeqID_77834
atggcccaagggcacatttccctttcacgaccaccatcaccgcaggggcagtggcagcaacagcagcaggggtggcagcagcagcagcaatggcaacgtgtgccccgctttcaaggccactggaagattcacggtcccaaggcctcctcttcttcggcatccgtggacgttccttccccgccggccggcatgcctaccgaggggtctggttcccatcggcatatgcctgctagggatatcgccgacgatccatcaacagctaccatggatgctccttcctcgtcgaccgccatgcccaccggcgggtctagttcccatcagcatacatctgctgagaatgttgccgacgatccgtcaacggctaccacagccccatcagcgtcggcgccaagcccaccatcgacggcggccgaggagattcctgttgcgtttgcccccaccgtgcaggatgacgctggcgctgagatggcgccatcggacccctag

SEQ ID NO: 34460 - DNA, 1872 bp, Zea mays
  Peptide Sequence Number=SeqID_77835
atggctacgtcgtcgacactgggccagacgcagcggtacgcggcgggggcactgctggcgctcgcgctccgccaggcgcagacgcaccagaccgtcctccttggctcccacggcctcgacgacgagccccaccccgacgcggccaccgcagtcgaacccgacgcccgtgacctctggacccacgagtcccgcggcctcctccgccccgtcctcaggtttcttgagatcgacccgaaggcctgggtcggggtggagaagacggccgcgtcgtctgatcccaagcaccacattggcgcgttccttcgcaaagtgttcgaggacgaagacgacgacgagaaggcccggtcagagcgatccgatcacgagctggcgctcgccaaggccgtggacgcgatggcgatgggcctggagagcggcggtgtcggatcggtggctgaggcgctcagaccggagagccacggctccgacgacgacgacggcgacccggcgctggcggcgtcgacgcgcaccaaggactaccggaagatggcggtgctgtacatgctcctctccgcgtgcgtcgcggacgtgaacatggccgaggagggcatggggtccccgcgcgtcaccaagggttacgacgcccgccaccgcgtcgcgctccggctgctggccacctggctcgacgttacctggaacaagatggaagctgtcgagataatggttgcttgctctgctatggctgcagcaagggaggaggaacagtcacgtgagaattcgtcaccgaacagcagatgggagaactggaagcgtggcggcatcatcggcgcagctgcactgacaggaggaacattgatggcaatatctgggggcttagcagccccggcaattgctgcagggttcactgctctagtcccaacattgcatacacttgtgcctctaataggtgctagtggttttgctgctatagctaccgctgctggtcacactgctggctctgtagcagttgcagcatcgtttggagctgctggagctgggttgactgggacaaaaatggccacaagaattggaaacgtaaaagaatttgagttcaagactatcggccagaaccatagccagggtcgcctagcagttggcatctttgtttctggatttgccttctccgaggacgattattcaaagccttgggaaggatggaaaactaacttagagaggtatgttctgcagtgggagtctaagcatgtaattggcgtcagcacagcaatacaggattggctggcatcaagggtagcgatcgagctgatgagggaaggtgcgatgcagacggtgttaaatggcatcatttcagcatttgcgtggcctgctaccttggtatctgccgcggacttcatcgacagcaaatggtctgttgctattgacaggtcagacaaagctgggaaaatgcttgctgatgttctgctcaagggactgcaaggaagcaggcctgtcactctagtcgggttctcgctgggggctcgtgtggttttcaagtgcttgcaggagttagcgcagctgggaaataatgtggggatcgttgagagggcggtgctcatcggtgcgccggtctcagttcaaggtgagatgtgggagcctgccaggaagaaaccacagctcctgccgttcttgcatctcctcattggcattgcctcgctgcagatggtcgccggaagcttgttcacgcaaggtttggccggcatccaggacgtgcatgtccctggagtagagaacgtcgacgttaccgagctcgttgtcgggcactcttcgtacttgtcgcttctccagaagattctagaccatcttgagctaaacacctactaccctgtgttctatccctgcacgcccaggacaaaataa

SEQ ID NO: 34461 - DNA, 1125 bp, Zea mays
  Peptide Sequence Number=SeqID_77836
atgttgtataatgttggtgttgattttgatgataaaaatagctgggagtatcttttcaagttatattggttggatctgaaagggaagcatttactaacgattgaagagctaaaaagtgcaaagaactattggactgttcctactactgctggtaggagagagaaagaggagtcatctgatgaactatatgatgcaagcaatgaccaagatgctacgtttgacatttcctcaaagaaacaaagacagaataactcttcaggaaaaagaggacaaaaacgtaaaaaagatggtggcattacttcaaggaagcgtggaatctcaattaatagtgctggaagcttaccgaatggatcaacaggtgaagggatgtccttggcaggtgacacaaaatgggcatcatctgagttattggaattcattggtcacatgagaaatggtgatagttcttatatttcccagtttgatgtccaggttcttttgctcgaatatataaagcaaaataacctctctgatcctcgcagaaaaagtcagattatctgtgatgcaaggcttagcaatttgtttagaaaaccacgtgttggtcattttgagatgttaaagcttttggagatgcattatcttgtgaaacaggttccaacattgaatgcagatagtgaaagagcatttgattcatactcggcccaagtaaatcatggaggatataatgagttgtccgataaattaggttctgataagaggaggaaggctcatatgaagattgaaagagaatcgacaattaatccagaggattatgctgccattgacatgcacaatatcaatctgatttacttgcgccgcagtgttatggaggatcttattgatgaggttgctgttttctctgacaaaattgctggggcttttgtgaggataagaatttccggtcttggcaacaagcaagatatgtaccgactggtgaaagttctcggtacacataaagttgcagagcgatacactgttggtaagaagacaacagattatgctcttgagatatctaatttagaaaaaaaagagattatcacaatggacacgatctcaaatcaggatttcacagagctgaatacctttaggatgtggtatattgtttaa

SEQ ID NO: 34462 - DNA, 2775 bp, Zea mays
  Peptide Sequence Number=SeqID_77837
atggctggttccggtaccaaggtgtttgggaaactgggatttctattggaaaactggaagaggattacaaaagggggaggtaatcacccggctactcctaggagccagcttctgaacactcctgaagaaacagagcgcatgattaatgaagctcctgaagtacatgttgatccccagatggatccaagttatgaatccgctgaagaacccgattataagaaagctgttgattggaccatgcatcggaacggaccagatctattatttccaggaagaaaagggacaaaattgaattctgtggagaatcatacacaaaatagtctggatgcaagcggtcacattagcagtctacctacagaggatgtggaccatagattaggtgctggaagtaacattaatttaaacaatatggcaccagagcctgcatcacttggagttttatcaaatgacactgagccagaaaaagtttggcactacaaagaccctaatggaaatgttcagggaccgtttactcttttgcagttatccaattgggcaagttttttcccacgtgacctgagaatatggcttacatttgagagtgaggagaactcactactgttgactgaagtgctcccaaagcagcagaaagattttattcagccttcaacagttactaccagtgataaatcaatatgggcaggctctggtcaagatagaattaactcaaatgcaaataactcttcctcccctagcttgtctgctgagtgctatgatccaacaaaatatctaaagcctctaggtggaacgtcaccatcaagatctctgaaagattctcatgctttgcatgaggtccagaatcaggttaacgattcatccacaattctttcttcagctggttcatatgtaccaaccagttctcatgatgaaagggtctcaagagacagggttgatgagtggaacagtagtcaggacaatggtggcatttggaatccaaccatgaatcatagtcggaagagtaatgcacagcaacatcctgacggttttacagggaaggaccaaatgctaactgaatctaaatgtagttcacatatggtctcagttcttaccccacaacaatctgagagagaccctgccacttctcttagtactacaagtcgtccggagtgcaaaaccatgtgccggcaggaaggttcttcatggagttcagctacaaatgctggagttcatgaccttcagttaactattgctttaacaaagccagagacatgttctccaacaaatcctgttgaagacagagattcgagttctgcttctgcggtgtcttgtcagtcaggggctcctgcctgcattccccaacccgatccaacatctacatgtaattcaagtaagattgaggcaaccatggatctgcataaaacatgccagcctgacacatcaaatgaatcattcggccggcttcctgaacctcaaagtggctcactcttttccttgaaaactctaaatcttgagtccgagcaccctagttctacgccaaaactggaggggaaggaaacttccatgaaccagtcaggatcaacatcagtagcacatgagaatttagctacaaagacacgtgtccgcccacctaccagtaaaattgatagcttgcaaccacttaaggaaagatcatgtccaacagaaagggactcaatcactcaattagagcatctgtttgaagagaatgtggtaaagagaaataacgaagtggtcaatcctgtatctgatgctgaagggattgctgtatcagatgtgttggaatcgttaacagaacaagattgtgaaaaatacagtacacatggagcagattgtgaaaaatacagtacacatggagcagcgcctttacaaaatttggtgccagcttcagccgaggaagaacaaccacaatgctccagtcctattgcattgtccccttggggggaaccaagttactatcagggtgaagctgttgattctgctctatggggcgtccaggatggtaatgacatgtggtcaatgccttcaccaacacctggtctccagccttcatcagatcggagtgcaaaagttgatggctggcaacgaacaagttcatctccggagggaaacagaaaagcttcaggctggcattcatcaggtcgtgagagctcaaagatcacatatggtgccagtgaaaaccgtaaatcattttctagccaccaagcgacgacaccaacagggagacactctttggcaaggaggcagggaagcagcgacaagggtgctgctggttgggaagagagtctaggaaacacttgggaagcatcaaagagacaacagagaaacagcgacaagaatgcaggctgcggagaggctctcggaagcaacaggacctggcacccatcgtctggtaaccccagtcggagcagccaggggaatcaccaacatgacaggcattctcacggcagtgattcgcggcggggtagctcaaactaccctcggaggtccgaccatcgtcatgaccatggcagtggtggttcgtcaagaccctcgtcaagagggcagccccagagggggcgccctagcggctggagattggagaattggctgctggcactgagcggtcgtccaccagaccgcccaggcgccaaacggcagacgccagttgctggagcctggagacaccacgccaccgagaccgacgccagacgacagaccacaacccgcaagcgccagttgctgcagcagggctgtccgccaaagtgccaaacgccagttgctggagacctggggtcctag

SEQ ID NO: 34463 - DNA, 528 bp, Zea mays
  Peptide Sequence Number=SeqID_77838
atggacataaagaatatagcgcttggagccactaatgccacaagccatgtggcagccgcgggactccgcctgagcgggaagcataaggcaagggctagacatgtgtcggccctggacccctattcgtgtcggggtcctcctggtctcggaaccttgccaaggcccggtccttacccgggggacctggggcttacccgagggacccggcacaccctcttgggagctccggacccgttcgtacaggggtccggtggaggtccgggcctatcagtgcaccccggggagtcttatctttccttgccacgtggtgctcctagccctgccccatgtggtggggttgggtgctcctccccatgtgaccagggggtgtcgtacgggtgcagcgtcttcatactgcagaagggggtacccctatctcggggtaccgacagtggccctcgggcccacctcaggggagggtgcgagtctgtaggtggggccaaaccctgtatcctgcgtaagcatagcgtggccgaggcatcttcttag

SEQ ID NO: 34464 - DNA, 54 bp, Zea mays
  Peptide Sequence Number=SeqID_77839
atggagcggtctagcggtcgagcctctgctgagttggttatgtggtctgagtag

SEQ ID NO: 34465 - DNA, 183 bp, Zea mays
  Peptide Sequence Number=SeqID_77840
atgagaacgaggctgggcgtaacggtggcggagcacgatcgcggacagcggccgagctctaccggcgatgaattcgggcgcaggggacctggcgacggggaagatccggtgggcttgaagaactggcgcgcgcagctcggggtttacaaatccaaattcaaactaggtttcaaattcaaataa

SEQ ID NO: 34466 - DNA, 324 bp, Zea mays
  Peptide Sequence Number=SeqID_77841
atgacagacacatatgtgcaaccagcatgtgccttgcatccatatgtgaactatgtcatggggacgacgaacaatctcatgacggatcttcgtaagggtgtcatggtgatgctgatggcagccatggaccacaatatgggtatggacaagttcccgctgcaccgacctatcactatcagtatgacggattggatcaatatcacgacccttccaacatgcctgagtactatcactatgactcgagctgaacatatggggttctggtgccaccttgctgctgatccagctagttggcaagttgaactcgactgggagtttagttga

SEQ ID NO: 34467 - DNA, 471 bp, Zea mays
  Peptide Sequence Number=SeqID_77842
atggggggcagcggcgaagcgggtggtaaaccgccgttggtaaaccgttaccgcccctggcggttttggtctccttcacgctcagcttcggccgcggcagccgcgggagaacgaccgacctgggcgcctccgcctcagcctcaggctcaggccctcagccgaagattcctcctctacagactcctcctccgtgtccggcacgtctataacctctgtgacggctgcggaagcggagctgttgtccagggacgagaaaaaacgatggggtgtgaagatacggaggcgagggggcgggagatgggaggaaggtacagagcagaggtggtaggagagacaggcgagactgcgagaggaaggcggagaattaccgccgccgccatggtcgctcgacgggatgccacggaggcaggtgacagcaaccgaactaccataccgaagagggagaaggactctgcccaccagtcagactga

SEQ ID NO: 34468 - DNA, 162 bp, Zea mays
  Peptide Sequence Number=SeqID_77843
atgaggcaggggcacagtgtgggcaagatctatgcccaggtgttggcgtgggtcgatcgtacagtgagggagagggtggggctgagccatgctatcgctagggacgtcaacggccacgtctctgagatggctagatctcgagtcgagatgtactttatatag

SEQ ID NO: 34469 - DNA, 519 bp, Zea mays
  Peptide Sequence Number=SeqID_77844
atgggagacgcaatcgcgactcgcccaaggccaaccccgggcaagagatgcaatcacgactcgctcgaggccaaccccaggtgggagacgcagtcacgattcgcccgaggccatccctgggtgggagacaaagtcacgactcacccgaggccaaccttgggtgggagacgcagtcacggctcgcccgaggtcaacctcggacgggagatgcaatcatggctcgcccgaggccaaccccaggtgggagacgtagtcacgactcgcctgaggccatccctgggcaggagaggcagtcacgactcgctcgacgggagatgcagtaacgactcgcccgaggccatccctgggtgtgggagacgcagtcatgactcggccgaggccaaccctgggtgggagacggtcatgagtcgcccgaggccaatcccagacgggagacacagtcatgactcacctgtggccaaccttaggcgggagaggcagtcacaacttgcccgaggccaactaggaatgacaatttaa

SEQ ID NO: 34470 - DNA, 564 bp, Zea mays
  Peptide Sequence Number=SeqID_77845
atggaggatgagcatcaaacaggaggggcaacagaggaggagcaccatatggagaagtatcattgtatggatacccatacgggtattgagaagggcccacgaaagaatgaccttacgaattattgggcccttgggccgttcgtgaggccttttacttctttagtggacccaggggatatctatcccccacaagcccccgatctttgggttgatttagagaataatattccatggggtgcaccggaggtgcacccaatgggtgtagcccccgaccttcaaatggattttttaaggataatccattcgaagcgcgccgggctcgaaggctcggatgagtcggagtactcctcggatgaggaggactcggacggcggcgacgagggtgaagacgacgacgacgacgacgacgacgatgacgacgacggcggcagcagtggcaggggcggcggcgacggcaggggcagcaccaagggcagcagcggcggcagcggggacagcaccaggggcagcggcaggggcagcaccaagggcggcggcggcggcaggggcagggccagtggctag

SEQ ID NO: 34471 - DNA, 279 bp, Zea mays
  Peptide Sequence Number=SeqID_77846
atggctgttgcacccaggcggtcaagtaaggaacgtggttggcggaataccagtgtttttatactccggtcaagaccgccaaattcggggaccccacggccgagaatcacggcgcctcactggttggccgcggcggatgcagaggatccgatgaagaagacaaaccctaacagtgcggcccaacgcgacagtcacagcgcaggagaaacgtggttctgcagcaagggccccatcagccagcagcacgggcgtggccgcgcggaggtgaagcggagataa

SEQ ID NO: 34472 - DNA, 321 bp, Zea mays
  Peptide Sequence Number=SeqID_77847
atggcgccgcggcggcccgggtatctgctgaggctggtggccggggtgcaggcgctcggcctcgccgtgctgcacctcaacgtggccaccgcgcccgacgcgacggcgctctacacgctcagcctcaagaaaaagattaagattatagctcaaattaacaacaacaagactcaaagagataagatcaaattaaaaacacatcaagtaagtgccgacatcacaacccctacaagcttgtgccttaaaacaagaggatacaagaagttggagtgcttttgtgaaggcttttgtgactcacttgaagcattggtacttttgtga

SEQ ID NO: 34473 - DNA, 537 bp, Zea mays
  Peptide Sequence Number=SeqID_77848
atgtctgtcggcttgtggtgtgcaggtgtgggcacatggacagtggtcgacgacgaatgtgtaggtcatacagctggcacctgggacatgcttaggcgcaatgatgtggcagagaagatcgtgtcgctggcgcggtcgaggactggcgggacacatgtccaggacgcatggcatgtgcatgcggagaggttctacaaggaggggctcaagaacaagtacctccaaaaggcgaagatcaaggagcatgccttcctcgcctccctaagcgaccccaaccacgacttcaatgagtcgacctcttcttcgagcgacaaggagcccatccttagaaacaaatgctttgttttgaagcaaggaaatctggacaagtttgagtcacgatcttctgacggtctagatcagatgggtgaaaccatctttatggtggaggagcaagacgatgatgattgtccactcgagccgaagcctgctattgaggggggcagcaacctcttcaagggtgtgaagcatttaggccccgaagtgatgttttcataa

SEQ ID NO: 34474 - DNA, 2166 bp, Zea mays
  Peptide Sequence Number=SeqID_77849
atgaaatatgagcatctgacgagggaggctgctttggcagagaaggagcttcttgaagaggagtacaagaaaaagtttgatgaggcaaagaaggaactatctctggagaatgatctagcaggcatttatctggttactatggtgcacgaggggcagctgaagaacactgaaccggatatcggcgtcaacatgggagatgatgagttaatctatctgccagacatagaagaatatgatatggatgctctcatgggagacgaggaccagttgaacactgatcaggctattttttgtgaggaacacaacctcgacaaggtgtcatcgtccaagcgtcccaaacgcttcaccgtgcagcagcttcagcaacttgaatcttcgttccaaaagtgtagccatccagatgatgaaatgcgccaggaactggctgccaaggttggtataagtgcaaggcaggttaagttttggtttcaaaaccgacgctctcagattaaggtgaggtcctgtggaactgagaacaacaaatatcggcgacaaaacgctgagctgctcgcaacgaacatggaactcaaggagcaactgaaaggaatgacatgcagtagatgcgatgccccaacaataatgcagaaatggcagttgatggatgaaaatgctaagcttagggaaatgtactcgctcgccagtgcagaactgaccaagctcatgcaggaagcaaatctccctccctctgtgatactagaggatatggcattagttacttccatgaacccattgtccagcaatgctagcagcagtcgtagcaccatcaaccaggatgagcttctctcatatgttgagtgtgctatcaaagagtttgagatgctagtaagggatggtacgccgttgtggctgccgaccatcggtggcgacgtgctcaacagtaaggagtatgcctgccagagattcccaagattacatgggacgatccgcccagaagggtttgttgtggaggccacaagggacactgccatagtcaagggatcagccccagacattgttgacatcctcactgatgtgccacgatggtacaaggcgttcccttgcattgtagcagcactaagggcctaccacgtcatctttagtggaccttttgcatctggcaacgtgctaattcaggaggtcacatggattgtccatgcagagtacgaggaggcctccgtgccacccctcttccgacagttctaccagtctgggctggcattcggtgcaagccgttggcttgcatcactccaaaggcactgtgaatacatggttgttaagcattccatccaagttccaactggttgtgtctctggctcaggggtgctcaccttgtctgctctgggtagatggaacctcctagagctggcacagcggatgatggcgatcttctacaagactacatctgggctgcccaccgtggaaccaggcaacattgtcaccaggtggggtcgtggctgcatgggcactacaggcgagatgcttgagccagctgtgcgcatggtactagggaattactttggcgccatggatgggcagccatcgcccctccaagtgctaagcgccaccacaactgtgtggctgccaggaacgcctccggagagtgtttttaactacctgtgcaatgggcaacgccgtggcgagtgggatgccttcgtctgtgccggcgcagtgcaggagttgagctcagttgccacgtgcccccaccttcatggcaatgctgtttctgttctctgccctaatgtgaccaatgcagctaacaacgccatgctgttcctgcaacagacaagcatcgatgtctcgcgcgcgctagttgtgtacagcgttgttgaagagaccatgcttcgttccgtcctggatgttagcgacgacacttcaaacttagtcctcctgccatctggattcgccatcctcccagatggccatggcagggctcaccatgccgctgcttccaactcctccagcgctcttgccggactcaacggaactgcaggatgtcttctcaccgcagcctaccaggtaccggtgccattcaacaatctccgtcatccagatgtgcaagagacctacgagaatgctggaaagcggatctgccatgcgataaagaagatcatggatgctgttggggcacctattgttgtcccaatctaa

SEQ ID NO: 34475 - DNA, 240 bp, Zea mays
  Peptide Sequence Number=SeqID_77850
atgacagttgaaattcaaattgccactcttgatattgaggagaagtcgagatctaaagatgtgcctcgttctggtccaatggatagtggcacctcaaatgccaacgtggttgaaagcaatcaaatctgtgaaactagtcacatagctagaaaatgccgcaataagaagggcaagaaagttgatggtcagaaaattgcaaatgtggctattgctgatactaggaattctgtaacaccctaa

SEQ ID NO: 34476 - DNA, 426 bp, Zea mays
  Peptide Sequence Number=SeqID_77851
atggcggagctttgccggaggcgagggcatgggcacgccgggggccctagggcgctgggaagggctcaggcttgcatcccttcccgtggtccatcccaacgaggtggcgggcaaccgcgcgcagcacagagcaaatcttgggaggcgaaagagagggtcgtcacgccaccacctgtgaaatgggacctcaccatcgtcggaggctcggcaatggcaatatggggttcagcggcaggcgtggatgcttggggtggcgtcgctaggcgggaaaagaccttgtggccaccagaattggtcactggtgcccctattccgccgcgggccacgctgcactgtggccgggtgctctctgtgcagagacagccgaccctaaacttcctgggaatagcacttgctatccacaagttacctaaaactacgaaataa

SEQ ID NO: 34477 - DNA, 315 bp, Zea mays
  Peptide Sequence Number=SeqID_77852
atggagcaggggcgctgcttggagggtacgactgctcctcatccaagcaaggcgagcaacaacaggggcgccatgggaggggaggagcctagctccccgctgcagctgctcgccaggagcaggaagatgaacgtcgctagctgtttgggaaggagagggggtcggacattgtgcagggcgtcggccatcggtggaagcaaggggcgtgggcttcttgctggtcgaagttgctgctcgcctgcagggggacagggagctcggccatggcgtccatggctgctggtcttgctccctgctgattgccgtggagactag

SEQ ID NO: 34478 - DNA, 441 bp, Zea mays
  Peptide Sequence Number=SeqID_77853
atggaggggtctgcgcgctggggaagaagactccacggaagagacggttgggagaagagagaaagggagtggcgactgaaaaagaataggggtgggagtggaaaattaccaagtgcaagggaagggagattgcaatgtttgtttaagttcagcttagaatccgtttttgtcaatcataaaaacaacaaaactcggctgtttcatcacctacaacaacatgggttcgaaaaccctgagtacggagtgtactttcgcaagtcttacccgacaaaggaaatgacttctcaaggatatgctggcttgtgggattcaaggtttctcaagaccaaaaagggttcacaccaacccagagcagagatacaccaccgtctagcctacggtcactggtttacggtctacggcggtcactgccgagtcttcacggcttgcgacgagtggtga

SEQ ID NO: 34479 - DNA, 1176 bp, Zea mays
  Peptide Sequence Number=SeqID_77854
atgtcttcgcgctcccttatgcatcgtgtcattccaccttccgagccctcggatgggggatgcccgcagtccttccgccttgtcgttggaggaatgcaactccgtgggagttggtacctttcaaccatcgttcggcttcaaggattttcatcagccagcccggctgcatcccctcgccggtggtcacccgagacggtgaccaccaggccctgggtggggatgagcaagccgggctgcgatcttggtcccaccctcagcttcaaggatgttcaccatcctcgctggggtggaggccgggctgagacggagctctacttcccgcacggtttcgtgggtcagcctctccttcagcgttcgagggagagggcgctcactggccctgcgagaggggcggacttcgacaacgcggggctggtcgacggcgggcgtcgtcagcctcagtgcgttgggctcgccagcttggctcccggtgccccctcctgccgcgaaggcggttgtcgcgccgtgcgctcgggaggaccgcccaagatgtcgcgcgctgccagggcgacgttcgtgttctggggcggtcctgcctttgcaccggagtccctcggctcggtcggccttgctgtccgaggcttctcttgcttagttaaaggaacccctcggccgctcttcgatgagccggagccaggggtagcggtgtcagcgtggacagaggcagagttggctcgaaaagaagacttggttggtcggagcctggccgggtcgtccgttagcgggaccgacgccggagtcgatctgccgaggcctcgggccgggctgatgtcttcgggggacagctggccgaggcctcggggtgaccagccgagccacctgctcgagtcggattcttggaggagacctaggcggcgatggcccgggcgtgatgttgaagtcgtccttcagggtggagatcctcggaccgcgtcgccgtccgaggctaggtcggacctcgccgaaggtgtagtcgatgccgagggtgctgctgctcccttcaactgtcaagatccgggcctgcaggatcggatcatcttgtatcgagaaggcccgaagaatcgcttcggcagaggagctttcgagcgtgaagacttgttcggtccgcggaatcgcttatccgaacgcgagttacttatcgcagaaggtgatgagtga

SEQ ID NO: 34480 - DNA, 426 bp, Zea mays
  Peptide Sequence Number=SeqID_77855
atggctggaggaagtccccgcaaaactggaggatgccattctcccccagacgccaggggaagaaaagggcagccgacccatgcgggggcagccccccgactcgcctcatcctccatcttggcctggatgacgaaaatccttgaggccgagggaggggcagaggccgcagcctggctcgctttccccaccgtcaaactggagggaccgggaaagggggataccccgagaaggatccttccctgtgaaggaaccgggctccgagcccccctactgatcagaggttcgaaggctggccctccgaggggttcaacagtcgcctcagatcgcgtgggccctacacccactactggtcagaggttcgaaggccggccccccgaagggctccacggccgcctcaggctactcgggctccgcgcccattactga

SEQ ID NO: 34481 - DNA, 876 bp, Zea mays
  Peptide Sequence Number=SeqID_77856
atgggcaccgaacatggtgtctccggtgagctgcaagcgggtaatccgactggacgtccgtgccccgttcgttgggggtcggctaggggcccagaggcacgcccaaaagtacctgcgggtgatctgccggacccggtcccctggcgaaggggtccgagggctcgatgcctccctccgatgggattccgttacaagatcgctcccactggtctcggaaatgtcctaggggatgtttgtgcgggcgagagttgcttctcgcggaaggtgatgagtgaggtatccgtatcccggaggcgtaggagtccctcggctcgtcgggcgacgtgggggctcctccgtggttggggtcgagtctgtcttccgtggccgaggccgagcccgagcccctgggtcgggcgaggcggaggtcgttcggcggaggccagggcggagtccgagccctggggtcgggcgaagcggagttcgtcgtcttctggggctgagcccgagtccgagccctgggtcgggcggagcggagttcgccgtcttccgggtcttagcccgagtccgagccctgggtcgggcggagcggagttcgccgtcttccgggtcttagcccgagtccgagccctgggtagggcggagcggagtttgccgtcttctggggctgagcccgagtccgagccctgggtcggggcggagcggagttcgccgtcttctggggctgagcccgagtccgagcccttggtcgggcggagcggagttcaccgtcttccgggtcttagcccgagtccgagccctgggtcgggcggagcggagttcgccgtcttccggggcttagcccgagtccgagccctgggtcgggcggaacggagttcaccgtcttccgggtcttag

SEQ ID NO: 34482 - DNA, 1206 bp, Zea mays
  Peptide Sequence Number=SeqID_77857
atggccgcggcaggcgggcggaagcagcagtcaaattgtctgcaggctcatgtcccctcctgggacagcgagagagccctctcccacggcgtgaagacggcgcgcccgtgttccgttcctcgaacggttcgcgcacgcacaacggctgccccgccaaccactcgtcctgtcgcattaactctacggcagggcaggcgacacctttggcaggcgaagcgggcgacgcttcacctccgccatgatgaccgcgtccaaaaagggaccgggaaagggcatactccgaaagggatccttctcagcgaaggaagcgggccccgagccctcctactgattagaggttcgaaggctagcccctcggaagggttcgacagccgcctcagagcactcgggctccacgcccattactcgtcagaggttcgaaggctggcccctcggaagggttcgacagccgcctcaggccactcgggctccacgcccactacttatcaggggttcgtaggctggcccccgaagggttcgacagctgcctcagagcacgcagagcgagggatgactctgggtcaaggctccgtccactcaagggacacgatctcgcctcgcccgagcccagcctcgggcaaagacagccgacccaggagaattcacgtctcgcccgagggtcccctcaagcaacgggcacaccttcgactcgcccgaggcccagctcgggcaggcttcgcggagaagcaaccttggccagatcgcctcgccagccgactgaattgcatgagcattcaatgcaaggatcgcctgacaccttatcctgacgcgcgctcttcagtcgacagagccgaagtgaccgcattcacttcgcccctccactggctgaccagacaggaaaacagcgccgcctgcgctgctccgactgctgtgccacccgtcagggtgaggctgacagccgccaagtccggcctcaggtgccataggaagctccgcctcgcccgaccccagggctcggactcaacctcgacctcggacgacggactccgccttgcccgaccccagggctcggactcaacctcgacctcggacgacggactccgcctcgcccgaccccagggctcggactcaacctcgacctcggacgacggactccgcctcgcccgaccccagggctcagactcaacctcgaccttggacaacggtctccgcctcgcccgaccctag

SEQ ID NO: 34483 - DNA, 720 bp, Zea mays
  Peptide Sequence Number=SeqID_77858
atgccttcgcactccccttatgcattgcgcccttccatcttccgagccccggatggggagcgccctcgttgctttcgtcttgctgtcgttggaggagcgcaacttcgcggaagttggtacctttcagccattgctcggtttcaaggattttcatcaggcagcccggctccatccccttgccgatggtcacccaagatggtgaccaccagtttgatggtggggagaagcaagccaggctgcgacctcttccctgcccttgctggggaggagggcgaggcgagccggggcctgccttcgcgtgggctggcgtcccgctttttcctccggcttctgggggtggaaactatcctccagctctgcggaggaggcgccctccagccgtgccggggaaggcgaactgctgctgcccagtccagggtgcagaattccgtcctttatccgggcgacggtggccagccgcaccggggggtctcacaacacgtcgtacgccgcgagggcggtactcgtgttttgggatggtcccattctcgttttcgtgatgaggacgggagcgaggacctgccggtgcgctttggggcggccggcgcctgctggtgcggtgttggtgggcaggtggacgccgccgccggtgctgaggtggtggcagctggagaaagcttctccgccgacgagaccgtcagcgccacccgcggaccgacctccggctcttttggcttttga

SEQ ID NO: 34484 - DNA, 213 bp, Zea mays
  Peptide Sequence Number=SeqID_77859
atgaagaagacaatgcccggcgcgtcgagcacgaacgccgccgactgcgacatgtccaggcagtcgaagaagtggtccaggtgcccgtgctacgcggagatgagcggcgtcgggtcagacgccgacaccgtggcgtgcccttgcggggtgcattattctgccgagaccaacaccgagagggagtccatgggcgggtacaaatgcggcgagtga

SEQ ID NO: 34485 - DNA, 174 bp, Zea mays
  Peptide Sequence Number=SeqID_77860
atgcatcggattgggtttctcgccggagtctgcgccgccgcgtgtgcttggggctcgccgcgctctgctgttggtgggggagacgacccagacgagcaagccactgtggaatctgaggttcagcaagtagagatagctgagcaggagctcattgaaggcaagttgtgcccttga

SEQ ID NO: 34486 - DNA, 903 bp, Zea mays
  Peptide Sequence Number=SeqID_77861
atggggaagtacatgaggaagcgcaagcgcaacgtggggaggacgacgccggccgcggagcacggcgtgaggacgcgtgcccaatccgacgccgtcgcgagcacagcttctgcggcggcggcggcggcgcccaagaggccgaggaagcagacgacggcggcagtgactgggaacaccagcggggcagcggcgccagggtcctgctacctgcacctgcggaccaggaggctgcagttcctgcccgggggtgagggcgaggtgcagcgtccggtgccgccgttgcctgcggcggcggcacagcggtcgtcgtctgtagcttccggggagccggtggagggtgccgggagctcgaggtgctccagcacggcgtcgtcttcggtggacgtcgtcgtcctggcggtggcaccggctagcgagaggggcggcggtgaagcggaggaggcacgcaacgacgacgacgactactgcggcgacgtcgagagcgtcgtcagcgactcggccgagtgctgccgccgcgacaggaggagggagacgacgccgtcgagccaggcacgggtagatcgtccctgcagcgacgaggagtgcagccaggccgcagacggcccaacgcgccaccgtcggcgacggaaggctttggcggccaccgcgacagccgcggtcgcttgcagagcgagggcgacgccaccggcagaagagatcgagcagttcttcgcggccgcggagaaggcccaggccgagcgcttcgcagccaagtacaatttcgacgtcgcacgcgggctgccgctcggcgccggccgaattctgctggtatttatgcaattcgttacactgcgtaaaaaatctggcatgttgttcactggtggacgcacctccgggttggagcgtaataaccttaagttttga

SEQ ID NO: 34487 - DNA, 258 bp, Zea mays
  Peptide Sequence Number=SeqID_77862
atgaccgggaaaaagaccacggcttcctctgactgcggcactccaaagaaagccaaggtggtggtggaggatgaggaagaggcggggttggaggatgaggaagaggcgactgtgacactatccgtggagaaggacgcgctggagtgcgacatctgctgcctacccttccagtccgaagttttcatggcaagtcagattaccatgcattgcaagaacgggtttgtcgctaacaataatcaattacatgacatgtcctaa

SEQ ID NO: 34488 - DNA, 930 bp, Zea mays
  Peptide Sequence Number=SeqID_77863
atggtgagggccttgcggctcggtggccgcgcggccgccgcagcgaggtggtgcacctgccggcgcgccgccgtcgccctctgcgtggccaacctcgtcgccgcgctgctcgtggcccgcgcgctctacgctcccggctccttcgcatttgcacccaaaccttttgagacattgggttttggcctctggtgcgagaaggtgaagaagctgcgcaaggcattcacgagggaagagaagacacgaaaagggctgccgctggagctgaagcagaaagtttcgcttgagattctgcagagactgcacgatttgggcgaaggttctaataccacggaacaacaagaagctgtagaagcatggcgtgttgggaagctcaaggacatgagaagtgcatcttctaagaatttatcaaattttggcctctccagtgaagattcaaggatgttaaagcgagccttggagtttaactggcaaaggatattggaggacattggtctttggatacctcccactatatatcatatcgaacatgatgacaaacctgagaatgaaccagaagatgaagagataatacccggtccacctttgccccctgaatgcaatactgaactgcatactgattatggtggcacggctgttagatggggcttaacacatcacaaagaaagtgccgcagattgctgtcaagcctgtatagatcaggctaagagggccagaccaggagccttaaagtgtaatatttgggtttactgtccgtctgagtatggatgctactcgccagacaaatatgaacacaaacatcaagaatgctggttgaagcaggctgaccaccctagattaaacttcaaagaccggtaccctgagccatacagagattctcatccgactgcccctgttgttgtgccatggatgtcgggtgtcattactgcatga

SEQ ID NO: 34489 - DNA, 360 bp, Zea mays
  Peptide Sequence Number=SeqID_77864
atgggcttggctccggccgagatctccgcccctgatccgcgccaggtggtgaggaagaggctctgcgaggagatggaggcgatccacggcgtcctcaggaaggccgagctcgcggagatgctggtcgagatctacaagttgatggacgaggttgctgaagaagagaagcgtcggcagcagaaaaacgagtcgacgaacgcttgcaaatccactgctagtcactcatcgccccgtgaactagaggatggtgagttcatcgaggaggattgtggtggcacccccgcaaatacatgcggcggcgatggttctgattctgttgtggtacgtaagggtcttggttcaccgccactaacaatgtaa

SEQ ID NO: 34490 - DNA, 261 bp, Zea mays
  Peptide Sequence Number=SeqID_77865
atggcgagctcgtcggtgctcgccgtcccctccatccctctccctcccccgggcgcctataaaaggacccgcccgagccccgtcttcaccacaccagcttcggccatctccttcgccttcccccgagccaatcgagctagtgccgccgtgcttcccccgtcgctccggcaccacttttcccctcctattgtgcctggcaaccgcactggcggcatcaccgccgcggacgtccgccaccacgccgcggaccggccgccatag

SEQ ID NO: 34491 - DNA, 399 bp, Zea mays
  Peptide Sequence Number=SeqID_77866
atgcaagatgccgcacggcgtgcgctttcgcactactgcttagtgctcggtgaggtggtcgatggtcttgacctgaggtattacccccgctgtccatctggcaagacaggaggcgtggttgtctcacctgttggtgaggacaatcctagattgagcagcacagtcaacctagtcgtcgtgctaaatgtggagctggaccatgctttagacaagctgtgtagggctcatgctgagatcgcccagttgtgggcggagcgcgcggagcgcgcggagcgccgtcacctagcggatggctctcctgcccctgtcaggactcagcacccttaccgcttgcctcggcatgggcgctatgtctatggcaactccaactgcaggaccaggataaatttaggaccatag

SEQ ID NO: 34492 - DNA, 498 bp, Zea mays
  Peptide Sequence Number=SeqID_77867
atggccatagtgattttgtttgagtatgggtatccacctcggatgtttggtgtcgatatagagttgtatgaagccaagtttggtgttgtgcgattgagcacagagcatcaacctcgtggtacttcgggtaagggtattgaagtttgggatgacatttatggtgatgacataccagctaaggatgtgttgactgttgctgcttctaccatatcttcggaatctacctgctggcagggtgatccaggagcggactgggagttagttgattcctacatgcagaattgtgtcgataaggagacaaaagaatttgaagatgaacttgagaatatgaacctggatgaagaagttgcagctcctggacctgggactagtaggattagatgtaattgcatgactagatgtgagaaggatagtggcaggaaaatggtatacaagtcatttaatgagtttaaggtatttttggtctatggaatcaaatataggatagagactaattaa

SEQ ID NO: 34493 - DNA, 411 bp, Zea mays
  Peptide Sequence Number=SeqID_77868
atggtgggtcggtggcgtgggtggggtgaggacccaatcaatcggcatcgtgcagtcccgttgatggtggctagagcggccacaaccacgacagcgaatggggttacggtagtcccagacttggtggtcggcggtgaggaagctaaagcagagagaagtggcgggaggaaggcagagggttgggttcgtatccatggagatcccgcagcgtcgggccagagtgaaagggatgaacgacatcgacacgtccctagaacacagaagtggttgggctgcattgaaggtgccatcgtcaacctctcgaggcctagcaaggcaagcaatggagagcacaaccgaactcaaggagtgatgcgggatgagcttggaggatgcaagaataagcggacccctagtcactatgatgtttga

SEQ ID NO: 34494 - DNA, 186 bp, Zea mays
  Peptide Sequence Number=SeqID_77869
atggcgaaccagcaaggttaccggcctagtgtgttacggttacggtctagctctgctactgctagagagaggatggcggttaaggtgcccgaggatggtagtactaaaagaaaataccatccaaaatctctaaaagcaaaaggaaggatcaggaaccagggctgcaagtccgtgatgcaacagtga

SEQ ID NO: 34495 - DNA, 216 bp, Zea mays
  Peptide Sequence Number=SeqID_77870
atggatgtttcagaatatgttacatcaaatgacaattatgtttgttccttgcttgctatcaggccctcatcaagtaaagatggttatacggttaaccagaaggttgacccagaaacgccacatataaaggaggccaccatgtcagatgtatcaccaactaaagtaaccaaacacaacaatggggatctgctatatatgaaggtgaaccttctttga

SEQ ID NO: 34496 - DNA, 579 bp, Zea mays
  Peptide Sequence Number=SeqID_77871
atgcctcgaacgccgccccaggggggcctcgcactcggccgccgcacgcaccagctctcccgaccccgacgcgccccgcccccgagccgcccgtcccaagctctcccgacccgaccgcgcaacacccacgagccgcctgtcccggccagccgctcgccgtggccgccgtcccgcccccgatcgcgctccgagtcccctggagcccgctccggtcgccactgcggccgtctctcccgcccccagcagcgcccaccctcgagtagcagatctctacacccgtctagctgcctgttcctgagcctaagcattgagcatagctccaccccaccctcgcccagctggagaagcagagccggtgcacccagccacgttggccacaacgccgtcgagcaaccaagggctcagcatcctacatgccactgtgtcatgtgcggactccttccacctcgaggctatgggtggggaggtgatctacctatcggtgaagacttcttccagatgagggaaaaggagaagtttgagaaggaagctgagaggcagaaagatcaaggaaatgtggaagacaagagccaagtctag

SEQ ID NO: 34497 - DNA, 1089 bp, Zea mays
  Peptide Sequence Number=SeqID_77872
atgggggcaagaactcatcatgccatgggccatgcatggggcatgggggcttggggcacaacaatacaaagaataggcacgggtgccggcaacgggaggagcacagagctctctcagctgcttggtcccgtcgaaagaaaatcccatgccataaagaggttagacgaggtaagaaagtttactgcaaatggttcatcttcgccttcggctaggaagccgtggcatggcccgctccctaaacctcggatctcgccgagtctcacaattggcgacatcattgagcgggctggagatttggagaatcgggcaagcaaggtgacggttcttccttcttcgcagtcagatcctacacttccgccttttccaaaatttactcaatttgaattggcacaattacggaaggggcttaaccagaatgggccgggctatcattctagaggccttctttctaaaacgtggtctgctcgtaacccggggatgtacgcgcttcgtctgcgtgtatacgtccgacctaaatcctctgttcattcctcccagctacacctgcaccagccgccattccagatttttacgtctcccagcagaagctacgcccaagctctcatggatggtagaggtgcagtgagggatggcaaggccatggcttggaaggaggttgatcgccgccgacatcccagaatcgaggtgaagacagagcagttgcatctcagaggtcatcgcctatctcgtggtcgtggtccaagtgaggatcgcggtcgcaggacatggcgcagccggggtggtcgatacggaggaaggccattccatggagcattcagagctccacaggacttcgctgaatccagtgaaggggcggatcccgagttagagaggaagcagagaagaagcgtgcggctgttgatggtcctcctgctgatgatcaaggaaagaaacgcaaagaagagttgtgctgcgaaatttgtgaaatggatcacactccacaggtctgtccgacgttcaatggccctaaaccacacgctcttctatgtggttttgcaggaggcgattcgggtttcttccaaattcccacaagtggagccaagggcatga

SEQ ID NO: 34498 - DNA, 438 bp, Zea mays
  Peptide Sequence Number=SeqID_77873
atgaatccattcgccgtggtcaacggggagccatatcctctggacatcagaggagaactagatgacacaacagcattcaaaaaattcaagaaggatggaataagcgaaggacaattcaaccatgttttgatccttgaaatggacgcgataaggaaggcttatgcctctctggaagatgggtatctacccccagtgacatttgtcataatacagaaaaggcaccacacaaggctcttccctggagttcatggaaggagagatgttactgacagaagtgggaacattcttcctggatctgtggttgataccgagatttgtcatccgcgggagtttgatttctacctttgtagcccatgctggaattcagatacgcacgatgcacgcgcgctgtctcagttggtaagtctatatgccagtttcaccaagttctttgtgtga

SEQ ID NO: 34499 - DNA, 258 bp, Zea mays
  Peptide Sequence Number=SeqID_77874
atggtaggaagaaggcacaaggacatggtaggagaagaggacatgggaagacaattcgggcttgcttctgcacatgaaaacaccgcatcaatcgaggatcacgaagccaacgatcagcgggtacaatctcttatactcccttttgcatctgaagattctctaccgatggctgatcagagagccgatgagcagcagaaaacacaggaggatatacaagtcttttacttagagttgatcaagaagcatcaacaactctaa

SEQ ID NO: 34500 - DNA, 2349 bp, Zea mays
  Peptide Sequence Number=SeqID_77875
atggggtcggacgaggcgaagtccatcttccgaggccgagacgggggccgaaccctggggtcgggcgagacggagcttcctatgtcgcccgaggctggacttagccgctgtcgacctcactctggcgagtggcacggcagtcggagcggggcaggcgacgctgttttcttgtcagctcccctcttgcacctgcagcaagagatcaattcaatcagatcgcggacaggagtcttcctcctcctggcagctggcacagacgctcacctgccggcccgtccggggactggaacggcgacggcggcggcgaccggtgactttgttgacccggttgatgtcgccgcgtttggcgggtctgggatttgtccgcgccggaccgccgaacaaccggcgactttcgacgctggttgcctggttgagcgcgtggtacgcgcacagcccggcgcacctggccgtcctgcgggcgcgaccacgcggcgctgcggcggctggtcgccgcgctcccgcgcctgcccgcgcgccggggaggtggcgaccgaggaggagtccatcgcggggggaggccttggcggacgccgtctcggccgtcgtcgaccgccgcgacgtgcctcggagggagacccgctccacctcgcccgtgcgccctccgggaccccgtcgccgccgacgtcctcatgtccgccgggcgccgactggtcgctgcagaacgccgacggctggtccgcgctccaggaggccgtctgcacccgcgaggaggccatcgccaccatcatcgcgcgccactaccagccgctcgcctgggccaagtggtgccgccgcctcccgcgcatcctcgcctccatctcccgcatccgcgacttctacatggagatcaccttccacttcgagtcctccgtcatccccttcatcagccgcatcgcgccctccgacacctaccgcatctggaagcgcggcgccgcgctccgggccgacatgacactcgcggggttcgacggcttccgcatccagcgctccgaccagacgttcctcttcctcggggacggcgccaggcctgaggacgccgggggcaaggagctgcacccgggctcgctcatagtgctggcgcacaaggacaaggagatcacggatgcgctggagggggcgggcgtgcagcccaccgagtccgaggtggcgcatgaggtggcgttgatgtccaagaccaacatgtaccgtccggggattgacgtcacgcaggcggagctcgtgccacacttgaattggcgccgccaggagagggcagaagccgttgggcaatggaaagccaaggtgtatgacatgttgaatgtcctcgtcacagtgaagtctcggcgcgtacctggggcgatgacggacgaggagctgtttgccatggatggggaggagaagaacgggaggggcgcggagcttgatgctgagttagacgaagtgttgacagccgaggagaggaagcagcttgattctgcgcttaggatggggaacaatgaagaggaatctgagcagaggtgcgacgaaggtgacactggtgctggtcatatggatgagcatgccgccgccaaagataagaagggatggttcggttggggtggcaagaaaggtgccaagggcgatgacaagccatcaaagatggggagtaaggatgaaacgagtgacccagggaagcaaaaggagaagggcagcgggaagaagaagaagggtggctcacctgctgagtctctaaaacatgaaagcgagtacaagaaggggttaagaccagtgttgtggctgacaccggatttccctctgaagacagatgaactcatccctctgcttgatgtcctagcaaacaaagtcaaggctgtaaggaggcttagggaactcttgacaaccaaacttcctacaggcacatttccagtcaagattgccatccctattgttccaacgatacgagtcatcgtcacattcacaaagtttgaagaactacagcctctagatgagtttgccaccccaccttccagcccgacacagtttcaagacgcgaaaaccaaagaatcagaaggatcaggctcatggtattcatgggtaaagggtggccgaggcacgcagtccagcgacagcggtgatagccggagctggaaagatgaggtggatccgttccacataccgtcggactacacctgggttgatgccaccgagaagaagcggaggatgaaggcaaagaaagccaagagcaggcggggcccagcccgaaaacagtcctcaaagaacactgcggaaggagcccaccgccccaatgatggatggcttcgaggagtaaaccatgctctcaccggcgttcttcacgccgaggcaggttga

SEQ ID NO: 34501 - DNA, 549 bp, Zea mays
  Peptide Sequence Number=SeqID_77876
atgaagggccttctcaagggcctccgatacatctcgcagatttttgatgcgaaggagccggagatgcagatcgggaagccgacggacgtgaagcacgtcgcgcacatcggctgggacaacgcctccgtcaccgcgcccagctggatgaacgaattcaaggcttctccgggggcggcgaggggcggcgatcctgagccctcgcagcctgggggttcgggcggatgcggagacgagcaaaccggaggagaagacgctggcggcaaggcggagcggccgcggcggacgagggggaacaaagtgtcgggtggcaacgagccggcgaagcggcgggactgcgcggccgaggggtcgcggcgcgaccggagggttgcgaaggcggcggacgtggcggagggcgccgagggggacgccgccgcggcgccgaggcagcggcggaggaagccccgggcagcgtcggggggcaggtccaagtcgtcgtcgggaggcgccgccgcgtcggacgcggaggcggcgcagccggaggccgaggccgatcgcgacggctgctga

SEQ ID NO: 34502 - DNA, 2655 bp, Zea mays
  Peptide Sequence Number=SeqID_77877
atgtcctcccgcctcaaggataccggcggcggtggcggcagggccacggccgcggcaacccgcccgctcaccccgaagcccttctctgtctcgtcatcagcccggcggacgaccgccgtcgccgccgccgggaaggagaacaccgcgtccaagccgtccaagcccacctccgccgtgcggtggtccacatcgtcgcttccgcgggccagcaggatccaaagctcggtggagtcctcgaagctcgtctccaccctcagggctcccgtgctgcccgggaggccttccgtcggtaaggataacgtggtggaggcaggcttgcggcggagcgtcaatggtgggatcagggcttcttctgtagagaaagggaggaggtcggttagtgttgttggatccagggcctccgaggctaggagagggagtgctggcgctggtggtgatggcactagcagaagggagaggcttgatgcgaaggccaaggggttggatgagatcagcaggagaagagatgatcttgatgccaaggggaagcagactgatgagattggcaggaaaagggagagctttgatgcaaagcccaagcagatcggtgggaaaagacagggctttggtgtgaatgtgtccaagcaatgtgatgagatcaaggggaaaactgacgcattcgtgagtaatatgaagaagcaaagcgaagatgttggtgggcgaagagtgggctctgattcgaaggcaaaggcaggtgaagaaatcaatatgaggaaagaggggctcaataaattggtgaaggagatgcatacccaaaaggctgatccaggagaagtttcttccaaatccgtggaatgttgtgccacccagaaggatgatgagataggcaacacttctgtcatccctgttttcactgttcatgtggtggattcaatggatgcccctgatccaataaggaaacagcaaaagaataatgaagagggtaggaagccggaagaaaagggaaaattgtcagacaggataagagtttttgagaaagtggctgcaggtggggagggagcgtcagcaaaacctgtgtctgctgtgaacaggtacccaagcaaacttcatgagaaactagctgtgttggaagggagggttcagaagattgctaccgatatcaagaaaaccaaagaaatgcttgatgagaacaacccggacgagccaaagcagatcttgtcaaatatccagaaggaaatcactgccattgagaaggcaatttctcatgtcaaagatgataataagatacagctgggtactgcagagaacagtgaatgtgagaactctcaccctgaaacagctgaaaaatgtaccattgcaaagccaggtgacctgaagcaagctggaaaaggcttgaatgctgatgagctggaggcaaggttccttccacaccacaaattattgaggggccacatatcttcaacttctactcaacaggagtcatctgttggtatgaggaaagattgtaatggaaaaacaagatctgcagcatctaaccctgacgatgatgaaaacagtatagccatggagtttctggcttctttagatggtgaagaaaatgatttcttcaaggagcgaaaagctaataaattggaaaagaataagacatgtgaagtagcagatgctaccagcaagacatcaagtcaaggtagctcaaagaatccagttgttcccaatcataaggaggaaactgaattgcttgctacggaggagctagaagaatttgatgatcgggaaaacaagtcctccatgatgttacaggaagaaactgatgagtcatgcaatagtcaattatcagagggagaagctgttcttcttgctcatggagatggcacatgctcctattatgacattgcaaaccacgagttcaaatctgagtacaagcctcccagcatggtatcaaataacatgtggggcgattgctggttgattcgtgccccaggcgttgatggatgttctggtagatatgttgttgctgcgtcagctggcaatgcactggatcctgggttttgcagctgggattactataccagagaagtaaaatcatttcatgtcgaggaggaagcttctcaagcctttgctccaacatcaagggctattcttggtgctctctctaatgtaggttcatcaagatctagctctgcactgtcaaatgcagaaagacagcaatggtggtatagaccgtgcggacctctcctgctttccactgctagcaagcaaaagatggtcacagcttatgatatacgtgacggcgatgttgtaatgaaatgggaagttagcaatccagtaatgggaatggagtactccagcccgttacagtggcgtagcaagggaaaggtagtaatcgctgggagtgagtcaatagggttgtgggatgtgaattcacttaacccacaacccttgttgtctgttgcttctggtaagaaattgtactgccttcatgtcaataacactgatgctgaggtcggcggcggagtgcgtcaaagggttagttcatccgaggtggaaggaaacgatggtgttttcagcacacaggaaagcgtaaatgtatttgatttccgtgtacccgctggcatcgggcttaaaatagcgagacatggcggcacagcgaactcaatcttctcacgcggagactcg

SEQ ID NO: 34503 - DNA, 1254 bp, Zea mays
  Peptide Sequence Number=SeqID_77878
atgaggcttcggctcctggcctgctgctacaatgatccggagatgcggatcgatccggacaccgtctaccccatccgccccgactgccgcgacgacgcccccaagacgcgcttcaagccccggcctggcctgacccttagtccaaagagatggaagcttctccacaacgaggaaggctgcgtggacatagctggaatgatcaagagagtgcaacgtgggggagtccacccaacaatcaaaggagaagtttgggaatttttgctgggctgctatgaccctaaaagcactaccgaacagtgcaaccaattgcgacagcagcgaaggttagagtacgagcaactgaaagctaagtgccgagaaatggacacagctgttggtagtggaagggtaatcactatgcctgtagtaacagaagatggtcaacctatcgaaaaccctaacggaggggcatcaggttctgagcagaaaaatagtggggcaccactcccgaaagaagttattgattggaagcttaccctacaccagattggtctcgatgttaaccgtactgatcgtttgcttgtttattatgagagacaagagaacttggcaaggttgtgggacattcttgcagtgtattcatggattgataaagacatagggtattgtcagggaatgagtgatctttgttcaccaatatcaatcattctggaaaatgaagcagatgctttttggtgctttgagcgtctaatgcgcagggtggttgagaagttagataatacagaactgcacttcaacacaattagtcaagacggttactgtatgttacaccaaaatcttgatggaggggaatacttatttgccttccgaatgctgatggttcttttccgtagggaattctcatttgttgatacgatgtacctttgggaactcatgtggtctatggagtacaatcctaatctcttttcaatgttggagagtgacactggcacatccagcgcaagcacaaaggatgaaagtgttctaggacagtgtggaaagtttgagcggaaaaaattgcaagcagctaagaaagatgaccagatccctctatctgtctttgttgttgctagtgttcttgaggctagaaacaagaagttattgggtgaggcaaaaggtctagacgatgttgtcaagattttaaatgaaatcactggtagtctggatgcaaaaaaggcatgcagagaagcattgcagattcacgagaagtatcttaaaacggtaaaagcatcataa

SEQ ID NO: 34504 - DNA, 2301 bp, Zea mays
  Peptide Sequence Number=SeqID_77879
atggaggtggtggcgctggtgagcggcggaaaggacagctgcttcgccatgatgcgatgcatggactacggccacaaggttgtcgctttggctaatcttatccccctcgacgacaccgtcgatgagctcgacagctacatgtaccaaactgtatgccccgtctcttacctcccatcgctggcgcctggcgctcgctctgtaattcggccgtcagtacttgctggtatctggatgacgcttgctgatgctcctgcttgttgtggccggggtcggggaggcttcaggttgggcaccagattgtgggatcagggtctcaggtacagtgtcacggcaggtgatgaggtagaagatatgtttgctctgttgagcgaggttaaacgtcgaatcccatccatcagcgcggtgtcgtcaggtgcaatcgcatccgattaccagaggctccgggttgagagtgtttgctcgaggctgggcctggtctcgctggcgtatctatggaagcaggatcagactttgctcctagaggaaatgataaggaggggcattgtggcaataattgtgaaggttgctgcactggggctgaaaccttcttcccacttaggtaaagaactggctgaacttaagtgtcatctgctccaaatgaatgagaattatggaatcaatgtctgtggtgaaggtggagaatatgaaacactaactcttgactgccctctatttcgtaatgcaagaattattcttgatgactctgaagtgatactccactctgctgattccattgcttctgttggaattcttcatccacgggcgtttcatcttgagcagaagccagattcatctgatagaattggggatggttctgccgttcaagagagttctagttgtgtatatgaggttgatgaagttaccactcacgatgatgtgggagaaaaacaggccctgagtccagctgttgatgcttacaccaatgttgacctatgtatctcaaagacagggaacaatttgcgttcaatgagctgttggattcaggatccatccagagcttcggaaggcctgaaggcagaccttatagcagttttgagcagaattgaaaatcagctcaaggaagaagggttaggttgggtgaatgttttgtacgttcacctctacatttcaagcatgaaggaatttggattggccaatgaagtttacgtcagctttattacggaaaagaaatgctacctgggtgttccttcgcgcagtacaattgaattgccactagttcaggctgggttgggcaaagcatatgtggaagtcctagtttcaaatgaggtggtaaagagagttctacatgtgcaaagcatctcctgctgggctcctagctgcattggaccttatagccaggcaactctttatgaagatattctttatatggctggtcagctgggccttgaccctcctacgatgaagctctgtcttggaggtccaagagcggaactagaattagcactacaaaacagtgaagctgtggccaatgcctttagctgctcaatctatatctcggcaatacactttctggtgtactgctctgctcagttgacgtccagcgagaaggaagaaattgaacagacattgaagagttcttatattactcgtttggatcgctcaaaaggtggatcatatccaactgttctgtacgtattcgcgtcagaccttccgaaaggggcacgtgtggaggtaaagcctatactgtatgtcccttccactgatgattgggttgctgccgaagagacggagaccggagttccactgccagcaccgagcaaaacctggactgattgtaccgcaccatactctgcgttgcgcgattcgtgttgccaggtccacacaaccggcgggagaatttgttccgccgtggtgtcgatcacagatgacatcgcatcgaagatctgctctgcagctggacagctgcaccacggagaggagaatctgaaaataatggctagattctgtgctttccagatcgcgaagaccctggcagacaacagattttcctgggacagcgtaacgatgttgaggctctactactcggtagatctcgccgtggcggcagatgcagtgtccggagcattttccgaggccttggccgagcttgcccaagacaacccttccatgagaactgacgttcctttctacaacgttgtgcccgtagccggagctggccgctctgcgtgtgccaacgacataatggcgtgcgagttactggcatccaacgtctccagtgcgaagtccataccagccgaaccgttcgctgtgacgcctgcttga

SEQ ID NO: 34505 - DNA, 2727 bp, Zea mays
  Peptide Sequence Number=SeqID_77880
atggcgccgccgcccaccccgcgttcgacgccggcgcaggtgccgccgggcgcggccgcgacgcctctcaggacgcccgcgtccaagcaccgcctccatttccccgccgccaccccgaggaacgcccaccacgccaaccacggcggcggcggtgccacggagcacccggtcgaggtgatcggccgcatccggaacctcgcctcggggtccgcgtccgcgctggagatcatgggaagcgggacggccgtgcgcgtgcgcggcgacgcggtcgggtgccgcgacttcaccctcgacggcgtctccgtgtccgaagaggaggacctcgagggtttctaccgccgcttcgtgcgctccaggatccagggcgtccgggtcggggccaagtgcacagtcatggtgtacgggcccactgggtccgggaagagccacaccatgttcggctgcaccaagcagcccgggatcgtgtaccgcgcgcttagggacatcctggagggaggcgaaggcgattcagcggaggatgacgccgggtttgacgccggcctcttcgtgcaggtcgcggtgctggagatctataacgaggagatctacgatttgctcgtgggaagcggggccactgctaaaggaaacacccccaagtgtatcgttgaagcctcgcagttctgtatctatgcacaggcaaaactggaagtaatggggaaaaaagcgaagaacgcaagttatatatctggaaatgaagctgggaggatatcaagagaagtgtttaaggtggaaaaacgaagaactgtgaagagcacactttgcaatgagagaagttcacggagccattgcatgattatcctggatgtcccatctgtgggaggaagattaatgcttgtggacatggctggatctgaaaacatagaagctgcaggacaaacaggatttgaagccaaaatgcagacagcaaaaatcaatcaagggaacactgctttgaagcgagtggttgagtctattgctaatggtgattcccatgttccattcagggacagcaaactcacaatgctactacaggattcattcgaggatgacaaatcaaaaatcctgatgattctgtgtgctagtcctgacccaaaggaactgcacaagacagtttctactttggaatatggtgctaaggcaaagtgtattgtccgtgctgctcatgccacaacacctagggacaaaatgagctccgaggagtcatctgtgatgctcaattcaagaatcgttgcaatgaaccagttcatccacaagcttcaaaaagagaacaaattgagggagaaagagcgcaatgaggcccagaatgtgctaaggctgaaggaagaggagctagcacaactgagagcaaagctcaagctgatagaagggcaagggaaagctaccgagaatgagattaattcaaaagttatggagaaaacccagttgttgaggagtgaactcatgaagatggaagaagcgatgcttaagcagcagcaagagcttacttcactgagacagcgactacaggaggttgagcacgaaaaggccgatggttgtcagccattgcagcaggatataattggaggtagattgctggcacggctatcagagatgcctgcaggccttgatcaatcagtggcaatggacatgtctatggacttagacatgggagatcaaccggtcatgcaagatgtcaaggtaataaaggaggatactcgccagcagggccacatatggaatcacacagccacagcagcaagtgcttgcacagggtctgtagtgcaagaagatgatgtcaagttgtccgggtatcctgaaaaaactgtcctcagcaccgtgtttgaggagggagatgaggaggatgcagagaagtgtggtcttcaagaggaggtacgcaaggaggttgtagaggagaactttaatgtggacataacacaacatacactttctgagccagatgatcctgcgacaaggaagcatcggattgaaaacatattcaggctctgtggcaaccatcgtgaaatagctaagaaaccaaaggtccagtcaccagcaaaggaaatgttctgcagcgagaacaagtctccagcaaagcaagtgtttggggatcagaacaaatcgtcatcaaaccaaatttttggagatgaaaacaaggagccgtcggcatggggtgctatagagacccccatgtgcgatgttagagtgactgacagcccagtgtcttctcagctttctccaatcgtatgccaagttgtggctgcaccattatcagaggaactgaatacatgcagtgcagtggaaggaagtgatccgagcaaggagaagaacagtcttgctggacagaaggatggcggcggcctcttggaagtttacataaaatgggagtctggcaacctgatcaaagggctgaagctactgcgcaactcgtgcctttcagatctgaggaagcttatagaggctcatttcgaagaagtgggcagcaaacagcagcagcagcagttcatcttccttctccttggggatccgtccggtgccccggtgtccagggacaaggaagcctcggtgcagataagcaggctgccgcactggaacaaccaggcggacggctacctggcgtgcctgcgcgcggacaagaagccggctgcggaccacacgcccttcagcccgctggacagcaagctgaacacggttgtgaaggacgcgcacctagccggtgcaatgttcgcctaa

SEQ ID NO: 34506 - DNA, 330 bp, Zea mays
  Peptide Sequence Number=SeqID_77881
atgtcaggccgaccgacggcggtcgcaccctctctctccttcccaatcctcctgcctgcctctacctgcacctttctcttacaggagggggtggagcccttacatgaggaatttattgataaagaaggcgttacagggagttctggtctgtttgtgggtgatgtttgtgctaatgtagctgattctggttttgttttctatgcagtctctatggttttcagggagagatttgtgttccttggttcgaaaggaatcagaaagaaattgcaggaggttgatgttgcaagtggttccgcccctggcttcggagagcccaaatatagacgctaa

SEQ ID NO: 34507 - DNA, 933 bp, Zea mays
  Peptide Sequence Number=SeqID_77882
atggcgctccctgttgacgtggcgggcccgcgcccgaggccgggcgacgtgggggctcctccgaagctggggtcgaatctgtcttccgttgccgaggccgagcccgagcccgagcccctgggtcgggcgaggcggaggtcgttcggcagtggccagggcggagtccgagccctggggtcgggcgaagcggagttcgtcgtcttccgggtcttagcccgagtccgagccctggggtcgggcgaagcggagttcgccgtcttccgggtctttgcccgagtccgagcactggggtcgggcggagcggagttcgccgtcttccgggtcttagcccgagtccgagccctggggtcgggcggagcggagttcgccgtcttccgggtcttagcccgagtccgagccctggggtcgggcggagtggagttcgccgtcttccgggtcttagcccgagtccgagccctggggtcgggcggagcggagttcgtcgtcttccggatctttgccgagtccgagccctgggggtcgggcggagcggagttcgccgtcttccgggtctttgcccgagtccgagccctggggtcgggcggagcggagttcgccgtcttccgggtcttagcccgagtccgagccctggggtcgggcggagcggagttcgccgtcttccgggtctttgcccgagtccgagccctggggtcgggcggagcggagcttcctatggcgcctttggcaagacctgactgcctgtcagactcactctgtcgagtggcactgcagtcggagtggcgcaggcggcgctgtccttctgtcagaccgctttatgctgatgggggttaccagctgagaattaggcgtcttgagggtcttcgattcaatctcaagcgttgggagacttcattgccgattggacgccaggggctcaggatgaagaaaaaatag

SEQ ID NO: 34508 - DNA, 273 bp, Zea mays
  Peptide Sequence Number=SeqID_77883
atgggcgcctctgctccgacgaccgctctctcctctgcgcctccactgcccctctccctgttaggcggcgacagcaaggaggaggaggaggaagggttccgaagagttcctggaactcatcaagagtgcacttcttacagccctagaagctttttaattcttactagtgtgctaacctttgtttgtgttcaggaccatggctacaagacaattgttacaattggtgatggcgcaactgatctggagatagaacaagatagaaataataggtga

SEQ ID NO: 34509 - DNA, 366 bp, Zea mays
  Peptide Sequence Number=SeqID_77884
atggagtttaagaattctcaaattgaaggatttcttgaggaggagggcatcaagcatgagttgtcttctcctacacacctcagcaaaacagtgttgtggagagaaagaatagaactcttattgtcggcgtttcgagaccggggggtccctaagccgacgagtgagtgtgccgcgtgccccagcccagatgggtcgagcgcgtgggcgagcgcgaaggggggaagcgaggtggccggagacgggcgtgagagaggtggaaatcctgcggccttcgtgttcgtcccgcgcccaggtcagaggacccaggtgtacaatgggggtgtagcagagtgctacgtgtctagcgggggagagctagcgccctaa

SEQ ID NO: 34510 - DNA, 360 bp, Zea mays
  Peptide Sequence Number=SeqID_77885
atggcgcttcttgttgacgtgacgggcccgcgcccgaggtcgggcgacgtggaggctcctccgaagccgaggtcgagtctgtcttccttggccgaggccaagtccgagcccctgggtcaggcgaggcggaggtcgttcggcagaggccagggcggagtccgagccctggggtcgggcgaagcggagttcgtccccgagtccgagccctgggtcgggcggagcggagttcgccgtcttccgggacttagcccgagtccgagccctgggtcgggcggagcggagttcgccgtcttccgggacttagctcgagtccgagccctgggtcgggcggagcggagttcgccgtcttccgggacttag

SEQ ID NO: 34511 - DNA, 504 bp, Zea mays
  Peptide Sequence Number=SeqID_77886
atgtgcatcaaattaagaagggagacggggaggctcaccgcggggaacgagggcggcgtcgacggatggcgagcgcggcgtggacggacggcagactcccttcttcgcgacggcggccacgggctcccttcttcgcgggcgggcagcgcgtcgagcgcggcgagggcgcgcgggctgcgtgcggcagcgtgctcccttcttcgcgagcgggcggctcggcgagggcgggcaggcgcgctcaggcgggcagcgagaggctcgagcgagggcgcgctcaggcggggcgcgggcggctcggcgagggcggacgggcgcgctcaggcggcgggcgggcggctcgggcgagggcgcgcgcaggcggggcacgggcggctcggcgcgggcaggctggcgcgctcgggcggcgcgcgggcgggcgcgctcaggcggcacggtgagcgcgggccgagggcgtggcgagcgtgggcgctcaggcggcgcggcgcggcgaggcgagcgcggtga

SEQ ID NO: 34512 - DNA, 801 bp, Zea mays
  Peptide Sequence Number=SeqID_77887
atggaggcctgggcccacacgtcatgtaaccgacgcaacggttactgcgtgcaagaaaaccgtaccaccactcgcgccaatgccgcgtcttttcgactgcggaaccagtgccgcgactcgaggcagccctgcgcggcaagcgacacctccggcaggagaagcgagcactgtttcgtctccgtcataatgaccgcgtcaaaaaagggaccgggaaagggggatatttcaaaaaaggatccttcccagcgaaggaaacgggccccgagccctcctactgatcaggggttcgaaggttgcgccctccggggttcggtgaccgccccagagcactcgggctccgtgccctttactgatcaagggttcgaatgctggcccctcggaagggagcgattttgtaacggaatcccaccggagggaggcatcgagccctcggaccctatcgaatgggtccgggtccagcaaatcacctgcagaggctcgggggctgctctcgcactaggcgtgcagacggattcacgcctcgcccgagggtcccctcaggcgatgagcgcaccctcggctcgaccgaagcccaacttgggcatactttgtcgtgaagcaaccttggccaaatcgccttaccagccgactgcctcggcctcggaagaagatctccgcctcgcccgaccccaggcctcggcctcgggaggagtcacaacctcgcccgagcccagcctcggcctcaggagaagtctccgcctcgcccgacctaggcctcggatcgactgcgctacaggggacacatcattaccctactcctag

SEQ ID NO: 34513 - DNA, 768 bp, Zea mays
  Peptide Sequence Number=SeqID_77888
atggctggccgttgtgcgaggcgcgctgccatggcattgcaagggtggattagccgctgcggtggtcggctcgtcgcccctctttctgcaccgccaaatcaccgcctcgctccaccgtcttcttccctgccgagaggcgctaagggaagcatcagggcgacccgcccccgcctcgagcgagattatcatcagaacatgcagatgtcgcaaatcatcttctgcggattcggcgacggcgagggcgcatgcgcaaggagcagggcaaacctcggattctacagatcaccgcctcgctctagcagggcgaatctcgcctcggcgatgatccggaccttcgacgtctgcaccttcgctgaatccatgtctatccacgagccctgcttccgcagttcgccacagctgttcttgctccagtccgagttggaggtgctgtcttcttcagggcgacccacagctcctcaattcttttgcatgaccagggcggcggcattgggacgtggccttctcgccaccagcctaaccacatgcgcctcggccacgctatcaggatttctccgcagtaaacaatggatgtttgaatctgaagttgatggtgtggtgtaccaatcctatctagatagctcatgtctattgaggttgtttcaattctgggatcaagtggcaccaatccctaagtcatcaattctggaatctgaagttgatggtgtggtgtaccaaccctatcttggaaatttactgagcgagccaaatatacaaccaaaagcttga

SEQ ID NO: 34514 - DNA, 201 bp, Zea mays
  Peptide Sequence Number=SeqID_77889
atggtggccatgaattttgaggaggacgcgcggcggccggaggtggaagagagcactggtgcgcgcgagttcgtggccaacggcgtggcaacctccccggcgatgatgggatggcccaagggagtcatggcgacacggtccaagtctctgcatcaaagttgtagtgctacataccagctacaactcgactatagggattaa

SEQ ID NO: 34515 - DNA, 789 bp, Zea mays
  Peptide Sequence Number=SeqID_77890
atgaccaccagttcggtggtggggagaagcaagccgggctgcggcccctgctccgcccttagcttcaaggatcttcatcatccttgctggggcggagggcgagctgagctagggttctacctcccgcatgggccggcaggccgcctcttccttcagcattcaggggagagggcgctcaccggccttgtggagggggcgaacttcgacaacgcgggaccggtcggccgtaagcgtcgtcagctccagcgtgcctggctcgctggctcagctggctctgtcgcggcctccgacgctacctcctgccgcttgatccgggcgtggtcgtccgtccaccgcacgggcgactgttgcgccgtgcgcaccgggggatcgtccaagacgaccgctggcgcgcaggtggccgctgtcgtcggtgctgaggtggtggcagccagagaaggtttcttcgccgacgagaccgtcggcgccacctgcagtcggacccccggctctctggctttgacggcttgtcctcgcccctcatgtggggacgtgggcgagggccttcttacaacagtgtttgccctgatgtcatcgttgctgttgtttagccgcccgaggcggaggtcgttgtcgctgctggtgcagtggtcgtcggcgagccacctggagtttgttgtcccgcaggccctctggtgtggaggttgttcatacccgcgggagtggaaccggagtcccatttgtaatggtaccctgagtatgggtgtttgttcattgtggctgtcgaggcctgaacatctgggtatttga

SEQ ID NO: 34516 - DNA, 1131 bp, Zea mays
  Peptide Sequence Number=SeqID_77891
atgcagaaggcgtgcaaccgcaccacggttgggcacccttttggcttcatcgcatccggtggggactgggaaaggggatatttcgaaagggatccttctccgcgaaggaagcgggccctgagccctcctactgatcaggggttcgaaggctggcccctcggaagggttcgacagccgccccagagcactcgggcttcaagctcattactgatcaggggttcgaaggctggccctcggaagggttcgacagtcgccccagagcactcgggctccgcgcccactactgatcaggggttcgaaggtcaaggcttcgtctacctaagggacgcaatctcgcctcgcccgaacctagcctcgggcgggaactgtagtcccggacgaagttacgtctcgctcgagggcctcctcaggcagtgggcgcaccctcggcacgcccgaggcccaactcgggtgggcttcgtcgagaagcaaccttggccaaatcgcctctccaaccgaccgtatcacaggcgcattcaatgcgaggatcgcctgacaccttatcctgacacgcgcgcctcagtcggcaaggtcgaagaaaacagcgccgctcaccccgctctgactgctgtgccagccacccgggcaaggctgacaacagcaagttcagcctcagacacaacaggaagctccgcctcgcccgaccttaggcctcggcctcgggaagagttctccgcctcgcccgacccagggctcggcctcaacctcggcctcggaaggtggtctccgcctcgcccgaccccagggctcggcctcaacctcggcctcgggaggaatcgcgtcctcgcccgaccccggtctcggcctcaggagaagtctccgcctcgcccgaccttgggctcggaccgaccgtgccatgggggatacatcattaccctacccctagctagctccagctacggggaacaagaccggcgtcccatctggctcgccccggtaacagggctcaggcacttctccgacggccacgttatcgcctacgcagggctcaagcacttctccgatagccacgttggcatgtacacaaggctcaggcacttccctgccagacacggaccccccggggtcgaaacgccgacatttggtgattaa

SEQ ID NO: 34517 - DNA, 384 bp, Zea mays
  Peptide Sequence Number=SeqID_77892
atggaagactccgccggccaggaggtctgcgtcgttcttggcattggggacaacatcaagggcctcttggccacgctgtcgcgcgttgacgccatcatctcctatgattcgtcccctcgctcaacctgcatcctatcataccctatcccgtgccaagtgccccgcacggcggagaacttcttggccctctgcgctagcggctactacgacagcactgtgttccaccgcaacatcaagggcttcatgggcctccatctgggcaccaagttcgccgacgagttcagggagtcccaaggtagcacactatgcagtgcaggagctaacagcagacccaacgccaacggcagccgattcttcatcacctacgccaagcagccgttctga

SEQ ID NO: 34518 - DNA, 2595 bp, Zea mays
  Peptide Sequence Number=SeqID_77893
atgtgctctcattattactctgcgtatccgccttttgaagtggcagaggaagatgcagacgaaggggcccttcggtgcgccgccggtcagagcagtgggcgtgatttagttgaagagtttgtggcgtatggggtgtggcccttggcgcacggttgggtgctgggcgaagtgtgcccttgccagatgccttttcacggaggaagggttgtgcgaagccctgccttcacactgaatctgtggaaccgcgacccggctgcctttgtgcgcgacgcggaggacggggccgtgcggctcgtggggcgttacgtgccgaggacggaaggccagcgcagctttgatatccgcgggtcaaatgaccgtctgaacagggtcttcgaattaaatcaattgccgtacgatggatatcctggtcaagacgaagccgaccgccgcgggaagaaaccggcggtggagacaggagacgaccctgcgccggcggccgcccctccctcgaaaaagagaaaattaggtactgcgacgggagggattggggtgtctgatagttttgctagggatttaatgaggacgtgtgcggccccgggggagaggatgtcttcgcccgagctccgggagtcttcggctcggatgctgagggttaccgggggttgctggcctagaaatgttcctatcccctgcgcggctgaggaggactattttacatctcgtatggttcatcggtggagagtttttccttacgggcgaaatatcggtgctgttgtgtggacagcgatggacaaggatcaccaaggggcggcgcaaaaatgccaggcgactgtcaggattcacgaagctcggccgaaaaggccgcggggaactgcgaaggctgtggcctccggcggagggtcggacgagggccagcttgccatagttgcgcctgccgcggcgatcgcgatggctgcgcaagcgccgaaggcgaggggcgagatccttggcgccggaggcgaggtgccggccctcgcgttggtcagggacgaggcgggcgcgacgacccgccggctgaagggagtgacggaggcgctgagtcaggcgacggaggcgctgagtcaggtggctgatttcaccagccgtactgcgtcgggggcccttacggcggctttgtctgccgaagtcgagagacttcggacgcaacatgctgacgctgtccgtgagaagtcggcctccgacagcaagtgccgcaatctgacagacaaggtggccgccctggagagggagaaagttgacctccggcgccaactggcggcggagaggagggaagccaacgaggccatcgccaaggaacaggctgcgcaggcggatgccaagctggcgcgggcggagggcaatcttgccaaggagctcgtggagcaactgcaagggcggctcaccgccctggagagccgcgcgaaggaggccgaggccgcgatgcgtgcggaggccgaacggacgcgcacacagcttatggatacatatcgtgagcttggtgcgcggaccggtgacttcgaggtgccggaccgagagcccgggcttcgctgtctgcagtgggcgcaggaggagctgctggaacttccaaccgttgtgggggggttgatgtcgtacgcctccctggtcacctgcgagggggcgatgaacgcgctctcccgcgaagggtgccggcacttcgaggccttcgaccaggtggatgaagactttgagcgagacatctataaggtcgaagaccccgtagtgaaggagtccgccggggccctttacgaccggatgtggggtctgtacggtcgtgaggtggtcagggagcgcgccgaggctgcgagggctcaggcggagcgcggcgagcgggtggacgacttcggggctctggacagcgtgctgccagatctggggtcgaccctcgcggaggctgtgactggggtcgacctggggccaaccccggagaccgcagcgatcgcgacggctgcccccccatccgctgcgactggcgaaggcgaccctgatgcccccgcagccgctgtgccgagtgctgaaggttccgcggcggtggcggcggaaactgcggcagaggccgcggcggagccaacggcggaggctcctgcagcgccagggccttcgcaggttcaagaatttgggcctgcgcacgcaaccgctactactgagtttttggcggcttcgaccgcggaaggtgggaatgaatatggtgggcctgtatctgagttttttgattttactgactctgggagctcggttgagtggactgaggagtcgtcggaggaggacttggattattttgcggccttggacgtggctgcggcggcggcgtcgccacacaccgcggacgcgtcaaacgtgccaggtccaagcaccggacgccgacgacgaagggcggttgcaaagcctagggttagcgcggaggaaggggctcggcttcgcgtgagtagggctggtcggcaggagctgctgtcttcgccggccgccgcgggtgtaggggaaggggagctgcgaagtctttttgtgggtgaggagcttaggataatgttatttaattatagggagatgggaattattcctaagattgagccgatgtag

SEQ ID NO: 34519 - DNA, 711 bp, Zea mays
  Peptide Sequence Number=SeqID_77894
atgaagttgcgttcctccaacgacaaggcggaagggctgcgggtgttccccattcaggggctcggaagccgtcgcgaggctgagtcttctccaaaacgctccaaggtcctccccctatggcacgggggctgggtcccacgcgtcatgcaagctggcccagggcagaagaagccaaaccaccgcgcgcggtgcatgcaactgcccagcggttacaagcattcctccactttcgcccagaccagcgggccccgagcctccctactgatgagaggttcaaaggctggcccctcggaggggtttaacagccgcctcagagcgcttgggtcccgcgtccactactggtcagaggttggccctagaagggttcacagtcgcctcagacacagagcgagggatgaacctgggtacgttcgatacataaccaaggctcgggctacgctccccgaggtacttttggagcgcgcctccgagcctctagccgaccctaacaaatggggcacgggcgtccactcggattacccgtcagcagctcaccggagacaccatgttcggcgccctccgagggcaacatggcgctttaccccctcctccttgcggaaaggcgacgcaggggcgtatgtaaaaaagttgagtctgtccttgaccgtcctctcgccctgtgcggaggctcgggggctgctctcgcgaacccggctccggccaaaccgttga

SEQ ID NO: 34520 - DNA, 252 bp, Zea mays
  Peptide Sequence Number=SeqID_77895
atgccggtcgctgttgcttcctgggtcgctgccgctgcgtcactgggtctgaggctatcctgcgacgaccatgtctttatgacgctcctgtttcaacacatacaagtttctcagaaagcttctttccctttgttatcggaggatatttcctttggccctatagtcttccaaggggttcgaaatatccgttctcagattccacttaaatcaggccagaaaagagatccgcaaactacagaagatactctgtga

SEQ ID NO: 34521 - DNA, 717 bp, Zea mays
  Peptide Sequence Number=SeqID_77896
atggagaagtgctctatggcagtctacctgggagaaagccgaaactacctgaaccacccttctttccaagtcactttcaccggataccgcttcccagacacttgccaaaatgttgcccgaaaagccctccggcaactatgccaaaactacaacagagtaatgtttgaaaccccacttcgctactttccacccagcaataaaaatacccccgcctggaggaaaagacttcaggccctgtcagggagggaccctaccgaggatgaccccaccatcgtctacatggctggatacctccacactctcgataaccaatatgatgaccttgcctcccactgtactcacctaaactcccgggtggaaagcctggagcatcaagtcagggaacttacaagggaaaaggcgtcccttcaagagagcctcgagatagcagaaggcgaggaaaccaacacccgtgaggcctaccgcactctgaagatggattacaacaagaagctgaagaagctcgcccccacaagaaaaatccgcaagaagaccaaaagccaagaatgtcagactgagcagaaggaagaagcccctccagccctaccacctaccaggatagggaacttgtccgacaccaaggaaatgtccctagccagccttgatgaccttctcaaggaatttggggacactttagagaaggagttcgggagtaccctagatagcactcgcgtgtaa

SEQ ID NO: 34522 - DNA, 5121 bp, Zea mays
  Peptide Sequence Number=SeqID_77897
atgagcctcctccgcaaccgccgcgccgccgccgccgcggctgcagcggcggcggcggcgggaggaggggggtacccggagccgccggcttacaacatcatcccgatccacgacgtggtgatgcacggggagcacccgtcgctgcggttcccggaggtgcgcgcggccgtggaggcgctggcgcacgcggcggacctgccgccgcctccgctagcccgcgcctgggacgccttccgtgccgacctcttcgactggctcggcgccaccttcggcttccagctcgacaacgtccgcaaccagcgggagcacctcgtgctcctcctcgccaacgcgcagctccgcgcaggcggcaccctccccaccgaccaccccgccgacgtgctgcaccactccatcgcgcgggacatccggaggaagctcctcaagaactacaagacctggtgctcctacctcggcaagaggccgcacgtccatgtgcccagcggcggacgccgtgtcgctcagggggtcggccctgacacacgccgcgacctactgtacaccgccctctacctcctcatctggggcgaggcggccaatttgaggttcatgccggagtgcctctgctacatcttccactacatggcactcgatctcaaccatgtcatcgaccagtcgattgatatcgagactgggcgaccatcagttcctgcggtgcacggtgtggatgctttccttgacaaggttgtgaagccgatatatgacgtgctcgaggctgaggtgaagttcagccggaatgggaccaagccacactcggcctggaggaactatgatgatgtgaatgagtacttctggagccgcagagttttcaggcggctccagtggcccctgtcaccagcgaggagcttctttataaagccaggaaaccccgggcgtattggcaagactggttttgttgagcagaggtcgttctggaatgtgtaccgcagctttgatcgggtatgggtgatgctcattctgttctttcaagcagcaatgatcgttgcatgggatggccacactccgtggtttagcctacgctaccgtgacatccagatccgggtgctgtctgtgttcatcacctgggctgcgctgcgcattgtgcaggcagtgcttgatgcaggcacacaatacagcctcgtgaggacggatactatatttctcgcagtacggatggtgctcaaggtgcttgttgctgttgggtggactatcacattcattgtgctctatgttcgaatgtggaatcagaggtggcatgaccgcaggtggtctttttctgccaattccagggtgttaaactaccttgaggcagctgctgtgtttctcatcccacaggtgcttgcacttgtgctcttcatcgtcccatggattcggaattttctggagaaaaccaattggcgaattctatatgtgctcacctggtggttccagacccgtacatttgttggacgtggtgtgagggagggccttattgataacattaagtataccacattctgggtgtgccttctcactgctaaatttagctttagttactttctccagattaggccgatggtgaagccaacaaagactattctcagcctccatgacattcggcgtaactggtttgagttcatgcctcacacagagcgaattgctgtaatctttctgtgggctccagttgttcttatttatctcatggatattcagatatggtatgcgatcttctcatcacttactggggcacttatcgggctgttctcacatctgggggagattcgcagtgttgagcaactgcgcttgagattccagttctttgcaagtgcaatgcagttcaatttgatgccagaggaacacctggatgctgtgcacggtggcctccgaagcaagctgtatgatgctatcaatcggctgaagctgagatatggctttggtcggccgtataggaagattgaagctaacgaggtggaagctaagaggtttgcgctgatatggaatgagattattcagacatttagagaagaggacatcattagtgacaatgaagttgagcttcttgagctaccaccagttgtgtggaaaattcgtgtggtgcggtggccatgcttcctgctaaataatgagctgcttcttgctcttagtcaggcaaaagagctagtagctgatgacaggacacactggtcaaggatacgtaacaatgagtacaggcgttgtgctgtcattgaagcttatgacagcatacgtcacttactgctggagatcattgaggatggaactgttgagcacataattttcagtcagctgttctttgcatttgatgctgcaatggagaatgggaaattttgcgaagaatataaaatagaactgttgcctgaaatccattcatctgtaatcgccttagtggaacttctactgaaagagaagaaggatcagaccaagatagtaaataccttgcagactctttatgtctttgcaattcatgattttccaaagaacaaaaaggatatggaacaactgaggcgagagaggctagcaccatcaacactagaggattcccgtctcctctttgaggatgtcataaaatgcccaggcaatgatgatgttagcttctacaaacaggtgaggcgcctccatacaattctcacctccagggattctatgaacaatgtcccaaagaatcctgaggctcgacggcggataactttcttcagcaactctctattcatgaatatgcctcgcgctccaacagttgagaagatgatggcattcagtgttttaaccccatactacaatgaagatgtgatgtacaacaaggaccaacttcgccgtgagaatgaagatggtgtctcaattttgttttatcttcaaaagatatatgaagatgattggggaaactttttagaacgtatgcagagggatggaatgactgatgacagtgaaatttgggctgggaaatatcaggaactccgactctgggcctcgtatagaggacagaccttagcacggactgttaggggaatgatgtactaccacagagctctcaagatgcttgcttttcttgataccgcctccgaggtagacatcacagagggtactaaacatcttgcatcctttggttcagttaggcatgagaatgatgtgtatcccatgaatggtggtttccggcggcaaccacaaaggaggttagacagaggaaccagtactgtaagccaactgtttaaaggtcaggaagatggtgctgctctcatgaagtacacctacgttgtcacttgccagatatatggaaagcagaaaattgctaaagatcaacgcgcagaagatattttaactctaatgaagaaaaatgaggcacttcgtgttgcttatgttgacgaggtccatcaacgaggctatactgaatactattctgtcctggtaaagtttgaccagagcttacagagggaggttgagatataccggattaggaagaagaaccatgccatcatattcacaagaggtgatgcagttcagacgattgacatgaaccaggataatttttttgaagaggccctcaaaatgcgtaacctgttagagcagtacaactattatcatgggagcagaaaaccaacacttctgggagttagggaacatgttttcactggatcggtctcttcgcttgcttggttcatgtctgcacaggagacaagctttgttacccttggtcagcgagtcctagctaatccgttgaaggttcggatgcattatgggcatcctgatgtatttgatcgcctctggtttttgactcggggtggtttaagtaaggcatcaagagtgatcaatatcagtgaggacatctttgctggtttcaactgtaccttacgtggtggcaatgttagtcaccatgagtatattcaggttggtaagggccgtgatgttggcctcaatcagatatcaatgtttgaagcaaaggtttctagtggcaacggtgagcagacccttagtagggatgtctacaggcttggtcatagactggatttctttcggatgctctctgtgttttatacaacagtagggttctacttcaacacaatgctggtggtcttgacagtttatacatttgtttggggacgcctgtatctagctctcagtggtcttgaggctggtatccagggcagtgctaattcaacccaacaacaaaagccttggcttggcttcttcactgcattgccaatgattatagagaactctcttgaacaaggtttcctacctgctatctgggatttcttcacaatgcaaatgaatttttcatctgtgttctacacattttccatgggaactaagagccattactatggccggacaatccttcatggtggtgcaaaataccgtgctactggccgtggttttgttgtgcagcacaagagttttgctgaaaattacaggctgtatgctaggagccacttcataaaggcaatagagcttggaataatattgactgtgtatgctgcacacagtgttattgccaagaatacacttgtttacataattatgaatatatctagctggtttctggtggtatcatggattatggctccatttgcttttaatccgtctggttttgattggttgaaaacagtgtacgattttgatgatttcatgaactggatatggtatcctggtggtctcttttctaagcctgagcagagctgggaagtgtggtggtatgaagagcaagatcatctacggaccactggtctttggggaaagattttggagatactgttagatctcagtcttttggcatttattcctactggttggggcttgatttcgatcgctcaagtaattcggccattcatcgaatccactgtggtctgggacagtattatttctgtggctcgtttgtatgagatactgcttggagtgttcattatggcaccagttgcattgctgtcctggttgccgggatttcaagaaatgcagacaagggcctcggtgtttctgttaaatactttgctcatggttaaggttgttctgacccagattgttgcggcggtgaaggtgaagcagcggtgctctatctcctatgtacagcttagcaattcagtgtggaagggctttgtgcttactgatatagcttag

SEQ ID NO: 34523 - DNA, 528 bp, Zea mays
  Peptide Sequence Number=SeqID_77898
atggaggaagataacaccaaggaagacgacctgctaggagaagatttggtcgactacggagcctcgccagagcttgatattcagaagttcctcaacaaagaaaacagctccgcctgcactgctccgactgttgtgccacccgctcgggtgaggctgacagcagccaagtccagcctcgggcgccataggaagctccgcctcgccagaccccagggctcggattcaacctcgaccccggaagacggtctccacctcgcccgaccccagggctcggactcaacctcgaccccagaagacagtctccgcctcgcccgaccccagggatcggactcaacctcgaccccggaagacggtccccgcctcgcccgaccccagggctcggactcagtctcgacctcggagaagcctccacctcgcacgaccctagggctcagactcagcctcgacctcggaaaagcctctgcctcgcccgaccttgggctcgggccgaccacgtcgcagaggggtacatcattaccctacccctag

SEQ ID NO: 34524 - DNA, 582 bp, Zea mays
  Peptide Sequence Number=SeqID_77899
atggccgcgcgggaggacgggctgacgagcaggctctctctctctctccctcgcgaacgcttacgaagaagggactctacatcgtatagcggatccaccggagaaaaagccttcgtcaaaaatctccgagaaggcaggaacgaagcaggagatagcgcaacctccagcgcccggacgaagactacctcctacaagctaggagcagagaattcgttcacccggaggaacccgttgtccacctcatccacggaaaaaatggacacgggttacaaggaaaaaaagaaacaaagacccatcaagctgcccttctggcacctccgccctcaaaggagaatagaaagaagcttgtcgtcacgacaactccattctaccccgacgtcctcttcatcgggaggggggggggtggaatcgtccccatctccaacgacgaaccgaccgtacctagggaagaacctcctcagcgggaagctcgtcgatggaggaaccgacgctgtaacgcccgacgacatcatgaagccggagaacaagatccagcgcagcctgtatcgcgagacgagatatcagagttgggagaaactctag

SEQ ID NO: 34525 - DNA, 348 bp, Zea mays
  Peptide Sequence Number=SeqID_77900
atggccgccgtggcgagatcctttctccggtccagcggctcatcgtccctccgcagcgcggcggccagagccgcctcgcgggccggaccggttccgctgccgaggcggatacccagttctgggccccggcgtgtgcctggagtccctgatgcccatgcacagcgccacggcttcggcgctcatgacgtcgctactcgctgccccggcttgcaagggattgggttggctatcagaagatggaatgtagcagattattatcctgtcacctcagatctacagatggatgatttgtcattattggagacctgcagtgatggtatctggtctggattatgcaatacctcgtga

SEQ ID NO: 34526 - DNA, 174 bp, Zea mays
  Peptide Sequence Number=SeqID_77901
atggcgcctcctgttgacgtggctggtctgcgccctaggttgggcgatgtggaaactcctccgaagccgaggcctttgcagctttatgctgatgggggttaccagctgagaattaggagcattgagggtacccctaattatggtccccgacagtcacattatgcacaaccttaa

SEQ ID NO: 34527 - DNA, 630 bp, Zea mays
  Peptide Sequence Number=SeqID_77902
atgtccggtgcaccagaggactccaacgcacactcgtcgccttcgggaaattccggaggcaactccgctataattcaccggactgtccggtgtacaccggacagtgtccagtgctccaaggaagagcggcctccggaactcgccagcctcgggaaaacgcagcgactgctccgctataattcaccggacatgtccggtgtacaccagactgtccggtgcgactgcggagcaacgactacttcgtgccaacggtcacctgcaggcgcatttaatgcgcgccagaagcgcgcaaaagtcaggcacgcgcgcgctggcacaccggacattaaacagtacatgttcggtgtgcaccggacatccaggtgggcccagaagacagaactccaacggtcgaaatccaacggctttggtgacgtggctggtgcaccggacatgtccggcgtccccgagaatagatcaaataccaataagtcaaatgtggatatgatattaatcccgggtatatccacatctacatcaggtttagtctcaacttccagcgagacgcgcaacaacaagttgcttcatggttacaattctgcaaacttattgttattattaccaaatgcacagtcaatcattaagatttag

SEQ ID NO: 34528 - DNA, 1137 bp, Zea mays
  Peptide Sequence Number=SeqID_77903
atgaagacagcagcatgttcgagggtaaaggcgccgtcgtcatcatcagcaggcagccaggcaggcgggcagcgacgcgctccgggccgggaagcgggaactcattgcgtcgccccccttcctggcttcgtcgtcggctcgtcgccccgcgtcggcttccggcggtgccgatgcctctgccatccctggcgtttgaaaagacgagcaaaagctgagcacaggcgtggggtggggactggggagactcggcagtccctgaccgcccgacgaaaacgtgagcgccgtgtacggggttggagcgccccccgggatagctgctgccgcgggcagagcctgccactggcccacatggccgataaatttcggctgggccggaagcagctcctagtaacgtccgcctactgccgcgcggggccaggcgtcggccgaccccacacgtcagtgactgcctcgttggctgggccgttgcgagacccccatgtgcacgtcggcgtcgatgtgcagcgctcaacaccgctgggtagtggtagtggtggacggcgcaccagaccagttgctaccggcgttggttccctgtctgtctggcacgaagacgaaacggacaggcaggcagagccggtggcgcgatgcgatgcggtgtgggccgaggccctggcgggtggcctcctgctgggggaacagtggcacctaaagcagcagcctgccgcagctgccttgcagcggccgcgcacggtggccagtagcgtgcaacagcagcgcagagcgcagcgccgtgccactccgcaacgacgcagcagtagcagcgccccacaccctggtgcggcggtgccccacggcaaaaggaaacagcccgtccaatccatcccctcaccccattgcctctccctctccctcacccgcacctcaccactcctcggcctcacttcttcacaagttcacatcagcagcagctcacgaaacaggagcgtcataaagacatggtcgtcgcaggatagcctcagacccagcgacgcagcggcagcgacccaggaagcaacagcgaccggcatcgatcgcggcagccgaggcggggggacgggaggagggagggagcggtcgccgcaggagcagagcggcacggcatggggtcctgagtga

SEQ ID NO: 34529 - DNA, 498 bp, Zea mays
  Peptide Sequence Number=SeqID_77904
atgtgggaggacgcaggagcacacatgccgcatctccatgtggtcatgccagggtaccgtttggttcccaaaatacaaactccatcctacagcagcaacggtggcgatcttcgagtcgcgctcgttgctctatctggccgtcgtggtgctcctcatctgcatgctggtagacgagtgccgccagctcccaccacacgtgccagagctctgtgggcgagggcgtcagccatgagttacgggctctgcagggccgccaccagccatggcacgttcagcgcaagccacgtcatcgtcgcgtgggcgcgcgacttcgatgaagtgtgcgggcgcggctccggcgaggtgcagccccggtgcgagtacgcggcctccgggacgtcctgtgcggcttcgacaaccatggcgattgtaccagtgcgtgtacgtgaaagagtagattcgatttcaccgttccgttgcagagaaatcgaagcctgtcgcgtaggacagttcggctag

SEQ ID NO: 34530 - DNA, 432 bp, Zea mays
  Peptide Sequence Number=SeqID_77905
atgagtgaggttgatgatgggcttcctcagccggggatctcgccacaagaggccatccctccgttggactgcctcccaggggtgtcggcctccctgcgccagctgtcatccgtggggagtcataggttcctcgtcatcggaggatggggtggtcttcacacagtgtctggggtgcgtgaccgccctatgacagttagtggagtgttttattatccccaagctcgggcgtcaatagttcgacaacggctcggtcgtttgaagaggcatgaggctcatgccgctggacgaagttcccttgctgggcgagtcacggtcgcagggtccatgtccagccaaccgacacgtccgaagcatctcgcggctggggcgaatgctagcctttcaacggcccagccaggtctcgtgagatatgagacatggatggagtggtag

SEQ ID NO: 34531 - DNA, 1062 bp, Zea mays
  Peptide Sequence Number=SeqID_77906
atggaggcccaggcccacgcgtcatgcaaccggcgcgccgaatgcttcgtgcatgcagctgcaccgccacttgcgccaccgccgcgcctcctcgactacagaaccaataccgcgactcgaggcgacccagcgcacgacccagcagcgccaacctggcgcgacgacaacgcgcacatgttccgttcctcgaatggctcgcgcacgcgcaacggccgccccgcgaaccactcgccccgtcgcattaactccgcggcgggacaggcggcgcctctggcaggagaagcgagcgacgcttcgccttcgccgctccgagcctccctactgatcagaggttcgaaggctggcccctcggaagggttcaacagccgcctcagagcgcgtgggctccacacccactactggtcagaggttcgaaggtcggcccctcggaagggttcaacggccgcctcaggctactcgggctctgcgcccactactgatcaggggttcgaaggctggcccccgaaggggctcggactcgggctaagtcccggaagacggcgaactccgctccgcccgaccaggggctcggactcgggctcagccccagaagacgacgaactccgcttcgcccgaccccagggctcggactccgccctggcctcagccgacggtctccgcctcgcccgacccaggggctcggactcgacctcggccacagaagacagactcgacctcggcttcggaggagtttccacatcgcccaacctagggcgcagaccagccacgtcaacaggaggcgccatcatcaccctaccccgagctgactcggccacggggaacaagaccgacgtcccatctggctcgctctgccagataggcaatgatggcgcccccgcatactctgtgacgacggcggctctcagcccccttacggaagcaagaggacgtcagcaaggactcaacagctccgacagttgtccctccgccaggctccagcactcctccgacggccacgacatcacaccagctgggtgccaaaatctctccggctgccacgacgacatgtacttagggcgctag

SEQ ID NO: 34532 - DNA, 1341 bp, Zea mays
  Peptide Sequence Number=SeqID_77907
atgtcttcgcgctcccttatgcatcgtgtctttccaccttccaagcccccgaatgggggatacccgccgtctttccgcctcgtcgttggaggaacgcaactccgtgggagttggtacctttcagccatcgttcggcttcaaggattttcatcagccagcccggctgttcccctccgtcggcggtcacccgagacggtgaccaccagcccctgggtggggagaagcaagctgggctgcgaccttggtcccacccttagcttcaaggatgttcatcatcctcgctggggtggaggccgggctgagccggagctctacctcccgcgcgggttcttgggtcggcctctccttcggcgttcgagggagagggcgctcactggccctgcgggcgggtcggacttcgacaacgcggggctggtcaacggcgggcgtcgtcagcctcagcgcgtcgggctcgtcggcttggctcccggtgccccctcctaccggaaggcggctgccgcgccgtgtgcacgggaggaccgcccaagatatcgcgcgctgccagggcgacgttcgtgttctggggcggtcctgcctttgcaccggtggaggcggctcgagaagtccccgttgctgacgggatcaccgccaccatccgcgcttcgggcctccggctctttgtacttgtcctcgcccctcgagcgtcggcgtgggcgagggcaagattgcagcagcatccgccctgaggccctcgctgctgcagttcggccacccggagcgggggtcgctgttgttgctgccagagcgggcgacggcgagccgcccgtcggtcttctgttgctccgcagccccccccatcgagtggggttgttcgtacctacggaggagtccctcggctcggtcagccttgttgcccgaggcttctcttgctcagttaaaggaacccctcggtcgctcttcgatgagccgaggctaggggtagcggtgtcagcgcgaacagaggcagagttggcccgaaaagaagacctggtcggccgtagcctggccgggttgtccattagcgggaccgacgccagaattgacctgccgaggcctcgggtcgggctgatgtccgcgggggacagccggccgaggcctcggggtgaccagccgagccgcctgcccgagccggattctcggagaagaccctggcagcgatggcccgggcgtggcgatgacgtcgtccttcagactggagatcttcggactgcatcgccgtccgaggctaggttggacctcgccgaaggtgttgtcgacgccgagggtgctgctgctcccttcgagcgtcaagatccgagcctgcaggatcgggttgtcttgtag

SEQ ID NO: 34533 - DNA, 237 bp, Zea mays
  Peptide Sequence Number=SeqID_77908
atggcccccctgaggtgcgcacaacggcgaggtgggagcggctgcgacatcggatcccgagggcacaaacgcgacagcggccccatgaggtgcgcacgacggcgaggtgggagcggccgcgtggcagatcccgaggggcacaagcgcggtagcgtctccttgaggtgcacgcggcagcgactgcttaaggtgcgcacgacggtgacgtgggagcggctgcggcggcgcgacggctga

SEQ ID NO: 34534 - DNA, 441 bp, Zea mays
  Peptide Sequence Number=SeqID_77909
atggccggatacctccacaccctcgacaaccactacgacgagctctcctcccactgcacccacctaaactcccgagtggaaagcctagagcagcaagtcaaagaacttaagcaagagaaggcatccctccaggaaagtctcaacatagcagaaggcgaggaagccaacacccgtgaagcctatcggactttaaagatggactatgataagaagctaaagaaactcgcccccaagaagaaaatccagaagaagaccaccaaccaaggatgccagatagagaagaagaagaagaaggcccctctagccctacctccccccagaatagatgattggtccgacgacgaggatgtatccctagcaagcctcgatgatcttctcaaggcatttggggacaccttagataaggaattcgctagtacctcggggaacgctctcgtgtag

SEQ ID NO: 34535 - DNA, 285 bp, Zea mays
  Peptide Sequence Number=SeqID_77910
atgaccggcaaaaagaccacgacttcctctgacggcggcactccaaagaaagccaaggtggtggtggaggatgaggaagaggcggggttggaggatgaggaagaggcgactgtgacactatccgtggagaaggacgcgctgaagaacgggcattctggatgtgcaaagtgctgcatccgcacggacgggcatcgaattgcgtgggatgcttcgctcaacgttccttatcttggttggatggtctatgaaaagagacatgtcgttgaactggttaaaatcctctaa

SEQ ID NO: 34536 - DNA, 267 bp, Zea mays
  Peptide Sequence Number=SeqID_77911
atgccgaccaggactcgaggacaggacgcagccggaacttctgggggcagggatgttaccccaaacccacctccggttcctcacacgttagccgaggcgatcgccgccttggtgaatgccaccgcagacaatacccgcttccttagggaaatggcggagacgcagaagccgttatttgcagcacaacaactccgtggtcctgccagtacctggtggggaaatttttgtggctattcaacctgtcaaccatcaagtcacctgggatga

SEQ ID NO: 34537 - DNA, 330 bp, Zea mays
  Peptide Sequence Number=SeqID_77912
atggctcggggtctattttccttacaggaaggattcaaagaaaattttgatatattgaagcagaagtttgacctcttgaggaaaaagaatgccttcacaaagggtctgtttggttggtttctctcgccaacctggctgtatgagccaggatcactggagcctggctctggagatgcgaccaatctgctcgtatctggtgagcctggcccaggatgctttaaggatcgtgcgagcctggatctaaatctacatgcaggcaaccaaacacagagctcgcacgcgcatagcctggctcacagcaaccaaacagcagctacccgcatcctgtga

SEQ ID NO: 34538 - DNA, 1080 bp, Zea mays
  Peptide Sequence Number=SeqID_77913
atggctgccccgcgaaccactcgtcccgtcgcattaactctgcggcaggacaggcggcacctttggcaggcgaagcaggcgacgcttcacctctaccatgataaccgcgtcaaaaaagggaccgggaaaggggatactccgaaagggatccttctccgcgaaggaaacgagccccgagcccccctactgatcagaggttcgaaggctggcccctcggaagggttcaacagccgcctcagagcacccaggctccacgcccactactggtcagaggttcgaaggctggcccctcggaaggcagccaagtccggcctcgggcgccataggaagctccgcctcgcccgaccccagggctcggcccccgtctcggcctcggaagacgacgaactccgcctcgcccgaccccagggctcggactcagcctcggctctagaagacgacgaactctgcctcgcccgaccccagggctcagactcagcctcggctctggaagaagacgaactccgcctcgcccgacccgagggctcggactcagcctcggctccggaagacgacgaactctgcctcgcccgaccccagggctcggactcagcctcggccccgaaagacaacgaactccgccttgcccgaccccagggctcggactcagcctcggctctggaagacgacgaactccgcctcgcccgagcccagggctcggactcagccttggcctcggacggcggtctccgcctcgcccctcgacccggggctcggactcgacctcgacctcggaagacagacttgacctcgacctcagaggagcctccgcctcgcccgacccagggctcggaccgaccacgtcacaggaggggccatcattaccctacccctagctcgctcaggctacgggggacaagatcggcgtcccatctagctcaccccggtaaacaaataatgatggtgccccgcgtgctccatgacgacggcggctctcagccccttatggaagcaaggagacgtcagcaaggactcgacagccccgacagctgtccttccgcaaggctccagcgctcctccgacggccacgacatcacatga

SEQ ID NO: 34539 - DNA, 1782 bp, Zea mays
  Peptide Sequence Number=SeqID_77914
atggtcccatcatacatctcaagatctgttgctggcagctacgataatgaagctgtagctatatttgctttaatattcacattttatctatatgtaaagacactaaacactggatcactcttttatgcggcacttaattctctctcgtacttctacatggtttgttcttggggaggctacacattcatcatcaatcttatcccaatgcatgttctcttgtgtattgtgactggtcgttactcttcacgactttatattgcttatgctccccttgttgtgcttggaacacttctggcagcatcggtacctgttgttggttttaatgcagtaatgacgtcagagcactttgcatcatttctggtgtttataatcctccatgtggttgctcttgtttattacatcaaaggacttttaactccccgactgttcaaagtggccatgacatttgttataaccgttggattggctgtttgttttgctgctgcagcaatactcattgcattgattgcatctagcccaacaaaaggctggagtggtcgcagtttgagtctgctggatccaacctatgcaagcaagtacatccctataattgctagtgtgagcgaacaccaaccaccaacctggccttcttattttatggatatcaatgtgcttgcctttttagttcctgctgggatcgtatcatgcttcttaccattatctgatgcaagctcatttttggtcctgtacttggtaacctcagtgtatttctctggagtaatggtccgacttatgctggtccttgctcctgctgcatgcattttgtctgggattgctctgtctgaagcttttggtgtccttacaagatcaatgaaatttcagcgtccaacactggatgatggctcttttacagccggggatgggagttctgatactcctacgaactctgaaatgggtttgaaggaaaaaacatccaagaaaaatcggaagaaagacaaagagtcagagggaagttcacctgttgatcatagaaccgaagaaaagcttttagtactgccttgtgggccatctgctgtgggcataatgctgctgaccatactttctggtttttacgtgatccattgtgtgtgggctgctgcagaagcatattcagcaccttcaattgtgctaacatctcgttcacatgatgggtttcatgtttttgatgatttccgcgaagcttatggatggctgcgccataacacagatgcagatgacaaggttgcatcttggtgggactatggttatcagacaactgcaatggcaaacagaactgttattgtggacaataatacatggaataacacgcacattgcaacagttgggactgcaatggcatctccagaaaaagtagcatgggagatcttcaattctttagatgtcaaatatgtgcttgttatctttggagggcttattggctacccaagtgatgatattaataagttcctctggatggttcgaatcggaggtggtgtattccctcaaataaaggaagcagattaccttaaggatggcaactaccgtgttgatgctcatagtaccccaaccatgttgaattccctcatgtacaagctttgctattacagattcgtcgaaactgatggtaagggctttgatagagttttcacaactcaccattggctggttcggatttacaaactgaaacctcagaagaacagagtcagagggaaactgaaatttaaatctagtttaaaagcaagttttatgcgtaaaactggtggaaagaagagcccatggaaatag

SEQ ID NO: 34540 - DNA, 1305 bp, Zea mays
  Peptide Sequence Number=SeqID_77915
atgcctggtatgccgacggacggtggcggcgcaatggtaccttttacaggggagcctggccaaggggcgcccccgccggcacccgtgcggccaatccgccacggcgtggcgccgcccatcttccgcatctacgtctcctggtccagcggcaaccttctgcaggtcgcgtgcctccgcccgccgaattcggacggtggcggcggcacggaggaggtcgttgggagtgtggtggaggtgaatctcggcgacggtggcagcggtggctcggaggccgaggagaaaattgacgaggcggagatgcggaggatcgagtacgggtcagtgccggccttcgcgctgctgcagagcaggaagaacaccctcgcagatgttgctactatgtcgcacgtgccctcagtccctgatcatgcagaatgcaaaaccattggcagtctccttgggaacccagacccttctggtttcatgattgaagaacccaagacaattcttaaggattttgacagcctgctgtcaacgatggcgagcacgactcccagtatcatgtggctatcccagcatgtaattgctattctgttttactatctaattgttgaagacgatcctgattactggaatggtttgtcagcagcactttcggttggatggcttgatattgtggtgaatatgctacggtttcatggatcgtaccaattagatcagatggatagccgtgagacagaaaatggattggtcgaggctgttgctgttcttgtatcaatgatgccccgcatgagaccgaatttgccaactggtaaattaggccagtgctgcaaaacaagacctgattttatcaagccgtggcggcgacgaagaaaagtgggggaggcggggcaggtccagccgggcctggcaggtgtgtacgacgctgtcgacgggaaaaacttgaaggagagagaggtgctaatgggcatcggcgcgggcatggtggaggtggccgacgctggggaagcagaggcgaaggtttacgcaccgtcactagacatggacagtgaggaggtgggcgcgacgtcatggacgagcgcgatgtccacgtcaatgttggccgcggtggccgcggtagcgggtacaggaggaggcgccgcaggtgtcgtaggagccgatgagcatgccagccactggaggagctatcggcggccgagtctagggaagaggcgttcgggagagggcgcagggtgcgagcgcgggaggatgacaggcttgaggccctggtcccttaggcggcgctttagcaggaggaggcagtggaagaggacgagggtggagtaa

SEQ ID NO: 34541 - DNA, 714 bp, Zea mays
  Peptide Sequence Number=SeqID_77916
atggctgatggcatagactccctctcgaggcacctagccaacaccagcattgcacttggagcaccgccgacagcacctgtgtcgactttcctgggaccacctcctccggtgtgtagggatgaaaacagttttggaatttttcagtattccggaaaccgatttcgaaaattttcgatcgggttcactggtaacgggtgcctggactccgaggaagaagacggtccgagcttcggcttagacttctccgggctgcgagatcatgaacccatgctgcaatcctatatgcatgtgattaaatgctttttgagagcttggagggttaaagcactggtggtgagggctatgacccaactcgggaatgcctccacatcgactcggagatccctgatgaaggagatcacctcggcatgccatgggaaggtgaccagcctccaccgcgcgttcaagaagcggtggaaccaggcggggcccagacccctcctaggagccatgcggcttaccttgagcaactccgagagctacacgataagctcagagaagaacaacaacggctacagcagctgcaaaaggctctggagagggaagccgccgacaaagccctcgataggggcacgcgcgcaaaggcacgtgatgtctagcgtcgcatcatggaagatgtcaacgccaccacacctctcgttctcaaccgagccagtcaaattctcgcagcggtag

SEQ ID NO: 34542 - DNA, 588 bp, Zea mays
  Peptide Sequence Number=SeqID_77917
atggggtgcacgacctcccacgacgccgccgccgccgccgtcacctcctccaattcccggccccgtgcgcgccgctcgtccgcgtccgagccctcaccgcggcgcggagaccccgccgcgctgtgccgcgagcatgtggcgctcatccgtgccgcggccgaccgtcggtacgcgctcgccgccgcgcacgctgcctacttccgctcgctcgccgtcgtcggtgacgcgctgcggcgcttcgtggcgtccgcgctcgcgcccgccacacccgggtcctcaccggtgctcacgcttccgccttcccccgccaagctggtcgctgccgcgtccgccagcctcccgtcgtggccgtcgtccaccgtctcgccgctctcgcactccctcgcagagaagcggtggatcattagggaggcggcgttgaagggaagcgcgggagagaggacacggtcacggactcaggccaccgctgctcacagctgcattagaatccgatttcgggtccgcgctcacacgtgtcaacgccggatacgggacgctcccgtgaagtgcggacgaagcttcaaaaggggtgaggttttaataacttag

SEQ ID NO: 34543 - DNA, 1212 bp, Zea mays
  Peptide Sequence Number=SeqID_77918
atggacacgctgacttggcattcgcttttgcgtcacgcttgtacttttgccttctttcaagccgaaggaccttcggaagccgaaggcccccaacaggggtgtctgttatacaaatatgaaaaagaagttgactctggaagcccatcagatgttgagatattagaaaacccaatagattctaagaagaggaaactactccatgtgcttgatgatagcgaagtagtgtttgaagatgaggaaggccctattactcaagcagacttgcaaaagtggtttgttgatgattgggataaaagacctcatgtaaaagtctctaccgacgggtgcaccaatgactttttaatggttggtctttccacaaaggacatgccagtgaccaaatccgattcaatagatgttttatgtgattatatcatgtcaatagaagacgatacgacactagagatgacatgggtgcgaagtttcaatccttttaagatagaaatatctatcaaagacctacaaaacatattaacgatacatcaagatatgactctaagatgttttgacatggctgttcggctgcttgccaataaagagtcacgtaggccgaaaggagaaatcataaataatagaaagcattatatggacatgtgtttttggagaatgattggttttggtaaacttccaaagtaccatcaggatcctacaacagaagagttagccaaaacactcgattgttggccatcaatgaattattatatcacgggttgtagatatgttcttatgccatggaaattcaacggatgtcacgcccttttcgtaatagatcatgttaaaaagcatgtgacttttatcgactttacaccgactcaagatttgtgtaaacacatgccatacaagaggtttgaggaagcgattatcatggcctcaaagaaatataagattgcttacaacaagaaatgttctggatgggcggaggatatctttaagtgggaacatacaattcagactggtgttccaatttactcaagagggtttaataccagctacctcgttctacaagctatgaccatgtgggggaatgacagacgaatggaatttgttggggatgcaaagattgttcgaaggaactttgtgattgatctgttaagttatgaggacaattcgtgccgatatgccatccctgcaaacatacaacggagacttatcgatatcgctaaaaaggattag

SEQ ID NO: 34544 - DNA, 441 bp, Zea mays
  Peptide Sequence Number=SeqID_77919
atggagaaggcgaggacgccgatgagaaggagggtgaagatgcacagcactccgccgaaggcgttgcggaggcgatctacgcttccgcttgacgccacagaggactggggctccggcattgctgctgagaagaagagttttggcaagagcgagcagctatgggccgcctatagcgccggtcaatccccactccacgtctccatcgacggcgcgtacccggtggtctacatcaccttctcgctcctcaacatgccggagcagctcaacatgactccatcgtcgccgtcgtgcaccacatcgctggctggaccccctgtcctccgaccaccgcggcgcgtgcggcaacgagctgtgtgcgcgtctggctgcatcgtcgaggagttacagatggagcagtccgtgcagccgtacctctttgcgttcgctgccggaaaaaattga

SEQ ID NO: 34545 - DNA, 780 bp, Zea mays
  Peptide Sequence Number=SeqID_77920
atgtcgtggctgttggaggtgcggcggagcctgatggagggacagctgttggagcgcccgagccaaggggtcggtcgaggcggaagtcgttcagccgaggccagggcggagtccgagccctggggtcgggcgaggcggagtttcgtcgtcttccgggtcttagcccgagtccgagccttggggtcgggcggagcggagttcgccgtcttccgggtcttagcccgagtccgagccttggggtcgggcggagcggagttcgccgtcttccgggtcttagcccgagtccgagcccttgggtcgggcggagcggagttcgccgtcttccgggtcttagcccgagtccgagccctggggtcgggcggagcggagttcgccgtcttccgggtcttagcccgagtccgagccctggggtcgggcggagcggagttcgccgtcttccgggtcttagcccgagtccgagccctggggtcgggcggagcggatttcgccgtcttccgggtcttagcccgagtccgagccctggggtcgggcggagcggagtttgccgtcttccgggtcttagcccgagtccgagccctggggtcgggcggagcggagttcgccgtcttccgggtcttagcccgagtccgagccctggggtcgggcggagcggagttcgccgaggcgcctttgtcgaggcctgactgcctgtcagacttactctgtcgagtggcgctgcagtcggagtggcgcaggcggcgctgtccttctgtcagactggccagtggagcggtggagtga

SEQ ID NO: 34546 - DNA, 1056 bp, Zea mays
  Peptide Sequence Number=SeqID_77921
atgggcaccgaacatggtgtctccggtgagctgcaagcggggcccacgcgatctgaggcgactgttgaacccctcggagggccagccttcgaacctctgatcagtaggggggctcggagcccggttccttcacagggaaggatccttttcgggggcagccgttgcgcgtgcgcgagccgttcgagggacggatcacgggcgccctgtcttcacaccgtgagagggggttctcttgctgcccccagacgggacgtgagtctggccgacgaccatctggcgcgccggttgcgtgacgcgtgggcctgggcctccatgctggcgtgttgggagtcggtgaagcgcgtccacctggcgcgattgcatgccacctgcatggctgcccgccccttccgcccgttggtctgggcaaaagtggggggtcacttcccggctgcacccctccaccggcggtcacccaagatggtgacctccagcttgatggtgggggaaagcgagccgggctgcggcctctccccctccctcatcctcaaggattttcatcaccaaggctggggaggggactgcagcgtgcccggctttcggacgcgagtggcttcggagccgctcgcggcgccggcgtctgccgcggcagctggaagaggttcttccgccggcgtgatagccaaggctggccacggaccgacctccaactctacggccttctgcccgtccttgcctcacaagttttggcatgggcgggggcctcctggcagcagcatccgccctgaggtcagtgctgccgctgttcggccccccagagcagaagtcgtcgtcgtcgccgctgctggagcagactcgcctgttgattgtctgaatcgcttcaccaagcatgagtcgccccgtgtcaaggtgacgagtgagcacgaacagaggcggagttggctcgaaaatgaaaacctggttggccggagcctagccgggttgtccgtcagccggaccgatgccggagttgatcagccgaggcctcggaccgggctggcgcccttggaagatggttggccgaggcccctggggtaa

SEQ ID NO: 34547 - DNA, 405 bp, Zea mays
  Peptide Sequence Number=SeqID_77922
atgggggtgggaggtggaggcggaggcggaggggaggccgcggcggtgtcggcgccggcgccggcggaggaggcggggaaggacgcggaggatggcaatgactggaccttgaaggcgaagctgatcgccgtagcggtgctgggggccacggcgctcggggtgttcctgcactcctacttccgccacgcggctgcgcaaggcggaggagggctcgtcagcatgtgcgaggagcgcgcgcgcatgctgcaggaccagttcgccgtctccgtcaaccacgtccacgccctcgccaccctcgtcgccaccttccactacgagaagcacccgcccgcgctggaccacatccacctgtgcgcagctgcacgacaccttcatagcgcggggggccagagctggagggagtaa

SEQ ID NO: 34548 - DNA, 402 bp, Zea mays
  Peptide Sequence Number=SeqID_77923
atgtcgcctccaacggtgaccgctggtctggttgccgatactaaagacgccgccttggaggtcatacaagatgtcgtggagatggcggccgcgcgcttccagcgtgaccctactgatgtcgagttcgacgtgtcaaggctggataccagcatacctaagaaagagttggtgtcctggcccccaggaggtagcctcgactgggacctggacctgttcacagcttcagctaggaagtgcttatggtacgggaccaggctaagcggctacacggctccggaccaccctaggggatgcttagggtgcggaaccaagctaagcggctacacagctccggacccccaggtgatgagtacccattctctagaactagcccccaggctgccggaccccctgctttcgtag

SEQ ID NO: 34549 - DNA, 159 bp, Zea mays
  Peptide Sequence Number=SeqID_77924
atgaacatgtacttcaagatggtggcagtgatcaagggggagctcatgaagatcaagaaaatgatgaagaagaagaaggaagagctcaacaacttcaagagaaatgaaatgcaaagcctgacgccacgtctgaagcagaatgttgtgggtaccaagtag

SEQ ID NO: 34550 - DNA, 351 bp, Zea mays
  Peptide Sequence Number=SeqID_77925
atggcggctacggcggcagaagaagtgcaagtccaaaggggcgcggagagctcgaaggcgaaaagtcgcgtggtgaacaacactctaccctgcaacgtgggcggctctggggtcgccacgtggccagggaagaggatatactccaagatatcaacactgggtccagacccccatgggaaagtgtcggacccttgtacatgtagaccggacctccgggtaaggtccaggacccccacgggcgcgacccggacccccgggacgggtctcggacccctctgtgtggggtccgggctacccacagccgggtcccgggactctgagacagagaatacccaggccttgctcaggtag

SEQ ID NO: 34551 - DNA, 195 bp, Zea mays
  Peptide Sequence Number=SeqID_77926
atggagatacgtccaaacagtgaccctgttgggggccttcggcttccgaaggtaccttcggacatatatcaaagagggagaacctcaaaagatacgaaggttggcagtgccgaagctgtgaagcaggaaagcttcggcatgttcgcagaaaagggaaccgacttaaagatgaaaaggccatttagacctcgatag

SEQ ID NO: 34552 - DNA, 891 bp, Zea mays
  Peptide Sequence Number=SeqID_77927
atggacggaggactggtggcccagtggggactggggagtcgcgtcgaagagcgggtgtctgccagtgccgggtgcagcgcgcacggcacacggcacgcggccgccgcgggcggcgtgcttgggatcctcggagcaagtcgagaggaaagagaaggggggcagcactctgtctctgacactgcagtactgcactccgcactcgggtccgatgcggcagaccattttctatgcccccgcctcccggtttgcgcaagccccatctcccccgcgaaagctgcaactggctcccccgctgcgacgtgggcagggagggtcagaactttgggtggcagatctgtgctcacgcgcagacgacatcgcagcgaccgagggttacgagtagcgagacgagaagtcgaagtccaggcatccagggcctcccttgcttccgtcggcgtcacagagcggagacacttacgggcgctcgaggtcgtcgggatcgggatccccgcggcggctcctgcggcagccgcgacggcgagcagggccagcgccgccacgccgatccccggggcacaccgcccacgccacatcccctgctcagcccacgcgcaaccagttctcctcgacccagatctctgccccgacccgtccttctcgcggcccacacgacccgcaaaaccaattcggtcgcaaatgaggcacggaagcagagggacagagggggacgtgctcacgcgtgaggaagtaggagacggcgaagatgcagagcgcccaccagacggtgcgcagttttgcctcctcgatcagatcgtcgtcgctctccatcctcttccgcatctcggcctgcgcgcgcgccacggcgcggcccggcccgtgggaggcggcgagggatccggtgggaccgattaa

SEQ ID NO: 34553 - DNA, 1398 bp, Zea mays
  Peptide Sequence Number=SeqID_77928
atggagacaaaaatattcctctccaagaactttgatatgaaggacttgggtgaagctgatgtaatattgaacatcaagctaataaaggcgaccatcatcgtcctcgcccaggcccaccaaagtggatcaggagtgtctccggtcgccagtgcggcctgggagcatcttgcgcctgtggcagttgcattcagggtcgatgtgcttgggtgggggacccagctcgccgtcatgctccgcaggctcgtagcgctgtgtggcagcgcgtccgcaagggaagcgcccatgcggtttgaagctccatggccggaggtttctgctgcgtcaccacgggtcaaaacaaagagagagagagaacatcgcaggactcgcatgaggattctgttcgtgcccggttttgaagggagagttacctgcatctgcatggaagagggaggcgacccgcagcttccgagcatctccgcacgcaccacgtccgaaggcgcggggggcgtcgacttggatctccttgagcagctactgtctgacgacaacggctggctcgagacgggtggcgcgagcccctcctccgtggaggagcagttcagccaggccctgtcctacatccgagatacgcagagcgacggcgacgtcctcgtgcagctctgggtgccggtcaaccacgatgacgggaaactggtgctgaccacaagcgagcaaccgttcacgctcgaccaccgctccgacagcctcctccggttcagggaggtgtccaccaagtaccagttctcggccaatgttaagtcgggggattcgccggggctgtcagggagggtctttatcggcaggctccccgagtggtcgccggacatcaggtacttcaccagctacgagtatcccagggtaagggatgcacaatacctcgatgtccatggcaccatgggtctgccagtgttcgagaagggaagctacaactgcctgggcgtcatcgagctgatcatgataaggcagaagataaacttcacctctgagctcaacaccatttgcagtgctctccaggcagttaatctcagaagtacagaagtttcaagcattccacgcataaagttcagcactgcttcctacaaagatgctttaccagagatactggaggtcctgagagcagcctgcttgacccacaagctgccattagctcagacatgggtcacatgtgctcaacaagggaaacgaggcaaccgacattccgacgagaactaccggtactgcatctccaccattgatgaagcatgctttgtgaatgaagccgagatgcggggcttccatgagacctgctccgagcaccaccttctgcgtggggagggggttgcaaggaaggcctttacaacaaaccagccatgcttcttgccggacattggatcctga

SEQ ID NO: 34554 - DNA, 1212 bp, Zea mays
  Peptide Sequence Number=SeqID_77929
atgcacgacacgtggagccccgtagacgcggacctggcggagctgctcctagagggcttcgtcaagaggacgagcgacagggagctggtgcggccaccggcagcgacgccacagaaggaggtcctcgtgcacgtggccatgggtggtttcgtcacgcactacggaatgcttgctagggtagcagaggcgcggttgggtttgctaatcgctattctgatgctgattccaggactgccaaagatggacagagcgcaaaatttgtccaggatcgatgaggcaaaggggatcattgataagatgaaggttaagttcccagataaaattgagggatggaaggaggtgaaggaagtgggcgagctaaggggcgcgcgagaggacgtcagggccttttgctttactattctcctctttatgatccagcatcagccactattttattggaactttctgcagacttcaaaacaaggaggcttccccaatattcagtctacgcaacatgttcccagtacaagcatttcatcgggtcttcctctcccacaacaattgcctgtatactctcagccaactctgccccttgggccttttaccagcctggttggctatccatatttgcctcagaactattacttaccttcatcgccattccagcaagcgtactcaagtaatgggcctttccatcaatctgctgctcctgccatgcctggagctggtatgaagtatccgatgccacaatacaagagcagccctcctgcttcgaccctaccacaaccatcatcactctctggttacggagggttcggaagtgcaaataatatccctagaaatttcagccaaaatcagggtgctgccgctgcacccacaactttgggattcgatgaagctttaggcacacaattcaaacaccccaatcattatgcagcactacagcagagtgataattcagcaatgtggcttcatggaggcgctggttcaagaacaatttctgcagttccgcctggtaacttctatggtttccagggccaaagtaagcatggtggcttccgccaggcacatcatccatctcagtacggtggtcttgggtacccaagcttctaccagtcgcagaccagtctgccacaggagcacccccagagccccactgagggaagcttgaacaatccctacggggtaccatcccagccttcacaccagctctggcagcacatatactaa

SEQ ID NO: 34555 - DNA, 498 bp, Zea mays
  Peptide Sequence Number=SeqID_77930
atggatgaagatggaaatttgagacatagtaatgacccgagccttgtaaacaagaggggtaacaatggtgggagacttgcaagccattcaacggttgcaaggcaagatccacctcgctcttatcctagagttgtcgaaaaagttcaacccaggaggctagaactggcaaggcaagagccaccaatgaggcaagcgaacccacaaaccctccaaagttcaagtttgcaagccaaacctcaaggaagctggaagcagcgaagcggtaccaggaagcggagaatggttcgtggtctctattttaacactcacaagagaattaagaatgaggattttgaagtgttagcaaagtcacatcaactgcaagcaaacagctggtgggggaagctagatatcaggggaggagagaaaaacattgctaaagcacaaagaaaaactgaggcaagggatttcaaagcaaatgaaggttctgaatatctgcaaagatctagcacctgctga

SEQ ID NO: 34556 - DNA, 399 bp, Zea mays
  Peptide Sequence Number=SeqID_77931
atggaggagcaaaggaggccacctagctcgaagatagcgccagtgtccatgaaggcgtcctctgcaaatgcgacgcttcaaggcatgaagaacagaagccattttcgaagggacaggaaaactgcgctgcaacaagacgtgtgtgtattgttctacctggtgtttagtcgtggacaagctgaggaagaagttgtggcacgagaagaacgtccactaagctctaaagcaggcgttctcgaggccgctctgcctcgcctccctattgtctcaagtatagctgcagcagctgccagacagccgaaccgcgtgaaaggtttgcatcaccgtacccagtctccaacttgtgttgactccaatggctccacctacccatgttgcatcataaaaagggcagcttga

SEQ ID NO: 34557 - DNA, 483 bp, Zea mays
  Peptide Sequence Number=SeqID_77932
atggactacatcaattgggatttagaaagtgatataatcgaatggaaaattcaagaaaataattgtaacctgtgggagcgtggtgatggaaatcacgaaccttttgtccgtggacttggtcaaattcagttaaaatttggagacttcaaaagttcattaggtagctttgagaaagttttggaggtgcaccctgaaaattgtgaaagtttgaaggctattggtcacatacatgcaaaatctggggaaactgaaaaagctatagaaaccttcaaggaagttacccgtattgacccaaaagatcatcaggcatttgtggagcttggtgaattgttggtagaatctgactgggctgctgctatggaatacttgaagacatgggatttagaaagtgatatagtcgaatggaaaattcaagaaaataattgtaacctgtgggagcgtggtgatggaaatcacgaaccttttgtccgtggtgagccatga

SEQ ID NO: 34558 - DNA, 348 bp, Zea mays
  Peptide Sequence Number=SeqID_77933
atgggcaagagcaagaagagcgaaagttcgtcgcaccactctggcgacaagcggaagcgcgagccgacccctccctcggaggatttcagcgattctgagtactcggaggaggagttctcctccgagtccgagggatcgccagcctacacctcgcccccggcatcgttcgaagactcggacgattcccaggggatcgctgctgaggggagcggcggtgacggtcacggcgacagcgacgacggaggcgatagcgaggggacggcagcaagggcaacggcaaaggtggcagcggcagcggcagcggcaaggctagtagcaaagcgccactggcttaaaatattagtatag

SEQ ID NO: 34559 - DNA, 114 bp, Zea mays
  Peptide Sequence Number=SeqID_77934
atggcgccattcacctcgaaagtgtctaagcgccttgcaaaccctggcaacatgggatacacgacttgtgtgtacagggtacaacctctgcagagtgtaaaactggtatactag

SEQ ID NO: 34560 - DNA, 57 bp, Zea mays
  Peptide Sequence Number=SeqID_77935
atgccgaggctgaccatgctctatcttgaagaaatttatggtgttaagagattgtaa

SEQ ID NO: 34561 - DNA, 456 bp, Zea mays
  Peptide Sequence Number=SeqID_77936
atgcaggtggcgtgcaaccgcaccacgggaacgcaccccttcgacttcgacgcatccagcatggaggcccaggcccacacgtcatgtaaccggtgcgccggttactacgtgcgagaaactgcaccgcgacttgcgtcaatgtcgtgccttctcgactgcggaaccagtaccgtgactcgaggcaaccctgcgcatggcctgacagtgccaattgagcacatcggtcacggggaccgaaaaaggggatatttcgaaagggatccttctccgcgaaggaagcgggccccgagccctcctactgatcaagggttcgaaggctggcccctcggaagggttcgacagccgccccagagcactcgggctttaggctcattactgatcagaggttcgaatgctggcccctcggaagggttcgatagccgcctcagagaactcgggctctgcgcccactactga

SEQ ID NO: 34562 - DNA, 108 bp, Zea mays
  Peptide Sequence Number=SeqID_77937
atgaagaagccatggaaaaatggtgtcgagatggcgcacgagacggcgatgcggatgcagcttggttcgtgggctatggtggacagtggaggcgtgggcgcgagctag

SEQ ID NO: 34563 - DNA, 1197 bp, Zea mays
  Peptide Sequence Number=SeqID_77938
atgggagacccctacagcaattttctcagaggccactactcccacttacctccctccaacgctccccccgccacctccttccccagcagctacgcctcctcctactacctccaccacccgcctccccactcccctcccatcagggaagccctccccctcctcagcaacctgacgccatcgtcagcgaccaaccacaaccacggcggcggcgacgtccgagatcacaaggacggcaataagcgcgccacttcgcgcagcaaccaagaagaggccgatcaggccgccgccggggaggtcacggtggccttgcacatcggcctgcccagccccggctccggccccagcccctccgagtcggcggcggacggtggcgatagccaagaaccatcagcggaagggaggagccagcagcatcaaggcgtcgaccatgaagcgggggaagaggaggaagcggaggaggaggacgccatgacggtgggctgcgcgtccatcgggatcgggaggctgacgaaagggcagtactggatccccaccccgtcgcagatcctcattgggcccacccagttctcctgccccgtctgctacaagactttcaaccgatacaacaacatgcagatgcacatgtggggccacgggtcgcagtaccgcaagggcccggagtcgctgcgcggcacgcagccgacggcgatgctgcggctgccgtgctactgctgcgcggcggggtgccggaacaacatcgaccacccgcgggcgcggccgctcaaggacttccgcacgctgcagacgcactaccgccgcaagcacggcatcaagcccttcatgtgccgcaagtgcggcaaggccttcgccgtgcgcggcgactggcgcacccacgagaagaactgcggcaagctctggtactgcgcctgcggctccgacttcaagcacaagcgctcgctcaaggaccacatccgggcgttcggccgcggccacgccgcctgcggcatcgactgcttcgacgacctcgacgacgacgaccgcgacccttcctccgaggtcgaccacgccgccaccaccaacgctactagcatgactactaccgctgccgccgccgcagctaatgctcaccgtcgtcaccacagcgtgtggaagccgccgccgccgccgccgccgccattgtcgtcgtcgagcagaggctccggcgaccgactgctatag

SEQ ID NO: 34564 - DNA, 156 bp, Zea mays
  Peptide Sequence Number=SeqID_77939
atggcgcagagggtcttcttcgcagcagacctatatctcacctcccgggagcgaccccgtcagggaggagagatcccagggtgtgtcttggcgtcgccagggcttgttcggttagctctcaatccatgtggattgagcgggattggatgggtttga

SEQ ID NO: 34565 - DNA, 648 bp, Zea mays
  Peptide Sequence Number=SeqID_77940
atgcggaccgttcgagccccagacgcggaccgtctggatgtatgtagaggaggagacgctcctgcgccaggtcgcggaccgtctggccctgtgcgacggaccgtcggtgcctccacagagagcaccgccaggcggtctgttccagtgtttggcgcccagttcgacgccaacacacttttcgacgacttcgctaggatcagtctaacggctgaggggcaacaacattacgaagactactgggctgtttggactggcacctacggcgccgcaccacgcctaaggtgcggcggccaatttgagcgccacaccagagtgtggcgcggtgtggcgtctgggagagcctaccaaacatgccttacatacgtcaagcgaaggagaaattcttgtcacaatacacggtggatcgccaccaaaaggttgtcaaacatggagagaccaacgtcgcatctcttctatcttcgcttcaagtccccaattagtaggatatctgtgtctaatacatcggcaacaaatgaggactcgcagccccagccattatatggtatgccgatgaactcatatccaggacaaataccaccaccgccatccctgcttggcagatcggcgcccctggatacggttggaccgtccgagctttttcctggatag

SEQ ID NO: 34566 - DNA, 513 bp, Zea mays
  Peptide Sequence Number=SeqID_77941
atggcgcaccggacagtccggtgcacaccggacatgtccggtgcccctgccacgtcatcagtgccgttggaatctgaccgttggagttctgacttgtgggccacccttgatgtccggtggcgcaccggacagctcctgttcattgtccggtgcgccagtatgggcaaacctgacgtctgcgcgcgctgcggcgcatttaatgcctctgcagcggacgagccgttggcttttcccgaagctgaagagttcctgaggccgcttcttcatggcgcaccggacactgtccggtgtacaccggacagtctggtgaattatagcgcgagagcccctgaaattcccgaaggtggcgagttcgagctggagtcccctggtgcaccggacactgtccggtggcacaccggacagtccggtgcgcccagaccagagggccttcggttggctctttgcccttttgttgaacccaacacttggtcattttattggctatgttgtgaacctttgacacctgtataa

SEQ ID NO: 34567 - DNA, 567 bp, Zea mays
  Peptide Sequence Number=SeqID_77942
atgagtgctatgaagcccgaggtgctcgtaggtcatgagcgggaagcagaccaacgccacgctgtgggttctgccacgcccgaccctgggctcggtgccacggggttcaaccggggacggagtccggtgcaccaggccgagctccactcaaacagctcactctcgggtttctctggggcgcgctccgctataattcaccggactgtccggtgtgcaccggacatgtctggtgagccaatggagcaacggacaaaagctccaatggtcgtccgctccaaaaccccaacgggcgtgctgacatggcacacaccagacagtgaacagtggttgtctggtgcaccaccggactatccggtgtgcccatcgtcagcaaaagcagccaacgatcacgccaagagggagatcgtcacaggcgacaaggccatgggctcgggaaggtttctatcaagggagtccggcgacaagtacaaggaggaatcctcttcctccatcaagtcacataggaggggtgacaagaagaaaaagaatatgaagaaggtggtctactacgagaccgactcttcataa

SEQ ID NO: 34568 - DNA, 1839 bp, Zea mays
  Peptide Sequence Number=SeqID_77943
atggaggacgaggagatggagaagaaggtgcagcagtacttgcagcgcaagggtttccgcctcactgagcttgcgctccaggaggagcgcaaccgcctctccacctccgccatctccgacgttgcgcttgcacggtctgacaatgatccagcgagatactacgatggatatagcagattaagaacatgggcatacagttctcttgatcaatataagcacgaattacttcgcgtcctttatccagttttcatccatagcttcatggatctagtggcagaaggacatatgcaggaagctcggtcatttttccatacatttcgggaagatcatgaggtgatgcattcaagggatcttcagaagctggaaggcgtcctgtctccttcacacttggaggaaatggaattggcccggtcttttaggaaaaataaatttaaaattaaattatgtgagggttggccaacggacacaagacaaaagcttggagtgctggacgccggacacccgctcgtgctcctgcagttcttcgcgaagagcgcaactgccgataccgcacaaggccgcgaccgccgccgcaacacaagttcacagctaccgccggtgccgtattcgtatgaattgcttctccagtatctccagaaaacacaagcccttgtggtgcttggagtaatcaatgagcacataacttttgaagtatctcctggtcagccctcattaatctctgatgacgctgatgttgttgctctgattgggacaagtaaggacttggcaaaacagataaatcagaaggaagtacattgggggttgcttgaagattctgttgaagagcgaatggagaaggcactagcagaatctgataaaatagaagctgaaagcaaggatgctgatgcagaagataacaaggcaatgaccttttttctaatatcagaatcttctcacattttgtgtcctaaaagaaatgcagaaggtggaaagcaaggtgcttctcttaagaaagccaaaaaggacaagcttgttggtgcgactggaaaaagcgtcagaactgaaacaagcatggtttctgtggcacctcgagtgaaaccggagctaactcttccagcaacattaaactgttcctcaatatcacatgatggatcactggttgttggtgggttttctgattcgtcagtgaaggtctgggatatgtcaaagatgggccagccagcaaaaatatcaagatcacagggtgagaatgggccttcccagggtgagcgcatatcaacattagatgaggggaaacgaacctatacactatttcaaggccattctggaccagtttattctgcggcctttagcccgtttggggatttcctcttgtcatcatcttcagactcgacaattagactatggagcaccaagctgaatgctaatcttgtctgttacaaaggacacaactacccggtttgggatgtccaattcagtccagttggccattactttgctagtgcttcgcacgacaggactgctagaatttggtcaatggataaaatccagcctttgcgaataatggctgggcatctttctgatgttgattgtgtccagtggcatgtaaactgtaactacattgccactggctctagcgacaaaactgtaaggctatgggatgttcagacgggtgaatgcatacggatgtttattggtcataggagtatggttttatcactggcaatgtcacctgatggacgatacatggcctccggagatgaagatggaacaatcatgatatgggatctctcgactggccgttgtgtttcaccactactaggacacagctcttgtgtgtggacacttgctttcaggtaa

SEQ ID NO: 34569 - DNA, 1348 bp, Zea mays
  Peptide Sequence Number=SeqID_77944
aagtcagatggaggtccgttgccaaaccagcttttgccagaatgaagatggtttccccaagttgctgagagcatgcacagttcgcctcggaatcaggagccagccagagtatgatggtcgtgaattcgtcgagcatggcacagagaagtgtgtcgtgactgtatacattggatccagtccacaccatgtggaatggagtgtcactgctgcatggcatagattcaaagacacctgccaagtcgtcgcccgcaaggcattgaggaccctgtgtcagatctatgaagaagaagtggccgacaccccgctcagattctttccgccctttcagagaaaccgtccagtttggatggccaggatgcgtgcattggaagggaagcagctgcttgaggatgaccccacagtcgtgcacctcactgcatacctgctcaccctagatgtgcagtatgatttcttggctcggcaccaccgtcagatgattgcccgagcagaagatgcagagaaacgcaaccgtcagctccatgtggatctcaccacagctcaagcccgtgcaactgccttggaaagtcgtgaagccattgctgttgaagccctgaagcaagccaaggatgagcacgtacagaagttgatgaaggcctacttggtaacccataaccaacatagagccctgcggatccaagagcccgcttcatccaacccagttcaatccgtgagagttgaagatccccagattcttgaaggtcacccggtctctatcaaaggagagaagaaaacttgtgaactgccggaaggagccatagtcttggaaggaattccagtcttccctcaggctatggataagcaagagcaccctgaatcctcccaagatcccctgccggagttgtttgagcccctcaccatgaagaagatttcagcaccatcccttgaagtcaaggaagaagctgcaagcaccccgccagcaccgcctttgaggagctacaagaacccctcttccacctccccctcgctgcgcgcacgccaaagcgccgccgccattaaccaccgccgccccgagcccgtttctccgtcggcgtcggagccccgccgcgccctctgccaggccgcagaggtctgccaccgtcgacccgggccgtcgtcgcaccattgtcgtcaccaaaaggtccctggggttcgccttgagggccgcttcccccacaccccgctctgcccgcccggccccgcctgtcagccgcccacgcccgccctgcccgcccggccccgcctgtcagccgcccgcgcccgctctgcccgcctggtcccgtctgtcagccgctcatgccgccgcgcgctcgcgcgcctgcctccgatctaa

SEQ ID NO: 34570 - DNA, 135 bp, Zea mays
  Peptide Sequence Number=SeqID_77945
atggcgtggggccagaatcagcagggtcgacaatgtcaaagcagcgggatcagcagggtcgacgaggacctcgaaggcgaagggttccggagacctgctctcctgatcgcagatgcacgtctgcggtcgggatga

SEQ ID NO: 34571 - DNA, 465 bp, Zea mays
  Peptide Sequence Number=SeqID_77946
atggcagttggaggcggcgtgtgtgtggcgtcgccctcgccgtcgtcggtcgaggcgtggtcgtggaggacgagcggggcgcggcgccgcgcggccgttaggtgcagcgtcgttggcgaggccgggccgggcgccgccggcgggcgggtggaggacccctaccggacgctgcgtctgcgccggggggccacccgcggcgaggtcaagaaggccttccgccgcctcgcgctcatgtaccatccggacgttcgcaaggagagggagagggagatggaatgcgacggcgacagcggcgtccagttccagaggattaacgtggcgtatcagaggctgatgagcagcatgagggaggccgacgagcggctggagtactggcgcctcaagtacggcctcgccgacgaggatctggacaggtacaggcgccgcctcaacgaggaagacgccgacgactggttcgacatgtga

SEQ ID NO: 34572 - DNA, 54 bp, Zea mays
  Peptide Sequence Number=SeqID_77947
atgacaagagaagctggacaaggatctggatcctcagagcgcatgggaggttag

SEQ ID NO: 34573 - DNA, 516 bp, Zea mays
  Peptide Sequence Number=SeqID_77948
atggacttccaatttccaaacgtcgacgcagccacaggagtgttgtgttacacggggcatggagaagctgggttttggctgggaaacccgcgggtttcgagagtcccaaacgagttcgtaatctgtgaaggagcattgcttgcatcgggatcggctgactgtactgtaaagctctgggatgtcgcttctagcacaaaaaccctgaagacagaggataccaaaggcagctcagctaaccgactgagactgcttaaagctctccctacaaaatcaactcctgtttatagcctgcggaaaactagaactggtcctgttttgacattgagtagtgaagctggcatttcagagactgcctattgtacagctaatattttcattagcaattccaacgaactcagcatgtactgccgaattgagcaccgcagattcgttgtagcgggttgtgatattgtaacaatattattaggttgtgaccttatgaacgcaactaaatgtacaagtgctgacaggcgatag

SEQ ID NO: 34574 - DNA, 1278 bp, Zea mays
  Peptide Sequence Number=SeqID_77949
atggtgctcctcccacctagtccccaagctgacactcaggaacgtccacgcgtccgtccccgtccttctcgtcgcaggaggcagagacagagcaactgcaacagcgccactcgtggcaccccgtgccctggtgaggctcctaggctggctaaggacgcaaactcccttgcgagggacctagcgaacgacacaccaactttgctggacctcccacctacgggctgggaggagccgatcgctccatggcaggacatgtcaatggctgggggagagccatcagtgtataaccccatcccttttcagtggagcttcgacactagctctctcaccagcttgtatgctggtcttcccttcccctcaggatgccttgaatctaaggaggaagatggtccgggcattggcctagacttccccgggcttcgtgacccaagtccatgctatagttcctgttcacatgatacgaactgctttccaacagcttgggtgactacaacaccgataaggggggttatgacccaactcgggagtgcttccacgtgggtcacgaggagcgcgacaaagggaaccatctcgacatgcctcgggagaatgatgtgccaccaccacacgctagggaagcaagagagctgggtgaggcccagacccctccagggagtcacatggcccacctcgaacagcttcatgagttgcacgccaatctcgaagaagagcagcaacgtgtgcaatagctccggtaggttctcgagagggaagcagctggcaaggttcttgacgaaggtgcacgcaccaaggcacgcgacgttcatcgtcatatcatggaagatgccgaggccgaagccccttcgccatttcacagggctagtcaaaacctcgttgcagcagcaatcttgctccgcaccatgtcggagccatccaccaccaagggacatcgaatccaaggtgaaattcggggactcttggagtgtgctgtggtccagtaggccgagagctcagcctctaggcttcgggagcctgcctcagagcaccgaacaggacccgctcgctttgagaaggaggcttcggtccatcccaaaccaacaagagaaaccgcccccgcagtgcaagaccgcattctcgacaaccgccagaactgaggtgtgcacgaccgtctcggcggccgtgtccagcaccccgatcgacagatatgttaccgaggggttgtgtggtttttctcaactatgccttgttggaggaaagttgcagctttctgcggcacaccggacagttgagagcacctag

SEQ ID NO: 34575 - DNA, 432 bp, Zea mays
  Peptide Sequence Number=SeqID_77950
atggcgcgacggtggcccggggcggcggtggcggacctccgcggctgcacggggagcggcggattaacagaacctgtgccaactgattacgagaaaataagggctatgaatatgatgaagaacaatcaattgtttcaatggctaggccttggacaattgaaatcactagtgactgctacagctgcaaacaacaaagaagactgtcctcagcaatcagggagtttatatgatggtgaaaacactgacaattctaatgaagagttttgggttcacaatgaatttgatatgcatatccttattgtattctacatattcaggaatcccaatgtcgtaacgtacgatggtcgtgccaacatatccaatgatggtgatcagatctcaacaaaagtaacaagaggaaataaaagaattatggcacctgcgcaggagtga

SEQ ID NO: 34576 - DNA, 558 bp, Zea mays
  Peptide Sequence Number=SeqID_77951
atggacaatgatagcaaggcagtggaagatgcttgtctagatatgctaaaggttggacaacgccaaatgaggtatagactaaaacaaaagtatttcaatgggatacctgctaatcaagtgaagactacatcgccaatttcaagcatgtctgatgaggactggagaaagttggtggagaagtggtctaccccaaaacacaagaaacaagagaaatataaggatgctgaaccgagtgcaatagatcttttcaaggacatgcattgcagcaagaagaaaggtttttctgaaaatgtaaagaatgcaattaatgctggtctgcaagataactccaagaaaagatccacaacaactgtttctgcaaaggttcaagaacttcagaatcaattggagtctaagaggctagaaaaagatggacttcgggaagaagtagaaaccttaaaggctcaggcacaggcctcaaaggagaccatggacaatatgaagagatcgatggaagaaaataatagtctcctccatcaactgttgagcttcaatcaaagccaagcgcccccatcttaa

SEQ ID NO: 34577 - DNA, 2337 bp, Zea mays
  Peptide Sequence Number=SeqID_77952
atgcaggtgcggagtcctgccttcgcattgaatttgcatggccgcgatcccgccgcattcgtgcgtgaggtggaggatagggcgatgcggattgttggtctctatgtgccaaggacggaggcccagcgtagttgggatatacgcggatccaacgatcgcttgaatagggtcttcgagttgaaccgtctgccgtatggcggttatctcgggcaagacgttgtcgaccgccgcgagaaaaaaccggcggcggagactgaagacgactccgcgccggcggccgccccatcctccaagaagaggaagctaggtactgcgaagggaggacttggggtctccgatagttttgctatggagttaatggggacatgcgcgacccccgagggaaggatgtcttcgcccgagctccgggagtcttcggcgcggatgctgaaggttaccgggggttggtggcctaagaacgttcctatcccccgcgcggccgacgaagacttttttacatctcgcatggttcgtgatatgagagtgtttccttatggacggaatattgctgctgttgtgtcggcagtgatggacaaggatcgtcaagaggctgcggagaagcgtcgggcagtcatcaggctgcccgaggctaggccgaagagagcgcgggggactgcgaagtctgccgcccccggcggtagccagtcgacgctggtggcgaagtcagccgcccctgggtccagcaaggtgccagaggtcgcgaaggcagccggagccggtggaaccaagtccgtctcggccggatccgcgaaggcccaagaattggcttcaccggcgaggcgcgttgccgactttgccaccgatattagcgtggacgattatctcgttggatcgggcgaggggcaacttgttgttgttccgcctgcggtggcgaccgcggtgcctgtggcgaagggaagcgctctcagcgctggtggtgagattccggcgctcactgccgtgaaggacgaggcgggcactgtgtcccgccggctgaaggaggcgtcgcagtggctaagtcaggcggctgacttcgctgaccgcgtggcgttgggggcccctacggctgtggtgtctgccgaagtcgagaggcttcgggcgcagcatgctgacgtcgtatgggaaaagtcggtcgccgatagcaagtgccgcaaattggcggagaaggtgggcgtgctggagggcgagaggactgaactccggcgccagctggcggaggagaggagggaggcaaatcaggccctcgccaaggcgcggtctgcacaggcggaggccagtttggcacgggtggagggtagcctcgccaggcagcgcgccgagaaatgggaggagcggttcaacgctctgcaggcccgtatggagagggccgaggcgtctacgcgctcggaagttgagcggacgcgtaaacagcttatggactcataccacaagctgggcgcgcggaccgctgacttcgaggtgcccgaccgagagtcgggccttcgctgcctcgagtggctgcaagaggagttgcaggcgctcccgaccattatggagggttttatgtcttatgcctccctcgtcagctgtgaaggggcgatgaacgcgctgtcccgcgaagggtgccgccactatgaggttttcgaccgatctgatgaagattttgagcgcgagatctacaaggtcgaggacccagtggtgaaggagtccacgggggccctctttgaccggatgtgggcccctcacggtcgggaggtggttagggagcggtccgaccgggcgaggggccaggcggcgcgtgccgagatcgtggaggactttggatctttgaacaacgcacgacccgaagccgagatgaacccggtggaagccgaggctgaggtcgtcccggcgccgcccccggaaaccggcgaaggctccctcgctgcccctgcggctgctgcgtccggcggcggctcgtcgccaaccgctgtgccgagggctgaggatccccgaagacgacgacggagccggcggtggaggatcccacggcggctaggccttcgcaggatcaagattttgggcctgcgcacgcaaccgctactgctaattttgtggcagcttcgacggtggatgctgggaatgaattggatgagtctgcttctaagtttttctgattttggtgactctgggagttcgattgagtggacggaagagtcgtcggatgaggacttggattactttgcggccttggatgtggctgcagcagaggcttcgccgcatgctgcgggtgctcaagttgtgcctggtctgagtgcttgggcgttaggcggcgaagggcggttgcgaagcgtagagtga

SEQ ID NO: 34578 - DNA, 177 bp, Zea mays
  Peptide Sequence Number=SeqID_77953
atgacgaaggtggatgcttgccgaaggtggtcgtttgagttcaccggaggtcaagaacaaggcaacacaattgttaattattacggaccttcgtcttctgaagcattatcgtcgcatgggtttaatgctcatcagacgaaggtcaagaaggacataccttcatcatttaatatgtga

SEQ ID NO: 34579 - DNA, 198 bp, Zea mays
  Peptide Sequence Number=SeqID_77954
atggaggtggaaaacttgttggagaacgacgttggctgcccgactaccacaaccaagatggtgtggcgccttgagcgacagtactcagccaagaggcggcgggcgctggccaccgaggtccagagagacagggtagcggggtcctggcgtttaggcggcgtggcgtcctacacgctgggcatcacgggggtgagatag

SEQ ID NO: 34580 - DNA, 441 bp, Zea mays
  Peptide Sequence Number=SeqID_77955
atgaagagcatgagggaggatgacataccggtgtctgacacgtggattattcctccccgcggcgcacggcggcatgacctaccacaccggatcatcggcaagcaaacgtccggcaaactaggcctttccatgcctgtcactgccactaccatggtcaggacgcacatgcgattcgctccagccaccacctaccatcaggaccggcatgtcggcaccggcagccacatcattgggccgtgcggtccaagtgggctgctggcgagatttcagcccagaaacaggagaagggctgaagaggagagggagtcagccatggagagggagctccgttcagccaccatgggagaggatggtgtgcgtgagggaggaagttggctggtcctggcagaggtcacgaggtgggagaagcagcaggccagcagccctgtacgacggctgtag

SEQ ID NO: 34581 - DNA, 429 bp, Zea mays
  Peptide Sequence Number=SeqID_77956
atggacttcgccttgcccgaccccagggctcggactcaactacgactcagaagacgacggactctgcctcgcccgaccccagggctcggacacagcctcggcctcggaagacggtctccgcctcgcccgaccccagggctcggcccccgtctcggcctcggaagatggacttcgcatcgcccgaccccagggctcggactcaactacgactcagaagacgacagactccgcctcgcccgacccgagggctcggacacagcctcggcctcggaagacggtctccgcctcgcccgacccagggctcggactcgacctcgacctcagaagacggactccgtctcgcccgaccccaggggttggactcagcctcgacctcggaagacggactcgacctcgacctcggaggagcctccgcctcgcccgacctag

SEQ ID NO: 34582 - DNA, 429 bp, Zea mays
  Peptide Sequence Number=SeqID_77957
atggacttcgcctcgcccgaccccagggctcggactcaactacgactcagaaaacgacggactccgcctcgcccaaccccagggctcggacacagcctcggcctcggaagacggtctccgcctcgcccgaccccagggctcggcccccgtctcggcctcggaagatggacttcgcctcgcccgaccccagggctcggactcaactacgactcagaagacgacgtactccgcctcgcccgaccccagggctcggacacaacctcggcctcggaagacggtctccgcctcgcccgacccagggctcggactcgacctcgacctcagaagacggactccgcctcgcccgaccccaggggtcggactcagcctcgacctcggaagacggactcgacctcggcctcggaggagcctccgcctcgcctgacctag

SEQ ID NO: 34583 - DNA, 1197 bp, Zea mays
  Peptide Sequence Number=SeqID_77958
atggcggcggcggcgagcaggacggtgtgggtgaacggccccatcgtggtgggggcggggccggcggggctgtcagtggcggcgtgcctgcgggagcgcggggtgccgtccgtcgttctggaccgggccgactgcatcgcctcgctctggcagcgccgcacctacgaccgcctccgcctgcacctgccgcgccgcttctgcgagctccccgggatgcccttccccgcccactacccggagtaccccaccaagcgccagttcgtggagtacctgcaggcctacgcggaccgcgccggcgtggagccgcgcttcaaccaggccgtcacgtccgcgcgctacgacgaagccgcggggctctggcgggtgcgcgcggaggacgtcctcgcctccacttccaccaccgagtacataggccgctggctcgtggtcgccacgggcgagaacgccgagcgcgtcgtcccggagttcgagggcgcccgggacttcgcggggcccgtctcccacgtcgccgagtacaagtgcggcgaggcgtaccgcggcaagcgcgtgctggtcgtcggctgcggcaactccggcatggaggtctgcctcgacctctgcgaccacggtgcgctcccgtccatggtggtcaggggatcggtgcacgtcctgccgcgggagatgttgggcgtggccaccttctccgtcgccgtgttcctcctccgcttcctgccgctgcggctggtggacgccgtcctcgtcctcctcgcgcgcctcttcctcggcgacctggagaggctcggcatccggcgccccgcgtgcggcgggccgctccagctcaagaacgccaggggcaggacccccgtgctcgacatcggcgccctcgccaggatccgctccggccacgtgcgggtcgtgccggggatcaggaggctcttccgcggcggcgccgagctccaagacggccgccgcgtcgccgccgacgccgtcatactggccaccggataccacagcaacgtcccacagtggctcaagggaagcgatttcttcaccgaggaagggtacccaagggtggcgttcccgcacggctggaagggggagtcggggctctactcagtcggattcaccaggagaggcctctccggcgtctcctccgacgccgtcaaggtcgcgcaggacatcgccgtggaatgggagaagcagacctccaagagatga

SEQ ID NO: 34584 - DNA, 351 bp, Zea mays
  Peptide Sequence Number=SeqID_77959
atgcaggtggcgtgcgaccgcaccacggggacgcaccccttcgacttcaacgcatccagcatggaggcccaggcccacacgtcatgtaaccagcgcgccggttactacgtgcgaaaaactacaccgccacttgcgccattgccgcgccttctcgactgcggaaccagtgccgcgactcgaggcaaccctgcgcatggcccaacagtgccagccgagcacatcgatcacgggcgaagcgagcgtcgcttcaccttcgccatgatgaccgcgtcaaaaaagggaccgggaaaggggacatttcgaaagggatccttctccgcgaaggaagcgggccccgagccctcctactga

SEQ ID NO: 34585 - DNA, 1059 bp, Zea mays
  Peptide Sequence Number=SeqID_77960
atggctgaggggttcggccccgagacctccaagtgggagacttggtgcttcgactgcggcaagacgcccgagggcgccacaagcttactcctccctgggaagggccattcatcatcgccgagatcttcaagcccgaaacgtacaagctggccaacaatcaaggcgaggtctacagcaacgcttggaacatccgacagctacgtcgcttttacccttaagatgttttcaagtcgttcatatacctcattttctatacatacacaaataaagtctaaccgtcaaggaagggtccgccttgcctcggcaaagcccgaccctccctcgggggctagaaggggggaccccctctacgtcaaaattttcctcggaaaaagtctttctgccagaacatctttcgcgcttttcgactgcttcgatagcgggatcttgaaaacgacggagtacacccagctgtcccccgaggacatcagccgggctcatggcctcggcagcatgactctaaggccggtaccgctaaccgacgacctggccaagctccagccgtcgctgctgcacctcctcggccagggaggccacgcgagtctcggcgctcgaaatgaggaagaggcacaatattacactcgaatacccagatgttcaggccccgacagccacaatgaacatacaccggcactcaaggtgccattacaaatggaactccggttccactcccgcgggtatgaacaacctccacaccggagggcctgcgggacgacaaactccaggtggcttgccggcgaccgctccatcagcagcgacaatgacctccgcctcgggcggctaaatagcagcagcgatgacatcagggcagacgctgctacgacaaggccctcacccacgtccccaatcgaggggcgaggacaagctatcaaagccaaagagccggaggtcagtcagcgggtggcgccgacggtctcgtcggtggagaaaccttctccggctgccaccacctcagcaccgacgacggcagctgaaagggaaatgtgcccttgggccatttctaagtattttggtgattaa

SEQ ID NO: 34586 - DNA, 111 bp, Zea mays
  Peptide Sequence Number=SeqID_77961
atgccgccgtgcgccgcggggaggaataatccacgtgccagacaccgcagtaatagacatcgaatccgtggacctgtggctcggcatggcctcaccagccaccgtggctag

SEQ ID NO: 34587 - DNA, 930 bp, Zea mays
  Peptide Sequence Number=SeqID_77962
atgcaggcggcatgcaaccgcaccaagggggcgcaccctttcgacttcgacgcgtccagcatggaggcccaggcccacacgtcatgtaaccggcgcgccggttactacgtgcaagaaactgcaccgccactcgcgccactaccgtgcctcctcgactgcggaaccagtaccgcgactcgaggcaacccagcgcatgacccaacggtgccaaccgagcacatcgaccacggggaccgggaaaggggataccccgaaagggatccttctccacgaaggaagtgggctccgagcccccctactgatcagaggttcaaaggctggtcctcggaagggttcaacagccgcctcagagcactcgggctccgcgcccactactggctggcccccggagggttcgacagccgcctcagacgcagagcgagggatgaccctgggtacgttcgatacataaccaaggctcgggctacgctcccgagagtgaggctgacagcagccaagtttggcctcggcgccataggaagctccgcctcgcccgaccccagggctcagactcgggctcggtcccggaagacgatgaactccgcctcacccgaccctagggctcggacttggcctcggtctcaaacgacggtctccgcctcgcccgacccagggctcggactcgacctcgacctcggaagacagactcgaccccgacctcggaggagcctccgcctcgcccgacccagggctcggaccgaccacgtcacaggaggggccatcattaccctacccctagctagctcaggctactgggaacaagaccggcgtcccatctggctcgcaccgccccttacagaagcaaggagacgtcagcaaggactcgacagccccgacagctgtccttccgcaaggctccaacgctcctccgacggccacgacatcatatga

SEQ ID NO: 34588 - DNA, 1641 bp, Zea mays
  Peptide Sequence Number=SeqID_77963
atgaagataaaaaagatgaaggccgatatcagaaaggtgtcacatgatgcatggagaaaagacagagaggctgaggagaaatggttagagaactgtggggaagatgaggagttcttgaaacgggagggcaagaggctaaacagagatcttttacgaattgcacctgtttatataggaggctcctctgaaaatgaaaagtcatatcgtggttgggaatctgttgctgggctaagtgatgttattcagagcatgaaggaggtggtgatgttacctcttctctaccctgagttctttagttctctaggtcttactcctccaagaggtgttctgctgcatggccaccctggtactggtaagacacttgttgtaagggcactcataggggcatgttctcaaggtaacagaagaattgcttattttgctcgaaaaggtgctgattgtttgggtaagtatgttggtgatgctgagagacagttaagacttcttttccaggtagctgaacgatgccagccttctatcatattttttgatgagatagatggtttagcaccttgtagatccagacaacaagaccaaacacataattcagttgtggcaaccttgctctcgttgcttgatggtttgaaatcacgaggctcagtcgtagtgattggggctacaaatcgtcctgatgctattgatcctgcccttaggagaccaggaaggtttgatcgtgagatatactttccactaccaaccttcgaggatagatctgctattctgtcactgcatacaaaaaaatggccaagtcctatttcaggtgcattcctgtcatttgttgctagccaaactgttggatatgctggtgctgatctgcaggcaatttgcacacaagcggcaataaatgctttgaaaaggacatgcccattacatcaaattttacaatatgccgagaaaggagttcctcatgggcgagttcctctaccaacagttcttgtcgaggataaagattggctagctgctcttgcagctgctccgccaccttgttcaaaaagggaagcagggattgcttcaaatgatttggtttccactcctctagattcctgttttgtaccaagcctttttaaaccattggtacaccttcttatttctatgtatttggatgagcgtgtatggttacctccatcccttcttaaggcatgttgctctataaaggaagtggtattctcatccatggaaaagaatactgtaccccacactttatggccaacttatcttagttctttgatccaacaaaaagatattgcagatagaattggaacaatcttgtcaagctgtggccttatatctgcacaactaggaaatcgtggttcaatgttgctgagtgatgttaaaacacaggagaatttttgtggcagcagattaaatcccactggtttgcatatgaaaggagggctgccacataagttatcaggctttcgagttttagttgctggagcaccaagatcaggccaacaacacctaattcgttgtgttcttcatggttttatgggccagattgtaatacacaagcttgaccttgcaactatggtgcaggaaggaaatggtgatatccttagtggtctgacacacattctctgtaagttactgtgtttcccttag

SEQ ID NO: 34589 - DNA, 2432 bp, Zea mays
  Peptide Sequence Number=SeqID_77964
cactctgctacaccccccattgtacacctggatcctctccttacggctataaaagggaggaccagggccttcttagagaaggttggccgcgcgggaccgaggacgggacaggcgctctcttggggccgctcgcttccctcacccgcgtggacgcttgtaaccccctactgcaagcgcacctgacctgggcgcgggacgaacacgaaggccgcgggacttccacctctctcacgctcgactccggccacctcgcctctccccccttcgcgctcacccacgcgctcgacccatctgtttcactcacttgctcggttgctctcctcctgcctcctgtgcactggcagctctgctaccaacctaccacggtaccaccccatgaccccactcgaacccaagccgtcccctccggcaacaccctttcaaacgtcaaacttgagtgtagcccgaaggctgaggcagaccctaaacccccggcgactcgtcgtcgtcgtctcggcgcgagccgcgtgatgcctccgtccaagcccaagcggcggcgcggcggcgccgcctcccgcggccggaagaagcagaaacgcctcgacgcgatccgcgacgtcccgccgccgccacctccgccggcacccctggccggcggcggcggctccgactccgaagaggagtccatccgccgcagcaagagggtccgccgggcgccggtcgtcctcgacacatcgccgctcccttccccacgcggcaagaggtctcgccgcggcgtccgggtgggttcgagcgggagctcgcggaggggaagccggggcagggcaccgcacgaagtggatgcccgaggggtggaggaaggggagtacgatgaggggagcgtggtgtggcgttcgcggctgagggatagggttaaggggaaggccaaactgggggtgcgggcaaggagcatgtggttcgaagatgaagattacgtggcggagggagatgggcaaggggaggaggaggaggaggaggaggaggaggatgaggatgaggaggaagatgccgggatggtggtggtggacgttcgtgagaggtctgaggacgacgaagtgaacaaggaaagtggatgtttgcagttgcaagggaaggaactaacagatagagagatcaatttaacaatcgatttgaacttagatgcacatgatgcccgggatggtgtcgatgcaatagaaaaggaagagggaggaaaaggagggaatgttgggaaggaagatgtggcggcggagcaagaacaagatgatgaggggcccacagtaggcactagaaatgatctagaggaaggcacgggagaggaaatggtggtggaggaaggtttgcagcaggaggaaataggagggttggaatcacatgtatcgagaggaaacagtagtgatgaactaccttgtggtgagagcaatgagggggttagggccagcaattcagacagaattgagcagcttgacatggaacagaccgcagaagagagcaaccttccagttgagcagcaaacggaaccgcacctatctagtcctagtgagcaagaggaagaggtccaacaggatggacagtcggttcatttcccagatgcggtattggctaaggatggttcaaaagagagcatgcaaaattcctgggttttagatgaaaaccagggagttaaggtggttaaagaagggaggaggtgtgcgctctgtggtggagggaccgatgggagaccacctaagattgcattgcatgattctgttgacagtgaaaatgaagcctatgagggggctttaccttcagaggaacccaactatgatatgtgggatggatttggtgatgatcctggatggttgggaaggctgttgggtccaattcatgaccgctttggcattgcacgtgtctgggttcatcagaactgtgctgtttggagccccgagaacgaccaacaagtcaatggcaggaagaaggccggcactgccggtgacgggtgttggcgtgtgcgtcgcgcgtggggaaggccggcgtggtcggcgccggggcgcagggggaagaagcggcctatccgctggccctgcgcgccgcacgagggccgtgacgtagggaagacagggtgccaccgtgagggtatttgccgtgggaggccatgggtggctggcggcggctctggtatggcgtgtgttgcgcaggttgtattggtgggaaattggatgcctaggcgtggtggttcgtcgcctgtgttggggcgaaggcgaacacgccacccttcgctcgacgacatctacctcaacattccgcagaacgaaggccgcgctagcaggccccgtcggtcaggccgcggacgtcgtccatgcgaaggcccaagcgcccctcttcgctccgacaagacgagacgaagacctccaacgactgcaagggttgggaggccgaggccgcgaagaccataa

SEQ ID NO: 34590 - DNA, 159 bp, Zea mays
  Peptide Sequence Number=SeqID_77965
atggggtggtaccgtggtaggttggtagcagagctgccagtgcacaggaggcaggaggagagcaaccgagcaaaattactctcaatagttgttattccatacctctcgaggccatcattattagcatctgtcggcgtttcgagacaggggggtccctaa

SEQ ID NO: 34591 - DNA, 549 bp, Zea mays
  Peptide Sequence Number=SeqID_77966
atgaagaactcgatgctaaccacgatcaccgaaaaaggacaagatagtaagaactccaacgaggaaaaggagaacaaggtaacgacaatgccgatgcttactcttcatcgatttgtgaagaaacactggtacgtcgtcatccgcgagttcatcagtgcatatgagggagtccttgacgacgactgcatcggcttcatcatccacaacgccatcatgcaaatgagcatcaatggcttcacctgcatgtggcttgccatgcttcacagaactgatcaccgtgaaccaccccactgtggacccacgccacaccgcgcacaagcgtcactagtggcgacgttccttcgttttcggctcgagtggaggagacaccgatctccaatatgtacccataaggattttgctcgttccatgggtacgagccctgtgtgctgtctgctgtgcgacgtcggagtcctcgataccacaatcatcaatgctcgtcacaccgtcactgcgacctccaccaacccaccaactacaacaccgacaaaagaggagaggcctcgatga

SEQ ID NO: 34592 - DNA, 486 bp, Zea mays
  Peptide Sequence Number=SeqID_77967
atgaacaaacacaccggcattcgaagtgccattacaaacggaactccggttccccctccgcaggtacgaacaacccccctccgagggggaaggcctgcggagcaacggaaggccgacgaatggtgcgccgtcacccgctccagcagcagcgacgacgacgccttctgctccgagggaccaagcagcggcaacgccgacctcaggctcgatgccgctgccaggagacccccgcccatgccaaaacttgtgaggcaaggacgggcagaaggccatagagttggaggtcagcccgtggccggccccggctatctcgccggcagcagaacctcttcaagctgccgtggcggatgccggcaccgcgagcggctccgaagccactcgcgcccgaaggccaggcacgctgcagctgccagcgccacggacgacggccgcctctccctccaatcactgagtgaaggagcgggccgccgcccacgcgggggctga

SEQ ID NO: 34593 - DNA, 1515 bp, Zea mays
  Peptide Sequence Number=SeqID_77968
atggaggcccaggcccacacatcatgtaaccggcgcgccggttgctacgtgcaagaaactgcaccgccactcgcgccactaccgtgcctcctcgactgcggaaccagtaccgcgactcgaggcaaccctgcgcatgacccaacagtgccaactaggcacatcggtcacgggccagcgggcggaagcagcagtcaagttgtcagccaagctcacgtcccctcctgggacagcgggagaaccctctcccacggcgtgaagacgacgcgcccgtgttccattcctcgaatggctcgcgcacgcgcaacggctgccccgcgaaccactcgtcccgttgcattaactctgcggcaggacaggcggcacctttggcaggagaagcaggcgacgcttcgcttccgccataatgaccgcgtcaaaaaagggaccgggaaaggggataccccgaaagggatccttctccgcgaaggaaacgggccccgagcccccctactaatcagaggttcgaaggctggcccctcggaagggttcaacagccgcctcagagcactcgagctccgcgcccactactggctgacccctgaagggttcgacagccgcctcagacgcagagcgagggatgaccctgggtacgttcgatacataaccaaggctcgggctacgctcccgagtcacttcgccgctccactgaccagcctgacaagaggacagcgccgcctgagtcgctccgactgctgtgccactcgacagagtgaggctgacagcagccaaggctcggactcggcctcggccccggaagacgacgaactccgcctcgcccgaccccagggctcggactcggcctcggccccggaagacgacgaactccgcctcgcccgaccccagggctcggactcggcctcgactccggaagacgatgaactccgcctagtccaaccccagggctcggactcagccctggcctcagccgacggtctccgcctcgcccgacccggggctcggactcgacctcgaccacggaagacagactcgacctcgacctcggaggagcctccgcctcgcccgacccagggctcgtaccgaccacgtcacaggggggccatcattaccctacccctagctagctcaggctacggggaacaagaccgacgtcccatctggctcgccctggtgccaaaggttcaacacaaaccaataaaaagtccaagaaagggttcaaaaggaaaggagcaaatgaaaccgaagactgccctggtctggcgcaccggactgtccggtgtgccaccggacagtgtccggtgcaccaaggtggatcagctcgaactcgccaccttcgggtttctagaaatgccactccgctataattccccggactgtccggtgtggctccggactgtccggtgtgccaagcggagcaacggtcgccagctcaacgttcgatttcaacggtcggctgacacagctacagtgcacggacagttcgcgcagagtcagagcaggcgccagaaggcgcactag

SEQ ID NO: 34594 - DNA, 381 bp, Zea mays
  Peptide Sequence Number=SeqID_77969
atggaggcagccaacacccacgcggaggaggcaatgatggatgggcccgcccagccgcggccgcccaacaggacccgggaaccaggcggccgcccaacaggacccgcgccttctgttccgtccgtcaccgccacccggctcctactactcggcgcggcacagccccagccccaacccctgtgcaaggggcatgtctcccactgcggttgctctacgtccaccggatctggatcccgcgggagcgagtggcgcggcggtggcgatgacgttggggaggggcggtggaggcaaagggaggaggggaggcggagagaggtcgcgtcggcggtggaggcagggggcgagcaacgcggcagagaggaacgtgcggggggaggttag

SEQ ID NO: 34595 - DNA, 417 bp, Zea mays
  Peptide Sequence Number=SeqID_77970
atgcgccaacggctccaaagcgccaacggtcggcttcgccaaagaaggaaagaaatccgcaccggacaatgttcgttggtgcaccggactgtccggtgccaaaggttcatctataactatactaaatcgactgtccggaataccgtagattattccggacaggagaagctttttggaaaaacaggccaagcgcggaccgtccgggcccttgcggcggaccgtccgcaacacaagaataaccctcggacagaaccaatgcaaaaatccgagtctgcactgtggaccgtccggaggataagcgcggaccgtcggagaccccgctcggaccgtccggtctcaggcgcggaccgtccggggcggaccgtccggacctggcacgcggaccgtccgcgctcagcagaatggagcaacgactag

SEQ ID NO: 34596 - DNA, 531 bp, Zea mays
  Peptide Sequence Number=SeqID_77971
atggccgcccttccgtctcccgcccttccatcttccgcccctgtcccttcccctcccggcgccaacctctccaccagcctcacgccggcatccaccccggacccggcggccaccccgtcgtcttccaccccactgccccctgccggtcttcaatctgaagccggcgaccacctccgcccaccacgttccggcgccaggatcctccacccaccacgttccggcttcccagactggacgctcaaaatcccagagatggaccgacgccattccccgttctacgtcggacgcacggtcgccaatcgacggtacgacgacggtagacgcgcagaggtgtcgtgccagaagcctgttgtgaagctagactctgctgcgggcgggtggcagttggtaaagagtaggagagcgcgacgttctgagcagactgtagctgtgaagaaggcggcagggcagcagcgagaccaacaagggttgcgtgttccggtgtggcagcggctgtccggaatggatggacctggccatcaggatctctag

SEQ ID NO: 34597 - DNA, 606 bp, Zea mays
  Peptide Sequence Number=SeqID_77972
atggagttcgtccgcggcggggagctctttgcgcgcgtcgccaagggccgccgcaaggaggacaccgcgcgcaggtacttccagcaactcatctccgtcgtcggcttctgccacgcccacgacgtcttccaccgcgacctcaagcccgagaatctcctcgtcgacgagcgcggtgacctcaaggtctccgacttcggcctctcggtggtcgccgaccagttccaccccgaaggcttcttatcatcggttcatgttaccgaagagctggccatagcagaagttggtttcggacacccagatcacctatcaagagcagagaaaatgcaaagcctaatagagtgctctttacagcacgttcttgggtgcaatgtggagatcagattcaaacttgtaccttgtccagtgagaaaatatgctaggttgaagagacactcgttcagttttctcagttgctctggccggaagcaagagctgtcagattcagttgtgactgatgaagacgaagctgtgaggcctggggcaagggagacaccgcttaaaggctacaagggccagcagattcagttttgtcagttgcgtcaaggctacaagggagacacagcttaa

SEQ ID NO: 34598 - DNA, 2613 bp, Zea mays
  Peptide Sequence Number=SeqID_77973
atggctgcctctagtggtgcaactgccccggagttgcgcagcatgaggaagaggcgacgtgctaagcgccggaggggaggtgtggagcaggtgcttcttccgctacctcctccttcggatcatgatgccccgttggtaatgcaggaggaagctggaagtgatgaatcttctgtggagcctacttgcgttctagaactctctattggaatggcccaagaggaagtggcactccgacgagctctgtacgtcatggtggttggcaccagaccaaaggttcttggcgctgaggttgtggaggaagtggcacgttgtttcggcatagatgctgattctttggcaattcatcaagccatgcccgaggactttctgctattcctccctaacgaagacaccgccacaagggttttcaatgaaggcaaagttttcagagggcctcgtttcaacttgcagttcaagcggtggtcgcggtttacgcatgcaacggcgggggctctcccatttctggtcgacgttcagatttgggggatctcggctcatgcatgggcaagatcaacggcggagcacctcctgcatgattcttgtttggtttcagatatccatcctgccacagccttgaagtcagacctctcgtccttcaagctgagggcttggtgttttgacccaaaaaaactccaccgaaacatgaagctctacatcgctgagcctgggatggtgacaagtgagaagcggtgcttgtcatacaatattagtatggcggcctttccggttgatgcttcgtcgggggctgaggactctcctccccccccccaccggctgatggcacgcatccagatggagacaatgaacgccatcgaccggattccccgtctcggcatcctcgtaaaggcgccggtcagcggcgatcaattcatcttcgtctgggtctacaacagacagagggatactgggccgctggacctggcagttcatgcttcacccctgcatgacaacttgagtgcggggctgtttgagctgaatgggccaggatcgccccagtctacacttgtatcgggttctggggacattactggaggtgacatgttgaagaagatgcacagtcaagttgacatcgttgctgattttgctgatggattaagtgggcagcatagtaatggttttgatgggctcgagatgcgctctggtactgggccgctggacctggatattcacgttccaccccagcacaatgccatgtgtgcggggttgctggagctgagtggagcagagaaaaccaggaagaatgacacaaataaggacaggtctaaaaggcttcgctgcccccttgagcaggaccaacggcaacaggttgagtgcaacgagatgagaaatgatagtcgggagggaaatgttgaaatgaccaggttagtgtgtcaagatggagcaaaacggaacttcaaccaaaagaagaatgctacagctcctgcttctagtgactcaacaaagtgtgatgggaaaaatatattaagtcccaagtgcagcaaaactattgcttcatcacacacaccaaatttgagcgaaggaagtaatgacatggatccaaaatctgacaactacgttgatggttgcactgaaagaggtatactgcagcatattccagtcacccatacagagaggaatatacaactgaaaatatcagataattttactcagtctgaggcgtttcgccgagattgtttaatcctgtggagagaaagacaattaagaaaggatagtgctgctaaggctgataacatcgtgaaacctgaccaacaacagactgcacaaagaagcaagatgtcaactggaagaagagtggggagtggaggatctgctgcgtcttcttgctcaaaaagcgataataaatacgactctgctccagagtgttctgaccaatttagtggtgcaacatcatctgataaactacaaaagtttggtggaagagctaacaaaaagttagagcagaccatcaaattccccagtaacagtaaatgcaacaaaaggcctcaagacgcaacagctgagaaagtattgaagtgtagtctcaagcttctgtcagaagcagatcctcttgaaattgcacaacctaaaggaaaggaaaaacttgttgacaggaggcaggtatcaaccgaacatcaagatgccaaggcgcatagtagtttgaatggttgttctgacacttgtaaggtggatcaagcagctatttcgcactgtcataatagtgcacatcagaatatttctcaacaggagaaaaatagtgttgtttcggatgcaagaagggaagagaaaccaggtgtaaaatgtgaaaagaaagcagcaggccatggtgccaaactggctgaacaatctactggtctgtatagtgacccaatatcactggacaaagagactgttgttagttgttcaaagcatggcacttcgaaggtaaatgcactaaaggttccagatcatgagattgggagtacttcactcgatgggtcaatgctgcctcgaggaactgtagacatgttcctaaggaagtccatcaaccggtctagtgaaagtgggtcaggtgtgttcacccatctgctgctcatcatgattccaattggagggtga

SEQ ID NO: 34599 - DNA, 654 bp, Zea mays
  Peptide Sequence Number=SeqID_77974
atggagacgggggacttcttctactcggcgctcccttcgggttctcttctcatcgactctgctctgttcgttcgacaaccaggcgggaaccagaaggcgcgggtcctgttgggcggccgccaggacttcttctacttggcgctccctttggtttcccttcccaccgccgcgccactcgctcccgcgggatccagatccggtggacgtagctctggggcctcgacgcagacagcctgggatcgagatgctccaccaatgggggatcgagaggacgaccgctccccaccggcgcagcccaagcccaagcactggagatccgtccgctcctctcctgactgcgggatgggcattatgagcttcgtacctgaggaagcagggtgggcattgagttcttgttttgttcaaggtactgaactgacaccagatgtctcccaccgcaaagaattgttcaaaaaattcgtacgattatgttttggtacacaaattatccgttacaatattagtgcacaacaattacatgaaaacaaacaatatctcacaaattcaagtggagatattctaaacccatatgtcgcaactatccattatgaccacctgatggatacggaccaagcagtttgcgtcgctaacttgtttctgttatccttaacctaa

SEQ ID NO: 34600 - DNA, 201 bp, Zea mays
  Peptide Sequence Number=SeqID_77975
atgaaccaaccgcacctggagaagaaccacctcaacgagaatcccgccgacggaggaatcgacgcaggaacgttcgacgacatcacgcggccggggaacgggatccggagcagcctgtctcgcgagacgaggtctcggaggagcaagccgagcaagatgcaaggcaacgccgggagaatccgctcttcgggcgcaacctga

SEQ ID NO: 34601 - DNA, 1806 bp, Zea mays
  Peptide Sequence Number=SeqID_77976
atgcaccgcgccttcgaggagatctccgacgaggagtggtctaatcacaccttcgagccctcgcgcgtcctcaagcgccctaatcagcggccctcgcagcctccgccgtcgatcgattcattcatctacaaccccaaggcttgctccgccgccggcaccagcactgcaactgtcgtcctctcggacgacgacagcgacttcgacctaggtgcggacgggggttcccgccgcgctgcgaagagccaacgcgtcctcaagcgcccgcataacggggccccatcgcggccttctctgccagttaaatcgtcccgccgcaatccccaaccatccaatgccgctgccgcctttgggttctccgatagtgaggacgatgacttcgatcttcctacgtcgcctttgaggacgtcaagccttcgccgcaaaggaaagaaccaacgccccctcaaggcccctcagctcaaacctcacttgcgggctcctccgccacccaactcttccagccataatccgaaacggtccaaatttgcctccgatgtgaagctttccaacagtgaggacgacgatttcgacctcacaaaaacgttaagcctcaacagcagcacaaataggcaacacatccagaagcgtccacagcacaagccccgtttgcagcatcgtcagtcctttggctcatcttgcggcaatcagaagcattccaaggctgttgccaccacacggctatctgacagtgatgatgatgacttcaacatcacggacaatgactttgaccttccagcttcgcattcaaggatatcacgcccacgccgcactactagttgccgccggttgacgagttttgctattgacatctctgaggaagacgaagaagaccttgctgatgatgacttcgactaccaagacccaaggcctccccagcaacgctcctctggccgccgctttgtggtcggggacgatgatgacagtgatgtgcctgtagctctggaggaggaggatggggtgaattggtcggagctggagaaggaggacgtagatgaggactacaatggggtgagaagtgtacatgtggaggagcccgagggagatgtagtgggaatggcattgcacaaatgttcacgcatctcgtcagatctgcgcaaagagctttttggttcatcagcgcagaattgtgaaagctactgtgagatagatgcttccacttgtggtattgttactcaggaagacgtaaatgctgcatgcacacgtgagaagtctgggtttgagcctgtgttgaagccttatcagcttgtgggagtcaatttccttctcctactgcatcggaaaagcattggtggagcaattttggctgatgaaatgggtctagggaagacagtgcaggctgtcacttatcttaatctattacagcatctatataatgacccaggtccacatctgatagtttgcccagcttccgtgttggagaattgggaaagagaactcaggaaatggtgcccttcgttttcgatcatcatgtttcatggagctgcaaggactacctactcaaaggaattaagctccttaggaaaggctggctgtccagctccatttaatgtcctccttgttggctactcactttttgaaaggcggagtgctcagcaaaaggatgatcgtagggccctcaaaagatggcgatggagctgtgttttgatggatgaagcacatgttttgaaagataagggtagcttccgatggagaaacctgatggctgttgcgcaacatgctcgccaaaggctaatgctgacaggaactcctctccaaaatgatttgcat

SEQ ID NO: 34602 - DNA, 237 bp, Zea mays
  Peptide Sequence Number=SeqID_77977
gagcaccgcgtggcaaggggagatgatgcaccccatgaggcatcattgggtccggacctccacggaggaataccggacccctacggcatcagggtcatcttgcagacggcgcacctgtccaatctgttgtcgaacaggcgcaagaagattgctccagcaggagatatcagtggctacatccgttatgttcctgggcccacatgtcggagctcagcactcttgtacatgcccctttag

SEQ ID NO: 34603 - DNA, 963 bp, Zea mays
  Peptide Sequence Number=SeqID_77978
atgcctgatatatttgctactggggatgttgatctgaagaagctgctgaatgcagaagatcgcgaactaatttcacagataaagtccattttagggccatttattcttagacgtttgaagtcagatgtaatgcagcagcttgttcctaaaatccaacatgttaagtttgttgtcatgggcacagagcagtctgaagcttacaaaaatgccataaatgagtaccgtgctgcttgccaggctcgtagtgccaagtcttcagatggcatttccaataatgttgctggattgattccaaagcgacaaatatcaaactattttacacagtttcgtaagattgcgaatcaccctttgcttataaggtgtatttatggtgacaaagatgttgatcgaattgcacggttgctgtaccctaaaggtgcatttggcttcgaatgctccttggagagagcaatacaagagctaaagaactacagtgatttcaatatccaccaactattattgtcatatggtgatgtgggcacaaagggcgctctaaaggatgagcatgtttttgcatcggcaaaatgtcagttcctactctgtgttcaggccttaggggagcttttaccttctctggcaaatgatggtcacagagtactcatatttagtcagtggaccacaatgcttgacatccttgaatgggcattggaaattataggagttacatatagacgccttgatggagggaccgctgtgacagaaaggcagactatagtggacacgttcaacaacgatctttctatatttgcatgtttactttctacaagagctggaggccagggtctgaaccttgtaggagctgacacagtcattatacatgatatggattttaacccccagatggatcggcaagctgaggaccgttgccatcgcattggacaacagaaacctgtcactatctataggtgctactctagtaactaa

SEQ ID NO: 34604 - DNA, 306 bp, Zea mays
  Peptide Sequence Number=SeqID_77979
atgaccatagctcctgcataccatattaaaaccaagaactccatgaaaagaagttttaggtacatgtccaacaaggcacaaacaaacatatcaaacagccccgcaatgatacaaggattcaggactacaggaaaaagagaacgtgttattcctatcgcaatcatcaccgactccccgagcggccgcctggtgttcccccaattgcacccaagttccacagccctagcgcaggcgcaagtggcagctggcgggcagcacccaacagcgcagaaagcaggcacagagacaagcaagtccgtcagttga

SEQ ID NO: 34605 - DNA, 120 bp, Zea mays
  Peptide Sequence Number=SeqID_77980
atgttcgtcaagaagctcgtggagagggcctccaagaaggcagaaaccatccctacgttacgtgtggtgaaagtgaaaagcgaggctggagggagctggtctgtgacaggaaaggaatag

SEQ ID NO: 34606 - DNA, 348 bp, Zea mays
  Peptide Sequence Number=SeqID_77981
atgaagctgcgagctgaggctgaggcagcacgtggagtgggtgtggacgttagcaaaactgatagtttggagaggaaacactgtgaggctattatggaggctgaggcttgcaaaagtagtgtgctgatggaagtcgcctgcaatggtggggaagccaacggattggttaacttggacgcgtgcgatgtctcggaagagtcaactaggtgttctgataataatatgggaatgcctggtgttcctgcaatagatttttctcaacacggtggcttagctcaagctagggatcggaatactcaaccgtaccggctatcccgggctggtgataggaagagtctaagggggtag

SEQ ID NO: 34607 - DNA, 180 bp, Zea mays
  Peptide Sequence Number=SeqID_77982
atgacccagctcttcgagttctacgaagctgaagaccctgagcatctgtttggtgaaggcaaagatgttcggattccagatggtgttgagaaggttggttttggtattaactctggtaatggagaagatgaagctgtggaaggagaccaccaggagttccaagattatgatgagttttag

SEQ ID NO: 34608 - DNA, 1707 bp, Zea mays
  Peptide Sequence Number=SeqID_77983
atcacttctgggcagcaacatatcggcagcatcagctcccttcgccccgagaacgtcagcccgcggctagccttccactacggcgtccctgcggacgccgccctccttgcctacgaccccgttctccacgtgctcgccgtcgccaccaggaatggacagatcaagctgttcggccgcgacaacacgcaggcgttgctccagtccccctcccctctcccttccaggttcttgcagtttgccgagggccaaggggttctgctcaatgtcaatacccagaaccagatcgaggtttgggacattgatgcgaaaaaactctgttatctgcacccggctgaaaaggcgatcactgcattctctgtgctgcagaagagcttctacatatatgttggagatagttctggaagtgtgtccccattgaagcttgatttggctcagagatgtctagctgacctgccgtactggattccttttactgaatcttatggttccactaccagtgccggtaatgatgtggaagtagtatttgtttcaccccagcctttgtctgaatcgaacagggtgctcattatcttcagagatggggttatgagtttgtgggatattaaagctagcaaagcagtatccatatctggtaaaactacgcagcagcaatcacagaaggaggctaaaaatgtaacatcagcatgctgggtttgtgccaagggaagcaaaattgctatcggatacgataatggcgatttatacatttgggccattcctgaggttacaagtacacaaaattcctcatctatgggtggccagaatctacctattcagaggcttaacctaggatacaagctagacaagttgccaatagtctctttgcaatggatccctagcgatggaaaggcaggccgtttgtatatcaatggtttcaatgatcatggacacctatttcaggttctgattctgaatgaagagagtgagtcgcgaattgtaaagatggttttgcctatcgctgaatcttgccaaggaatggaacttgttacagggcttagtgacccaaataagcacagacaaagtgcccttgcactcttgttgaaatctggtcacatctgtttatatgatgattcagaaattgagcgctatctccttcactctcagtctagatcccctccaacacttccaaactgttcatatgtgaagcttccttatggtgattcaggcatcagtgttgcaaagttctatacaagtaaccctgcagcgttagcttctttggacgaggcatgtatatatttggattatttttcatcagctaccaaatatccatgtctgttttcaatgaagggtaaaggtcagactttaacaagttttaccaacattcataagacccggaacctctatataactggacatctagatggaaccataagcttttgggatgcatcttgtcctcatttgctgcagatttttatgataaagcagcagaataaagacgatacatcaactggtaaccctatcacatcattacagtttgatatgtcctctagcattctattgtctggagaaaggagtggaatggtccatattatcacattcaaaaaggactccagcgacaacatattctcctttttaaatggtactgttctcacactgttcctgaacccaacatttggtgcttctaccttgttcgatgtgtacttgctcagtaaaaattgtggaacgtga

SEQ ID NO: 34609 - DNA, 210 bp, Zea mays
  Peptide Sequence Number=SeqID_77984
atggtgggttctccggatggccccgaaatcaggcaatttcctgcgcgagttcccgtggtcccgacgaagacccacaagcatcaccgagacctagtcgacacccacgcagagactgccaccggcggcgcgagcagacgctccaagtttgacggtgaatcttggttggctgaagatggagcgagggcaacgcttcgactggtgcttaaatag

SEQ ID NO: 34610 - DNA, 486 bp, Zea mays
  Peptide Sequence Number=SeqID_77985
atgagcagcagctggcgttgtccacacgactccagacgtcggcggctgtgggcatacaggctactgctcgtggcttccttgcacgacggagagtgcgtgagatgccggcagatgctcgaggcagccttggtgacggttgacctcggcacatgggggcgcgacctcgccctgtcagccgaccatcagcagcggcaccgggccgctatctccaactgcgagcatggtatgtgtcccgcgggcgacgaacttcaactctacggcagcggcggtagggaaggcactcccctcatcatcggcaagggcgcactgtttagcgccaccacattccgctaccggccgccacgagggtgcctccgctggttatgttgcgacctatttcaggtgctcgcccatgtgctcccctttcgtccagatggagtccatgggatccaggtggctgcacacgtgcaagtccaatgtgtggagggtgcctgccttatggggtaa

SEQ ID NO: 34611 - DNA, 666 bp, Zea mays
  Peptide Sequence Number=SeqID_77986
atgaggatcaagctcaagacaatgaagaagaagatcaaaaagatgagccacctcaagaggaggaaaatgatcaagggggagatgacaatgatcaagaagtacagggtcaaagaccgccacacccaagagtccaccaaacgattcaaagagatcaccctagtggaggatgcactaagagactcggattgggtgttggcaatgcaagaggagctcaacaacttcacgagaaatgaggatgtcaagcccatcaagacacccatgggaacaaatgggcatctcgacctcgacacgggaggggacccatctgtgctcgcagagaacccaaaagaggcccccgctagtgtcgtggagccaggggctgccgtgacgtctaacaaggcggctgcgacggggtttttggccaacgcgcgccatactggctatcgcctgcctccgccggacctacaacgagactggatcgccgcgacttcccaaagcaagccagaacatcgtggtcgtcgcaatgcttttggacaaactcctcgaggcagatactccaagcggataaaggacccaccaagaaattcgagggcttccttaaactcgcagttccacagaaggccaaaccttctacgttacaacatcgggaacccggggttgaccgatgcaccacatccacgccactga

SEQ ID NO: 34612 - DNA, 1413 bp, Zea mays
  Peptide Sequence Number=SeqID_77987
atgtcttctatctcaaaatcaaagcattttgctgttgggacagaaaaaggaattgtatcagttatcaacgtagaagatgctacaatattatatcaagaacagtttgagtgtcgactgcctggtggaatcgcctctttgcaatttgaaatctatagccataatggatatgacaaggacattttgataatagcgatggaagattcatctatttttgttatcgaggaagaaacggggaaacttttgaaccccaacccagttcagacagacaaaccctctaaagccatccttctgcagatgttggagttatcgcccattgacacaccagcagtttcagataaccaagatacagtatcgaaggaatcattgctgctactttgcactgaaaatgcgatccgtttgttttccttgggccacgcaattcagggcacaaagaagataatcaataagaagaaattgagcagctgttgttgtttcgcctctcttattcatagttcttctaatgacattggacttatactcgtcttctccaatgggaaacttgaaataagatccctgccagacttgtccttgttgaaggatgcctttttacgaggttttgtgtactcaagaaacttgaattcaagtagttccataacatgttcatctgatggagaagccatcttgattaatggagaagagacctattttttctctacgctctgccaggatgagatatacaggcacgtagacagcattagtacagtgtacagaaaagagaactcaaccagggaagactcttcttttgtagtgaaatctcctaaagaaaagaaaaagtatggaactcaacagggtctgtttggaatgattatgaaagataacaaaggaagcaaatcaaaagaaagtgatgcaattggcagcgaacaatgtattgcaacgacttctgaagagctggcttcaatattttcatcaactaactttgctccgccatctgagggaaggaacagttcactacgagatgatgaaaatgccgagctggacatagatgatatcgacattgatgacaacccacagaagccaaaaggtccacatttccctggtctaagcaaagataaaatcagcaagggactccaaacccttaaaggaaagttgaagcccaagactgaagaaaagataagctcgggaaacaaaaaaactgaagatgaaacatcagtgagtcaagtcgatcagataaagatgaagtatggatatgcaaatacaacaaatgatgactcaaccagtgtcacaaaaatgattgggaacaagctgcaggaaaacatgaaaaagttggagggcattaaccttcgagctgccgatatggcgagcggcgcccagtcattctccacaatggcaaaagagctactccggacaacaaagaacgagaaggggacctcataa

SEQ ID NO: 34613 - DNA, 735 bp, Zea mays
  Peptide Sequence Number=SeqID_77988
atgccgtttagattatttgctgaaacgtgttgttcagaaaacgtttgtgttcgtcttaacagttctgaaacatccacgtccacatcggatcttcccttccccaatgccatcttctgtgatataaaagttgaatatgacgtagaacaaaagattttcagttctgatgagagagctgtatatgaagaagccctgaagcatatcactcaagaaacgaaggaggaagatctgcccaaaggtggtatgtcagttttactacttaagcatcagaaaatagcattggcgtggatgctttcgaaagagaattgttcacattgtcgaggtggaattttggcagatgatcagggtgttgggaagacaatttcaacgattgcccttatacagaaggagatggttaagcagtctaggttcatgactgctggttcatacagtacaaagtttgtcccaaacagtgattatgacaatggcagtgatgttgtgattagcatggacaagaaagaaccgaaagatgaacccttgaatgagctagatggttctgcacgattgcatgtcgccagcagtcttaagctctgtgatagtaagccaaacactgctactgataaagctgaacctaagaagaaggccagagtgaggtactctgcatcaaacttgaggtcgaagactagaccagctgcaggaacagtggtcgtctgccctgctagtgtgcttaggcagtgggctaatgagctctctgtgaag

SEQ ID NO: 34614 - DNA, 648 bp, Zea mays
  Peptide Sequence Number=SeqID_77989
atggcgcaccggacagtccggtgcacaccggacagtccggtgcccctgccacgtcatcactgccgttggattctgaccgttggagcttctgacttctgggccctcctgggtgtccggtgcacaccggacatgtactgtttgatgtccggtgtgccagcatgggcgattctgacttctgcgcgcgcagagggcgcattaaatgcgcggcagagagccgttggcgcggagatgaccgttgcttcggaggcgcaccggacagtccggtgcacaccggacagtccggtgaattttagcgggctagccgttggcgtttcccgaagctggcgagttcctgaggccgacctcccttggcgcaccggacactgtccggtgtacaccggacagtccgactgtaaccttgctgacggagagtacgtcctcgtgccggagcaaggacctactcaggaggtagccccagatccagcaccagagcctgcaccagaggacctgcctgccactgctttggaaggcaagccccggaatccttttgagatggatactagttccttggaggaaatggttgctggagtgacttggccgtccatcttgccaccgggttggactgtcgagtgggaccccgcctcggctgaggaggagcatgaggagtga

SEQ ID NO: 34615 - DNA, 174 bp, Zea mays
  Peptide Sequence Number=SeqID_77990
atggccggaatcgctcagtccacgcgcgcaggcgggtgttctcgtcggcggcgagtgtaccggccaaaccacggcgatctggttcaatccaagggcacggttatgaagcacactacaacttttatatttggtccaagccatgatcataaggtttacatgatcttttgctcctag

SEQ ID NO: 34616 - DNA, 369 bp, Zea mays
  Peptide Sequence Number=SeqID_77991
atgaaccatgtacaacagtcttcaacccaagaatcaccaagcattgtgatcttaggggcgaaggagtggaaaaatggagttgcttgcgatttggtagaggagatttttatcaggtgcgacggaggggaaggggggcctggtgccggccatgatggcggcggtgggtgcgctgcaaagggggcgtgggtggcggtagtgcgctgcaaagggggcggcacgcgtgcggggggcacggagaaaacctttttaagaaaaacgaaaagaaaacacacaagctcagcaatgataagcacaaacaaatcaaatgttttgaataagggaagaatagagtttttccaaagtacggactactcagattcggggggctaa

SEQ ID NO: 34617 - DNA, 249 bp, Zea mays
  Peptide Sequence Number=SeqID_77992
atggggctcggtgtatgcggctcgctctgccaaggtggcgatgagactgatggtcttggttatgcctatggtgttgctagtccactacagccaaacaggatacttgctgagtatgttgatgtgtactcacccttgctctacacaccaaaccccccatccccaggttgtcagcattgcaaccactgctcaggtgaagatgaagctgtggaaggagacttccaagagttccaagactacgacgagttctag

SEQ ID NO: 34618 - DNA, 180 bp, Zea mays
  Peptide Sequence Number=SeqID_77993
atgaactcgactgaaggtgcttttattgtttcaaagaatacttccgaaggtttggtgtcattggtgactatgctcatctgcgaaccatccgcactaggtggcctgattgtccgcaagggttctagatcgtccggtctcaagggtcgtactgttcgtcgtatgatggactatccgcactag

SEQ ID NO: 34619 - DNA, 99 bp, Zea mays
  Peptide Sequence Number=SeqID_77994
atggcgcctgggcgtaaaactacagcaaaatcaaccaaaccaacagaattgggtcaaattcagctagcatttcaatcaatcctaaaatattcccattag

SEQ ID NO: 34620 - DNA, 276 bp, Zea mays
  Peptide Sequence Number=SeqID_77995
atggcggtgtcagtctcagaagcagcagcaagcggtggcagattcgcggaatccacggccgtgccgccgatgcgctttgcaagcggctgctctagactgggaggacgggatcctcctcctcttcctgctcggttgccgcggccgcggggacagacagcggaggctgcgctggaggtgcacggaatctttgtggatggattcgctggtctaaagcgagatccctccttgctcatcttctcactcatcttcctgggggagaaaagaaaacgaaagtga

SEQ ID NO: 34621 - DNA, 1176 bp, Zea mays
  Peptide Sequence Number=SeqID_77996
atgtcttcttcctcccttaagcgtcgggtcttcccgtcttccaagcccccggatggggggtatccgccgcctttcctcctcctcgttggaggaacgcaactccatgggagctggtacctctcagccatcgttcggcttcaaggattttcatcagccggcccgaccgtgcccccatgccgacgatcacccaggatggtgactgtcggtttctgggtggggaagagcaagccaggctgcgatcttggtcccaccctcagcttcaaggatgttcatcatccccgctggggcgggagccacgctgagccggcgctctaccttccgcgtgggtccgcgggtcaccctttcccgtggtgcttgggggtagaggcgttcgctggccctgcggacggcgcggacttcgataacgtggggctgaacgacggcgagcgtcgtcacctccagcgtgtcggagtcgtcggccgggcttccggcggcccctcctgccggagggcggccgccgcatcgacgggcggcggtgagccggccatcggccttctgtggttccgcaggccttccccatggagtggggtcgttcgtacccgcggaggggggaaccggagttccgttggtagtggcatctccactaggtctcgcccgtttgattatctgatccgctttaccaagcatgagttgccccgtgtcaaggtgacgggtgaggccgggggtagcgatatcagtatgaacagaggcggagttggctcgagaatgggaacctggggtaaccggttgagccgcctgctcgggccggattcccggaggagcccctggaccgcggcgccgcccgaggctgggtcgggctttgctgaagacgtcgtcgatgccgagggtgctacagctcccttcggcgtgaagacccgagcctgcaggatccgatcatcttgtagcgtgtgcttcctgcggccgccgaggccagaagaaaacaccctcgctgcacttgcgaagctgcgccttttttcctcctgtttcgagcatctggacttcgtcggtaacagggatgtttgtgtgagcaagagctgcttttcgcggaagggacgagtgaggtatccgtatcccagaggcgtgggaatccctcggctcggtcggccttgccgcttacgcgtactttcacccgtccatgaggccctgtccccgacttag

SEQ ID NO: 34622 - DNA, 348 bp, Zea mays
  Peptide Sequence Number=SeqID_77997
atggtgtgccaagggaaggggagaggggctacgcgggtgagaaggaagaagagcacggctatcagagggagaattggaggggaagatttctcacctagacacggaggctcgccggacgccggcgaggatggaacgggacagggggaggagattggccatagcagcaaggtgtgggcagcgaggggcttcatcggctgctatgcgattgcgcgcagggagttgtgcttgggcttaaaaactgagcgacgtgggggcgggttcctcggcgcggacgcgtacagagctgagggagttgcgcggctgaccgagtcgctgggcgcctgtgcgtctgcggctctgcgcggctga

SEQ ID NO: 34623 - DNA, 144 bp, Zea mays
  Peptide Sequence Number=SeqID_77998
atggggagtcatgatccccgggcaaaatgggaatcacggctcatggatgacaaggatgatggttatgactatggtaatggtaaagaagaaggcgtcgaggtgaatctccaggagttccaggacttcggcgagttcgaggattag

SEQ ID NO: 34624 - DNA, 381 bp, Zea mays
  Peptide Sequence Number=SeqID_77999
atgaccctcacaaaaaacaagatagaacaacaagcgtcataccaagttgagcgatgcttctgctacaagtgtggtgagcaaggtcatctacgacaggtaattttaaggaaggaggtgcatgagcaaaaggagccctcaattggtgataataggtgctctcactcaacactacctaaaaaagtggatctcatggtatttaggcgtaacacccctctcgctcgagaggcccgtgccagaggattcaagattggagacctcgaaggcctgaagattgagccacattgcgaagtgcacggggagaaaggcaaagacttaggtgctaccttcgcctggaaaggacagggcgaagacccatcaatgactctagagactgaacattaa

SEQ ID NO: 34625 - DNA, 264 bp, Zea mays
  Peptide Sequence Number=SeqID_78000
atggcccctaaaagagcaaattcaaaggccgccgcttccatcgatgatgcagcgaaggtggcccttctagctgaaaagaaaggcaaggcccccattgcagacaacatccctcaggaggccttcgacgatgaagcagtcaaacagcaaaaggcaacgccaggacaacctgcctacgccggagggcaccacgcgcacctgcagttccgagggggtaccttaggcacccccgctagggcttcatcaacccagaaggcgaagacatag

SEQ ID NO: 34626 - DNA, 3438 bp, Zea mays
  Peptide Sequence Number=SeqID_78001
atggcgtccctcctgccgcccggggccctacctttgtcctggccgctggaggtggattttgatgacaaaagcagctggtggtatttgttcaaggactattggttaaatttgaagacaaacttgtcattgacagttgaggaaatatcagcagccaagtctcaaaagagtggagaattacctgatactaatgacgaaattaattcagagagttcatcagggcgtcatctagaaaacaatacatcgaaaaagaggggcaggaaccgatctaaacaagctgccatcgagcagggctctgaaggaaaagagaccactgggaaatctgccaaactaggtctgtcaggcattcgtgatgctcagacttcttcagggaaaaaggttagaaaattatccaggcgttctttgagcagccagcattcaccaaaagattctgaaagtgttgggacatcaacatcctcagctgacgaggtcagctgggcttctaaggagctcataaactttgtagctcatgcgagaaatggtgataaatctgtgatcaatcagtatgacgtccaaccccttttacttgactatatcaaacgcaacaatctgcgcgatcctcgtcggaaaagccagataatttgtgattctttgctccaaagtctcttcgggaaagaccgtgttgggcattttgagatgcttaagcttcttgaatcacattttcccacgagtgaggtttcaccaattgatgctgatgaaaatcatggtggtgtagtagaccctgatcctagtcaggatgctgatggtaacagtgaagcttcagttgttatgagttcagaaaaaagaagaaaatcacgtaagtatgacctgaaacatcagcctaatatcgatgactatgcggcaatagataaccataacattggcttgatgtacttacgtcgcaacctaatggaagaattgattgatgacgttgacacttttgatgagaaagttgttggatcgtttgtgagaataagaattcctggtacagggcaaagacaggacatttatagacttgtacaaattgttggcactggaagatctgcagaaaaatataaatctgggaaaaggactactgatataacgctagtgatactaaacttagacaagcgggaggcagtaactattgacataatctcaaaccaggagttcactgaagaggagtgcaaacgcttgcgtcagagcataaagtatggattcattccaaggctgacagtgggagaggttcaggagaaggcaaaggttctccaaactctgaaagtcaatgattggattgaaagcgaaaagatgcgacttgggcatcttcgtgaccgtgcaagtgatatgggactattcacgcttagggaatgtgtagagaagctgaaattgctaagcactcctgaggagcgtgctcgtaggctcaatgaagaacctgaaatacatgctgaccctgcaatggatccatattatgaatctccggaagaacaggagcaggagattgaaagaagtagcttcaataagtccagaagttctttcttgaggaaagatggtagtcttgtgtctccagtgctccacaagggtcaccctggtgcctcatctggaagtctagctactaacataggttcaggggcaaaaactgcatctcaatcagccattaacgagtctgagaagatctggctgtacatggatccttctaataaaatccaaggtcctttctcaatcatacagctgcggaaatggaacagcaatgggtacttccctcctagtttgaaaatatggaaagctagtgagaagcaggatgattccattctattgactgatgctttggcagggaagtttgagaaagaccttcctccatgggaaccaccacatgttagtttgtctcaaattaacaaaacccctcttgagcaaagcacaatagctgatgaacaaactccaaaatcagtaattgcaaagtctttctcaagcagtgatcaaagacatgattatagttcaacgaaccttggaacaaccatgatccattctggctcacaaggttattatggaatgcaaaattcccatgcagcatacacaagccagcaatctcttactgggagttggaatgccacgtcaagtcagtttggggttgcaataagtcctttgacacctacccagcctgccatgcaaagcctttcaggacaaaatattgtggctgcagaaaatatgggtcatttaactactggaatggctcctgcaactgcaaatgcagaaatggttaattcagatttgacttcccagaaccaaatgttgtcttctttaccgcaaacggatgacagattagctgatggaattgaatccaaatcaggagaagatgtttcacatggaagagtgaggtcttcggctgaagctatcggaccacaggatgcacagcttggaccagtgcaactaaacgctcagcaacttgaaaacacaagaaaccatatgtcatcaattgatctctccaagtcaatgatgccatcacagatgatgtcagcaccatctgctgcatcagtacagccttcattgacaaccactgctcgcagtgataatcaaagcagtgggtgggctgtacctgcacaaatggcgaacacacctggccagtctcagataactggaaatctaacctggggaaatacacctcagggtgacgcaagcttaggttggggaatggtgggacagagcaatatgaatatgccttgggtagcatcagctcaaggtgcttcaggctacaacatgggtgtagccatgccgacgcagccaaatgcagttccaaacatgggctggttaccaaatccaggaaacaccagcatgaacatgatctgggctgcaactcaaggccaggggactccaaatgcggctcctatgatgggaggtcagatgcaaggagtcccaatggccccttggggtggtgttgcagcaggaagtgcaaattcttatcctgcctggggaaaccaacaagctggaaacatgaaccaaaatgttggctggagtgctcctgtgcagggaaatccaggtcaggcaaataacaacatgaactggaacgcaccaaatggtaatcctaattggaataatcaacagagagagaatgggggcaggcactctggacaccgcggtgcttttagtggtggtgactcaggcggaaggtcatggaagtcacgctctggtggcgatggggggtcaaggggacatagcagattctcccattcaacaaacacagagggatatccatccaggactgatcggcattacgataggcagaattcaggcaacgagaggcgatatgagaatcacaatgagagaaatggtcgacagtttgataggcagccttcggataatgaaaggaaccatgataggcctgatggcagacatggtggcagggatgacgataggcaggctgataggtccgagtcaagagagctgcgttag

SEQ ID NO: 34627 - DNA, 258 bp, Zea mays
  Peptide Sequence Number=SeqID_78002
atgcgcgaggcggtcgtcgagatgaagccggggagcaccgccggagttgaaggagggcagtggagcatcgggggtgccacggcagcagctacaagggcaacccgcgccggcgaagcagggagcggcgtcgaccatgagagaatggacagtgggggtcattggcggctggggcaggatttggacagctgtagcgcgtcaccagtgaccatagctgtcaacgccgtgcaagggaagagggcaggtgcagccacgccgtga

SEQ ID NO: 34628 - DNA, 117 bp, Zea mays
  Peptide Sequence Number=SeqID_78003
atgaaggggggttgggcggcggggtgggtccagctgggcaggggcctgcgccggacctggcaaggggtgttgacggcgccggcacgggagaagcatgaagaggaggcctgctggggc

SEQ ID NO: 34629 - DNA, 417 bp, Zea mays
  Peptide Sequence Number=SeqID_78004
atggagggaaccaaaccacacagcaggtggacagatgtgcggtctgcagggcagcactgcagaggaaacggatcagcaaagcaggcggtgcatcttgggctctatagccaagtaagaaaagagcctggagtggattacctggacgacgctacggcggggatacgaccagagcgtggtgacggaagacgacgggaggcggagcgccacggacggacctcactgggggcgccagggacggagtacgctatgggaagcacgggcggatcgcgcccaggcaatcaggcgccatcagggacgaagcagcagccctcagccgccaccagggacgaagcagcagccctcagccgccaggacggagaaactttagggaaaaaagcaaatggagaagaaggcacacacaaccaacagttcggataa

SEQ ID NO: 34630 - DNA, 945 bp, Zea mays
  Peptide Sequence Number=SeqID_78005
atggcggccctaggagcttctccgaatcgatgcttcctcatccttgcaacaagggaggacatgacgctcctcatcctctcgatgagggaagacacgacagggccaaacccaagagcttcttctccctcaaggtcaaggttgtacgttagttggaccggacctccacgaggaagcgccggatccctgtacgcacgaaccagacccccgagtacggtacggaactcccaagtagcgtgccgggtcccttggacggggtccggatccctccgataccctggcataagcaagggtctggtactgacacgtgtcaggccttatcctgtgcgcttgcgctccccgctcaggcggagacctgctgctgccacgtggcttgttgcccgtaacataagccagtgggcggagcctgacgtaaggcctctaggccgtgcggtctctgcatttattatggagaggacgcgccgcctgtccaccctgctgacaggcgatgtgccccctcagcatttaatgcgttctgtccactccactggcaggtggcgccagggccatcctgtagacggcgcgcctgtccagtccattgtcaaacagtgcacccgtgctgtgcggcgcactgtgtccatcatcccttatacgagaagcttcccctgcacgtcgatactacgcagatctcggatgtcagggcgcaagaagattgctcgagcgacgaatattagtggctccaagtactacatccgttatgttcctgggcccacatgtcggggctcagtacccttgtgcatggctccagtggcggaggacggaataataattagcatgatggtgcaaatcgttgagcaccacaccgagacttcaacggatttcctggtggaggaagaagctgtttcttccgcgccacaggtttccaaccgcccagtgtcgggcattgctgctgtgcatgccgcacgttag

SEQ ID NO: 34631 - DNA, 285 bp, Zea mays
  Peptide Sequence Number=SeqID_78006
atggcactcggccccacagaccggggatgcctagtcgggtggctcgggtgccgtcccctgagacgcgtcgtggagtgtcgcgagatcattgacctcgcgaaacgcgtcagcgagcggcgcgagcagtcttccaaggacgactccccacctcgtcgccgacctggcaaagaaaaggtcgacgacggcgaggtggccgcggctaaacgggacctcgggtatcagtcacccgagggggacctgaaggatgtcttcgccggagattcctactccggtggcgacaactag

SEQ ID NO: 34632 - DNA, 621 bp, Zea mays
  Peptide Sequence Number=SeqID_78007
atggagcaccgtcccgggccggaaaggttgctggagactacccatctggagcttgacgggaagctgttcgtcaacacgcagcaggcccctacctggcgcgccaactgttggcgtttcgaccccggggggccctgggtcgggcgaggcggaggctcctccgaggtcgaggtcgagtctgtcttccgaggtcgaggtcgagtccgagccccgggtcgggcgaggcggagaccatcgtctgaggccaaggctgaggctgagccctggggtcgggcgaggcggagttcgtcgtcttctggagccgaggccgagtccgtgccctggggtcgggcgaggcggagttcgtcgtcttccggagccgaggctgagtccgagccctggggtcgggagaagcggagttcgtcgtctgaggccgagacgggggccgagtcatggggtcgggcgaggcggagcttccgatggcgcccgaggccggacttggctgttgtcagcctcactctgtcgagtggcacggcagttggagcgatgcaggcggcgctgtcttcttgtcaggccggtcagtggagcgacgaagtgactgcggtcacttcggctctgtcgactgaagggcgcgcgtcaggataa

SEQ ID NO: 34633 - DNA, 396 bp, Zea mays
  Peptide Sequence Number=SeqID_78008
atggagaagatggcggcgcggggggcagggaaggcggacacgcggcgcctctggcgggaggagcgcgcgacgcttcaccttcgccgtaataaccgcttcagaaaagggaccgggaaagggggataccccgaaagggatccttctccgcgaaggaaccgggctccgagccccccattactgatcaggggttcgaaggctggccccccgagggttcaacagtcgcctcagatcgcgtgggcccgacacccactactggtcaggggttcgaaggccagccccccgaagggcttcatggccgcctcaggctactcgggctccgcgcccattactgatcaggggttcgaaggctggcccccgaagggttcacagtcgcctcagacaccgagcgagggatga

SEQ ID NO: 34634 - DNA, 468 bp, Zea mays
  Peptide Sequence Number=SeqID_78009
atgagcaagaatgaaggcccctacacagggagcttcatcaagaaggcttgttcgatgatgatggatggtaatctgttaaacaaatacgaagtagtgaagaatatagctaaagacttgccctacacaaaatctactcgaatgaataatatgaaccaaccaatgaatttaaagcgcttgacaagaacacacaagaacacgcgatataacccgaggttcggcaaccaccacaaaggtgtcctactcctcgttgaggaacccacaaaggactgggtcttttccaaccctaatcctccacaagccgaccacaaaggtcaaggcaatctcttctcaaatcagctcaaagagcgggtcagagcagaggtggcaggtgaacagtaccaaaaccggttgaaccggtttcaggaccggttgaaccggttttgggggctgaaaccaaattttgagtattttgaagagaacaaaaagtag

SEQ ID NO: 34635 - DNA, 879 bp, Zea mays
  Peptide Sequence Number=SeqID_78010
atgcaggtggtgtgcaaccacaccacagagacgcaccccttcgacttcgacgcatccagcatggaggctcaggcccacacgtcatgtaaccggcgcgccggttactacgtgcgaaaaaatgcaccgccacttgtgccaatgtcgcgccttctcgactgcggaaccggtgccgcgactcgaggcaaccctgcgcatgacccaacagtgccaaccaagcacatcggtcataggtcagtcagccgcgggaggagatgcgacggtcgatatggccaaaagtgggccgacagtaatggcggcagcaggcgaacggaagcagcagtcaaatcatctgcaggctcatgtcccctcctggagcagcaggggagccctctcccacggtgtgaggacaacacgccagtgttccgtccctcgaatggctcgcacaacgaccgccccgcgagccacccgtcccttcgcattaacttcgcggcaggggaccgggaaagggggtatttcgaaagggatccttctctgcgaaggaagcgggccccgagccctcctactgatcaggggctggcccctcggaagggtttgacagccgcctcagagcactcgggctccacgcccactactgatcaggggttcgaaggctgggccctcgaagggttcgacagccgccctagagcacgcagagcgagggatgactctgggtacgtccgatacatggccgaggctcaggctacgctcctgaggcctcctcctcgctccttgggtcttgaggcatcagggctggtcataatcgcgtcggcgtcgcctctctatgtttcgacaagcgttgggaccagcttggagctggcatgctggcaggcgtacaccgtcttgaagaagtggtggctttga

SEQ ID NO: 34636 - DNA, 672 bp, Zea mays
  Peptide Sequence Number=SeqID_78011
atgcggggaaggcgaactgctgctgcctggccagggtgcagcattccgtcctctgtccgggcgactgtggccggccgcaccggagggtctcacaacacgtcgtacgccgcgagggcggtactcgtgttttgggatggtcccgttctcgttcttgcggcgaggacaggagtgaggacctgccagtgcgctttggggcggccggtgctcgctggtgcggtgttggtgggcaggtggctgccgtcgtccgtgctgaggtggtggcagccagagaaggtgacgagtgaggtatcccggaggcgtaggagtccctcggctcggttggccttgccacccaaggcttctcttgctcagttaaagaacccttggctgctctacaatgagccggagccagagccagcggtgtcagcgtggacagaggcggagtcggctcgagaagaagcttcgttggcccaagagcacgtggcctccctggccgaggaggtgcagcagcggcggctggaacctggccaggacccttacgaagaccttagctatgatggcccgagcatggtgctggcctcctccttcgaggtggagatccttccgcccgcgtcgccgtccgaggccgggccagacttcgccgaaggtggagacgatgccgagggtcctgctgctccctttgttgatgtctga

SEQ ID NO: 34637 - DNA, 201 bp, Zea mays
  Peptide Sequence Number=SeqID_78012
atggcatatgcaaagcagacagatagctcttcatgtggcctctttcttttgaactatatcaaatactggacaggggatgaactgtatgatagttttacccaggtaccttcggactcggatcagaaccacaatatgaagaagtacaaagaatgcaaaggttggcgcagagctgaagctatgcgcaggggaccttcggcatga

SEQ ID NO: 34638 - DNA, 333 bp, Zea mays
  Peptide Sequence Number=SeqID_78013
atgggatccgttggttgccgagttgcagagctgtcgtcttcccccactcactctcaaggtgtgcgtgagagttggcggcgggaggatcgtggctcggctgtcgtagctcaaggtgacgagcgactggctcgaccagcagctgcagggcgagacggacggctcgaccgagaccttgagcgactgaagcggaatatcagagaagaggagaaggggtggggagcaagcgacattaccgcagcagatctcggggaggaggaggcgacgacgcagcgctcggggaggaggaggcgacagcgcggcgctcggggaggagacgagcggtgcggcggctga

SEQ ID NO: 34639 - DNA, 76 bp, Zea mays
  Peptide Sequence Number=SeqID_78014
atgcacggattgggagttattgctcgccggagtttcgccggagttgtaaccgtcccgaacttctgcgagcttaccg

SEQ ID NO: 34640 - DNA, 318 bp, Zea mays
  Peptide Sequence Number=SeqID_78015
atggagcaagagatgggaggagaggagcaggacacgaagaccagcaatggcgactggccggtgtacagcttcgtcgacaccggaggtgaggccgcacgggaaagctccaccgagcgccgagccgccgacacaggagacggagaggccgagagaggagaacaaaagctagggttaatgggttatgtgccgacacgggagacgcgagacgcggacggcgtttattcgccttattaccgggctccgggccggcgctgtgccgcaggcgaaccagagagtgcgagatcatttctcggaaatcctgttgctgcaagatcatga

SEQ ID NO: 34641 - DNA, 690 bp, Zea mays
  Peptide Sequence Number=SeqID_78016
atggagattttcctctctgcactcctaggcgacctcgcctctagatccataaatctgctcatcagcacaaggtccaggccgacggggatggacgtgggagacagcctgcaaagcgcaatcctccgagcacaggtcatcgtcgatgaagctatggggcggcacatcacaaaccgagccatgctccagcagctggacatgctgagagacgccatgcaccaggcctgctacgtccacgacaccttcagctgccagcagtcccacgctgaggaggacgccgccggagatcatctgcaggttgtgaatcactctccgtctctgctgccaagtacttctcttaaaggagtgatctatggtgcttccgatagaaagacgccaccgccgcttcttctgaagcagctgcaagagtcgcttcggaacttgagctctatgatccttgacgcgagtgagctagccgtgttcttcagaagctaccctcctcgcctctactcgcaaccctacagcatgcacctcctgctaggcaactgcatgttcggcttccagttggaaactgagctcgtcatgaacttcctactgcacgcagaaccacctcctggttctgaagcactagacgtcctaccgatcgttggccctatatatgtcaaatgggcgggcctggcacggctgggcacggcacgacatcgtcgtgcctag

SEQ ID NO: 34642 - DNA, 324 bp, Zea mays
  Peptide Sequence Number=SeqID_78017
atggacatcacaagtaagatggacattgcaaaagtgagactcgggtgcgtagctcggagacaactgatcaagccaaggacgaaggcaagaaaagcttcgaggtaccaagtgcacgggagaaggtcaaggaggctgaggaacccaaagccaagggtgaagaagaaggcttgcaaagtcaaggccaaggcagctcagtctggcacaccggactgtccggtggtgcaccggacagtgtccggtggtgcaccggacagtgtccggtgcgccaggctgaactcgagcaaactggccgctctcgggaattggctgacggcgtacggctaa

SEQ ID NO: 34643 - DNA, 678 bp, Zea mays
  Peptide Sequence Number=SeqID_78018
atgaccaggtgttgggttcaacaaaagggcaaaggagcaaccaaaggctcctctggtctgagcctgcgcgctataattcaccggactgtccggtgtacaccggacagtgtccggtgctccatagaagacacggctcaggaactcgccagcctcaggttttcattccagccgctccgctataattcaccggactgtccggtgtgcaccggactgtccggtgcatctgcggagcaacggctacttcaggcgccaacggctacctgcagcgcatttattgcgcgccagcgcgcgcaggggtcaggcacgcccatgctggcgcaccggacaccctacagtgcatgtccggtgcgccaccggacatcaaggcggacccagaagtcagaactccaacggtcgatttccaacggcactggtgacgtggcaggggcaccggactgtccgacaactgatcaagccaaggacgaaggcaagaaaagcttcgaggtaccaagtgcacgggagaaggtcaaggaggctgaggaacccaaagccaaggccaaggcagctcagtctggcacaccggactgtccggtggtgcaccggacagtgtccggtggtgcaccggacagtgtccggtgcgccaggctgaactcgagcaaactggccgctctcaggaattggctgacggcgtacggctaa

SEQ ID NO: 34644 - DNA, 633 bp, Zea mays
  Peptide Sequence Number=SeqID_78019
atgacgactgcaacggtcgcgggcaccgtcgccatcgcagccgctcggggtgggagcggggggccctctgccatgggacatggtgcgcaggcgttgagcactaagctcataaggcgccccaagaggaagccctccggcaagcgtgtctccttcgccagccctttggctgtggtcctgggagtgaaccccattgtgcagctgttgcccagcgttgatctagcttctggtattctccctcttgctgtttctacctttcatccacgtaatgacccaatgcttgatgaagtgctatatggtgttgctgtttcagaagcgcaagcactacgtgcatccaagattatgcagttgatccattcagcggaggacagggagtacatgctagctgctcttccagggctgaacagtgaagctaccatggagcacaacatccaggtggaaactgtgcagatattgacagatcttgatgttgtggaacagcttgcgcagcattttgaacagcccctatccgagaggaaagcagaggcgatcatcactctagtgaaccatggcaagcaaagcaagggcaagatgaagaagaaactccatgctagaggatctgtggctccagcatcgcttgagatggaggtggcttag

SEQ ID NO: 34645 - DNA, 321 bp, Zea mays
  Peptide Sequence Number=SeqID_78020
atggcccttgacctgaagtactatcctcgtcgttcgaccgacagtgctagaggtgtgattgtctcgccagtgggtgagggcaatcccaggctgaacagcatggtcaatctggtcgtcatgctcaacacagagttggaccacacccttgatgagttgggcaagatgtctgagaacaggcgcagaggtgtgaggcgtgctcagcctgaacagcaggcaccccaagaggaggcagccccgcaacagcatctgccaccgccaccaccaatgaccattgagcaaatgttcttgatgcagacccaaacagttcaggcaatcggatag

SEQ ID NO: 34646 - DNA, 1389 bp, Zea mays
  Peptide Sequence Number=SeqID_78021
atggctgtggaggaaagcctgcaaagggctcttcttcaggcacgggccatcatcgaggaggcagtgggacgtcgcatcacaaaccaagccatgatccagcagctgggcatgctgagggacaccatgcaccgaggctattacgcacttgatgcgttcaggtaccagcctcgctatggagaggacggaaacgttccagctgttaggcgctttatttccctatcaaaggtacactctgtgaaggatccctatttctcctgccgaactgcacagttccgtgaacaactacaggatgcgctagacaggctgagctccatgattgttgatctgaatgagttggtggtgttcttggcgagctaccctcgtctgtatcgccagccttacaacatgcatatcctactcggtaactgcatgtttggtcgccaagtggaagcagaacttgtcactgagttcctgttgcacacgcagcctcatagtctccaagaattggaggtcctgccgattgtcggtccactcagagttggcaagagtaccctcgtcgctcatgtttgcaaggatgaaagggtccgcgagtatttctcagaaattttgtggctgtacgaccatgattttacagatgacgagctagctttcaaacaaggatgtgcaatggaaaatcaaatttcgaacctgaacaaagacaagagagtgctagttgttgtagaactatctggagatctctatgaagatgcttggaataggttgtatcttgcttccaaacagagcatctgtagcgggagtaaaatcatagtcacaagccgttcagacaagattgtaaggtttgggacaacacgggctctaactcttaagcttttgtcccatgaggcatactggtatttcttcaaggtacttacgtttggaagcaatgatcccaacacgcacccaaggcttgcccaactggccatggagatagccagaaagctaaattgttcaattaatggtgcatatgtcacctcttatttgttgagggacaattttaacgtacacttttggtgtaaggttctgagctttttgagctggtgcatccagaagcatatctccaaatttggggtgcatccttctgttctttttagtcaaaatgtacctgtagagcttggtagaatggctgcgccttctgaagatttcatgctttgtgatcagtatcaccggtcttcccaagaagaggttccagagataagaatccaagatgtgatgtatggaagcatcaagagacatggaaaatttgatgtattagtatggagatctcagatacccccctactacagctatgtcaatgcttgtgtgattcaagagcgaaaaaatacaggtggaaagaggaagcgttgcatcaacgatggagccacagtctcttaa

SEQ ID NO: 34647 - DNA, 321 bp, Zea mays
  Peptide Sequence Number=SeqID_78022
atggagatcaagccaacttgtctcaacggaaaagcagccagaaaagcgatcgcgtcagctgaagcaaagcaactggcgagcaagtgggccgattgggtcgtgtatttagagcctggtgggccgaccgtagagcctggtgggccgaccgagactccttggcctcaccgtgtgagggccgcgtccactgatcaccaggcttcgtgccgcagggatggtgtgggtgcgccgcagtccgcgctcgtcgtgggtgaagaagacaccaatcaccgatcggacgaccatgggttcttaccggttcggataaagggcaatctaatctag

SEQ ID NO: 34648 - DNA, 195 bp, Zea mays
  Peptide Sequence Number=SeqID_78023
atggcttcggttacttcccaaggcatcaatggggagagcaatggcgaggaagaaacagtcggagtgatgatccttaacgcaacaagtaatcgaacggacgcggacgtcgagtcgcgggttgggacgcgctgtcgggctggcggctccacgcgtgggcgtcgtgtctgggtcctatcaatacaacaacaatcatag

SEQ ID NO: 34649 - DNA, 240 bp, Zea mays
  Peptide Sequence Number=SeqID_78024
atggccttgttccccacagtggaaacatgcacgacctcctccttgcactggcgctgttttggttgctttggttggttgctagggcaggaagacgggctgcctgattgctctaacgttggtattgatttcctccttgctggctattctgacggtactgttgttgttgaggaaactgcctctggtactactattgctggttctgacgctgatgctggtgctggtactggtgaccttgcttga

SEQ ID NO: 34650 - DNA, 459 bp, Zea mays
  Peptide Sequence Number=SeqID_78025
atgggcaagaacaacaagcgcaagcgtgagccaactcctccatcggaggagtttggtgactcggagtactcaaaggaggagttctcctctgggtctgaggggtctccggctcccgtccccctgcgtgagtcgtctgacgactcagacgactcccaggggctcgcggcggaggtctggtcgtacatccgggccgtcgagcgctctgggctcgagggctcggatgggtcggagtactcctcggatgaggaggactcggacgacggcgacgaggacgaggacgacgacgatgacgacggcgacgacgacgacgatggcggcggtgacggtgacggcagcggcagcggcaggggcagcggcggcggcagcaaggacggtgacggcggcggtagcaggggcagcaaccggggcggcagcagcaggggcagcaccaggggcggcagtagcaggaccagtggctag

SEQ ID NO: 34651 - DNA, 498 bp, Zea mays
  Peptide Sequence Number=SeqID_78026
atggcggtggcaggcgggcgggagcagcggtcacgtcgtcagccaagctcacgtcccatccgggggcagcgagagaaccctctctcacggcgtaaagacaacgcgcccgtgtttcgttcctcgaacggctcgcgcacgcgcaacggccgccccgccaaccactcgccccgtcgcattaactccgcggcgggacaggcggcgcctctgggaccggtaaagggggataccccgaaaaggatccttccctgtgaaggaaccaggctccgagccaccctactgatcagaggttcgaaggctggccccccgaaagggttcgacagccgcctcagatcgcgtgggccctacacccactactggtcagaggttcgaaggtcggcccctcggaagggttccacggccacctcaggctactcgggctccgcgcccattactgatcaggggttcgaaggctggcccccgaagggttcacagccgcctcagacgccgagcgagggatga

SEQ ID NO: 34652 - DNA, 249 bp, Zea mays
  Peptide Sequence Number=SeqID_78027
atgccagaaaccaaggactacaacagtcttggtcagaaaccaagatctgtttcgtggaagcaatttgcagctagaaaagcattttgcattgcagcgaattacaggtgttggcccgtgacaggctcctgggatcttacaagtaaatcaactgaaagcttaaagaaatcagacagtggttcaaatggctacatgtttgctcaaaacaatgcaagtcccatctggagcacaagctatgacgatgctaaataa

SEQ ID NO: 34653 - DNA, 495 bp, Zea mays
  Peptide Sequence Number=SeqID_78028
atggagcggaggtggagggggagtagtgcatcgagcagaaggttcgcgacgcaccaggatctgttgggggcgggcgttgctggcgcggcggggactgcgggcacaacagctttgcgggggcgcggtgaattcggggacagcggggacgagcacggcggcggggactgcgggcacagcagcttcgcgggggcgcggcgaattcggggacagcggggacgagcacggcggcggggactgcgggcacaacagctttgcgggggcgcggcgaattcggggacagcggggacgagcacggcggcggggactgcgggcgttgcagctttggcggggacagcgggcgcgaggacggcggcgaggactgcggcggcgaggagtcacgagcgcggccgcgaaagcagcagaccagagtaccagccgttccgctacttgcgcaagcgcaagcgcaagcgcaagctttcttccccgcacgcggcggtcgctaccggccggatttag

SEQ ID NO: 34654 - DNA, 672 bp, Zea mays
  Peptide Sequence Number=SeqID_78029
agaattcctgactcggaccctcgaccaggaggcagcttcctcctccaaaaaaagcctgaattcatgcttccaattgggtccaccacgattccagaggttgaagaaggccctgaactccttacgctcaatggagcccaagttataaatgtggaaacccaccgccatcgaggaaaccgaaaatcgaaaaacgcggtcagccagctgaagcacttcgaaatcctcggcgagcccaccaagggcagcctggagaagatgaccaaccgaaaccgaattcaacttgaagatgcatctaccaaaggaaaccaccagccagaagggcgaccgcaaacaggggcgagcagggcaaaccgaagcttccaaggcatcccagagggattccgaaaagaccaagcctggcccaaagtccaggagagagaaatccatagcgggaaagcgagaagaccggagggaaggacacgagaagcaggagaacctgagaacctgacagactgccgtgcggcgcggtgcccgctgggcgctggcgacctctcccctccgggtcaaagagctgatcgattcaggctgacagacaggggcgcagtaccggaccggacagcccaagtcctgtgctgccgcctgcccaagggccaaagctgcgtcgccctgatgattttgcagttttggtcgtactaa

SEQ ID NO: 34655 - DNA, 255 bp, Zea mays
  Peptide Sequence Number=SeqID_78030
atggcctggcagtggcaggcgcttacaatccgtatggaaatggactggcaggtgcttatggtgtgcttggtgctcatgctgcacaggaaaattcaacttaaacatgatcgaaaaaatgaaaccaaagtggatagtgaacaggctatgttccatgggtatggcaatttactaaaatatcacaggctattaaagaacagttgcaggaacaatctgactgaaatcaacatggttgtccgttcacaagttactatatga

SEQ ID NO: 34656 - DNA, 333 bp, Zea mays
  Peptide Sequence Number=SeqID_78031
atggcggtgggtttccacatttataacttgggctccattgagcgtaaggagttcagggccttcttcaacctctggaatcgtggtggacccaattggaagcatgaattcaggctttttttggaggaggaagctgcctcctggtcgagggctcgtaacatctggcgcccgcaggctttgcctcggcctctcccgagggtctccgtgttcaaccgtcttcgcccgcaggcttcgggaccgtggcattctgcttctaatggaagaactggtcttcctcggttcttgggccctaatcgttctggtgttgctattggtagctgtcacacccggttttag

SEQ ID NO: 34657 - DNA, 2967 bp, Zea mays
  Peptide Sequence Number=SeqID_78032
atgggggcaaaagttgaaggggaaagctatatgcctggatattatgccacaggggatctcaacgtggaagcaagtggtaggtggtctccatactatgaggagatgacatcaaatggccagttatgcaatggcttcgcaacaaaaccaacaagtggttattcagaatttgacaaagaaatactcaagcatcaaattcttgaacatgaagctgtgttcagacaacagcctcacaacccactcgctatccaggtgtatgaactgcaccgagtttacaaaatacagaaggatatgatgaaacaacatcaaagaaaagaggtatattcatacccaactttggcaggtgcatcacatactaattcaccatcacaagtgccaccaaacggtgcaaagatgatgtggcagatgccagttcctcctgtgtctacaacatacaggaaagctattggagagcataatgatacaaaccagtcctgcatgaagttccttagagaaggcagtgtgcagtcttctccaaatggatttctatcaagtgatgctgctccaagaaccagacaaggcacttttgaccttcaacttccagccgatcattatatagatgacgatgacacatcagataacaagcccatagatttccttggtttggcatcagatgcaaaaccccagaatgatgctgagcttacattagttagtgcagaacgcttgggcaagttcagtgataatagttcatcctcaggtttgcggactacaaataatcttggaagccgacaagttaccaacctgaatgaatcaaatactggcttctttatgggtagagcaaatggatctgtttccagaggccttccgcataccctcgagaactcgtggcaccaaccgatattgagatcaagcacaactactttcaatttcagtaaagaatactccaaagaaaagcacacaaatgaaggtacaagctcaaatttttttgacacaagtgcgaaactaacacatgacgacaagccaacaatcaataaaggtaaacaagtcagcagtataacttttttagcacccagatataatgatgctgatcccccaaaatacttcaaagctgctgatgggaggcctgccagttataaccaatttctttaccaaggtcagaatagttcagctggatggattgcacgaagtcctctggaaccttctgttatcaataattttgctagagttgaccgtccacatcattcgaatctgggtacatttactgtccccatctctattcctcaaatagacaatccttcaattgtctccccgatgggttcttgcacagcagacccaaggagcagcattgtcaacaatcctgctttaattccaagattcaatgggtcgtcaaccgtgaattcgtacgccagtcttagtgctgtgacacagagcattggaacttcaatcccaaagctgaaaaatgtggataacttagataaacgctatcctggttttccacttgattcgttttctgtgtcccactcacgacatcaggtagcaatttcaagtaacctggagcaaaagaactcccagaagtttgaagattcagatcaacagtcccatggcaagggtatgaagaacttcaatttgaatgagacactgtcagattgtcaggaagatggtcttgtagaacaagatgggagatgtgctgccagttttcagcatggtaaagacggagggtcagtattcgggatctcttggctcaaaaataaagctgtgtctgctgatccaacagctttggagaaggcagggaagatttttggccattcgtttggaactacaatggagctgaaaaatgctaaagaccagaacgaaccagctgtgactattcgaaatttgtcagactctgcttcgacatctcttggctgtggaattaagaaggatgggccttcagaagacattgccactggaactttgctggtttgtaataaagcccaagaggacgctacatgtttacccctttcatgccagaaacatgtgcctaaagatggacaagatgctgatggagtcatcaagataagtggtgcctccatcaggaatttcatcgatctcaatgatgctgtgccaaacgatgacaattctgaagaatcagtagtgtcacatgaatgccaggcggaaccttcacggaacaaccatcctaaacgagcatttgtgattgatctagaggtgccggcttgtgaagaggatgctgcttgggattttgatcaagaatgtgcacagcctaaacctgatgcacaccaggaagttgacggcagatctgatacatctgctctagctgcagctgagaacatcgtagcgttgtcaaggattattccaacagctctagaggcatctgatgatatgttgcagtggtttgcagatctcgctgtattgaacatcaaggaccttgctgagcaagctgaactccaagcttgtaccaatgattccagtaacgacgagtcagattcattcgaatccttgacactgaagctggaagagaccaagattgatgagtactggagcaggccactggaacctgaaatcacaaccgatgaacaattaatttcaactgctcaccttctcaccaagcccagaaggggccagcaaaggaggcgacggcagaagcgggatttccagaaagatatcttgcctggcctttcgtcactttcccggcctgaaatcatagaggatgtccagttgcttgaggggttagtccaggcttctggtggatcctgggagtcgagtttaactaggcgaggacgttatggtgggcggactcgaggtaggaaacctcggaaaactgtagtaactgtaattgtagaagaggaggtcgaggttagcccaccgccgaaacctgttggcactggcgacctcgaagccgatggtaggggtatggttggatggggcagaacaacaaggcggtgtcgcagagcgagatgtccgtcaggtaacaacttggctgctgcgtcttga

SEQ ID NO: 34658 - DNA, 345 bp, Zea mays
  Peptide Sequence Number=SeqID_78033
atggccacggccagtcgaccgcagatgcccccaaccgcctggacgagggccccacccggagctgagactgaaccgcagccagctcgggtcgggtcgggtgtgtgcggtactgggatgcgatgcgatccgatgtcgatgcgcggcccggctggttccaattccatcccgatacctgggcctgacttgcgggtcccgcagcctgatgacaccgtgtctgtcttccgtaggagcaactccaatagttatgtaaattttagctctctaaatcacagatttaagaaattgttaaatggcttttggagtaaaaaaatgaagtcttttagagaactactggagttgctctaa

SEQ ID NO: 34659 - DNA, 156 bp, Zea mays
  Peptide Sequence Number=SeqID_78034
atgggctggagcttcctgtcctgcggttgccatccctggccatcaatgcgagccgcaggcatgggctgggcgcagggccagggcgagacgaagcataacgtagtgcaggagcctactacaggccaagacatggacgcccggtctcttgcacagtaa

SEQ ID NO: 34660 - DNA, 360 bp, Zea mays
  Peptide Sequence Number=SeqID_78035
atgaaccgacctgacctgccactccctattgccgtggacttgctactggctggtcagattatgacaggcagccttgacaagaagctaaagctttgggattcaaaaacaagaaatatatgcatttcgttgtcatccaaattccagaaacggaaaatggaatctggtccctgtaaattgcatctcagttcatccctgcttccaatgtatttgggcagtgtggcgtcagtggcatacaaccataatggccaacttctggcggttgcctcaaactattttttagaagtggataaagaggagcaacaccaccaggtattcattgaaactgtggagaacttcaaaggcaagtcccgtgtgggatag

SEQ ID NO: 34661 - DNA, 420 bp, Zea mays
  Peptide Sequence Number=SeqID_78036
atggtgtctgctgctggtgggatcgagattgggcaagtaaccggcacggcagcgcactccagcgagaggactcgtagacgtagaatgcttcggcaaacttggcacagcggtcattgtcagcagcgtcaacggcgagaacagataacgacgcagtgcgtgcaggcagcaatggagcatggcgacgattggatttcgcgaggacagcccgtggggagggtcagtggtgaaaatagggatgggaacggatccacaaaggtgcgggcaaagagatttatagctgaggaggaagaaacggacgccgctggggagagaaagagcgccattaatgatggtgtgagaatcaataacagagaaacggttccacatggaagggaaacagccagggcgtcgacagccattaatgggggtggagctgtgtag

SEQ ID NO: 34662 - DNA, 408 bp, Zea mays
  Peptide Sequence Number=SeqID_78037
atgaccgttgaacaaaaaaacgagaaaagtagaaaacgtcgtgaagcaagccaacgaaataaaggacctcctatacagacagaggcatctagagttagtctttcagatggctgtagcacaattgatttcacaaactttgcaacacaagttccaaatgtgaatcgagatgatgatagcgattggttgcataggaatgagacattcaagtcagacgatgttttcacaacaagagaccttctgacaccaggcggtgtgcatgaaactgttggtaacacgcctaaccataatttgggaagggctgcctactttagagagcggtacaaaaacttaactccagccgagagggagcttaatcgtgaacgccttagttgtataataatacaccaaagcggaaagggtcaaagatag

SEQ ID NO: 34663 - DNA, 1365 bp, Zea mays
  Peptide Sequence Number=SeqID_78038
atggcacacatatgtagcgctgaacgaagggtgttactttacctagaccatgacatggtgtttattccgataaacatccgagagacgcactggtatcttgctgtgatccatgcaagaaatatggagatacaagtgctcgattcacttggtacttcacaagaccgcaaagacctcactgactctattaaaggactgcaaagacaaatagatatgatatctcaacgtaaggagttaaaagaccacaggtggccagacctccaagttgcttcttggccgctcagagaaatagacatgggatatgcaaagcagacagatagctcttcatgtggcctctttcttttgaactatatcgaatactggacaggggatgaactgtctgacagttttacccaggatgacatgtcacactttaggaaaaaaatggctgctatattactatcttcagacctgaataagagaagggggtgtctgttatacaagaatgaaaaagaagttgactctggaagctcatctgatgttgagatattagaaaacccaaaagattctaataagaggaaactactccacgtgcttgatgatagcgaagtggtgtatgaagatgaggaaggccctattactcaagcagacttgcaaaggtggtttgttgatgattgggataaaaaagctcctgtaaaagtatctaccgatggttgcaccaatgactttttaatggttggtctttccacaaaggacatgccagtgaccaaagccgattcaatagatgttttatgtgattatatcatggcaatagaagacgatacgacactagaatgttttgacatggctgttcggctgcttgccaataaagagtcacgtaggccgaaagaagaaatcataaataatagaaagcattatatggacatgcgtttttgggttctcatgccatggaaattcaatggatgttacgcccttttcgtaatagatcatgttaaaaagcatgtgacttttatcgattttacaccgactcaagattggtgtaagcacatgccatacaagaggttcgaggaagcgattatcatggcctcaaaaaaatataagattgcttacagcaagaaacattctggatgggcggaggatatctttaagtgggaacatacaattcagactggtgttccaattgacttaaaagggtttaataccagctaccttgttctacaagctatggccatgtgggggaatgacagacgactgaaatttgttggggatgcaaagactcttcgaagaaactttgtgattgatcttttaagttatgaggacaattcgtgccgatatgccatccctgcaaacatacaacaaagacttgtcgatatcgctaaaaaggattag

SEQ ID NO: 34664 - DNA, 903 bp, Zea mays
  Peptide Sequence Number=SeqID_78039
atggttaaaagggctgtcattgtaacccccacaagcttagttagcaactgggaatctgagataattaagtggttgaaaggcagagtgcaggtgctggccctctgtgaaagcacacgtgctgatgttctttccggaattgaaagtttcttaaaacccttgagccgtctccagcctcctgagaactggaacggtggtgttgggtttgtgtctaaggaaatgatccaatctcattgtccagcgcctgctgagtacattcagacagttacatcagaagctgtatcagaagtggttcagagttctgtttctgtggcggtcgatgctgttgacttggtagatgacaagggagatagcgatgatgacatcgtcgatcaccatggggacgaggacaggatgactgatgtggagctgtggcagcaacttgaaagtgagttgtaccggaagagggagggagaagaagatgacatagccgaagagatggctgaaagtacaattgctgaggagacagttacatcagaagctgtatcagaagtggttcagagttctgtttctgtggcggtcgatgctgttgacttggtagatgacaagggagatagcgatgatgacatcgtcgatcaccatggggacgaggacaggatgactgatgtggagctgtggcagcaacttgaaggtgagttgtaccggaagagggagggagaagaagatgacatagccgaagagatggctgaaagtacaattgctgaggaggtgggtggcgtggctgaagatgtgctcagcgagacaaaggaagtgcataggttctaccctcctggaaaaatcatgcacatattattctccagcagtgaagaagcagttcgtggagaggagcctgatgatgatcatggacatcacttgtgctgttcgtga

SEQ ID NO: 34665 - DNA, 363 bp, Zea mays
  Peptide Sequence Number=SeqID_78040
atgccaccatccccgcctcctattgcgctcggcagcctcgtcggcgacctcaccgccgcgagcgcccgccaccgcgccgtggaccgaccaccccaggcaccctccagccaaattggacctacccccatgatcccctacccccgcccgtgcctcgccaccactcctccgtcgcaaaaccgggctcccggcggagaaccaccgcggacctcaccggcggtcgagcccgaccggttcaccccccctcctctcgctgacacgtgggtccgcgcccacggcgtccgctcacgccgctccactcttccgtgggccgactgggccacctgcccgcgcccgtgctcgctgggccgaatcccctcttcgcca

SEQ ID NO: 34666 - DNA, 591 bp, Zea mays
  Peptide Sequence Number=SeqID_78041
gccctgtcaggaagagatcctagtgaggatgaccccaccatagtatacatggctggaaacctccacactcttgataaccactatgacgaccttttcgcccactgcacctgcctgaactcccgggtggagagcctagagcaacaaatcaagaaattaaaagaagaaaaggcatccctccaagaaagtctcgaaataacagaaggtgaagaggccaacactcgtgaagcctaccgaaccttgaagaaggactacgataagaagttaaagaagctcgcccccactaagaagatccggaagcggaccaagagccaaggatgccagactgaacgaaaagaggaagccccaccaacactgcctccctccaggatagaaaacttgtcagacgttgaggatatgtccctagctagccttgatgaccttctcagggaatttggggataccttagaaagagagtttggaagcaccttagaaagcgctcgcacgtacgctgccgtcagaaatgctacctgggcagaatttgaagccgccttccgagaacatcatgtgccccaagggatcgtccagctcaaagaagatgaatttcagaattaa

SEQ ID NO: 34667 - DNA, 507 bp, Zea mays
  Peptide Sequence Number=SeqID_78042
atgaccaggacaataaacagagaaatatgggtgcggggaagtttcttaccacaagcacgaactccggagcgcctggaggacggcgggaaggcattgaagtcctgggtcgacggcggcagactccagctgcacgggaaacactccggtgagcaaggactaggcaaaccagaggggctgggggcgaaccgaggggtgtcccgagttgttaacggcgaggcggaactcaccggggcaatggaagcgaaagggactcaacggcggtcgtggaacgacggcggtcttcggtgtgcgggggcggagcttggctggtcgcgtgcgcagggcaagagagggggcaagagagctcggctgagggcgcaaatgactggggggaagtgtaacaccccaggtgttactcagggttctttggaggacatggttgctggagtgacttggccgtccatcttgccaccgggttggactatcgagtgggaccctgcctcggctgaggaggagcatgaggagtga

SEQ ID NO: 34668 - DNA, 258 bp, Zea mays
  Peptide Sequence Number=SeqID_78043
atgaccaggacaataaacagagaaataggggcgcggggaggttgcttaccacaagcacgaacttcggagcgcctagaggacggcggtgggctccagttgcatgggaaacactccgatgagcacggaccaggcaaaccagaggggctgggggcgaaccgaggggtgtcccgagttgctgacggcgaggcggaactcacttggacaacggacgcgacagggactcaacgacgattgtggaacggctgcggtcttcggtga

SEQ ID NO: 34669 - DNA, 532 bp, Zea mays
  Peptide Sequence Number=SeqID_78044
atggagctggagagggtgtcggcgagggcaacacgctccccaaatttgtccctgggcttgaaagaggcacaccaacaaaccccgccggcccagcaacatcgggtctgggttgctcacaaggaatcatcatggatatcaactaccatttggattgtctttgctgatatgctttggaaggcactattaaatgggtcgtgtcccagaccagcccgccaaacacgacctatttggtcatctatacacccgcacgataatgatggtcctcggctgccgccatctcgttccccattctcgacagagggcgtgggagcaggtgtctccttcccgtattcgtctgacaccagctctgacaccgacctgcacagtggctattgcacgtccacgaggatgtttcacagcatgcacgcaccatcgttttcatcgtcatcggacgtcccgttcgtcttcccggcattcgccatgttcttcctccccaaccagctgcccccgcccacggtcgcagccgggaaccgactgacgctcgtccacgcgg

SEQ ID NO: 34670 - DNA, 114 bp, Zea mays
  Peptide Sequence Number=SeqID_78045
atggcgagagtagcgtgtaccctccgtggcaagaggctggacggtggtgtatctgtgctctcagttggtgtgaacccgccttaccttgactcccttaagccagcatatccttga

SEQ ID NO: 34671 - DNA, 192 bp, Zea mays
  Peptide Sequence Number=SeqID_78046
atggcggctcagggatccctcgtcatgtggagggcggtcttcgcagcgctgggcttgctcatggtggccacgctggtgtacaccttggccaccgacggctcgccgttccgccttgagctgtttacgccgtggatggtggcaacactggctgatttttatgttaatgttattgcaatctcggtaatgtcttga

SEQ ID NO: 34672 - DNA, 477 bp, Zea mays
  Peptide Sequence Number=SeqID_78047
atggcggcgattactccgacgagcgacccagccgagcgcaatcccccaaattggaacgcgctaaacgttgataggaacatggtggagccttctgcgtccgaggaggtggtgtgcgcgattcacgctcggctactaacccgtcgaggcccctctcgactcctgaccgccagcaacaccggaaatcaggtgcggcggcgcttctttcccctcggttaccggcggactccgcacccgcacccggttgaacgtggtgcacggataggttatgggagagagagcacaggagggagtttggtgtgcctttgtagctggccaacgtggtctgagggcagcgagaactccgggacggcgcaaccgcccggccgcaaagtccgcgcgggacgagaacaggctgagcacgcggtccatgtgcccgcgatagcaccggaggatagacttaggccagcgcgggtttcagatcgaggggtatcccattga

SEQ ID NO: 34673 - DNA, 1323 bp, Zea mays
  Peptide Sequence Number=SeqID_78048
atggggggctcggagcccggttccttcgcgaagaaggatccctttcgggcaactggcgcgccggttgctcgacgcgtgggcctgggttccaagctggcgtgtcagaagtcggagaagcgcgtccatctggcgcggctgcatgccgcctgcatggctgcccgccccttctgcccgttggtctgggcgaaaatggggggtcgcctgcagcccggtcgcaccccttcaccggcggtcgcccgagatggcgacctccagcttgatggtgggggaaagcgagccgggctgcggcctctgccccttcctcagcctcaaggattttcatcaccaaggctggggaggggagagtgccgagttggggtcggcccctgcgtgggcggtggctcgctccttcactcagtgatggggggagaagcaggcattgcccgtggcgtccggcagctgcagcgtgcctggtcttcagccgcgagtggcttcggggccacttgcggcgtcggcgtctgccacggcagctggaagaggttcttccgccggcgcggcggccgggaccggccacgggctgacctccaacttctacggccttctgcccgtccttgcctcacgagttttggcatgggcgggggcctcctggcagcggcatccaccctgaggttagcgttgccgctgttcggccccctggagcagaagtcgccgtcgtcgccactgctggagcaggtgacggcgcgccgttcgtcggccttccgttgctccgcaggccttccccctcggagcggggttgttcgtacctgcggagggggaaccggagttccgttggtagtggcatctccggagccgacgccaaagtcggtcagtcgaggcctcgggtcgggctggcgcccttggaagccggttgaccgaggccccaggggtaaccggttgagccgcctgctcgggccggattcccggaggagtccctggaccgcggcgccgcccgaggctgggtcgggctttgctgaagacgtcgtcgatgccgagggtgctacggctcccttcggcgtgaagacccgagcctgcaggatcagatcatcttgtagcgtgtgctttctgcggccgccgaggccagaagaacacaccctcgctgcgcttgcgaagttgcgtcttttttcctcctgtttcgagcacctggactctgtcggtaacagggatgtttgtgtgagcgagagttgcttttcgcggaagggacgagtgaggtatccgtatcccagaggcgtgggaatccctcggctcggtcggccttgccgcttacgcgtactttcacccgtccatgaggccctgtccccgacttag

SEQ ID NO: 34674 - DNA, 264 bp, Zea mays
  Peptide Sequence Number=SeqID_78049
atggcagtaaatcccgctcgctgtggccctggggtgctactcctcgtggcgctccttgtggcgctggtcgtctccgggcactgccctgggtgcgcaccacctcgagctgaagcgtcgccggcggaagcacgagatccactctctgatcaaggcggtggtggtcgtggtgatgtccggtggaggtacacttccaattacagcaaggacactggaaaccataattcgtctatcgacagctcatgccaagatgaaactgaggcatga

SEQ ID NO: 34675 - DNA, 258 bp, Zea mays
  Peptide Sequence Number=SeqID_78050
atggttaaaaattttggcagcaaaacagtgcaaatagcaatgaatgttgtggtaacttcacacctactcgtctgtttatatagtgatgcagatacaaccgatcaagccaaggatggaggcaagaagagcttcgaggtaccgagtgcaggggagaaggtcaaggagaccaggaacccaaagccaggggtgaagaagaagacttgcaaagtcaaggttgatcgagttaagagttatggtgcatcaaggatcactacataa

SEQ ID NO: 34676 - DNA, 144 bp, Zea mays
  Peptide Sequence Number=SeqID_78051
atggtcgaatatcctgagcaacacctagatcctagacctagcaaggcctcggcctcgggaggaatcgtcaccacgcccaacccaggcctcgacctcagcctcagcctcggcctcgggaggaggtcttcgcctcgctcgacctag

SEQ ID NO: 34677 - DNA, 348 bp, Zea mays
  Peptide Sequence Number=SeqID_78052
atgtttggggaagtccacaatgcattagagatatctggtgtaacatcggattttcagataccccatcagacagagtacatatctggtgcatcagacatccctcttggatgtcacaccgatcaccataccggataccccatgctcaacgatcgcaatggctcgtttcaactgttagctggcatggacacgcatcgaacgtgttcgatgggtgcattagagagttcgcttattcagcagctgattcagggcataaaccagagtttcacttgcgagttgcgaaggatgtttcaggagagcatgaaacttgacaaccgctacggtactcaaaagtacccgatgaggcactga

SEQ ID NO: 34678 - DNA, 360 bp, Zea mays
  Peptide Sequence Number=SeqID_78053
atgcgggcagcagctctagcgttctactcacttgtggtggctggtgagggaccggccaccgcacttggcctcgctcgtgcaggtggtctactctgcctcgatcggccgggatgcagatgcccgcgcccgtacgcgaaagatctgcaaaggcaagccactgcacaaaagagcagtggacagtggtcacctacctatcaaagatctctcgctagctcatctcggcagattcccccctgcgcggacggcgtgcggcgcgtctcagctgtgaaccccacgcgcaccaggccgaaagatggcgccgcgacagtgccgccggtcggcttccgcgtttcaggctcgcagacccaggcccagggatag

SEQ ID NO: 34679 - DNA, 936 bp, Zea mays
  Peptide Sequence Number=SeqID_78054
atggagctcaaggcgtcaagtggtggctcactcggactcgcgctcctctgcaagacactgttccccatgaggtggccgaggacaagtttggcaggattcacaagtgctcgtagcaaatctacaaaatccccaaccgcctctcaacaaagtctccccacggaggtacacagctacgcgcaaaccgcgtctcgcgcgaagaatccgcatttccccttccccgcaccgcaccgcacccaacccccgtcggagagagagatggcatcggtggcggagatgcagcccctcgcgccggcggggtaccgccgcgcgccggagatgaaggagaaggtggaggcgtcggtggtggacctggaggccgggaccggggagacgctgtacccggggatctcgcgcggggagagcgccctccgatggggcttcgtccgcaaggtctacggcatcctcgctgcgcagctgctcctcaccaccgccgtctccgccctcaccgttctccaccccaccctcaacgccacgctctccgactccccgggcctcgcgctcgtgctcgccgtcctgcccttcatccggaaaatcgttctggaggctttagtgctgacggctggcgtggtggtttctctgactgcgtatgctttctgggcgtcaaagaagggcaaggaattcgggtacctggggcctatcctgtcttccgcgcttactatcctcgtcctaactagctttcttcaggttttcttcccactgggacccgtgtcggtgggcttgttcggtgggctaggggctctggtcttctcaggcttcatcctgtacgacaccgagaacctgatcaagcgccacacctacgacgagtacatctgggcgtcggttgggctgtacctcgacatcctgaacctgttcctctccatcctgaacatgctcaggagcatgcaatccgacaactag

SEQ ID NO: 34680 - DNA, 696 bp, Zea mays
  Peptide Sequence Number=SeqID_78055
atggcgaagcgttactcccaccaaatccgagccgaccacggccagatcaacgatccgaaatccaccgatcagattgattcccagacgtccgatgcacatccaacgcgcagctccgcggtggcggtgtgtcaccggcgagcaattccaatcgccgccgaggtcgaaacacctccacctggtcacgagcgcccacccagaaacaccgcgaagtactccaaggcgacacagacttttcggcaatggccacggacggtaacgaagctggcgggtgctccctgccgcgatccaagcccgagcagtgagaaattccggggaacccgagccacgatccgagaatggcggggcggcaccctcacacgcggcgttgttggtacccggtgcgtgatgaagctcagcgatggcgcgctcggctgcttggattcttctcctaattgcaaacgccggtggaattccatggtggcggccgccaactgctccttgactcccagtcgcgcccacaccgtggtcaagttttcggcaatggggaagagggagggggtcttaggctcctacttatacgctggtaaggcggggaatcacaacaccctcactacacggcggattaacaaggagtcggccacgactgcgtggattgcgcccaagctgttacggcaaggagatagatctgacaagtcggtcccgcgcgcagtggaatag

SEQ ID NO: 34681 - DNA, 693 bp, Zea mays
  Peptide Sequence Number=SeqID_78056
atggtgaccaccagttcgatggtggggagaagcaagccgggctgcggcctctgccccgccctcagcttcaaggatcttcatcatccttgctggggcgggggacgagctgagccggggcttgccttcgcgtgggctagcgtcccgcctcttcctccagcatctaggggtggaaaccatcctccagctctacgaaggaggcgtcctccagccatgcgggggaaggcgaactgctgctgcccggccagggtgcagcattccgtcccctgcccgggtgactgtggccggccgcaccggagggtctcccaacacgtcgtacgccgcgagggcggtactcatgttctgggacggtccagttctcgttttcgtggcgaggacgggggtgaggacctgctgggaagagatctctcacaggtcctagggcaagattcgtacgtttgggccgctcagcagagggaagaacaggggcagaagcaaagagccacgtgttcgacgcgctctgagctcgccagagcacgcccgacgcgcgcccccgcgtgccccgcgtcgcgccaaagccaagccggcgccatggcccgcgcccgcgcctataaagcacccagggaattcggccatacccctctgcgcacgctcgacctcaccggagcccgaaaccaccggcgttgccctgtgcacggcgtacccgcggccacctaa

SEQ ID NO: 34682 - DNA, 198 bp, Zea mays
  Peptide Sequence Number=SeqID_78057
atggcccacgcccgcgcctataaagcacctagggacttcgaccgtacccctccgcacgcgctcgacctcaccggagcccaaaaccaccggcgttctttggaggacatggttgctggagtgacttggccgtccatcttgccaccgggttggactgtcgagtgggatcctgcctcggctgaggaggaacatgaggagtga

SEQ ID NO: 34683 - DNA, 552 bp, Zea mays
  Peptide Sequence Number=SeqID_78058
atgcatgacgggagtgcgaaggcgtggctgccacccaagggggtcagtcccttttcaaaggcgactctccccactcgcgtcctcaggcgtcgcagactaagtcttcaccaacgtgctctagggtcctccccctacgacacgggggttgggtcccacacgtcatgcaagctggcccgaacagaagaagccaaaccgcagcgcgcggagcgtgtaaccgcccagcggttacaagcactcctccatcttcgtctaaaccagcaggtgaaagggcgaaccgccatgcaggcgacatgcaactgcaccgccgggatgcaccctttcgacttcgacgcatccagcatggaggcccaggcccacacgtcatgtaaccgacgcgccggttactacgtgcgaataactgcaccgccacttatgccaatgccgcgccttctcgactgtggaacctgtgccgcgaatcgaggcaaccctgcgcatggccctacagtgccaaccaagcacatcggtcacagggaccgggaaaggggatacttcgaaagggatccttctctatga

SEQ ID NO: 34684 - DNA, 393 bp, Zea mays
  Peptide Sequence Number=SeqID_78059
atgggcgcaatacaggaaaacagcttcgcctgccccgctccgactgttgtgccacccgctagggtgaggctgacagcagccgagtccagcctcaggcgccataagaagctccgcctcgcccgaccccggggctcagcccccgcctcaacctcggaaagatggtctccgcctcgcccgaccctagggctcggactcaacctcgacctcagaagacggtcttcgcctcgcccgaccccagggctcggactcaaccttgacctcggaagacagtctccgcctcacccgacttcagggctcggcctcagcctcgacctcagaggagtctccgcctcgcccgaccttgggctcggaccgaccacgttgcaggcgggtacatcattaccctacccctag

SEQ ID NO: 34685 - DNA, 696 bp, Zea mays
  Peptide Sequence Number=SeqID_78060
atggcgaagcgttactcccaccaaatccgagccgaccacggccagatcaacgatccgaaatccaccgatcagattgattcccagacgtccgatgcacatccaacgcgcagctccgcggtggcggtgtgtcaccggcgagcaattccaatcgccgccgaggtcgaaacacctccacccggtcacgagcgcccacccagaaacaccgcgaagtactccaaggcggcacggacttttcggcaatggccacggacggtaacaaagctggcgggtgctccctgccgcgatccaagcccgagcagtgagaaattccggggaacccgagccacgatccgagaatggcggggcggcaccctcacacgcggcgttgttggtccccggtgcgtgatgaagctcagcgatggcgcgctcggctgcttggattcttctcctaattgcaaacgccggtggaattccatggtggcggccgccaactgctccttgactcccagtcgcgcccacaccgtggtcaagttttcggcaatggggaagagggagggggtcttaggctcctacttatacgctggtaaggcggggaatcacaacaccctcactacacggcggattaacaaggagtcggccacgactgcgtggattgcgcccaagctgttacggcaaggagatagatctgacaagccggtcccgcgcgcagtggaatag

SEQ ID NO: 34686 - DNA, 969 bp, Zea mays
  Peptide Sequence Number=SeqID_78061
atggttgccccgcctcctcctcctgtggcggggaaggtgacgggacagactcagatgctgctcttccggcacgcggggaagacgtcgtcgattccgccgccgtcgggcgggccgacggccgtcgtcgtcgcgcggcggaggaaggagtaccttgttgtagctgccgtcgagggacatgaactcgagactcccgaaacggagcagcgtcccgggctggataggttgctggagactacccatctggagcttgacaggaagctgttcgtcaacacgcagcaggcccctacctggcgcaccaactgtcggcgttttgaccccgggggtccctggaccgacgatagggggttacaagcgttcgcgagagagggtgagagcctgttcgtcagcccgtcctcccgcgcggccaccttctcgtacgagggccctggaccttccttttatagatgtaaggagggggcccaggttgagtccgagccctggcgtcgggcgaggcggagaccgtcttccgaggtcgaggcgggggccgagccccagggtcgggcgaggcggagcttcttatggcgcctgaggctggactcggctactgtcagcctcaccctggcgggtggcacagcagtcggagcggggcaggcgatccttgcattgaatgctcctgcgatacggtcggttggcgaggcgatctggccaaggttgcttcactgcgaagcctgcccgagcagggcctcgggcgagtcgaagaggttgcgcatctttacccacaagtcatgttacccatctgcaaagagatggccaatcccatacacctctaccgaggaggcgaggcaggggttcttgcctgaccgccatcgcagcaaaatcaaccaaggacctccctacactgaccactcccctactgcccttgccccttttgggccgaacgggtaccgtgcactcagggccgttggatccgcagccgagggcacggattag

SEQ ID NO: 34687 - DNA, 500 bp, Zea mays
  Peptide Sequence Number=SeqID_78062
atggttggcggcaagggtagcaacggcaagcgtggcccgaaggatcaaggtgggaagcggaagcatcctccaactcctcctttagaggacttcagtgattccaagttctcggaggagcggttctcctccgagggcgaagagtctctgccaccgacccccctctcgtcgtcgtctaagggcttggataactcgatggggctatcgacggcgaagagggcctacatccgatccatggagtgtgtagggcttgaggagttagatgactcggaggaggactccgaggaggaagactccaaggaggagggcggtggtggtgaggatgggagcggctacgacagcggtgacgagggcggcaacaatggcaattgcggcgacagaggcagtggtggcaaaggcggcggcgagaaaggcgacggtgacaaaggcggcggcggagacagcagctatgacgacgacgatgagggtggcaacggcaacagcggtggcagggcgccaccagc

SEQ ID NO: 34688 - DNA, 314 bp, Zea mays
  Peptide Sequence Number=SeqID_78063
atgcaggggcactccgtccccacacacatcaaccgtccccatcgattccctggcaacagatcagggctcaccgccttggcgtacaatgccccactgaccccgactggccgtcgtgcagtgaccgcacttgtacccaccataaccggaatgggagacctcgtctcaggtcacgtgaggggatatgtctgcgggcaggtcctctggtgcaggctcgggtgctggatctggggctacctcctgagcagctccttgctccggcacgaggatgtactctccgtcagcaagattacagtctatcgaaatgcaatgaacat

SEQ ID NO: 34689 - DNA, 510 bp, Zea mays
  Peptide Sequence Number=SeqID_78064
atggagatcccaaaggacaggggctacaccttgggagggggattggggaaggggtggctagggtttgatggggagtgggcggctgcagccaagaggagaggaattgggtcggcttcaagagtggaagagaggaagagagaggggggcggccaaaggggtgggagattcagtggggtagttgacggccttgacctgaagtactaccctcgccatttaaccggcagtgctggaggtgtgattgtctcgccagtaggtgagggcaatcccaggctaagcagcatggtcaacctggccgtcgtgctcaacacagagttggaccacgcccttgacaagttgggcaaagttcgggcggaggttgcggaactgcgtgctaaatgcgcggcacaccactatcttgatggtggttctcctgcccctttcgggattcagcatccttaccgttcaccgccccgtggtcgcttcgactatggtaccccaaaatgcaggacccggatagatttggatccctag

SEQ ID NO: 34690 - DNA, 1311 bp, Zea mays
  Peptide Sequence Number=SeqID_78065
atggcgttctggggggtggaagtgaagcccgggaagccctacacccacatccatcacgctgaccatggccgcctccgcatttgccaggctacactgggcaactgtgatgctgctgcaaggacggtgctgcaatgcaatgttggcaacaagattcccatcaaactttgtagtctaaatccgaaattggccgagacatgccatctagaggttgagtttgaggaggttgatgatgttatcttctcagtaattggtcatagttcgatacatctctctggatactatgtctgtgcaagcaacagagaatcttatggggaagatattgggcactccagcaccgatgaggagcatgataccagtgaggacagctatgaatctgacttcattgatgatcgtgaagttccattatctgagaagtatgggtctggttctatagatgacagtgatgatgagtgcacccaacgatgccacagacaaaaagctgaaaaaacgactcaaaatgctgaaagacggcggcgcttgaagaagcaccaagtaggtagcactgattacgatgatgatgatactccagtcatgaaacatgttgcgaagcgctgtgctcctaaaatatctgatagtggtgatgatgacactcctgtcacaaaacctgttgtcaaacgtagagcttcaatatttgatagtgacagtgatgaagatgataatgtacctatttctcttgcattgggtaagaaagacaatgctaaggttgctgaggaaactgaacatcaaaatggacaggcaaatggcatcaccaaaaaaaggattattgatgtcaagaaaagaaaacagtcttccatcagcgaggatcctgcatcgtcaatggatatgacagatgctaatgcaccatctgtttcaaaacaagttgatgaaataaaaaagaaatcaaagaaaaagatgagaaatcaatcaggggaaaataatgagaagcagtccaatataagaacattggatgacgggttggtggttgaatatttgtcaatgggaaacaatgatgcaaaagtggcttctgatggctgcaaggtctatatcaaatatgttggcatgttgaaggatgggaaaattgttgagtctaatgttagtgaaaagccttacaagttcaagcttggtgctggaaaagttatccgtggatgggatgttggtattcatggtatgcgtgttggcgagaaaagaaagcttacagttccaccttcaatgctctctggcggtaaatcagtgggagaagtacccgaaaattcttcagtcatatatgaaatcgagttagtgaaagtgaaataa

SEQ ID NO: 34691 - DNA, 336 bp, Zea mays
  Peptide Sequence Number=SeqID_78066
atggaggcggacgaggaggatgtgctgccccttggacatctcgaacgggatcccacgctacggtcgaccgcccctcctcgccccccgcagcgacgtggctcttcttctggatcttgccccaaccatggagctcctaatagtgttgatgatgctagctttgatgataacttgggtagttctgctgcaaatattgatgatgcaccttttcatgttgatatatttgatctaaggtattgggattcactagatcctcgacaagttgacatcttagtagtaaagggaccaaaaagagacctatcaattgtgaaaggtcccaaggatagattgacagtctga

SEQ ID NO: 34692 - DNA, 462 bp, Zea mays
  Peptide Sequence Number=SeqID_78067
atgagcggctctctcgtcctcggtggcaccgaaggcggcgagggcatgcagtatgtgcccttggtgaagagcgcaacgggtgacaagctatcgtacgacatgtactactacctggcgttgaggggcgtgacggtgggcgagaaggcggtgtggctctcggtgcgggcgttcacggccaacgcagcagggtccgaaggcgccgtcgtggactccggcaccacgttcacgtacctggacccgaccgtgttccagcctgtggcggacgcggtggtgacggtggtgggcaggcggtacaaacgggccaaggacacggaggtcgggctggggctgcacccctacttcgtgttgccgcagaactacctcgtggagtatgacctggagaaggagaggctaggccctggggttctgctggcagacatgcatgtcgtcgtcggcaacagggatcggagtggaggctactaa

SEQ ID NO: 34693 - DNA, 132 bp, Zea mays
  Peptide Sequence Number=SeqID_78068
atggcgggcggaaatacgctcgccggagctaaggaacggtggctggccgatgagggattcgagttagggatcaaggtgaacatccctgatctttggctcaaggaagtaatggctcttggtgtggctttttaa

SEQ ID NO: 34694 - DNA, 117 bp, Zea mays
  Peptide Sequence Number=SeqID_78069
agacattatggcacagatggttatgagatcgatggttttggttatgactatggtactggagaagatgaagctgtggaaggagacttccaggagttccaagactacgacgagttctag

SEQ ID NO: 34695 - DNA, 336 bp, Zea mays
  Peptide Sequence Number=SeqID_78070
atggcggtgacaacgacggaggatgcatgctttgacatgggtcctggcctgacgatgtgttggagatcttcttggccgaaagccttggtgacggcgattgacgacttgatccgacggctcctcgaggcccacggcgggcgcaccccgcgcaacgcgcaggtgactgatgtcgagatccggcgcctctgcgccgccgccaaggacattttcctctcccagcccaacctcctggagctcgaggtccccattaagatatgcgctctcgtcgctccactcaagatccagcagaagtggagcaactgcgagaagaacttaagcgacatcaggattacttga

SEQ ID NO: 34696 - DNA, 120 bp, Zea mays
  Peptide Sequence Number=SeqID_78071
atggccgtgatgggttcaacatcggacaagatgtacctctgccaggtaccaaactttgggattgtaaatgataaaaatgagaccgggcaggtggttcccaaggaagagccccagcagtga

SEQ ID NO: 34697 - DNA, 111 bp, Zea mays
  Peptide Sequence Number=SeqID_78072
atggcgagagtagcgtgtaccctccgtggcaagaggatagatggtggtggttcccaaggaagagccccagcagtgaagtggtcgcgggaggatattggcctcccactttga

SEQ ID NO: 34698 - DNA, 429 bp, Zea mays
  Peptide Sequence Number=SeqID_78073
atgttttgctggcgctcgcgcgccctctctaaagagatccgggcgtcctctcccgcacgcctgcggttgagttatgcccggaggtcattggtctatgcgcccctcactgagggtgagcgcacagacgccgacgcttcatgttggcgtcgggatgaccgtggcctcaacctggtcgaggtagagtgtgccatgctgagcagtcggtcgacgtcatcccgccactgcttcatggcccccgtgctcccggagccgtcctcgacggagtctgggatgtccgcgcagttgtatgctgccgtgcagcgtgcacagcagcagtgcccgacactgggcggttgggaacctgtggcatggaagaaacaacttcttcctccaccaggaaatccgttgaagtctcgacgtggtgctcaacgatttgcaccatcatgctaa

SEQ ID NO: 34699 - DNA, 1143 bp, Zea mays
  Peptide Sequence Number=SeqID_78074
atggaggtgaggatgatggcggagcgggaggcggagcgccgggcagatcatcagaggatggcggagatgttccagtacatgcagagccttggcgccgcacagggcatcgctccgccacctccattgttccctctagttgaccctgctctcttccacactcctgccataacactcggcacagaatcaagacctgggcaccggcataggttctttgccgagtgtaatgtctctgacactcggcaaagaagcacgctttgtcgagtgccagacctagcattcggcaaagaacctgacatggggaccctctctaacgggttctttaccgagtgtcttaggtggcactcggcaaagatgcatcctttgccgagtgttgctgggcaaacaccagggacactcggcaaagtcgccgtctccgtcacccggcgccgtaatggctgcttttctttgccgagtgctctctggcactcggcaaacctctttgtcgagtgcccgacaaaaaacactcggcaaagaaggctttgccgatgcactgtgtgccgagccttctttgccgagtgcgacactcagcaaaggctttgtcgaatcgactctgccgccaggaacgtggtctccaacccaaaccatctgccattgggagaaatgtgtgccgctagacaccatatctcggccatatctcatgttgccgcttcctgccatggctccatgaagaagaagagcgcgcgagggtggaaagcaacgcgggaaaccacagcgatgcgcgcgcgtgagtggattggggaaccttggctcgcacaaattctcgacggcacgctggtactggtactctcccccgtacacctccgcggcggcggagcgagatcccgcgaggccctggatcgtggccttgagcttgtacagcgggcccttcctgcgcttccacgcgtcggcctcagccgagtcgtcgtcgccggcctcctacttgaacgcgcggcaccgcagcagggacggcttgtgagcgagcgaggaggaggaggaggaggtgaacggccgatgatccggagagcggtggtgctgcagcgacgcggcctgctgaataagcaattcaagcaattcaacatacacgtgttacaatcccagactgaccaaaaccaagctgcagcataa

SEQ ID NO: 34700 - DNA, 303 bp, Zea mays
  Peptide Sequence Number=SeqID_78075
atgcgcctaggggtcccttttatagccccaaggcagctaggagccgttgagagcacatctggaaggctatccttgccttctgtcgtcgggcgcaccggacagtccgtcgccggagaaaaacccgagagcggcctcttcggccgaggcggcctggcgcaccggacactgtccggtgcaccaccggacactgtccgcgacgcagcgctgctccgcttcctgctcgtctctgcgatgctccatgtctccggtggcttggacaatgggggttgctgcctgctgggctcgtcggctgggtatcggtga

SEQ ID NO: 34701 - DNA, 1518 bp, Zea mays
  Peptide Sequence Number=SeqID_78076
atgaagaatgtgggaagtctttgccccgtcctcgtcaggctgatatgctttacaatttgtgctctgattgaagtcggcgtcgtcttcttctgcaatatctcatttactttcatctgggtggacaggcggcgcgtcctctccgtaataaatgcagagaccagagaccacgcgacccagaggccttacgtcaggctccgccagctggcttacgtcacgggcaacaagccacgtggaatcatcggatctccgcctgagcggggagcgcaagcgcacaggataaagcctggacacatgtcagtaccagacctttgcctaggctggggtgtcccctgtcccgggacctcgctgtgggtggcccggaccccgctcagaggggtctggacctcacccaaggggtccggcttgcttgtatgggagccctggaccttactcggagatccggtcgtgagtacagaggtccagcgctttctcgaggagggtaccgacagtggcccccaggcccgcctcaggggaggatacgagcctgcaggtggggccaaagaaccggcgcccaaggagggtgactcgtggacccgcgcccccatgttagagcctgggctggtttcgacggaggtgaagaggcgcactaccgcaggtggtggcgttattcctcaagcggtagactggtccgctgctttcggcagaggtgaagagacgcatcaccgcgggtggtggcgtgctccctacgcggcggtttgcctttgccgcacacgaaggccaacgcccaaggagcatgactcgtgggcccgggcccccgtgccagagactgggtcacctttgcgcgcgtcggtcgaggtcttctgcggcgcttcggggcgccaatgggagaatccttctttaaaaagggactcccccaagcgtggtagccattctcatcagcgccctttcgccctcgagctctccgtgctcttatgtcgcgtagctgccatggccttgctagacccttgcgagctcttccagcccgaggtggcactcaacttggtgcgcaactcgctcggatggggtgtgctggcgcttgccaggaggacctgtgtcgctgctggaggggcttggcctctagcctctacccgtggtgtcctgcttcatccttcaggcggccatcatcgcctacctccgcgggatgtccgtggaggcgacgctccttcccgcttcttcctccagcatttagggggggtgattaccagcctcgtgaaagcggacatcgggctgagccacgactccatccctcgtgcccccaactctttttgggtgggaagcgagccgtgctgtggctccatctttttggctttgatggcttcggtgccgcctccaacgctgcctcccaccgctgagtggggcgtggctgtccgtccactgcaccggcgacggtcgcgccaggtggccgcctccgctggcgagccactcggagtagaggttgtcgccacctctaacgagccgccggtgcagaggtggtcgcctccgctggcgagccgctcatag

SEQ ID NO: 34702 - DNA, 342 bp, Zea mays
  Peptide Sequence Number=SeqID_78077
atggttgttgtaacaacccccaccgagatcgacgcggggtggaagaagcacatagccgtggtcgagggcccacctgccagtcagtgcgaaacgagtgcggctgtagattcaggcccggagaccccacacgcagggaagctggcgcccatgggtcatgcggctgagaaagggatttgggctggccagtcctcaatttgtaatactcaggttttaaaaacctcaacgtacagggaagagaagatacttgttttcctagccgctgcgggtctgcctgcaccgtgtcgcgtcgccactgcaccgacccgccacagccccactagcctgactccaccgccaccctag

SEQ ID NO: 34703 - DNA, 474 bp, Zea mays
  Peptide Sequence Number=SeqID_78078
atgggcaagagtaacaagcgcaagcgcgaactgactcctccatcggaggatttcggtgactcggaatactcggaggaggagttctcctccgagtccgagggatctccagctcccgtctctcccccggcgtcgtccgatgactcggacgactcccaggggatagccgcggaagtctggacatacatccgggccgtcgagcgctccgggctcgagggctcggatgagtcggagtactcctcggatgaggaggactcggacggcagcggcgaggacgaggacgacgacgacgacgacggcgacgacgacgacgacgacggtggcgacggcgacggcgacggcagcggcaggggcaggggcagcggcgacggcggcaggggcggtgacgacggcagcagcaggggcagcaccaagggcggcagcagcaagggcagcaccaagggcggcggcggcagcaggggcagggccagtggctag

SEQ ID NO: 34704 - DNA, 555 bp, Zea mays
  Peptide Sequence Number=SeqID_78079
atggactatgctgcaccagcaggagtcgcgctggaagctggctccgggcagcctcaccagcggcggcgaccacctctgcatcaatggatcgccggcagcaacgaccacctctgcaccagcagcgacaaccacctccgctccgagtggcttaccagcggtggcgaccaccccaaggtgtgcaccattgcaaggaggtcctcgcccccatcctcctacgggggtgacaacgaggccattaaagccaaagagtcgaggactcgacggcaggtagctttgatggtctcaccagtggaggcaaccacctctgcaatgggtagcctcaccagtggcggcgaccacctcatcaccaacgacagtgcccacctctgcaccggagaagtcgtggatgtggcggacccgcgcacggcgcgaccatcgcccgtgcggtggatggacagccacaccccgaccagagcggcaggaggcagcgtcggaggcagcgccgaagccatccagcccaatgggccagacacgctgcagctgacggcctacagccagcaggccccgcgtagctga

SEQ ID NO: 34705 - DNA, 660 bp, Zea mays
  Peptide Sequence Number=SeqID_78080
atgacctcactcccttaccgaatagtgcggcagaaagggaggcagcttgtgcatgggtggagcagcaacaaagggacaaaaaaagacaaggtggataagaagcggtggagggccgagcaccagatgcatagggaccatggtgcggagaacaacttgaccaatgaggacagagacgacgatggtgatgcgagcgcgagctctgagctttgcattggaagctgttctacctcgggtctattagtggtcccagctggcacacctcctgtgtcgctcatgctcgcttccaaagcgggtggcgggactggtgcttcgcctaggtgccatgaaggcgaggttcctttcaaagggccaagggagctgaacaaggagagcgatgtgaccgagaaggccttgcgggacgaccttcattggctttcgatcgcgcaccaaaagctaccgtcgcttgcaaaggggctggcgtgcagtgaggccgccaaagcctatgcccccactgcattgatccaaaacgcctatgataccatggtcagaccaacaaggagggatgcagagtcaatgacccttgcacgtcttgagagcgagaaagcgaactcctacctccgtatcctagagctagggaaagaggtcgctgaggcccgagtcactgcttggaggaggagctag

SEQ ID NO: 34706 - DNA, 498 bp, Zea mays
  Peptide Sequence Number=SeqID_78081
atgaagaataaacaccgctacaatggcctcgaccgtcctttcttccccttccttcgaaatgccccaaacctagctttcaggggcctccaggggaacccgaggaagccccaccatgaaggggtggggaggcatcgcgaggccacgctcatggaagtgacgaacgaaaccacgaagcccgacagcggatttggaacatcttcagagccagggagcaggatcagtggacactcactggccaatgactgcgaggtggaccgaccaatctcgaaaaatttggagttcaaaggttggcccgtaaagggttcgcgattgctcccaaaaccccagagcaagggcgattatgaagtggacaccgaagcagccagtacgctagatcacgagtgccaaggggcacttctaaatcgtgttcaagtcacagggaacgttggacttatggtttatcgtgaagagaggcaacgagtcgtcggacccagtcgaatggggtcattgactatatga

SEQ ID NO: 34707 - DNA, 357 bp, Zea mays
  Peptide Sequence Number=SeqID_78082
atgagtgcaaatgtctgcaaatgcaaggatgacttctgccttcatacctctaaggatatgaagccatatcgtacccctcctcgggcaacgtatgatgctaaaaatgtaccggtgtgcctagccgtccaccatggcgttcgtcgttgtgctgccagggctctagccttcaagcagttctggtcgggctacaagctcggtactggcgacctatcggaggacgcaactattggcgctctagaggactttgaggatgtctttggcatggacgttggggccacggttgacatcctctcgctagaggatgtaatcaacgggtctcccaagctagggtgtagccgtaggttgcaacgatcataa

SEQ ID NO: 34708 - DNA, 375 bp, Zea mays
  Peptide Sequence Number=SeqID_78083
atgaggctcccctgggccttatatacacgactgagggtcactcccagcgtacatgatgatgacattcttccagcatatcccctaactaataggaccaaggatcgtatctccgaagtagcccccgtgcccctagggattcccaagattgtgcttgccacatcatcttccatgtgcagccaagtgatctcgatgggtcaaaggaaagacttccaaatctctttctaccagggcatgatcccgatcctctcgtcgtggacatcctcgaatttctgggagcgcttggctgctacccatatagcgctcgaggctgccgacggtgacgtggctggtctccacgctcgcctggtggaggaggaccgtcatgtcgtgggttag

SEQ ID NO: 34709 - DNA, 588 bp, Zea mays
  Peptide Sequence Number=SeqID_78084
atgagcctaccatgcaatgggaagagcctccccagcatgaagcatggtgatgaaggaactgacgtcggaacatgcggcaacatcatgaagctggggaaccgaatccggtgcagtaggtatcccgaggcgaagcctcagaggtgggaagaactcccaatgaacgaatgcaccgagaaaagtgtaactctcaccgccgcgatcaccgacaggctcaagaccgggagaaaaatccaattgaaaatgccttggctcgagcagccaagactttgctcagtctggagcaccgaactatccggtggtgcaccggacagtgtctggtgcgccaggctgactctggcgaacaggctgctctcgggacttcgaaggcggtgtacggctataattcatcggactgtccggtggtgcaccggactgtccggtgggccgttcacaggcgaactcgtcgctctcgggaattcattggcgatgtacggctataattcaccggactgtccggtgtgcaccggactgtccggtgagccaacggtcggccgggccaacggtcggccgcgcgatctgcgcgggacacgtggccgagccaacggctag

SEQ ID NO: 34710 - DNA, 1603 bp, Zea mays
  Peptide Sequence Number=SeqID_78085
atgaagaaaatagacgaggaggcccaccgacaaaaggatcaggtgctcaaagtggcagataagtggtacctctcgcactttagggtagactgccaccagaagaccgtccaagagagggagataaacgtcgagtatatgttagccgtgctgcaacagcttcccacgatagccccgtctttcccacggcggacaccgagttctcttccaccggccgcggcttctgccgacaccgagcactcctccaccatcctcgcctctcccgacgctgaattctcttcctccatcagcgtcctactccccatgcacgagcacgacaacgtcggctctgggtcacagcctaatgcgcccttcgccgctgacgccgacgatttctcgttcttatttgactccgacgaacacgatcacctcggggccgttgacgcgatgacgatgatgccattgccgccgcaggtttttgctgatcttccggtgaaccccattcccagcagcgagagcagcgacggtcaggcccaggcccaggcggcagctacagccgtggccagccgccgggtgtgggtccggaagcggagcaccgagtggtgggaccacctggacgggccctcgtgcccggatgcggagttccggcgcgccttccgcatgtcgcgcaccacgttcggcgcgctctgcgacgcgctcggcggtgccgtcgccaagatggacaccgcgctgcggaccgccatcccggtgcgccagcgcgtggccgtctgcctctggcgcctcgccacggccgagcctctccgcgaggtctcccgtcgcttcggcctcgggatctccaccagtcacagcatcgtgctccaggtctaccatgccctggccgccgtgctcaggcccacggtcatctactggcctggccctgactccgctgcgaccgttgtcgccaggtttgaggccgccttcgggctcgctggcatcgtcggcgccctctacaccacgcgtgtccccatcgtcgcgcccaaggccaacgtcgccgcgtactacgactgcggcctcaccgagcgaaaccagaaggcgtcctactccgtcgccgtgcaggccgtcgctgacgccgacggcgcgttcacggacgtctggatcgagccgggatcgctatctgacgccgccatactcggcagatcggcactttctgggctcctagcaggaggccacgggcagggccagcggctagtcggtggcacgagctatccgcccatggactggatgctcgtgccgtacgcccaccagaacctgacgtggacggagcacgcgtccaacgagcgcgtcgccgccgcgcgcggggtggcgcgcggcgcggtcaggcggctcaaggcgcggtggcgctgcttgcagcgccgcagcgaggtgaagatgcaggacctccccagcatggtcgccgcctgctgcgtgctgcacaacgtctgcgaacgcgccggcgaggagctcgaccccgagctcatgcagtacgacctcgatgacgacgacggtggcgtcatcgctcacgacgccgcggcggccgcaccctcagcacctccagcgcaggcggcgggggacagcatcgcgcacggcctcctacacggcggccacgcta

SEQ ID NO: 34711 - DNA, 1287 bp, Zea mays
  Peptide Sequence Number=SeqID_78086
atggcggacccgaggcgtgaggcgaagagagcgcgggggagcgcaaaggttgctgcctccggcggcagccaaccggtgccaactgcgaaaccggccgcgcctgggtccagcaagccgtcggtgggcgcgaagacagctaccgctggcgtgaccaagtctcccctggttgaagctgcgaagggacgggagctgccctcgccggggaaacatgttaccgacttcggcatgaacatcagcgtggaggactattttgtcgggtccggcgagggacatatggttgttgtcccgtcttcggtggcaaccgctttgccatcggcggaggtaagggcgagggggaccgcgcaggacccgtgggccgccttctgcgcgagcggtgagattctgacagccgctgccgctaaggacgtggcgggcaccatgtcccagcggctgagggaggcatcgcagtggctatcgcagcagctgtcgcagcagctaagtcaagcggctgacttcaccgaccgctttgcgtctggcgtcctgactgcggacgtggctgccgaagtcgagagacttcgggcacagcacgcggatgtcgtccgcgagaagtcggccgcggagagcaaaagccgccggttggtggagaaggtggccgccttggaggccgagaagacagaccttcggcgccagctggcagaagaaaggagggaggcgaaccaggtcatcaccgaggcacaggctacgcaggctgaggccaaggtggcgcgggcggagggaagtctcgccagccaacgcgccgaggagtgggaggcgaggttcaacgccctgcgtggccgcgtggataaggccgaggcctccacgtgctctgaggttgagcggacgcttgcacagttcgtgagttcgtatcgtgagttgggcgcgcgtactgctaacttcgaagtgcccgaccgggaggcgggccttcgcttcctcgaatggttgcaggaggagttgctggatgtgggggcacatggtcgggaggctgtcagggagcgatccgaccgggcgagggagcagatggagcgtgccgaggacgttgaggactttggaagtctggtcggcgcaccgcccaaggtttcggaggccaatccggtgctgcccttggacgccggcgaaggcccctcggccgtggccgttcctgtcatgaccggtggcgaagatcctctgtcggcccctgcgctgacaatcgaaggtgccctggaggtggcggatgagccgccagccgaagaccccacggccgcggccaggccctcgcaggtggctaagtag

SEQ ID NO: 34712 - DNA, 876 bp, Zea mays
  Peptide Sequence Number=SeqID_78087
atggcggcgcgaggggcaggaagggcggtttcctcttctctggctaagtctctcgggttgcgaaaacctaagagggaggcaggaagcggagcaaagaaccatcaccagaccctctcccgggagaagcgggcgacgcttcgccttcgccgtaataaccgtgccaaaaaggctccgggcctccttactgatcagaggttcgaaggctggccccccgaagggttcaacagccgcctcagatcgcgtgggccctacacccactactggctggcccccgaagggttcacagtcgcctcagacgccgagcaagagatgaccagggatcacccgcaggtacttttgggcatgcctctgggccccttgccgacccctaacgaacggggcacggacgtccactcggattacccgcttgcagctcactggagacaccatgttcggcgcccatcgaggaggctcgggggctgctctcgcaaacccggctccggccaaaccgttgacagcgtcaacataccagcccgagaacttgggccccgaccgtacacccgggctacggccagttcgcatgagggaacaaccagaacagccgaagcgttacgcaaggcattaagacctcgaaggagtgaaaccactcctccgaggcctctggggctacacccggcgggtgcgctcgcgcgcacccaccggaacaaaatgcaaccgagaaaggctggtccccttgcaaaaaagtgcgacgaaagcctccaagcgagtgctaacactcccttcgaggctcgagggctactgtcggggaccataattaggggtacccccgagactcctaattctcagctggtaacccccatcagcataaagctgctaaggcctgatgggtgcgattaa

SEQ ID NO: 34713 - DNA, 1542 bp, Zea mays
  Peptide Sequence Number=SeqID_78088
atgggcgccaatgttggaactcgcgttctcggtccctcaagggcactatacggggaccgtcattacataaaagcatttacaaatcgggcccgtaatacaaccggccgcgcggggcctgttacaatgggccaaattcctcgtgggccttcgcgttcgacgaggacgcggggcggggcgacctcatccgagactggcgaaggcatcgagcgaggggtagtgtctttgccttcgccccaacacccgcccgcccgccagacgcgacagttgcgatccgcccgctcgccgcaatccccgcccgccctccgcaatccccgcccgccatgtgaggcatgttggaagtccatcaaccaccggatcctctccagccacctcacccccgtggtcctccccgatgagcacgcgctcacggagtccatcaagcgccgcctcgcggcctcgggctgccccgatgatgcgctctcatccgctgacctccactccaagctctccatccgtgcccccgagcgtctctgtggccgctcctctacctgctcgactcgctctcctcgcacccaacccagcccaaagccgtcagatcgtggcactccgtccaaccctcctgggtacgacgacaacgacgacgatgaggccatcgtcaccccctccatcccctacgacccgatggcgctaaggaaggcgttcgagaaggccgtggtgaagcgactgatgacatacgtcccattcggcgtcttgctctccggcgggctggactcgtcgctggtggcggccgtcgccgttcgccacctcgccgggacagaggccgccaggcgcttgggcaccaagctccactccttctacgtgggcctggaggggtcccctgacctcaaggcggccagggaggacgacatcgacgccatcgaggacgtgatctaccacacggaggcgtacgacgtcaccacaatcagggcgagcacgcccatgttcctcatgtcgcacaagatcaagtccctcggggtcaagatggtcatctctggcgagggctccgacgagctctttggaggctacctctacttccacaaggcgcccaacaaggaggagttgcaccgagagacgtgcaggaaggctcgcgtcccgttcctggacaaggagttcatcaatgcggccatgaacatcgatcctgagtggaagatggtccaacctgatcttggaaggattgagaagtgggtgctgaggaaggcattcgacgacgaggagcagccattcctgcccaaggtgcatatcctctacagacagaaggggcggttcagtgacggcgtcgtgtacagctggatcgatggcctgaaggctcatgcagcatcaaatgtgactaacaagatgctgtcgaatgcaaagttcatcttcccacacaacactccgaccaccaaggaggcctactactacaggatggtcttcgagaggttcttcccacagaaatatgctatcctgacggtacctggcgggccaagtgtggcgtgcagcacaaccaaggccatcgagtgggacgcctacaatagggtcttatag

SEQ ID NO: 34714 - DNA, 474 bp, Zea mays
  Peptide Sequence Number=SeqID_78089
atggcgcctgcggccaacggtcgtccgtgtgatcaacgcgcgacacgtggcccgcaccaacggtcggttgggcacaccagactgtccggtgtgcaccggacagtgtctggtgcgccaactggcccagaggaccaacggtcggctgtgcccggtatggaaggaaatcgagcaccggactgctacagtggttgttcggtggtgctccagactatccgggccagaggctccaacttgtggagattcctcgcaaacgggaaggatactctgaaaggaaaagactgtggtattcaagtgatgtgcggccataggaaccacaagagcaagatcaaccttcttcctctacggtggtgcatcccccaactcaagacgatgaataggtacctcaagaagaagggcaagatcaagggggagcacaagaagaacaggataatgaggaagaagcatcacgagttcctccaactcaagtccgaatga

SEQ ID NO: 34715 - DNA, 363 bp, Zea mays
  Peptide Sequence Number=SeqID_78090
atgctggttcgtggtgcaagtgctagaggaaatcggatcctcgggtcgggcgatgagatagaaagggatgctgcagccacacgggcgttgagtcatgacgtgactgctcgtctggtgttagctttgtcagaaactcgctctattttgctgtcgtctgttatgccccttgccatcctccgccgtatggtctgtctagacgtcctgaatgggagcggagatgaactacccatgtatctgctggacaaacaaggcagacactatcgaagcttcgactcatttgacctgctgctccggaagtttgagagtgagaagaacgaccttgatgctggaagtaccgtgacagatgggttagcaacgtcctaa

SEQ ID NO: 34716 - DNA, 68 bp, Zea mays
  Peptide Sequence Number=SeqID_78091
atggagatggagggatacttgaccgtctcctcaacgacgtcaccggttcttaacgaccttcaaatcgt

SEQ ID NO: 34717 - DNA, 345 bp, Zea mays
  Peptide Sequence Number=SeqID_78092
atggacttcgcctcgcccgaccccagggctcggactcaaccacgacttagaagacgacgaactccgcctcgcccgaccccagggctcggactcagcctcggctccggaagacgatggactccgcctcgcccgaccccagggctcggactcaacctcgacctcggaggaatcgccacctcgtccaaactcggtaaacaagtaatgatgacaccccgcacgctccatgacgacggcaactcccagccccttacgtcagcaaggagacgtcagcaaggattcgacagccccgacagctgtacttccgcagggctccagctctcctccgacggccacgacatcacatga

SEQ ID NO: 34718 - DNA, 1500 bp, Zea mays
  Peptide Sequence Number=SeqID_78093
atggacaaggaccgccagggggctgcgcaaaagcggcaggcggctatcaggattgttgaagccaggccaaagaggcaaaagcgggagtcggcgaaggctgcggcccccggcggaggcaagccgccgctggcggcgaagtcaggcgtccctgcatctagcaaggcgccagaggcagcggcgggcgccggaggctccaaaccggcgaaggctgtgccgccgctcagcgaggtggcggaggccgcgaaggcggcccgagcgctgccgtcggcaggcaagcgtgtcgccgacttcgccaccaacatttgtgtggaggactatcttggtgggtcggacgagggccagcttgctatggttgcgcctgccgcggcgatcgcgacggctggcatagtgccgaaggcgaggggcgaggctcttggctccggaggcgaggtggctgacttcgccaaccgtgctgcgtcgggggccctcatggcagctgtatctgccgaagtcgagagacttcggacgcaacatgctgacgctgtccgtgagaaatcagcctccgacagcaagtgccggaaactgacggacaaggtggccgtgctggagaaggagaaggctgaccttcggcgccaactggcggcggagaggagggaggccaacgaggccatcgccaaggagcaggctgctcaggcgaaggccaaactggcgcgggcggagggcaatcttgccaaggagctcgccgaacatctgcaggagcggctcaccgccctggagagccgcgcgaagggggccgaggccgcggtgcgtgcggaggcagaacggacgtgcacacagcttatggatacatatcgtgagctgggtgcgcggaccggtgacttcgaggtgccggaccgagagcccgggcttcgctgtctgcagtgggtgcaggaggagctgcaggaactccccgctgtcgtggggggttttatgtcgtacgcctccctggtcacctgcgagggggcgatgaacgcgctctcccgtgaagggtgccgacacttcgaggtcttcgaccaggcggatgaagattttgatcgagatgtctataaggttgaagacctcgtggtgaaggattctgccggggccctctacgaccggatgtggggtccgcacggtcgcgaggtggtcagggagcgggcggagacggcaatggctcaggcgtcgcgtggcgagcgggtggacgacctcggggcgctgaacagcgcgctacctgacccggagccgacccctgcggaggccgtgtccggggtcgccctggagccaacccctgagaccgcggcgatcgcggtggctgcccccacgtccgctacggccggcgaagacctacccccaaaggtggccgaaggcgcccctgatgcccccgcagctgttgtgccgtgtgctgaagatcccgcggcggagacggcggaaacaacagcagaagcggcggcggagcccgcggcggaggctcccgcagcgtcagggccttcgcaggtggcatag

SEQ ID NO: 34719 - DNA, 2118 bp, Zea mays
  Peptide Sequence Number=SeqID_78094
atgggcaactgctgcgtgacgccgaaagcagccgacgacgccggcggcggcaagaagcccaaggagccgaagcagaagaagggtaagaagccgaaccccttctcgatcgagtacaaccgctcggggcaggcgagcgcgccaaagctggtggtgctgcgggatcccacggggcgggacatcgcggcgcggtacgagctcggcgcggagctcgggcgcggcgagttcggggttacctacctctgcacagaccgtgcctcaggggaggcgctggcctgcaagtctatctccaagaagaagctccgcaccgccgtcgacctcgaggacgtgcgccgggaggtggagatcatgcgccacctccccaagcaccccaacgtcgtcacgctcagggacacgtacgaggacgacaatgccgtgcacctcgtcatggagctctgcgagggcggtgagctcttcgaccgcatcgtggcgcggggacactacactgagcgtgctgccgccttggtcttacgcactatcgttgaggtcgtgcagatgtgccataagcatggagtgatgcacagggatctcaaaccagaaaattttttgtttgcaaacaagaaagaatcagcggcacttaaggccattgattttggcctgtctgtatttttcactccaggcgaacggttttctgagattgttggaagtccttattacatggctccagaggtgctaaagagaaactatggcccagaggttgatgtttggagtgcaggagtgattctgtacattcttctttgtggtgtccccccattctgggcagaaacggaacagggtgttgctcaggcaatcattcgatctgtcattgatttcaaaagagatccatggccaagggtgtctgataacgccaaagaccttgtcagaggaatgctgaatccggacccaaaacgacgattgacagctcaccaaaacattaagaaggctccaaatgtcaatttgggtgaaactgttaaggccagactccaacaattctctgtgatgaacaagttcaagaagcatgcacttagggttatagctgagcatctttcggtagaagaggctgctgacataaaggatatgtttgagaagatggatcttaacaaggatcaaatgcttagtttcgaggagctgaagcttggtctgcataagtttggtcaccaaatgcctgatgcagatgttcaaacactaatggaagcggcggatgctgatggaaatgggtccttgaattatggagaatttgttacattatttgttcatctaagaaagattggaaacgatgagcatctgcataaggcattcgcatacttcgaccggaaccagagtggttatattgaaattgatgaactccgtgagtcattagctgatgaccttggacaaaaccgtgaagagattatcaatgccatcatccgtgatgtagacaccgataaggatggcaagataagctacgatgagtttgcgacgatgatgaaggccggaacagactggaggaaagcatccagacagtactcgagagagcgattcacaagcctgagccttaagctgcaaaaggatggatcgctgcagatgacgactcttctgcttgtcctgatgttccattgctttgtattcttcgcttgcggcctgtttgaaggattaggggggattgtttatgctatgattccgctgcggaggacgttggtgcccgtccgtcctcttcgctttgacttctcgtgcccggttgagtggtcgacgccgcagccgcacacgtgcctacgccttctgccgctgcaggctgcagcagctgcattggaagcgggctttgcaagcagccgaatcggcggagcagtggagcacgggctgcacatccgaagcaggcggagcaaagcaaagcaagcagcaaagcaggcaagcaaccgtggagcagtgaagatggagcacggccgtgcggccgtcggccggccaacgtccaacgggccaaccggccaagcacaggcgcatggcaggaaggcagaggcagctaggcaagaccgcagcccgcgggaagcagcaagccagagacggagcggttgtgttgcggcggctgcgctgtgcgtgcggcgtgctgtgggtacggagacgggctag

SEQ ID NO: 34720 - DNA, 372 bp, Zea mays
  Peptide Sequence Number=SeqID_78095
atggcatacgtggtattggaagatgccctccttcaaaatcctcaacccgccgtcctccagtctctctcggacgacccaaagacagcccacaatggcgcacatccctgttcacccttcgacaccttcgcttcaaacttcagcttctggctccactcccgcgtcctctgtattctgcgttatgacacccgctggcgtgacaaggacgtgtcggaaggtaatcagcttctcatcggcgggaaggggggcgaggaggccgcgaggcgagagacgccggaggagaagcggaagcggctggaggagctggatgcgctgctggagggggctggtcgagcccatgatgcggcctccaacgccacctcctcctccgggtaa

SEQ ID NO: 34721 - DNA, 975 bp, Zea mays
  Peptide Sequence Number=SeqID_78096
atgcaggcggcatgcaaccgcaccaagggggcgcaccctttcgacttcgacgcgtccagcatggaggcccaggcccacacatcatgcaaccggcgcgtcggttactacgtgcgagaaactgcaccgccactcgcgccagtaccgcgcctcctcgactgcggaaccagtgccgcgactcgaggcgaccctgcgcatgacccgacaagtgccaaccaagcacatcagtcacgggtcagtcagccgcgggagaaggcgcgacggtcgatacggccagaaatgggccggacaagcggcacctttggcaggcgaagcaggcgacgcttcacctccgccataatgaccgcgtcaaaaaaggtgtgccacgtcattcgatttcgtatccttttccacttcctctttctctctcttgccataaggactgggaaaggggatactccaaaagggatccttctccgcaaaggaagtgggcttcgagcccccctactgatcagaggttcgaaggctggcccctcggaagggttcaacagccgcctcaaagcactcgagctccgcgcctactactggtcagaggttcgaaggctggcccctcggaaggtttcaacggccgcctcaggccactcgggctccacgcccactactgatcaggggttcgtaggctggcccccgaagggttcgacagccgcctcagagcacgcagagcgagggatgaccctggcacaaacctgcaaaggcatgatgggcgcgattaaggtcaaggctcagccctctcaagggacacgatctcgcctcacccgagcccagcctcgggcaaaggcagccgaccccggaggattcatgtctcgcccgagggccccctcaagcaacggacacaccttcggctcgcccgaggcccagtcttcgcagagaagcaaccttggccagatcgccacgccaaccgactgtatcgcaggagcatttaatgcaaggatcgcctga

SEQ ID NO: 34722 - DNA, 345 bp, Zea mays
  Peptide Sequence Number=SeqID_78097
atgaagaagcgtaaccttgatggaagtccttcaaaattgatgaagaagatggttacaaagcggatgaaagcagtggaacctcccgacagttggaccaccagactgaaagtacgaccagggcttccacctgttatatctaaagggcctctcctttggacttctgttatccttctcgcttttaaccatcttaaccatcgtgggccgtcatcaacatcgcagtgtatgaacgtggccctcgaccgcggcaccaagtcctgcctgtgcctggattgctggaagaactatctctgcctcgggatcaagaagggcccactgacgagcgcgaagctggtgagagacacctga

SEQ ID NO: 34723 - DNA, 186 bp, Zea mays
  Peptide Sequence Number=SeqID_78098
atggaagatatactcgacctcgacctcggaggagcctccacctcgccccacccagggcttggaccaaccacgtcacaggaggcgccatcattaccctaccccaagctgactcaggctacggggaacaagaccggtgtcccatctggctcgcttcgactctttgctgcagcacggttcaacaagtag

SEQ ID NO: 34724 - DNA, 1303 bp, Zea mays
  Peptide Sequence Number=SeqID_78099
atgacatcagggaaacgtgtgaatagtaatgtgatgaatgcttcaaagaggccttttaagagtgactttcaatatggttcaagaaactctaagccaccacactttaaagaggaggtctgtgatagtttactgaagcccaagaagatggaaacttcacctaagcattatgatcctttcgtcacagaacaccatagactagttctggaatcctctccatgtgaatctgttgaagacagcccaagagttttgaatccggtggtaaaaaagagaatggcttctcctaccaaaaatttcattgttgcagaccctagttatctgcgaacacttagtcagacacatgctagctggatatttggagcgatagctgagctcattgataattccagagatgctggtgcatcaaggttgagtatttccatcgagcatttgttttcaaagaaagcacagaagaaaattcctgtcttatctgtaattgatgatggacatggaatgacatatcctgacatcatgagaatgatctcttttggccataaacgaccaaatggacatcgtgaggatcagattggaagatttggcattggattcaagactggtgctatgaaactcggaaaagatgcaattgttctcacacaaactaaatcctccagatcggtggcctttctttctcagtcttttaatgaagaaaaggataatcttgagatccctgtggtggcatatcgaaaggaagggcagtatatggaagttgatttgagtgtgcagtctgatgctactgcagaatataacttgaacgctattaagaatttttcttccttcaacgagtatttcattggagaaaagttgggcctatttggtgaagatactgggacacaaatctacatatggaatttagacacatggggtactgattacacattggagtggaattctggtaagtcttcagaaaatcctgtgcaccatggtcgtggagacatattaatccgttcaagaagagtcagatcacgtccaggacaaacaagtaacaaggtgctgttggattattctcttcagtcctatctggaagttatgttcttgaatcctcggatgaagatatctgtccaagggtctttggtcaaaagccgcccgttggcgaagacccttaacaagacttctgttgtgtctggtgaaattatggaaaggactattatattgactctgggaaggagcaagtcttacaagcgggttggaggccaaaagcatagtactgacatggggcgtggagtaataggagttgcagatatcacaaatctcattgatgatgaagatg

SEQ ID NO: 34725 - DNA, 1695 bp, Zea mays
  Peptide Sequence Number=SeqID_78100
atgactttcgactatatcgataacggaaccctgaaaacgacgagagggactttgagcggcaaggccgaccgagccgagggactcctacgcctccgggatacggatacctcactcatcaccttccgcgaaaacgggatcctaaaaacgacgagagtacacgtaagcggcaaggccgaccgagccgagggactcctacgcctccgggatacggatacctcactcatcaccttccgtgaaaagttcagacatcgtcagagggagcagcagcaccctcggcgtcgtttccaccctcggcggaacctggcccagcctcagacggcgacacgggtggaaggatctccacctcgaaggaggacgccagcaccgcgcttgggccctcacagccagggtcttcgacagggtcccggcccgagcagacacctcggctggccgctccgtagccacaaccagctgtcccccgaggacctcagcccggctcacggcctcgacagcgtcactctggggttggtcccgctcgcggatgacctggccaagccccagtcgccgctgctgcacctcctcggcctgggaagccacctgctcctgggccgacaaagcctcttttcgagccgactccgcctctgtccacgccaacaccgctacctccggcttcagctcatcacagagcggccgaaggcgagtcctagtgctcgaaatgaggaagaaacacgacattacactcaaatgcccagatgttcaagcctcgacagccacaatgaacaaacacccatactcagggtaccattacaaacgggactccggttccactcccgcgggtatgaacaacctccacaccagagggcccacgggataacaaactccaggtggctcgccggtgaccactgcaccagcagcaacaacgacctccgcttcgggcggctaaacagaagcagcgatgacctcagggcaaacgctgctgtggaagggccctcgcccatgtccccacacgaggggcgaggacaagccatcaaagccaaagagtcggaggtccgaccgcaggtggcgctgacagtctcgtcggcggagacaacctcctctagctgccaccacctcagcaccgacgacggcgaccacctgcccaccaacactgcaccggcgaatggcggtcgccccaacctgcaccagcagatccccactcacgtcctcccagacgggtcggcgccgacctccgcgtggaggcgtcgtgccggagtgaggacaagacaatccaagaacacgaatgccgcccatgcggcgtacgacgtcttgtatggtcccccggtgcgcacggcgcgacagccgcctgtgcggtggacggacagcaacgcccggaccaagcggcaggaggcggcgtcggaggccgcgccagagccagctgcgccaggcacgctgcagctgacgacgctggcggccgaccggtccaacgttgtcaaagttcgccccctccacaagggccgccctgcttgcttctccccaccaccaggcctacggtcatcatcctgggtgaccgccggcgggggactacagccgggctgcatgatgaaaatccttgaagccgagcgatggctgaagggcgccaacccccgaaaggtcgcgctcctccaacaacagcaagacgaaggcaacgcgggtgctccccatccgggggctcggaaggtggaagggcgcgatgcatga

SEQ ID NO: 34726 - DNA, 306 bp, Zea mays
  Peptide Sequence Number=SeqID_78101
atgcaggtggcgtgcaaccgcaccgtggtggtgcgccccttcggcttcgtcgcattcggcatggaggcccaggcccacacgtcatgtaaccggcacgcccgttactgcgtgcaagaaaccacaccgccacttgcaccaatgtcgcgcctcctcgactgtggaaccagtaccgcaactcaaggcagccctgcgcacgacccaacagtgccaattgagtgcaacgaccacggggaccgaaaaaggggatatttcgaaagggattcttctcagcaaaggaagcgaaccctaagccctcctactgattag

SEQ ID NO: 34727 - DNA, 3474 bp, Zea mays
  Peptide Sequence Number=SeqID_78102
atggcgctttttgaacttcactttccgcgctccgtgaaaaccctagccgcccgccgtattgccgctcgtctgcccgccgtgctcttgttcgccggagatctggctcgaatgaagcagaccgcccgccgccgccgatggtacgtagcgatgctgacctcctcttcttccgctgccgctacgccgccggccaatccctcgccgccggccgccgcctcgtctgaggagacgctgagtagtttgatggcggaggagttgcgcgccggcgattctgttgattttggagtgtcgcggatgtcgtcggtccgcatgcaagaaatgcagcggttgggttatttcggcggcggagttgctcgtgtcccggggacggaggaagtccccgagccggagggcgagttggttgttttcgaggcgttcttcgccgccggtctccgcttgcctgcgcaccgatttgttggcgaagtcggcggacagccatcggtcgaagtttttgcgaagtattattgtttgcactggcagaagaggatgattggagacgaagtcgctcagtttggatcctgcacattcacgccgaagaccggcaagaccacgatgcaggtagtcgagttggttccttgcgcccgcaacaagtggggcaactggaatgaattttggttttacgttgctgagggtaccgtcgaaggccatgagggactccccgtgtctgagatgtgctctcatttttactcagtgtacccgccctttgaagtggcggaggaggatgtggacgagggggcccttcggtgcaccgccggcgtgagcagtgggcgcgatttggttgaagagtttgtggcatacggggtatggcccttggcgcatggctgggcgttgggcgaagtgtgccctcgccagatgccttttcatggtgggagggtggtgcgaagttctgccttcgcgctgaatctgcaaagccgcgacccggccgcctttgtgcgtgaggcggaggatggggcggtgcggctcgttggacgttacgtgccgaggacagagggccagcgcagctttgacatccgcgagtcgaatgaccgtttgaacagggtttttgaattaaatcaattgccatatgacggctatcctggtcaagacgaagtggaccgccgtgggaagaagccggtggtggagactggagacgaccctgcgccggcggccgcctcatcctctaaaaagagaaaattaggtactgctatgggaggtcttggggtttctgatggttttgctagagagttgatgaggacgtgcgcggcccccgggggaaggatgtcttcgcccgagctccgggagtcgtcggctcggatgctgagggttaccgggggttgctggcctaggaatgttcctatcccccgcgcgggtggcgaggacttttttacatctcgcatggttcatgaatggagggtttttccttacgggcggaatattgctgctgttgtgtcggcagtgatggacaaggatcgccagggagccgcacaaaagcgacaggcggttgtcaggctcgttgaagccaggccgaagaggcatcggggggctgcgaaggctgcggcccccggcggaggcaagccgccactggcggcgaagtcgggcgcccctgcatctagcaaggcgccgaaggcaacggcaggcgccggaggctccaaatcgacgaagatggtgccgccatccagcggagtggcggaggtcgtgaaggcggcccgagcgttgccgttgtcaggcaaacgtgtcgccgacttcgccactgatattaatgtggacgactatcttgttgggtcggacgaaggccaacttgctatagttgcgcccgccgcggcggccacgacggctgccgtggtgccgaagacgaaggtcggggctcttagcgccggaggcgaggtgtcggccctcgcagcggtcagggatgaggcgggcgctgcgtcccgccggctgaaggaggtgacggaggcgctgagtcaggtggctgatttcgccaaccgtacaacgtcgggggccctcacgacggctgtatctgccgaagtcgagagacttcggacacaacatgctgacgccgtccgtgaaaaatcggccgccgacagtaagtgccgtaagctgacggacaaggtggccgcacttgagagggagaaggctgacctccggcgccaactggcgggggagaggagggagactaacgaggctctcgtcaaggagcaggctgcgcaggcggaggccaaattggcgcgggcggagggcaatattgccagggagcgcgccgagcagctgcaggagcggctcaccgccctggagagccgcgtggagagggccgaggccgtgtcgcgcgcggaggcagagcggacgcgcaaacagcttatggatacataccgtgagctgggcgcgtggaccggtgatttcgaagtgccggaccgagagcccggacttcgctgcctggagtgggtgcaggaggagttgcaggcactccctactgtcgtggaggggttaatgtcgtatgcctccctagtcacctgcgagggggcgatgaacgcgctctcccgcgaggggtgccggcacttcgaggtcttcgaccaagccgatgaagattttgagcgagatatctataaggttgaggacctcgtagtgaaggaatccgccggagccatctacgaccggctgtggggtccgtatggtggcgaggtggtcagggagcgggccgagacggcgatggctcaggcggcgcgtggcgagagggtggacgacttcggggcgttgaacagcgcgctgcctgacccggagccgaccccggagactgcggaaggcgcaccggatgcccccgcatccgctgcgcccggcggagacctgcccccagaggtcaccgaaggcgcacctgatgcccccgcagccgctgcgccgagtgctgaagatcccgcggcagtggcggcggaaacaacagcggaagcaatggcggagccaacggcggaggctcccgcaacgtcagggccttcgcaggttcaagattttgggcctgcgcacgcaaccgctactgctaaatttttggcggcttcgaccgcggaaggtggtaatgaatgtggtggatctgcatctgagttttttgattttgctgactctgggagctcggttgagtggactgaggagtcgtcggaggaggacttggactactttgcggccttggatgtggctgcggcggaggcttcgccgcacgccgtgggcgcagaggatgtgccaggtcctagcaccgggcgccgacggcgaagggcggttgcgaagcgtagagttagtggggcgaagggggctcggcttcgtgtgaatagggctggccggcaggaactgttgtctttgccggccgccgcgagtacaggagaaggggaactacgaagtctttttgcgggtgaggagcttaggataatgttatttaattatagggagatgggaattattcctaaggttgagccgatgtag

SEQ ID NO: 34728 - DNA, 576 bp, Zea mays
  Peptide Sequence Number=SeqID_78103
atggcggatggcctccccgtcatcgttctagagactgcccctgctccgcgcggagccgctcttcaacgcgactgcacgactattgttcctagcggcggtggtgttccgtggtgtgacagcaaaatcgacgatcgcaggaacgcgctcgactttgactctccaggcgccgctaaccgcatcgtcccccgtggaacaagtggaggtgcagttctaatcttggccgctgccgtgattgcagctaagccagaagaaaaggcggaagaagagccagaattcccattagaagtcatctcaaatgctggagtgatacaaaatcttccattcgaggacgttatgcaactctgccatttgttctacaagattgctattaaggttgtagagaatgatgacatttacataaaatactccaacgtcaaggcttcttctactcaagggacgcaatatcgcctcgcccgagccaagcctcgggcgagaacagtagtcccaggcgaattcacgcctcgcccgagggcctcctcaagcaacgggcgcaccttcgactcgcccgaagcccagctcgggcaggcttcgttgtga

SEQ ID NO: 34729 - DNA, 924 bp, Zea mays
  Peptide Sequence Number=SeqID_78104
atggccaagaacaagccttccaacctctcatctgacaggaaagaccatcacctctctttatgtagcttacagaagcaaggatggtcgcaagtgtacgagtaccggacgcgcagtggaagccaccaccataacttcctgggtggcattcaaagagttcatattataaaaggatgtgtggatgtatcacttctattagaattttttacaggagatggagaaggaacaatgatcgctagcaataaaaacatttggaaatttatcatttacaatatgtcatgggaattccctaattgtacttttcttatggatcagaccctcactaagcttcgctttacaaggaatgattttactgaggacgataaagcgatgttcaatgtgaacaaaatatttttggagaatgcatttgatgctgttatgcactttgttactgttgcttatgttggtgtcatgcaaaggaaatgctcttacaagctcccccagattcaccagaggggatttttatggaggcagcaaagtcaaatatcttgggccttccggctcgagaaggaaaagaatgtgagggcatggctttgtcaatcagaagctgattaccaggacaagttactggcatgtggagctataattgttgcacagctacgagtcagagttctggaggaaacccaattcacatgctctgctgggattgctcacaataagatgttagctaaacttgtcagtggaatgcacaagcctgctcagcaaacagttgtcccttcttcatccgttcaagacttactagcatcactacctgtgaaaaagatgaaacagcttggtggtaagcttggaagttccttgcaggatgatcttggggttgagacaattggtgatctcctaagttttacagaggaaaaattacaagagcagtatggagtaaatactgggtaa

SEQ ID NO: 34730 - DNA, 249 bp, Zea mays
  Peptide Sequence Number=SeqID_78105
atgaaggaggtctctatcctctgcgatgcgaagattggcctcatcatcatctctagcaccagcatgctctacgagttctccaacaccaaatcgagcagatttggaaggctgcagggagtgaagcgtgcgattgcagggaggaacctttacaagaggtgcagctgcagctgcagcacaggggatgccatggggatgaacatgatctccaaaggtgtacaaaatgtgctggactgcctccaggctccttga

SEQ ID NO: 34731 - DNA, 888 bp, Zea mays
  Peptide Sequence Number=SeqID_78106
atgacggtcagttggcggagtccgaaggagttgcaggtgaagaccctgagcagcagctggttgatgaaggcaagtggtgacgaggatgatggttatgattatgcttatggtactgccacatggagaggctgcaccaccgcctccacgaggagcaggagcgtcgacgacaggagctggacggagcagcaggactcttctttctcacttcagcaggtgatagagtctgtgaggagctgctcccctgtgctcccgctggaggcgccccctgcaccaccactgagcgccccagccactggagtagctgctggaggagacccagacgacggagatggcgacaacagctcgagccacagcaccgacctttcagaggagcagaagctggaaggatgggttgcccgacccatcacccgtgacgccgctcgcagcacagtcgcagggtttaccccggaccgttgggaggcgacctgcttggtgcgccgtccagagaacagtctccggggtgcggaggtctgctcagagcactattccatctctaagcgggactcagctgaggtggccatgcaagatgtcacatggcgtgcgctttcacactactgctcagtgctcggcggggtagctgatggtctcaacctgaagtattacccccatcgtccatctggcaacacaggaggcgtgattgtctcacctgttgctgaggacaatcctaggttgagcagcacaatcaacctagccaccatgctaaacacggagctggaccatgcattagatgagctgagtagggctcgtgctgagatcgcccagctgtgggctgagcgtgcggagcatcgtcacatggaggatggctcccccgctcccgtcgggactcagcacccgtaccgctcaccttag

SEQ ID NO: 34732 - DNA, 2169 bp, Zea mays
  Peptide Sequence Number=SeqID_78107
atgtccggtggggatggacctccttccgttttttatggtgacgatttttcatattggaaaattcgtatggaagcatatttagaggctatagacattggtgtctacaaagccgccacacaaggattccccgaacctagagatcccacaaatcttgtaggtgaagagtttaactatgagaaatggaatgctaaggccaaaacaccctttttagaggcctttgcaaagatgtgtttaatagagttagaaaccataaaaatgctcatgatttgtggatggacatatgtgctctgcatgaaggaactagatgaagtaaatggcttggggcttacacaaatttcacaaccggatgttgtgaggaagattctcagtgtcctcccaattgacaaatatggacacattgtcactgtgctgcatcagatggatctttcagttgccactcctacacatatattgggaaagatcaatgctcataagatgtacatgcacattaatgacaaggatgagtcatcttccaagagaaatgatttgactctcaaatcaaatcaagaaataaaaggaaaagctaaagtacaaattgaggaagaattctcaagtgatgatgaccttgatgctaacattgccttgatggtgaggaagaccaccaagatgttaaagaagctcaacagagaaggcatcaaatttaactcaagaaagaagaaattcttttcccgcaaaagaaagtccatttctgaaatggattgctacaactatggagagcttggtcatcttgctcatcaatgtaacaagcccaataagaacaagttcaagggcaagaaagaagatgacagcgatgatgagaaaaaggaaaagagattcttcaagaggaaggatgggaagcacaagaggttccacaaaaagaaaaatggaaaggcatatattgttggtgactggctcactgacattgagtcatcaagtggatcttcttcaagtgaagaagaaaatgatgaaaaagttgtcgccatcgctggggacttctcttcaccaccaccatcgccatcatcgacttctcacctatgcctcatggctagaggtgaacgaaaggtacaaaatgataacgatattattgatgatagtgatagtgatgatgaatttgcttcaccttcctatgatgaactagctgacttgcttaaagaatacactcaaatcattaggaagtcaaaagctaaatgtgataagttgaaagatgaaaatgaatttttgaatgccaaatatgacatagttatgaaagctagtgatgaaatgaaagaagaaaacaaaactatgccatccactgtaaatgagcttacatcctccctaaaagatgctaaggataaatgtgacaagttaaatgaagctaacagggagttgaaagatagactagtgaaaattaaggaagacgatactaagattaaatttgatcatgataatcttcttgttgaaaatgaacttttatcttgcaatacacatgaagctattaaccttgttgttaagattgatgcagcaacctcatgtgatgatttgagtcaaggagatcaaactagtctacatgatgaactgaccgaaaaagttgaagtcttgacattagacaaccaaaaattgaagagatacttgactgatgcaactactagaggaaaggttgccattaagaacaatgatttcaacaatgagttggcagtggataatgaaaggcttaaaaatgaggtcaagaaacttaagagtgaaaatgaacatcttgcaacaagtgtgcaaaagttcaaaaaaggccaatacctccaaaatgaattgctcatgaacactgtcatgaaaaacaacaagagtggtattggatacaattcttttgtgcaaaagaaagctactactcaatacaagccaaagcagactcataagcctatcaaatgctttgagtgtggaaaagaaggtcactttgcccacaactgcaaagccaaaccaccaactcccttgcctaagcactcaagaccatttgctttcaatgctcattatgttctaagaaaagtagcaaatggaaaagtcaaggttacattcctaggtccaccaagcaagagtagacctagacaaatttgggttgcaaagtccttgattgagaaagtcactggtcctattggggacttgttctcaaatgctatgagttaa

SEQ ID NO: 34733 - DNA, 648 bp, Zea mays
  Peptide Sequence Number=SeqID_78108
atggcgcctcctgttgacgtggtcggtccgtgccctaggttgggcgatgtggaggctcctccgaggtcgaggttgagtctgtcttccgaggccgaggtcgagtccgagcccctgggtcgggcgaggcggagaccgtcggcggaggccagggctgagtccgagccctggggtcgggcgaagcggagccggttagtggagcggcgaagtgactgcggtcacttcggctctatcgactggaggacgtgcgtcaggataaagctttgtgctgatgggggttaccagctgagagttaggagtcttgaggcccccgaggcctcggaggagtggtttgactcctccgaggtcttaatgcctcgcgcaatgcttcggctgggcgagaggacggtcaaggacagactcgacttttttagatacgcccctgcgtcgcctttccgcaaggaggagggggggaaagcgccatgttgccctcggagggcgccgaacatggtgtctccggtgagctgctggcgggtaatccgagtggacgcccgtgccccatttgttaggggtcggctagaggcccggaggcgcgctcaaaagtacctgcgggtgatctgccggacccggtcccctgtcgacggggtccgagggctcgatgcctccctctga

SEQ ID NO: 34734 - DNA, 441 bp, Zea mays
  Peptide Sequence Number=SeqID_78109
atggcggcctccagctcctccaactcctcccccatcggctgccgtcacccaaccctcatcttcatgcgcagcacaaccgtccccaagcgcaaggatcgcctcgtcgagcgcgcgccctacgcctgccccgtcgtcccccgcggaggagccggagaagaagacggtcaagccggcctcggccttggcctcctggctcgggctcggcagtacggactccacctcctcccccaccgcacccagtcgccgctcgcccgctcccccctcaacctccaagcccagatcttgatgtaccagctttgcaacaccatggccttcgtccacgaccctaaggtgctgcaccgggagctcaagttgcacatccttctcaaggaccacaagaccatggtgctcaagatcgccgacctcagtcttagccacgccatcaggttcatggagatctag

SEQ ID NO: 34735 - DNA, 825 bp, Zea mays
  Peptide Sequence Number=SeqID_78110
atggtcgcctttcaagggggtcaccctccttttaaaggcgactctccctacttgcgtccccagccgtcgtgggctgagtcttctccaacacgctccaaggtcctccccctacggcgcgggggctgggtcccacgcgtcatgcaagctggcccagagcagaaggagccaaaccgccacgcgcggtgcatgcaatcgcccagcggttacgagcattcctccaccttcgcccagaccagcgagcgaaagggcgggcagccatgcaggcggcatgcaaccgcgccaagtgggtgcgcccctccgacttccaatgcacccagcatgggggcccacgcccacgcgtcatgcaaccggcgcgccggtcgctacgtgcaagcaactgcaccgccactcgcaccactgccacgccttctcaactgtggaaccagtaccgcgactcgaggcaaccctgcgtacgacccaacagtgtcagccaggcgtgacggcggcgcctctggcatgggaagcgagcgacgcttcgccttcgccataatgaccgcgtcaaaaaagaggccgggaaagggggataccccgaaaaggatccttctccgtgaaggaaacaggctccgagcctccctactgatcagaggtttgaaggctggcccctcgggggggttcaacagccgcctcagagcgcgtgggttctgcacccactactggtcagaggttcgaaggccggcccctcgaaagtgttcaacggccacctcaggccactcgggctccgcgcccactactgatcaggggttcgtaggctggccctcgaagggttcacagccgcctcagacatag

SEQ ID NO: 34736 - DNA, 321 bp, Zea mays
  Peptide Sequence Number=SeqID_78111
atgacgacaaaggaagtcagcaacagaggccacagtattcctcgcaagcttcggggcagcaacaaagctatcttcggccgccagctccaaggggcagaggtgccaggggcttcggaggaaggtttggggatcagcctaggaaaatttattgcttattctatgacttacagagtccaaaaagttgccgaggcacaaaaagccgttttcaaggcacaaatatcttcaaagttacaaaaagtcgttctacggaacgcagccttcggccagaagttgagtaacgacttcgtccataatggtttcagccatgctaataatttctaa

SEQ ID NO: 34737 - DNA, 198 bp, Zea mays
  Peptide Sequence Number=SeqID_78112
atggcgccccgcacgctctatgatgacggcggctctcagcccccttacggaagcaagaggacgtcagcaaggactcgacagccccgacagctgtccttccgccaggctccagcgctccttcgacgcccacgacaccacacgaactgggtgccaaaacctctccggctgccaccatggcatgtacacaatgtttgctaa

SEQ ID NO: 34738 - DNA, 507 bp, Zea mays
  Peptide Sequence Number=SeqID_78113
atgaactccagcttcatcgggctcaagcccgctgcggcagcagcccaggccaacaccgcggctgcctcgtcgccgatgaagcagcaggtgcaggtcgcgcccgagggccgccgcgccgcgctgctcggcctggcggccgtcttggctgtcactgccaccacggccggatcagccaaggctggggtcttcgacgagtacctcgagaagagcaaggctaacaaggagcttaacgacaagaagaggatggccaccagcgctgccaactttgcgcgcgcctacacagtcgagttcggcagctgccagttcccctacaacttcactgggtgccaggacctcgccaagcagaagaaagtacccttcctcagcgacgacctcgagatcgagtgcgaggggaaggagaagttcaagtgcggctccaacgttttctggaagtggaaggtgactgacgcatcgttagactcaaaactcatcaacgttatctgcgaagtcttcgtcatcaccgtctga

SEQ ID NO: 34739 - DNA, 1569 bp, Zea mays
  Peptide Sequence Number=SeqID_78114
atggtacctgacggtcgcagcgggtgcgggtcggtggcttgggtcggggacgtccacagcgggttcggtgactgcgcagcggacgccgacgggcggatccggggcacggctgcggcaggggcgtccgcggcggcggtcggggccagggccggggcgggcgggggcggccgtgcgcgtcgggggccgggcacggcggaggcagccgcgacggcggctcgttcgggcggggcggccttgcgcgcgtcgggggccgggcgtggcggaggcagccacggcggcggtcgggtcgggcggggcggccttgcgcgcgtcgggggcggggtcggctgggcgcgggagcggcggctggggctgagggagaggcggcggcggccgggggcggggtcggccgggcgtgggagaggcggtcggcgcgctggagacagagagacgttgagaaagcccaccggcgatctgctctccggccgtgctccggcgacctctggtgcccctgctcaggcctcctcttccctcttcctcaatcatcaggtcaggatgtcgcgcacgaagaatgtgtcagcgctagggggaggagatgacgaggaccctcctcgcccctttaggcagtgtgctacagcggccagggtacgtcggttccaacacgtacttgtggagtcttggctacctgctcaaagagaccctgcagcggcagatctattcagcaccaggatacatgagtatttctttagagcacagttgtcagctcagattgctctgcaagcgcaccggctattgggtctccctgccttcctgctagcagccagtgcagactctgaggttcacctctcatatttgcctagacttctgactcttctgacttccagcggcagatatgttgaggaatgggttcgagttttctatgcttctgtatgcatcgaccctgatcaccagtggatgaggttctgctttgagcgagaggatgttatacttcatgccaaccagattcaccagctgtttggattcaacgagtcatcgactcgtcttcacagcttgtgctacggtacctctgatcctcctcgtcgccctcacggcggagttcctccagctacatctcacgtcgcggccttgttccgaccgcccttctcagatgggttgcgacattctccggccgatttcactacagcggccaagtacctatatcagctcatgagacggacgcttttgccatggatgggttacagggaggctgctacacatatccagctctggctcctcggtgccctgatctctcactcagagtttgatgttgttgatttccttatctgtgagatagaggacatgttcgagacacagggcgcaacagttcccgatgatgatgatgatgatgattttgggattccgccttcgcctccccgctcccatgatcatgaggctgggagttccagtgttgttcctgctgcccctcctgcggttgaccctgctctgtctgtgatccttcaggcccttacacagcagcagactcttatggcctccgagcaagctcgactggcatccgagcaagctcgccaggcagctgagcaggctcgttag

SEQ ID NO: 34740 - DNA, 738 bp, Zea mays
  Peptide Sequence Number=SeqID_78115
atgactaccagccttgtggtggagagaagcgagtcgggctacggcctccccctgccctcagcttcaaggatgttcatcatccatgctggggaggagggcaagccgagtgggagctttgccttccgcatgggctggcggcccgcttcttcctccaacattcgagggagaggggcgttcgccagccttgcggaggaggcgaactctgggttcgcggggccggccatctgtggcgctgtcagctgccgcgtgtctggctcctcggtctgggtggctctagcaccgccttcggcgctgccttctgccgctggggcggagcgtggctgcccatccaccgtacgggcgatggtcgcgccgtgcgcgggttggccacatccacggcttctcccgtgctaccggccgcactgggaggctgtacaagacgtcccgccgcccatcgatgcagaggtggtcgctgccactggtggggctgatgcggtcgcctccgctggctcatggtacgggaccgggctgagcggctacatggtttccgggccccccaggagacaagtgcctgttcttcagagccggacctccaggcttgatgtgttgaggttggataccagcgtttctgaaagggttatcgacaatcctcgggaggcaaactcgccgggatctggatctggcggtggagcgtgcaggcccacagtacgggaccaggctgagcggctgcacgggctctggaccaccccaggagactaa

SEQ ID NO: 34741 - DNA, 387 bp, Zea mays
  Peptide Sequence Number=SeqID_78116
atggtgccattaagtacgatgggcacgggccagtcagccgtgggaataagcacagcagttggcaaggccataggcgggccggtagtaattgcagcaacaggtgcgcgggagcagcagtccaaccgccaaccagactttggtcccacctgcaggctcgcatcctcccctgaggcaggcccgggggccactgttggtaccctaagtcagggataccctcttctacaacataaagacgccgcacccatgcgacgtctcctagccacacgggggacgacgcctgaccccaccacatgggcaggccaaagggcaccacgtggcaaggagggacagcacaccccagtaggtccggggcccccacagaaggacaccggaccccgatacatataa

SEQ ID NO: 34742 - DNA, 153 bp, Zea mays
  Peptide Sequence Number=SeqID_78117
atggaggcgtcactgcctctgccgcgccctccacttcctcgttctcttgctctggtcaggtttcccgaaaattttccgttcccggtggtctgggggaaacggttccgaactgatttcggcaaatttcattcaaaatttttaaaactgatataa

SEQ ID NO: 34743 - DNA, 357 bp, Zea mays
  Peptide Sequence Number=SeqID_78118
atggatcctaaagggaaggcaaaggtgaccgaggaggagatgaagatcccctcaggtgacacacccaagggaggacagaccgtcaactctgggttcgacaagaagaacttagagaggatggaatgttttgattatgtctttggagtgtattcctatgctttagtattgaatgagaagatgaccgttggtgaagttgaccgttgctctattggctcacctgacagtccggtgaattttagtggagtggttttgagaaaacccgagagccgccagttcgtgaagtgcttcgcctgggcactggacagtgtccggtgcgccactggcagcaccaaatcttgtatgctccaagctttgtag

SEQ ID NO: 34744 - DNA, 1563 bp, Zea mays
  Peptide Sequence Number=SeqID_78119
atggataagagggttagtgtagccccaggcttacatggagctcttgtcacaatagacgatacaagagggaaaatcatggtgaggaatatgaagttggtagtgttggcttcgtggtttaggctcaagtacccccatgtcaccattggggccctcgcatcttcggcaccaatcctacagttcgactacataacaccttggagcagcttctatgatgttgtctcacaagactataaggtcataggtaaggtaggcctaggatatgtgctcatggccaatgaagatcatcttgcatctatgatcctcgagtgttccacaaactcagttgaggtgaactcccctccacaatcaatgtggaacaccttaagctttatctcggattcaccttctgcccatgccaggatgtgtttgatggcgactgttgcacgatccttcaaaggaatcatagctacccacatataccgactgagctcatctaatagcagaaggaagtacttgtttcctcctggtgaggcccacataattggaccatacaaatcactatatgtatcagctccaagagctcctgtgcacagtgctttgcaaaactatgagcttaaacttacttttagaaaatacttatctactgcaaaactttataattttaacaaatatctaaaagacatgtctcttaagagtgttgttcttgctaactggtttctagagtctgagagcttgaactgcttcagtgtgatcaaggcagcctgggatgtgctggaggagaggggctccaatggcaacgggctcgttgagctcagtaaattgttcagagcctgcaagactgtgaagtacgctgattcaattcgaaggtggcttcggacagcattcgtctcaattgccatgatggactacccaacaccggccagtttcctggagaatttgccggcctaccccgtcaaggagatgtgcaagatcgttgatgggttccctgccgacgcggacatcctagagaaggtgttcgcagcggcgagcttgtactacaactacacaggagaccagacctgcaaccagatagaggacgaaggcaacccccgttgtcttaacctcaattactggggatggcaggcttgcacagagctgatgatgccaatgtcatccgcaaacgacagcatgttcccgccacacaccttcagctacgaggacaaggcaaattactgcctgcaaacgttcggggttcgtcccaggccacattggatcaccactgaatatggtggatatagaattgatgaggtgctcaagaggtttggcagcaacatcatcttctccaacggaatgcgagacccatggagtcgaggcggggtgctcaagaacatctcgtccagcatcgttgcccttgtcacagagaaaggtgctcaccatttggaccttaggtctgcaaccaaagatgatccagactgggttacagaacagaggaggcaagaagttgagatcatacatggatggatagatcagtattatcgagacatggcgcaagtcaagacatttttttgtgccaaaacgatgggtgtgatcctctactatgcttaa

SEQ ID NO: 34745 - DNA, 574 bp, Zea mays
  Peptide Sequence Number=SeqID_78120
atggcgacacctcctgtgctcgcgttcttgctgcttctcctcgtttcatccttttcacatgcatcagtcgcagcggtgctcccagcacactccaaccccaacccgttcccgacaaccactccactgcacctgcaggctcgtcggcagcagcgtgtgcgtcagccaaacagcccggcggacgctactaagctcgccgccgccgccgccgatgacaccggtaccacggcggggccgttcacggtgcactacttccagcaggagctggaccacttctccttcacgcccaacgcgtcgacggtgttctatcagaagtacctcgtcaacgacacgttctggcggaggcccggcggcggcggcacggccgggccgctgttggtgtacgtcggcggtgaggccgacattgagtgcatcgctcacaacgtgggcttcatgttcgatatcgcgcccacgttcggcgcgctcctagtcttcgtcgaggcactcgccgacttggctatcctcatcaccgatcttaagcggaacctctcagccgagacatcacccgtagtcatcttcggtggctcatacggcggca

SEQ ID NO: 34746 - DNA, 315 bp, Zea mays
  Peptide Sequence Number=SeqID_78121
atgtcacgcgcgttcgacgactactatatcaaagactatgacgtcatcttggcgacagaggaacacaaagccatcatgctctacaagtcctccagctacagcttctccatgaagctggacgcccacgaggcggaaccatcgcagaacgaggacaacgacgactacctgacccactggctgttcaccgaggacaatgacaaggacgagctggtgaacgtgtcggggtcggtcaccgacgtcatgcgcggtgcgagggagcaagaggccggcgaggggattggggaacaactttgctcgcgaatatttgagggatag

SEQ ID NO: 34747 - DNA, 1431 bp, Zea mays
  Peptide Sequence Number=SeqID_78122
atggcggcacctactgtgctcgccttccttccgcttccgcttctgcttctcgcagccttctcatcagcatcagcctcagcgcaccccaactctttccggccaatcgttcccctgcgtctccaggctcttctgcagcagcagcagcggcggcgagcgagctcggacgccaagctcgtctccgcggccgccgacggcaccaacagcacggcgcagccgttcacgacgcactactttccccaggagctggaccacttcacctttacgcccaacgcgtcgatgctcttccgccagaagtacctcgtcaacgacaccttctggcggaggccccgccgcggcggcggcggcggcgccgggccgctgttcgtgtacacgggcaacgagggcgacatcgagtggttcgccaccaacaccgggttcatgttcgacatcgcgcccaagttcggtgcccttctcgtctttatcgagcatcggttctacggcgagtcactgccgtttggggacgactcctacagctcagcggagacggagggttacttgacgtcgacgcaggcgctcgccgacttcgccatcctcatcaccggtcttaagcgaaacctctcggcggagaccgcgcctgtagtcgtcttcggcggctcctatggcggcatgctggcttcttggttcaggctcaagtacccccatgtcgccataggggccctggcatcctctgcgccaatcctacagttcgaccacataacgccatggaacagcttcagtgatgccgtctcacaggactacaagtccgagagcttgaactgcttcagtgtgatcaaggcagcctgggacgtgctcgatgagaggggatccactgacacagggctcctggagctcagtaaactgttcagagcctgcaagagcgtcaagcacgctgattcgattgcaggctggctacagacggcattcacctacactgccatggtggactatccaacaccggccaacttcctgatggatttgcctgcctaccccgtcaaggagcctatccagatgtgcaagatcatcgacgggttcccggcaggcgccgacatcctggaaaaggtgttcgcggcggcgaacctgtactacaactacacaggagaccaggcctgcaaccagatcgagtctgattctgacgacagctccagttctcttgggctcagtggctgggggtggcaggcttgcacagagatgatcatgccgatgtcgacctcaaacgccagcatgttcccgccatccagcttcagctacgaggacacgtccaatgcctgcttccagtcgaccggggtccggcccaggccgcactggatcaccactgaatacggcggatatagaatcgacaaggtgctcaagaggttcgggagcaacatcatcttctccaacggaatgcgagacccgtggagccgaggcgggtag

SEQ ID NO: 34748 - DNA, 312 bp, Zea mays
  Peptide Sequence Number=SeqID_78123
atggcctggtgcctgggctccctgctgcgcggtgttcgtcttctcgggctggtgctgtggatgtctcccacggcctcagcagtggctctagtatctccgtcaacctcccgctgtgcaggcccggacgtggacggcggaattggttttctgggacagaacttcgtgttcgctgagctgatcttcccacgtagacaatctacgtgttggtgtgattgcgcaatctgtgggtggattcgattgctcaatgataatagcggtgtaatgagacaacgtgacagtctgggttttagtgtgttgttaatttcagcataa

SEQ ID NO: 34749 - DNA, 357 bp, Zea mays
  Peptide Sequence Number=SeqID_78124
atggcacgcgccggaatcagcagggtcgacgatgtcgaagtagcgaaatcagcagggtcgacgaggtcagcagatcacgagcagtcgcgtgaagacgcttcccaaaaaccttattcgccctctcccggtgcaggatctagaagacgaagggttccggagacctactctcctgatcacagatgcacctctacggtcgggacgaagggaactaaaaagcggctcagctatgaagagagtttttcagcagagactgttaagttgaacttccgcctagaactccaagctacaccaacccacaacttggacaatggactatgccttgaattgcaagttttgcgtgaaatgggtttcacttga

SEQ ID NO: 34750 - DNA, 1887 bp, Zea mays
  Peptide Sequence Number=SeqID_78125
atgggcgtgcctgacttctgcgcgcgctggcgcgcattcaatgcgctgcaggtagccgttggcgccgaagtatccgttgcttcgttgtcacaccggacagtccggtgtacaccggacatgtccggttttctttctgaaaagggactgttaacactttccataaggcttcttttcatttaccagggcactgttcttgttatggatcagatgggatacaatgctgatcgcacaccattcacgaacatctcaaacaccatcattacagtaggtacagacactaatccacaaagttacattgtaggtaatcaaaatgaatcgaattcgcttggaccaattgtcgatgctagggaacatagctttccagatgactgtagcatcattgatttcaaaattttgtcaacacaaggcattgcaggtggagacgaacaagtaaacgtggatctagatgatgatagcgattggttgcatagaaatgagacattccaggtaaacaacattgtcgcaagtaatgaccttttgacaacaggttgtgtgcatgaaagtgttgataacacacctaatcatactatgaaaagggtcgcctactttagtgagcggtacaaaaacttaactcccatcgagagggagtctaggcgtgaacaccttaggttgtataataagacaccaaaacggaaagatgcaaagacagagtacggcagaaaacgtagagcactgcaatctgacactttgaatcaggagtccatcgccatggaggacccaacatatacccctgaggttggacgtcatagaacagatgcaacacaaccgtatggatcctcagttaccacttgcgattgggttatccctgaatttgtcgggacacctttcctgccaacttcaatacagaccgaggatgttggttcactcactatgtctactgagccactaagtcgtaaacatcatgtgctatctggggcaagaccagctatcttaggtagtcgaaaccaacaatttgaagccgccatttcaaggaacgtggctacagtgactgaggatacaatcagtgacgccgtggaaggggacgattggacacaaccccatatgactacagagatccacaacaatggtgacgatgatgagggtgtcatattcgaagaggatgatgatgataacgatggatacctattcgctgggcaatatgatgagaccgacgaggacatcaagattgatggtactcaagaagaatctattgacactgatttgcctgacacgtacaacaaggtgtacagtaacgtgcctgaagaaacacatatgctgaagtctgttcccaactacggttattgcaatgcgaagaagtttgagtatgagccacctggattttgctgtcgtggtgggaaggttgagctagccccactggagacccctccacaactctggaggttgtgggatagtgtagactctgatgctaggcactttcgtgataacatcaggttttttaatggccatttctctttcacttcgttgtactgttgccttgatagtatgacaactaatgtgagggattctggtatatacacgttccgggcacaaggcatgatgtatcacaatatcaagtcattcggtagggaaggtggggcggagcataaacaccttgaactttacttttacgatgatgatcccaatctcgagcatcggtaccgtatgtgccgcgaagaacatcaacagaaagacaaagatgttattaaacaaatagtttccatactccgtgaaaatccatactctgaacatcttagaagcatgggtcatgttgagaaccttgatgactatcgtatcacattgaaccttgatcaatcgttgaaccagaagacatataacacacctatcacttcagaggtcgctgctgtctag

SEQ ID NO: 34751 - DNA, 354 bp, Zea mays
  Peptide Sequence Number=SeqID_78126
atgggtcggcgcgaggccgagcgcgaaggggggagaaaggtggccggtgacgggcgtgagagaggtggaaatcccgcggccttcgtgttcgtcccgcgcccaggtcggtctgagtcagcttggggtagggtaatgatggcgcctcctgtcgacgtggtcggtccgcgccctaggttgggcgatgtggaggctcctccgaggtcgagtctgtcttccgcggccgtggtcgagtccgagcccctgggtcgggcgaggcggagaccgtcggctgaggccagggctaagtccgagccctggggtcgggcgaagcggtgttcgtcgtcttccggggctgagcccaagtccgagccctag

SEQ ID NO: 34752 - DNA, 1041 bp, Zea mays
  Peptide Sequence Number=SeqID_78127
atggcctcctcctcttctgagttgaggcccgcgagcaggaggatcgtcgattacctcaacgacggcgaggagctcggggccctgggggcggtggtgacgccgccgtgttcccctgctgcggttgcggtggggaaacaggccaagtccgcgctgcccaggttcaggtggccgcggctcgtcaggttgcggagagagggaggcggcgacgaggggaagccgggggtcgtggtggtggagaagggcgacgacctccccgtggcggccgcgtctacctcaggatgcgaatcatcagcggcgagcgacaagaggcatcccgacctcggcgtcgggctaagcctgctgttcctgctggccaagacgtccgacgagttcaacaagatggccaaggtgcgcgcggagatggaggcgctcctgagagagttaaaagacggggttaggaccaagagcggcggcaccgagggccacggcgcgccgaaagaccgcaaccgcgagtccaccacgtcgagctgcgtcaccgacggcaacgaccagaccgcaagcgctcgcctggagtaccagctcgcctcgtcttgcgtggagccggcgggctacgagaggtcgtccgaggatgacggaggctgctgtgcgaggatggagttggacgtgcttgaggaggagttccacgccgagctggagctgcttcagggtaactatgagtcagggacaccatcgtttctgcctgaagaagaagaagaggaacactattccgagccctacgacgagatggccgactaccgggatggagttgatgaagattcaaggggaggtgttgaggatgaagacgacgacgacgaccatgacgctgagtacaacggagtttctgccgtacagttggagagaaggctccacgagcttctccacgaaagaaaccgggaccggattgaggagctggaagccgcgttgaggcgtgcggagaagaagcttgttgagaaagaaatggaggtgtccctgtggaaggacacggctaagtttgcgttgagacaggacaaggagttgcaatga

SEQ ID NO: 34753 - DNA, 459 bp, Zea mays
  Peptide Sequence Number=SeqID_78128
atgggcaaaagtaagaaaggtagcagttcttctcctcgctctggtgacaagcgcaaacgtgagccgactcctccttcggaggacttcggcgactcagagtactcggaggaggagttctcctccgagtccgagggatccccggctcctgtctctcccccggcgtcgtctgatgattcagacgactcccaggggattgccgcggaggtctggacctacatccgggccgtcgagcgctccgggctcgagggctcggatgagtcgaagtactcctcagacaaggaggactcctcggactcgtccgaggaggacagcggcggcgatggtggttatggcggcaacgacggaggcgacggtgatggcggcggcgacagcggcaggggcggcgacggcggcagcaagggcgacaatggcagcggtagcaagggcagcagcaagggcagcaacaagaccagtggctag

SEQ ID NO: 34754 - DNA, 309 bp, Zea mays
  Peptide Sequence Number=SeqID_78129
atgactgaagataacccagccctcgagggtgctactaaaggtggttcaaccctcgagggtattgctgaggatgatctagcccccgaggaaactgctgagggtgatccagcccccaagggtcctgaacctggctcttcttcggctgcttctatggatgttcatgttgggtcaccactggttcagtctgaggaagctgtggtgacgagtcttgaccttcctactgctcaagctggcccgactactttagagaatgttctggactcagtgtcaacccagctgagggcgtgtggtgctcccattcctgattag

SEQ ID NO: 34755 - DNA, 699 bp, Zea mays
  Peptide Sequence Number=SeqID_78130
atgcagcccggctgcacccccccgccggcggtcaccaagaatggtgacctccagcttgatggtgggggaaagcgagccgggctgcggcctctgcccctccctcagcctcaaggattttcatcaccagggctggggaggggagtgtgccgagttggggtcggcccctgcgtgggcggtggctcgctccttcactcagtgatcggagggaagggcggtcgtcgtccgtggcgctggcagctgcaccgtgcctggctctcggacgcgagtggcttcggagccgctcgcggcgccggcgtctgccacggcagctggaagaggttcttccgccgacgagatagccagggccgcccacggaccgacctccaactctacggccttctgcccgtccttgcctcacaagtttgggcatgggcggggcctcttggcagcagcatccgccctgaggtcagtgctgccgctgttcggccccccggagcagaagtcgtcgtcgtcgctgctgctggagcgggcgacggcgcgccgttccgtcggtcttctgtcgctccgcaggccctcccccatcgagtggggttgttcgtacctgcggaggagtccttcggctcggtcggccttgttgtccgaggctcctctggcttagttaaagggaccccttggccgctcttggatgagccgaggccaggggtagcaatatcagcatga

SEQ ID NO: 34756 - DNA, 69 bp, Zea mays
  Peptide Sequence Number=SeqID_78131
atggcgcgacggtggcccggggcggcggtggcggacctccgcggctgcacggggaacggcggggtttga

SEQ ID NO: 34757 - DNA, 456 bp, Zea mays
  Peptide Sequence Number=SeqID_78132
atgtcttttggcttgtggtcaattgaagttcgtttggttcagattcgaaaactgaatttcgagctgctgaaatcaacactaaagcaaaatttggttagctcccattcaccccctctggtcgcctcaccggtccttcaattgttatcaaagccggttaaggatttccttaccctagtcggtctgaaatccacgaagatggataagggaccttgtgcaagagtatctagcgttgacacatggccattgagggctgagtggaatatgcctgagatgaaggaggatgcttcgaaaatagagcctggcttggttaggctttggtataggtataattttgaaaacaaatttggagaaccttgtgatgaatggttggaagctattgaggaaaatgcaacgagattcttggtaactatagtgaaaaggaggtcaagccaggatttgaataacggtataccataa

SEQ ID NO: 34758 - DNA, 133 bp, Zea mays
  Peptide Sequence Number=SeqID_78133
atggccgttggaagtgtgctgtcgcatggcgcaccggacagtccggtgcgccaccggacactgtccggtgaagagttcagccttgagtgccctggtgcaccggacactgtccggtggcacaccggacagtccg

SEQ ID NO: 34759 - DNA, 159 bp, Zea mays
  Peptide Sequence Number=SeqID_78134
atgggggaagtgcagggcagccgacgagcacaggtgagggcgccagggagggacggcggacgtggggagctcgaccatgagaacgagcagagaaggaacaagactggcttggacttgggagatgaggccgacggcacctcgtggaaggataagggatag

SEQ ID NO: 34760 - DNA, 546 bp, Zea mays
  Peptide Sequence Number=SeqID_78135
atgcgctgtgtgaaccccggcagcgccacggcggcgcctagctcctgcccggcgcagaacggtgcggccctgatccccgtgtaccggctcgcgtgcaggctcggcgcgccgtcgaaccgcagcacggcggagaggttgtacgtgatggccgaggccgcggcgtcgaatgccagggcgcggagctcgcccgacgcgatgtacgggacgacgtggtgcggccggaggagcagccgcgggatgagggacggcgcaaggacgagcacggccaggaacacgaccaggggcgcgaggcaagccgcagccgtggctgccactactgccacgcactgccgccgccgccgactcgccggcgacggcgtctccgtggacatggctcgcaggatgccgggcgtgcctgctggatcgtcagcgtgggttctcccctacttaacctctcgtgtagggaagctgaaggagaagggtcgcatgcggctgacgaagagacggacaactgaaaggtttaacccagagttgaaaatctcgcggttaatgagtgctaaaaattaa

SEQ ID NO: 34761 - DNA, 555 bp, Zea mays
  Peptide Sequence Number=SeqID_78136
atggatgttttgatgattagaaactttggagaggaccaacaaggacttgggaaaggccaatatgtcaaggaggagaagttgccatccgctgggcgtcggcgtcggcgtcccaaaaagaggggcctgctgctgacgacggcgaggggcggcggagtcctcgcgccggtgaggtcgagcgggatcgagacgacgacgacctcggtgggagctgaggccgtcaccgggcaggtcacggaggtcaacaaggacaccttctggcccatcgtcgaggccgccggcgacaaggtcgtcgtcctcgacatgtacaccgaatggtgcgggccttgcaaagtgatggctcccaagttccaggagatgtccgagaagaacctggacgtcgtgttcctcaagctggactgcaaccaggacaacaagcctctcgcgaaggagctgggcataaaggttgtgccgacgttcaagatcctcaagggcgggaaggtcgtgaaggaggtcaccggcgccaagatcgacgagctagcggaagccatcgagatagccaacaagaagtcaggctga

SEQ ID NO: 34762 - DNA, 708 bp, Zea mays
  Peptide Sequence Number=SeqID_78137
atggtggagacgctgccctcgctcgaagtggtcccacagaggtttttgaaatgtgaccgtcgatggacgtgttactgttggattgtgtgtttcccgaggcgtcgtgtcctgtctataaaaaggcggcacagccgggatggtttcttaccctttgcgtgcgccgtgaaatccctaatttttttgaaccgctcacctaccctccttgctctcctacttcggaaatctggcccgcgtcaagcagactgcacgccgccaccgacggtccaccagttgacgcctaacgccgtggttgccctggcgaagtatgtttgggcagtttcttcgtatgacggtcagccgtctgtggaagtcttcgccaagaataattgtctgcactggcaaaagaagaaaataggaaataagattgcacaatttggatcgtgcaccttcacaccgaggactagaaagacttcggcggaagttgtggagatagtcccttgtggtcgcaacaagtggggcatctggtgggacttttggttttatgtctctggtggggaaatcgaagatctacctaggctccctgcagccattatgtgctctcattgctacgtggcatttctaccgttcgaggtggcggaggacgatgaggatgaaggggccctttggtatgctgcccgcaagattagcgggcgcgatctggttgaggaattcattggatatggagtatag

SEQ ID NO: 34763 - DNA, 822 bp, Zea mays
  Peptide Sequence Number=SeqID_78138
atggagctcaagtcactatctcaaagaatcgaatgcgcgagaaatggagtcttggtgcttaggaatgatcaaggaatgcttggattcctcctccatgcgcctaggggtcccttttatagccccaaggcagctaggagccgttggaggcattcttggaaggcaattcttgccttctgttgggtggcgcaccggacagtccggtgcaccaccggacaaccactgttcatgtccggtgcgcgatttccttccattgctggcgcagccgactattgcagtcttctagcagttggcacaccggatagtccggtgcacaccggacagtccggtgccccctgccgaccgttggagtgggccatgcgtcgcccgcggatttggcggccgaccgttgcagtggcggccattggctcaccggacagtccgttgtcatggcatcgcgcaagctgcgccactacttcgaagcatttcaagtacgggtcacttcggatcggggtctgggagaactatttaggaacccggaggcatccgtccgaatcgccaaatgggcagctgaactttctggataccacatcaccttcgaacccagaacaacgattaaatcacaagtcctggcatacttcatcgtcgattggatgggaccaacatgacaacaagaagagtcctcagagaaagtatggaccattgactgcgacggcgcgtggtccatgcgggggcaggcgccgtggcaattatcacttcacccaccagcgtcaaatacaaatacgcaacccgcctatgcttcgccttggagttcgacagatgcaccaacaacatagcagagcatga

SEQ ID NO: 34764 - DNA, 294 bp, Zea mays
  Peptide Sequence Number=SeqID_78139
atgcgcgcgtggcttcccttccttctccataattactcgtgcgcctggcatctaacgactgacgtgtggggccatgtagcgttgtcgcacgccgtcgctggctggtcgatcttattggtcagtgaccagctacgcatgccgctacctctttctctggagcacgggcccgcgctgtcgaaggtcgtctcctaccctgtgtccaagattaaaccaacgtcgagtttagagctcaacggtatccgcgagatccttgggggccgacatgaccaactcgtcaacgcctccgggctataa

SEQ ID NO: 34765 - DNA, 435 bp, Zea mays
  Peptide Sequence Number=SeqID_78140
atgcctggaccaacaagcggctgtggcctgccagtgctggccagccggggtgacgtcgagatcagcgaggacgtgaccacacaggcagtcaggcacacaggcacagcgttggtggcgcggggttgcagccgcctcgcctcgcctggagctcgcgcagccgcctcgcctagagctcgcgctagggccagggtcgccctctcgctgctgctgctcgccgtcgaggtcgcggcctacctccggggctggcacctcgaggtggatgtgggcgcggggatcctcaccgtcgatgccctctttgtcgccgcctacgcggcctggatgcgcgcccccctcgactacctcgcgccgccgctgcagttcctcaccaacgtctgtgtcgtcctcttccttgtccacagcgtcgaccgcctcgtgatctgcctggtctgcttctag

SEQ ID NO: 34766 - DNA, 495 bp, Zea mays
  Peptide Sequence Number=SeqID_78141
atggagcaagaggattacagtgtcgacgaggtgtatgccgtgactaaggcttgggcgccaaataatggcattctgatcagtggatgccagactaaccaaacaacagccgatgcaactacaccactaggtgtctccttcggtgctctgagtaattctatacagaccattcttgcaaatgagcacgggaagctaattcgtgttcgtatttctggatctgtggttaatgatctttctaattcaatatctatgtgcacaaactcaggcagtcaggctacatgtataccaccccctgtacccacccgttctccaatttcatatagaacaagttgttgcttgatattagcgtcccacttgaatgagtctctgtcaactctgtttgtctcttggtttctccgttataatgcttatatgctcccaagtcagttcatgtcaaccatgaatagattgcaaaagcttctgtttgtaatcttctcgtggctggattcaaatttgtaa

SEQ ID NO: 34767 - DNA, 420 bp, Zea mays
  Peptide Sequence Number=SeqID_78142
atgaaggcggcgcgttgcttctgttggttgagggaggcgaatacgaaaggcgcgctactgctgatgctggttgagacgaagaaggaaggcggggctcgaccggatgaacgcgcgccgctgctggtgaggcaggctgcggccctgcgcggcgctggtattatatatgggcaggctgtgtccggatatggctcagatatatcaacacgtgaggttgttgaagatctatctgcatggaaaatcgatcagagtacaacaaccaaaagagttgcaaaacctatgttcacttaccaacaagatcgtcgtccaggaccaggactccgctggcgcagctgcgccacggcgagcctctcgcgggcgacgcacgccgaagcgcaggctggcgccgctgccccaggcaacgcgagcgtggccatcacgtga

SEQ ID NO: 34768 - DNA, 978 bp, Zea mays
  Peptide Sequence Number=SeqID_78143
atggggggctcggagcccggttccttcgcggagaaggatccctttcgggcaactggcgtgccggttgctcgacgcgtgggcctgggttccaagctggcgtgtcagaagtcggagaagcgcgtccatctggcgcggttgcatgccgcctgcatggctgcccgccccttctgcccgttggacccagcccccgagtcgcaggggagggccttggagcgtgttggagaagactcggcccgcggcgcctgggggcgcacgaatgcaactccatgggagttggtacctctcagccatcgttcggcttcaaggattttcatcacgcagcccggtcgcaccccttcaccggcggtcacccgagatggcgacctccagcttgatggtgggggaaagcgagtcgggctgcggcctctgccccttcctcagcctcaaggattttcatcaccaaggctagggaggggagagtgccgagttggggtcggcccctgcgtgggcggtggcccgctccttcactcagtgatggggggagaagcgggcattgcccgtggcgtccggcagctgcagcgtgcctggtcttcagccgcgagtggcttcggggccacttgcggcgtcggcgtctgccacggcagccggaagaggttcttccgccggcgcggcggccgggaccggccacgggctgacctccaacttctacggccttctgcccgtccttgcctcacgagttttggcacgggcgggggcctcctgacagcggcatccaccctgaggtcagcgttgccgctgttcggccccccggagcagaagtcgccgtcgtcgccactgctggagcaggtgacggcacgccgttcgtcggccttccgttgctccgcaggccttccccctcggagtggggttgttcgtacctgcggagggggaaccggagttccgtttgtaatggcacttcgaatgccagtgagttcgttcattgtggctgtcgaggcctga

SEQ ID NO: 34769 - DNA, 396 bp, Zea mays
  Peptide Sequence Number=SeqID_78144
atgaagatcttctttgagattaccaagaaaaagtatttggaagcacttcataggcatgatagagcaaaggctgtagatattcttgtcaacgatcttaaagtatttttgacattcaatgaggagttttataaggagataacacaacttctcactcttgagaattttagtgttgctgccgcggtggagcccaagctatggtgcctcctcaaggcagacatggccgccgtcttctgtgagctcgttgcgcagggcgaggccctccagaattttcaacatggggctggattttggagtgcaatgacttcaaacataaccttccagtcaaggaatgtgctaagcaagaaatttatggtatatccttacatgccttctctttttgagatgaaaccaaattag

SEQ ID NO: 34770 - DNA, 921 bp, Zea mays
  Peptide Sequence Number=SeqID_78145
atggcctcacggccagccggccaggcacagcggcgtcaccgcttaatgtgggtgagcagctgcgccacgacgagcctcccgcgggcggcgcacgccgaagcgcaggctggcgccgctgccccacgcaacgcgagcgtggccatcaccatagcggcccagcaaagcaagcgtattcgcgtattgcagtactggcgtctggcccccaaatcggcaagtgcaaatcctccaaggctcctcgctgctcgaatgactttgctggcctgctgccttgctgctcgggtgtctttgttggcttgctgctcggatggactggacctggactgctcgcacccgccgccggccgccagcccgagcacactgcgtgcccggccgacgccacccagcgcgctgcgccgcgccaccaccctgctcgcgcgctaccccactcgctgcgccgcgccaccagccagcaccgcccgctcgacagccccacgccgcctggccgcccgcgctgctcctctcggggctgtgcctcttgggcgccgtgctctgggcacgttcggtcaaccaaccgcgctgcagctacccgccgacctcctgcccgcgctcgcgggcctccacctccacctctacgactcctccttccggtcgccgccgagcaaccgcagtgggagacatgcccccttgcacaggggctggggctggggctatgctgcgccgagtaggagccgggaggcggtgacggaacagaaggcgctgagtagggtcctgttgggcggccgcctggttctccaggtggttgcgatagccgtgttctcggcactggggttcgccttctacgtcttcttcgtgccattcgtggggacgaagccgttccagattgtggccatggctatctacactccattggtgaggttcctgtcctttttttcaagggtttaa

SEQ ID NO: 34771 - DNA, 726 bp, Zea mays
  Peptide Sequence Number=SeqID_78146
atgaactcaagactcccgaaaacggagcaccgtcccgggttggagaggtcgctggagactgcccatctggagcttgacgggaagttgttcgtcaacacgcagcaggcccctacctggcgcgccaactgtcggcgtttcgagaccggggggtccctgagccgacgagtgaatgtcgccgcgtgccccagcccagatggggcgagcgcgaaggggggaggcgaggcggccggagaccggcgtgagagaggtggaaatcccgcggccttcgtgttcgtcccgcgcccaggtcgggtgcgctttgcagtagggggttacaagcgtccacgcgggagagggagcgagcggcttcaagcgagcgcctgtctcgtcctcgtccccgcgcggccaaccctctctaagagggccctggtccttcctttttataggcgtaaaggagaggattccagggggctgagagccgccgtcgtcacagagtacgcggggcgccatcattgcctatctggcggagcgagccagatgggacgccggtcttgtttcccgtggcccgagtcagctcggggtagggtgatgatggcgcctcctgttgacgtggctggtctgcaccctaggttgggcgatgtgaaagctcctccgaagccgaggtcgagtctgccttccgtggccgaggtcgagtccgagcccctgggtcgggcgaggcggagaccgtcggctgaggccagggcgtag

SEQ ID NO: 34772 - DNA, 306 bp, Zea mays
  Peptide Sequence Number=SeqID_78147
atgtcgtcccttccctccatcccgcccccgcccgcgccgtcccttccctgcatcccgcccccacccgcgtcgttccttccctgcatctcgcgccgcccccgcgctcccaaccctgtgacatgtgccaagagcttcgtcggcccctttgccactcaccgacgagcggcacccaccaggcgtaaggagaggatccaggtgtacaacgggggtgtagcagagtgctacgtgtctagcggggggagagctagcgccctaagtacatgccaatgtggcagccggagagatcttggcaccctgctggtgtga

SEQ ID NO: 34773 - DNA, 3993 bp, Zea mays
  Peptide Sequence Number=SeqID_78148
atggaggacgggcagaatatcagattgcttgcagctagtttatttttccagcccaggcatgctagtgacaatgattttcagatgtggcaacagcagatgatgttcaagcacttgcaggagtttcagaggcagcaacaactacagcagtctgatcatggagccaggatgcagctctcttttggacagtttcatgctcctgcaaaacctttgcctggtgatcaattgtcgacaatgtcaaatgaaatggtcaacaatgagaccatgaattctggatggccacataattttacaggtggtgacctgagtttgacgagcaactcccagatgttgaacaatggtagcacaaattgggatcagattgttggttctcctgttgtgggcaatttcatgaatggttcaatgtttgtgaatgctcataatcagtcgatgagaccaatgggattagctacccaccaagtggatcaaactttttatccaatgcatgctaccagcagtagagggcctggaaaccagtattcccaatttttagggattcctgctgatcctcagagtgaagcggcaagggttggtccagttcagtcagaaaagacatccagaccattcaactcttcaatgaacgaacttggtcttcatatgcaagggcaagcgagtcgtggggctagccttgaccctactgaggagaaaatcttatttgggagtgacgaggatagcaactggggagctttgttgaggggtgacaatgacaatgtcaattctttggacaatgacaactatggtggtggctactcatctctacagagcggtagctggagtgcccttatgcaggaagctctccagtctacaaccagtgaaagtcccaaagaagagtggagtggcttgagtttccataaaactgagcaggtgatggctagcaatgcaaatttatcaggccgcaatggtagtaagtttactggattaagtggtgcaaacctagaaaatgcacgtccttcgccagcgtccagctatgctgatggaacaatgaataacccaaaccttgccagttttcagcatgtcataaggcctccatccgagcgaagggaccatatgtctcatgaatcttctaatgctcctgttaacaatcatcaatcaacttctgaagtcaacaaggggtactttcagcaaggcataaaacaaattcactctgatgcaaggcaaggacaagcgcacctagtaaatggaacctggccgcatcaaaagactgaactgctcagaagtaatttgcagtcaactggtgtacatgctacaccacctggtggacatggatttgggatgtcacaacaaattgcaactgatcacaatatcaacagagagtccagtaataatcaaaatgactggaaagctaacaatgcacttggacaagacatgtgcaatagccaaaatatctttaatagcaatgagaactcttggaagtcaactggaggtaatgccaattcagtccagagatttcagcagaggaggtctgatgtaagcgctactaatgaaagttcagatggtaaaaatattagcatgatgagctcaagcatgccaatgatgacacaggatcattaccagatggtcactagtcagagtggtgagcaaattggcatgaaccgtaatctgacacatagagctccagagacctctgagtcaccaggaaaaaagcgcagaacaaagaccagaaggcattctgtatctgctgggaaggaatctgaaaatttaggtcagtctagtcagcaagcaatgggatcttacatcttgcagaaccgtgctatggggagttctggaatgaacattggtctgtctccaggcaatccaatgtcaaatagtctgtttccacctcagacacgaaatagtctgcagcatcattttggcacaaactcccatgtttccaatagtatgccgtcagcaagtgagaaaatgatgatggcacaggaacaacttcaatcgcgacatggtctccccaacagctccagtgcatcaactttaggaggagctgatactggtctatcccagaatagagcagttcaaaacagtcaacatatgcttcagcttctgcataaggtggataactcaaggaatagcaatgtggttgctgacatacccaacaattcccttggcgttgtttctgcccagcaacaacttaaccattcttctttgcaaggatttgggttgagactggcaccaccatcccaactccaatcaatttcgggtaatttatggtctagtcagactaatgctgatggcaagcaattttaccaagatggcgaccgcacacagctaccttccacccctagccagtcactgactcctcagcatcaaaattctctatcttcaccatttcacagttcagaaacagaaaatactgggcaaccaattgcgtgtttcccccaattaggatcaggccaacagtatcctatggcagatgatagatctggtcctgcacccatgctgcagcagcagcctcagcaaagcaactctgcaacagtgttcaagaatgtatggacaaacatatcagcacagcgcctaactggtatgcaacctaacaagattacacccaacatcattcagtctatgatgtttccaaataatgctgcagcttccaacttatggagctctcagaaggcagatgatcaagggcagagggcatcaactccatcagatattgcaacaagttcagcgaactcacagaatcaatctccaaaacaagctgctgatagtgatgcaaagttagcatcttcccagaagggaaacctagagttgacaggaactaccgtaacaggaggaaacgaatccttgcagaagccttcttcagatgagaattctatcaatgctgtttcatcctttgcacagttgcgtcagcaaggcatccttggtgctaaacatggggagaacccaggagctaattttcaggctatgaatgtttcccacaataatgctaatcacagtggtggcattgttttacatggaagtccagcacctacaaacattcagcagcaaaattactctcttctacatcaaatgcaaacctcgaggcatatggatgttgatccaggcagtttatctggaaagacgacaaaacctgatattggttctgatgctgcacagattgattggaattctggtcagagatttgctcatgtaaccaataactcaaccaaatcgtctgcagataacattggaagccctggtgtcccagggtcattcacatcggacttgaaaatgttgagttttgcttcaaggaacgaggagagaaatccaaacataccttctcggtttccttccggagagtgcccgtctcctggtatgataaccacacaagatgataatcagaatcaagttcagcatatgggcacaggtgcaatgtcaaattctgatgaaagaagtgagaggccgaggataaaccctcaaatggcaccttcttggtttggacattacggaaactacagaaatggtcagagtgttgctacgcttaatgctgctacgcttaatgcgcagaagcccatggctttgccatttaattttccgaaagcatctcggaacaatgaaaataatagccatgctgaaaatagagttgaacctagccaatctgttaggcctgggcatcatctcccatcagcaagaatggaagctttggttccttccaatgtaaaagtgtcttcaatgatgagaaggcctaagaagcgtaaaactatggactccacacttgtttcttggcataaaataattgaaagcccacgaaaattgaggggcatcagcacacctgagatggactgggcttgggcagctaaccggttaattgagaagttgatccagcaacttctccctgctataccagcgaccattctgagagcacaagctgtgtctgcttacggaagtgcgacatacactctatcaatgttgacactaagggatgcatgcagcatggcatcatcatcatataactcttgctcacctgtggaggatgaaaataagtaa

SEQ ID NO: 34774 - DNA, 216 bp, Zea mays
  Peptide Sequence Number=SeqID_78149
atgaggcaggccggggacatgttccagccgatcaagtcagtgctggctgttgttgatgcaccttatatcaagtataggtccatcgtagatttcagcacaggatcagttctacgagactacgaccctagagaagtggttcgattccagacgacggatcaatctaggatgagctggttgctgaacccatacaaaatgaaacagcccaaacagctctga

SEQ ID NO: 34775 - DNA, 339 bp, Zea mays
  Peptide Sequence Number=SeqID_78150
atggggtcggcagcggcggcagtcaccgccatgggagggggcgcaggacgtgcccgtggcaagggcgtacacgccaataggggcgctggtggccaggcaccgctaggtgcagagaagttgtttggggcaaaacaagaagcttggtggcttgtcctggggaatgctacaagttcagagctgtatggtctgaaaagaattagttttgcagatcgggtgattaatactcgcatggaattgccacagacgttcaatgtgcaggagacgaagctgatcttggtgtcggattgctacctaggttttgacttggagtattctcttgagcatctcaccaagggttga

SEQ ID NO: 34776 - DNA, 5451 bp, Zea mays
  Peptide Sequence Number=SeqID_78151
gttaaacagcacttcagggatggtattttacataaaaacgagtttaagatagtctatgttgctccaatgaaggccttggccgcagaggtaacagcaacattcagtcgccgattatctccattgaacctggttgttagagaacttacaggagatatgcagttgaccaaaaatgagattgaagaaactcagatgatagtgactactcctgagaagtgggatgttattacacgcaaaagcagtgacatgtcactttcaatgctggttaagctgatcatcattgatgaagtacaccttttaaatgacgatagaggttcagtaattgaggcgctagtagctcggactctccgccaggttgagtctatgcaatcaatgattcgcattgttggcctatctgctaccctgcctacctacttagaggtcgcacattttttgcgggttaatccagacactggacttttcttttttgactcaagctatcgtccagttcctcttgctcagcagtacattgggatcagtgaaagggattacacaaagagaagtgaattattcaatactttgtgttatgagaaggttgttgagtccattaagcaaggtcaccaagcattggtttttgtccatacccgtaaggatactgggaaaaccgctagaaccctgacttgtattttgaaaggacaattcagtaatatgacctacaagattgacctagcagcaaaagcaggggaattggaattattttcaagtgcagatcatcctcaatttccattaatcaagaaagatgttagtaaagcaaaaagtcgtgaagttgttgaattttttgaatctggatttggtatacacaatgctggaatgatgcgatctgacagaagtttgatggagcgcttgtttggtgacgggcttttgaaagtccttgtttgtacagcaactttggcttggggagtaaacttaccagctcatacagttgttataaagggcacacagctatatgatcctaaagctggtgggtggcgagacttggggatgcttgatgtgatgcagatctttggacgtgctggaaggccacagtttgataaaagtggcgaaggaattattatcacaacacatgacaaattggcttattacttgaggttattgacaagtcagcttccaatagagagccagttccttggatctctgaaagataatttaaatgctgaagttgctttgggcactgtaacaaatgtcagggaggcttgtacctggcttggctatacatacttatttataaggatgaagactaatcctctggtgtatgggataacttgggaagaggttatgggagatccttctatgggtgcaaagcaaagaacatttattattgatgctgcacgagcactggacaaagctaagatgatgcgctttgatgaaaagagtggtaacttctactgcaccgaacttggtcgaattgcaagtcatttttaccttcagtactccagtgtcgagacttacaatgagatgcttcgacgtcacatgagtgaaagtgagttgattactatggtggcccattcctctgaatttgagaatatcgtagtaagagaagaagaacaggatgaattagaagcccttgcaaggaaagcatgccctttagaaattaagggtgggccgactgacaaacatgggaaaatttcaattctcatacaggtttatatttcccgtgctccaatcgatagctcctctttacattctgatgctcaatacattagtcaaagtttggcacgcataatgagggcactatttgagatttgtctgcgtcggggatggtctgagatgtcatccttattgttgcaatattgcaaggccgtggaccgcaagatatggccccatcttcatccacttaggcagtttgataaggatctttctcctcaggtattgtggaaactcgaggaaagaaatgttgatctggatcatctttatgagatggaggaaaatgaaattggagctctgatccggttttctcatcagggaaagttggtcaagcaatacgttggatacttcccgtatgtcaacctatctgcaaccgtgagcccaatcactaggacagttcttaaagtggacctgcatataactcctgaatttgtgtggaaagatcgttatcatggcatgtcagaacgatggtggatcattgttgaggattctgaaaatgataccatttatcattcagagctattcacattaacgaagaagatggcaagaggaacacctacaaagatatcttttaatgtaccaatatttgaacctcatccgccacagtactatatacatgccatctcagactcatggctacatgctgaaacactcttcactgtttcttttcataatttgacattgccacagacacaaataacacacacagaactcttggacttgaagcctcttccactgagtgctcttggcaacaaaacgcattatcagttctttttgcatagtggtgagttgtttgtgggaactgggaaacatgtattcttgattgaacataaattggagaatcaagcttttcatgttctttatcacactgataacaatgtactcttgggagctccaactgggagtggcaaaacaatttcggcagaacttgcaatgctccatcttttcagtacacaaccagacatgaaggtagtttacattgctcctctaaaggcaatagtacgagaaagaatgaatgattggagaaaacgtcttgtaattcagcttgggaagaagatggttgagatgactggtgacttcactccagatttgatggccctattgtcagctgacatcatcatttctacccctgaaaaatgggatgggattagtcgaaattggcatagcagaagttacgttatgaaggtcgggctcatgatattggatgagatacatcttctgggagctgaccgtggacccatccttgaggtcattgtatcaagaatgcgatacatatcatcacaaacagaacgttcaattcggtttgttggtttatcaacggcattagcaaatgctcgtgatttagctgattggttgggcgttacagatgacggtctattcaatttcaagcctagtgtgagacctgtacctcttgaagtgcatatccagggatatcctgggaaattctattgtccaagaatgaatagcatgaacaaaccagcttatgcagccatatgcactcattcacccaataaaccagttctcatttttgtgtcatcacgtcgacagacaagacttacagctcttgatatcattcagcttgcagcatcagatgaaaaaccaaggcagttcctgagcattgaagacaactccctagacatggttctttcacaggtttctgacagtaatttgaggcatactctgcaatttggcataggtctgcatcatgctggtttaaatgacagagacagatccttggttgaggagcttttttcaaacaataagattcaggtgctggtatgtaccagcacattggcgtggggtgtcaatcttccagctcacctggtcataatcaagggcactgaatactatgatgggaaaacaaaaagatacatagattatgatatcacagatattctgcagatgatgggtcgtgcaggtcggccgcaatacgaccaacatggcaaagctgttattcttgtccatgaaccaaaaaagagcttttacaagaagttcctctacgaaccgtttcctgtggaaagtaatctgagggagcacttgcatgaccacataaatgcagaaattgtttctggcaccatcagcaacaaggaggaggcgattatttatctcacctggacttacctatatcgcagattggttgttaatccggcctattatggattggaggatactgaaacaaacacattgaattcttatctatcaaggttagtcgaaactacatttgaagatcttgaggacagtggatgcataaaagtggatgaccactctgtaaagtacttgattttggggaaaatagcttcacagtattacctgagctacctcactgtttcaatgtttgggtcaaatattggccccaacacaacgttggaagtctttctacacatactgtcagctgcatcagaatttgatgagcttcctgtacggcacaatgaggacaatttgaatcgaatactcagcggaaatgtcccgtatccagttgatcaacaccaccttgatgatccacatgttaaagccaacttactctttcaggcacatttctccagagcagaattgccaataagcgactatgtcactgacttgaaatcagttcttgatcagagcatacgcatcatacaggcaatgattgatgtatgcgcgaatagtggatggcttacgagtgcattgacttgcatgcatctcttgcagatgatcatacagggtctctggtttgagagagattatgaatccctctggatgttgccatccatgaatgatgatatattagaccatctcaagagtagaggagtctcaacagtcccctccttactagatctttcccgtgaagaattgcgtagggtacttcaaccattttctgcgtcagagttgtatcaggatctgcaacatttccctcatgttgatgtgaaagttaagcttcataatgaacaggagcgatccaaacctccaactttaaacatcaggttgcaattgaaaaattcgcgacggtcagcatcaagagcatttgcccctagatttcccaagctccttggtgaagatgttggcgaactgggaggtgatcgggacgcggacatcgtcgacagcgacacactcgcggacgaagtggagcttgatctccacgtgcttcgtgtgatggtgttgcatgggattggagagccaagatgtctcggctacgccattggccacaacgcgatactcggccttagcgctggagtgagaaaagacgggttgtcgcatcaaggaccaggagacgaggttggcgcccaagaacacgtcgtagccagagatggaccgacgcgtgtcaggacaaccaacacaatcaacgtcaatgtagacgaccaactcagaagtcggagagggtcgaagaaagccgtagtcgagggtgccgcggaggtagcgaagaatctgcttggcagcgttgaggtggggctcccgcggggtgtgcatgtgaaggcacacacgctggaccgcaatgttgatggcgtactggcgctggtgaagaaagaggccctggggacgacactccacggtgacctcgagcaagtagtggagaggattgtagtccttcatcgcgaacttgcgctgcagggcgacgacactagatgctgtgagcatgatgttatcgatgtagaggaggtagacggtgtcgtcgccatgccaaaggatgaacaaggatgtgttcgacttagggatggcaattttacccgcgggtttggatatccgtcgggttcgggtacgaatttgtacccgcgggtcttgcccatacccgacccatga

SEQ ID NO: 34777 - DNA, 811 bp, Zea mays
  Peptide Sequence Number=SeqID_78152
ccacttggagagactacaccaccgcctgcgtgaggagcaggaacgtcgacgacaggagcagcagagctcttctttctcgctccaccaggagatagagtctgtgaggagctgctctcctgtgcttcctctggaggcgccccctgcaccaccactgggcgtcccagcttctggagtagctgctggaggagacccagacgacggagatggcgacgacagctcgagccacgacaccgacttctctgctaaccctgagccggaaggatgggttgctcgacccatcactcgcgacgctgctcgcgggtgtcacttccacgatgcgctcgacaccctgctacgtcgggcatttgaccggcatacttggtccgtcgagtatcgctgtgtggtctaccagcacagtcgcggggactcagctgaggcagccatgcaagatgctgcacggcgtgcgctttcgcactactgctcggttttcggtggggcagctgatggtcttgacctgaagtattacccccgccgttcatctggcagcacaggaggcgtgattgtctcacctgtcggtgagggcaatcctaggttcagcagcacagtcaacctagccgccgtgctaaacacggagctggaccatgcattagacgagctgagtagggcttgtgctgagatcgccctgctgcgggctgagcgcgcggaacgccgttatttggatggtggttcccccgctcccgttgggactcagcacccgtaccgctcacctcagcgtggacaccagtcttatggcaatcccgactgcaagaccaagataaatctagaaccatag

SEQ ID NO: 34778 - DNA, 345 bp, Zea mays
  Peptide Sequence Number=SeqID_78153
atggcaggagagcaatctggtgctagtgtgcctttggcactttcgacaagtgttcaagatacgaaggttgaggaatttgtttcaaaaatagaggttaccacctctcaggttgaagctggctctatgaatccgtctaaggatagtgacaatattgacattgaagaggatagcacaaccatacgtcctacgaagccaagccatgtggacttcgacaaatgtaagatcaaaggaggacatattgaggtacttaaccgctttggctatattgacaatgttgattgggtgcggttaggaggtgatgatttagtgtcagatctaagagaggacgaagtcgtcgtgttttga

SEQ ID NO: 34779 - DNA, 175 bp, Zea mays
  Peptide Sequence Number=SeqID_78154
ccgtgctcacggttatgagcggccaagggagctccagagattagtgatacttgatcagagatattgtggtacaggtggcaatgagactgatggttctggttatggttatggtattggcgaagatgaagctgtggaaggagacttccaggagttccaagattacgacgagttctag

SEQ ID NO: 34780 - DNA, 216 bp, Zea mays
  Peptide Sequence Number=SeqID_78155
atggccggttcggccgcctccctgcccgccggttcggccgccccgccccccggctcggccgccccctgcgccgcctccctgcccgccggtggttatgagattgatggttctggttatggttatggtgctggttgtcagcattgcaaccactgctcaggcgaagatgaagctgtggaaggagacttccaggagttccaagattacgacgagttctag

SEQ ID NO: 34781 - DNA, 1326 bp, Zea mays
  Peptide Sequence Number=SeqID_78156
atgggcgcagatgagcagccatctccgacgcggaaacgcgaccgcgaggaaggggaggacctctccgacgggggcgccgccgagaagcggccgcgcgccgaggtcgcgtccctgctggggctggccacctacgaggacgaggaggaagacgaagcggccaggggtcacacgaatggccgacacgcggtggagcctgagctagaggacgacgaggatgatgatgatgaggacgacgacgtgaggagggctcctgagaggaggcccagacaggtagagctgcgccgggactgcccatacctcgacaccgtgaacagacagaccattagctacttttgggcccagtcttgtagttacttttggggtttaatccagctcatgggtgaagttttggttcttgattttgatttcgagaagttctgttcaatctccttgtcaaatttgaatgtgtatgcgtgcttggtctgtggaaaatatttccaaggaagagggttgaaatctcatgcatatacgcacagccttgaagcaggccatcacgtgttcattaatcttcaaactgagaaggcttactgtcttcctgatggatatgagattaatgatccatcgttagaagatattcgacatgttctgaatccaaggttcactaaggagcaggttctaaatcttgacaaaaataagcagtggtctagagcacttgatggctccaattatctacctggaatggtgggtcttaacaacatcaaggagactgattttgtgaatgtcacaatacagtcattaatgagagttacacctctgagaaatttctttctaatccctgaaaactatcagcatagcaaatcaccattggttcatcgttttggggaattgacacgtaagatttggcatgctaggaacttcaagggccaggttagtccacatgaatttctgcaagcagttatgaaggccagcgacaaaaagtttcagattggtgtacagtcagatccagtggaatttatgacatggctcttaaacacactgcatgcgaaactaaaaagttcaaagaagaaaaacagaagcataatacacgattgttttcagcaacttatcaggtcacattgggaactgttcgtgcagggagaacttgaagttgttaaggaggttcataggaagcatataatggaaaaaagagaggatggcggtgagctgaatggtgaggcaggttcagtggtgggaactgcagatggaattgttactgaaacatccaaggtcccattcctgatgctcggtcttgacctgccacctccacctcttttcaaagacgccatggagaaaaatatcattccacag

SEQ ID NO: 34782 - DNA, 156 bp, Zea mays
  Peptide Sequence Number=SeqID_78157
atggagggtatacgctactctcaccatctcccatgcctagtgcaggcaagctgttctggtattggtccaagcaaggcaaagctcacccatgacgaggcatgtggccagttaaaagatgttgaacccatcatggccatgatggcttcaccatcataa

SEQ ID NO: 34783 - DNA, 567 bp, Zea mays
  Peptide Sequence Number=SeqID_78158
atgacgaccgtgtcaaaaaagccgccccagagcacttgggctccaagctcattactgatcaggggttcgaaggctggcccctcggaagggttcgacagctgccccagagcacgcagagtgagggataactctgggtacgtccgttacatggccgaggttcgggctacgctcccgagcgggtgcacccttggctcgcccgaggcccagctcgggcaggcttcgacaagaagcaaccttggccaaattgcctcaccaaccgaccgtatcgcaggaaaacagcgccactcaccccgctccgactactgtgccagccacccgggcaaggctgacaacagcaagttcagcctcgggcgcgacaggaagctccgcctcgcccgaccttgggcctcggcctcgggaggaggtctccgcctcgctcgaccccaagactcggcctcagcctcggcctcgggaggaatcacgtcctcgcccgatcccggcctcggcctcaggagaagtctccgcctcgcccgaccttgggcttggaccgaccgcgccacaggggatacatcattaccctacccctag

SEQ ID NO: 34784 - DNA, 285 bp, Zea mays
  Peptide Sequence Number=SeqID_78159
gggatagccgcgcaggtctggacgtacatccgggccgtcgagcgcgccgggctcgaaggctcggatgagtcggagtactcctcggatgaggaggactcggacggcggcgacgagggtgaagacgacgacgacgacgacgacgacggcgatggtggcggcagtggcagtggcaggggcggcggcgacggcaacagggacagcaccaagggcgacagcagcaggggcagcaccaggggcagcaccaagggcggcggcggcggcggcaggggcagggctagtggctag

SEQ ID NO: 34785 - DNA, 222 bp, Zea mays
  Peptide Sequence Number=SeqID_78160
atggcgcccaagaggaagaccgcgaactcgtctgccgcagtgatccccgccatcgaccccaacagtcagttacccttcgcaggaagacagccggacgttcgtactccgagttggactgagtctcccacggaccaagaagtggccgaggcagccgctgaaagacagggcctatctggcatatctttaccgagggctggccgactcaacccgagttaccaatag

SEQ ID NO: 34786 - DNA, 129 bp, Zea mays
  Peptide Sequence Number=SeqID_78161
atgtccaaaccggacaacacattccccctccttatcctcccggtgctccccagccttcatacccctggggtttggaccgctatctctctactcacaatgcaaaagatccaccccgtaatcccgacttag

SEQ ID NO: 34787 - DNA, 861 bp, Zea mays
  Peptide Sequence Number=SeqID_78162
atgaccgcatcaaaaaaggcttcgagcctccctactgatcagaggttcgaaggctggcccctcgggggggttcaacagctgcctcagagtgcttgggtttcacgcccactactggctggccctcgaagggttcacagccgcctcagacatagagcgagggatgaccctgggtacgttcgatacataaccgaggctcgggctacgctctcgagtcacttcgccgctccactgaccagcctgacagaaggacagcgccgcctgctccgctccgactgttgtgccactcgacagagtgaggctgacagaagacagcgaactccgctccgcccgacccagggctcggactcgggctcggccccggaagacggcgaactccgctccgcccgacccagggctcggactcgggctcagccccggaagacggcgaactccactccgcacgaccaagggctcggacttgggctcggccccggaagacggcaaactccgctccgcccgacccagggctcggactcgggctcagccccggaagacgacgaactccgctccgcccgaccccagggctcggactcgggctcagcctctgaagacgacgaactccgcttcgcccgaccccagggctcggactcagccctggcctccgccgacggtctccgcctcgcccgacccaggggctcggactcgacctcggcctcggaagacagactcgacctcgacctcggaggagcctccacatcgcccaacctagggcacggaccgaccacgtcaacaggaagcgccatcattaccctaccccaagctgactcaggctacggggaacaagaccgacgtcccatctggctcgctctgccagacaagtaa

SEQ ID NO: 34788 - DNA, 237 bp, Zea mays
  Peptide Sequence Number=SeqID_78163
atggagctcgagtcccgtttgttgggaaaaccgccgagggcgctgccgacgtctaagtctagataccatagttaccctaagatttcgttatcgacgcagttgaaaggcacgcccaagctatggccttacagcagcgtgcccgggccggagaacattgtccggctgtccgcagggttcgagatggctcttaacgagtccgtcaagaattgcaaggcgcttgcccaagcggctgagtag

SEQ ID NO: 34789 - DNA, 441 bp, Zea mays
  Peptide Sequence Number=SeqID_78164
atgggcaagaacaacaagcgcaagcgtgagccgactcctccatcggaggagtttggtgactcggaatactcggaggaggagttctcctccgagtccgaggggtctccggctcccgtctctcccccggcgtcgtccgatgactcggacgactcccaggggatagccgcggaggtctggacgtacatccgggccgtcgagcgcgccgggctcgaaggctcggatgagtcggagtactcctcggatgaggaggactcggacggcggcgacgagggtgaagacgacgacgacgaaggcgatggtggcggcagtggcagtggcaggggcggcggcgacggcagcagggatagcaccaagggcgacagcagcaggggcagcaccaagggcagcagcaggggcagcaccaagggcggcggcggcggcaggggcagggccagtggctag

SEQ ID NO: 34790 - DNA, 657 bp, Zea mays
  Peptide Sequence Number=SeqID_78165
atggcgatgtacggctataaatcaccggaccgtccggtgagccattcacaggcgaagtcgtcgctctcgggtagcgatcaacgacgtacgactataaatcatcggactgtctggtggtgcaccggactgtccggtgagccaacggtcggccgagccaacggtcggccgcgcaatccgcgcgagacacgtggccgagccaacggtcagaagggtgcaccagactgtccggtgtgcaccggacagtgtccggtgcgccaacggctccaagacttcaacggtcggctgcgccagaataggaaggaaatctgcaccggacagtgtccggtggtgcaccggacaatgtccgacagtgtccggtgcgccaagaaggagcggcctcaggaacttgccagcttcgggaatctccaacggctagtccgctataattcaccggacatgtccggtgtgcaccggactgtccggtgcaactccggagcaacgactatctccgcgccaacggctacctgcggcgcattaaatgcgcgcgcagcgcgcgcagaagtcaggcgagcctatactggtgcaccggacaaggaacagtacatgtccggtgtgcaccggacatccaggcgggcccagaagtcagaagctccaacggtcagaatccaacggcagtga

SEQ ID NO: 34791 - DNA, 606 bp, Zea mays
  Peptide Sequence Number=SeqID_78166
atgtccggtgcaccagaggactccaactcgaactcgtcaccttcgggaatttccagagtcactcgcgctataattcaccggactgtccggtgtacaccggacagtgtccggtgcgccaagaaggagcggcctcaggaactcgccagcttcgggaatctccaacggctagtccgctataattcaccggacatgtccggcgggcccagaagtcagaagctccaacggtcagaatccaacggcagtgatgacgtggcgggggcaccggacatgtccggatcacctattcacccccctataggtgctctcaagttcaatacaacacacaatattccacgctatcatgagccttcacccgtcgccgatagcgacgctgcgcaggagacaacttgccaggcactagtcgtcgtcgccgcccaagatcggatctgcgccgctcaggatgccctcactagggaacaccagaccgcctccgaccttgagcgttttgcgaccgctgcgcacaacgccaccttcccaccaccctacgacgacgtcccgaacaacaacaccaatgtttttgaagaccccgactacgaggccactctcatcgtcaatcttcacacatag

SEQ ID NO: 34792 - DNA, 201 bp, Zea mays
  Peptide Sequence Number=SeqID_78167
atggcgcccaagaggaagaccgcgaactcgtctgccgcagtgatccccgccatcgaccccaacagtcagttacccttcgcaggaagacagccggacgttcgtactccgagttggactgagtctcccacggaccaagaagtggccgaggcagccgctgaaagacagggcctatccggcatatctttaccgagggctggctga

SEQ ID NO: 34793 - DNA, 1299 bp, Zea mays
  Peptide Sequence Number=SeqID_78168
atgatctctcagcaatgctccaggaggggtttgggttctgtgctagaacttaacaatgcattggtatcatcagcattagacattcttctcaagcctatgtcatggggaatatccatagaattagggcagagatttcccttttctcatgcttacttcccaagccaacaaagtgacttgcttgcgatactaactggacccttatcttataaaggttttttggacctagtttcttatattagtgccttggttcatttggacaacacaagaactagatgctcttcgcagaaaaacttacaattacaaccatcgaagggattggtaaaatacaattctgcttggtacatgattattagtttccctatttggttcagttatgcaactgctttacttttccacagagaaggctcacaagattatttatcagaaacattatccaaagagataactgctgaatcaataagtgatgtcagtcttgttcagagggcagccttttacctttcttggctgctatgcccttataatcatgatcaacgcgagatgctatcaaacaatattttggaaatatcacattcttgggctaggaacaacaaaaagtgcgtaagctaccaaagtactgtgaataataggaggaaactgcgaatacccacagctgcggactctgagaaattccatgtgccagtcaacactataagctcccttgttaaagaatttgatgatcgctgtgtaaaatgttgtagcccaactgcctttcctcaagcacaagttggaaatctatcggacctccatcccttatactttaacctgttgcatcagtggattcctttgggagtattgcttgtatcacctagttgtgttaacgagcagaactgtgacatcctcctgcgctacacaagcactgggcaggttctggagtcaaatggagcacgagtaaaaacaaaagatgatgccactaatgatggtttcttaggcagctgcattggtactgctgagagatgggcattgactggagcatatctcatctttggctggcttgacgtagttgaggatatggccccattgatatttgattgcgaagataaatgtcatagttttgtcagccaactcagaaacaagacaggcccatacctgctcaagtgcgtgaagtcattatttaagacgttggaacagccaaatcaagataaagattttgtgattgatcttcataataggttgttaaactgggataagaacgtgcaaggctgtgagatatttggggatgttatccttgaaatgaacaagaagtttaatcttcctttgtag

SEQ ID NO: 34794 - DNA, 1701 bp, Zea mays
  Peptide Sequence Number=SeqID_78169
atggacgccaccccgccatccaagaaggccaagacgacggccgcgccgccgccgcgcaagctgcgggaggccgccgctctggcggacgaggtccggacgccggataaggccgcgaagaagatgacgccggcggcggcgttcgagcagatcccgacgccggagaagccggaggagatgccgagggcgcgcggccgcagcgtggcgttctccgtcaaggagatccgccgggcggcgctcgggctgcggcggcccgcggcgcaggccgaggcggcggtggaggatgatctcgagtccgtcgagcgggagctcggtgttggcgccggggctggccggagtcccgtcaagcgcaaggcggaggtcaagctgccggagagttatgagatgctcttcgagttcttcaactgcctggagagctctacccgactgctccgtatgaaggggtccaaggccacgttccccaacatctgttctagcattcagaatttgaccgagcggagatttacccacagccatcttgcacagctcaagtacataatgccagaggcgatcgtcatcaacaagatccttttgcgtgacgacacgacatgctgcatgtaccctgatcttcaggtgaacctcctagttggtgctgttgagaacgtccttaagcaaaagggagaaactgcatacctggcattaagaaggacctttaggcagaggctcgtggaattctacagggagcaccctgagggagatgacattccagagcacgagctgccacacccattcaaccgagcgagatcgagcttgccccaggacgaacaaaggactgctcctgaatcttcgtccccactcaagccatctgatgtcaatggacagcagcagaccgctgctgtgatgtcgcacatgtcacagtcgttcaagaggaggttctcgcagagatctccgatcggctctgcaacagccagtgcacccagtccactggtgaaggctgcttccactgctccatcaccactgagcagaaactccctctttggctgtgttgattctggcagcacttgtggtgatgaaaaatcatcaagtgccaaagaagacttctgcaagtccggtgtttcagaaaacacccctgcaaagtttgcctccacaccagcgaggctaatggcgcctacgccaggcctcaagacgccaaagagaccaatctctgccacaggttatgataccccgcctctgagaacggcgaagagatcagctcgcgcgaagctgtttaccactccaacaaagaataacagtacgggtggagagagccaaagcgcaagcgtatctggcgctagcgccgacgacgacttgctcagcttccttccacagtccctccttcagtcggtgaaggagaaggaagacagggctttggtagagaaagaatccggtttcgccgatcaggtcagaaggcagaagctgatcgcctccctgcccagcaccttcgacgtcgtgttcctcatctaccagtcgaggcagcggtcagtgatgacaaagcaggagctagtccacaagatcatcgcgagcagtcctaagatagctgacagaagtgaagttgaggggcatctgacgctgttgaaggagctcgttccagactggttctccgagaaaaccgcacgcagcggggatgctctgtgctgttggggtctcttggtcttacatgttaagaagagacggaccagggcgtga

SEQ ID NO: 34795 - DNA, 906 bp, Zea mays
  Peptide Sequence Number=SeqID_78170
atgggagcacggaggagattcgacgagcagactgggcgagcaccaggaagttctgagctatggcagccacagggcgagagcagtgctgctacagtagtgaccgctgcagcagataggacaacggaggaagagaagaaaagaacgacggctgctaggaaagaggtaacggatgtagacgataatcgtttcagcttatcaaattcgaaagtacgctgcacgcctgactgccgctccacacccaccctcgtgatgctcgccagagtagtcgaccgccgggcctccgccatccgccgcttcccgccgggctgcggccgcccccacaaaccggcggcggggcctccgccgtaccaccggattccaaccgccgccgccgccaaaactaaacacacactcccgaacccctccgcgcgagcggccaccaataccgccccacccccgccaagacaaaccctctcagcaaccgcctccttgggtgccgaggcgcccgaccgtggcgtggggagcggaaggaatgccgctgcggtggtgaccgttcgcctcgtctcggccgttagggggtacccgccgggctgcgggcgaggcgtcgccgtgtccaagtcgaagccaccggattcggaggatgaagcggagcgtgaggacggcgcgggtaatccgtcggcggtggtgggcaacggtgaccccaaggccagagcttgtgacggggatgtgatgctacgcgcgtctgcgcttgatcatgcggagttcagttccaatggtggggtgacgaccggaggtgatggtgacgctggtgcacatgatgaaggtggtgggaagccttgggaggttactggcctcatggcggcgccgttcttgccatgggcgcggcatgagaggaggtcacagcggggcagcggcggaaggccttaa

SEQ ID NO: 34796 - DNA, 672 bp, Zea mays
  Peptide Sequence Number=SeqID_78171
atggactacaaccccacggtatggtgtcgtcgcttccctctcgcctttcctactttctgtgagaggcttatttcggaatccttgatacttggtttggtggtgaggaagattcccgatgagctggtggagcactaccttggccaccgcagcggcgaggacttctgtgagatgggcacgagccccggcagcggcagccggaacgtcgccgccttgacgaccagcacgttggggaagaacttcgatgacatgtttgaattcttcgatgtcgagcctgttgggtctgcttctattgcacaggtgaatgggcctgtactggtggaggacacctgcctatgttttaatgcgctcaaaggcctaccaggtttaaataatctgttaaaagcttatgaagataaatcagcgttcgctatgtgcatcttctctcttgctcttggacctggagaggaaccaatcacatttgttggcaaaactgcgggaaagatcgtgtctgctagaggccctaacgattttgggtgggatcctgtgttccagccagatggttttgaacaaacatatgctgagatgcccaagtcagtgaagaacgaaatatctcatagagggaaagctcttgctctggtgaaagaacacttcgcatctgctagctatacagttcagagcgacgactcagcttaa

SEQ ID NO: 34797 - DNA, 735 bp, Zea mays
  Peptide Sequence Number=SeqID_78172
atggcgcctccgctcgaagacctcacccgggtactcgccgagctcgcctcgggcctcgcccagcctcctgctggcggcggtacattctcatccaccgactccctcccggcctccatctcctccctcgccgccgccctcaaccccagcggcgacggggccgccgcctcatccggaaccggggttctggacgccgcgctctccctcatgtgcttcgacccgctagaggtgaatagtgcccgcgtcaactgccttgtccgcaccctcgtctccgtgctctcggcgtcagtctcgtgctgcgtggtccgtcccgatggggacgctgctgaggagatgctctgtgtcgggagttccgtgtcgcccctggactgccgcgagctgctccggtcgtgtgcagccctcgtggagaaattgggggattgtggcggtgagatttttgttaccggtctctcttccgacacattgcaatcgggcatgtctaatgtcacaggaagtgcccatcgatttccgtggtcagatgatgtgtactaccttgctgatgagcccgaggtgcacttcgtctggcagcccaaccaagagtcatcggtactcgccatgtcgcgcgcgttcgacgactactatatcatggactgtggcgtcatctcggcgctggatgtgacgcagaggaggattgacaacaatgatcagtttgtcatcctcgccaccgtcgggatagcttttgtgctggcctgcctttaa

SEQ ID NO: 34798 - DNA, 648 bp, Zea mays
  Peptide Sequence Number=SeqID_78173
atggaacgtcggaaaggggcgaccgaggtgaagatgacggtcgatgtcggagaaacgatcgctaaggctgcgcagaacgttgaggaccaattttcagtcggagactggttcgccaaggcatctgccatggttttgaagcggcgatacaaggtccggggagatggaactggagatccaggacttgacaacgcagtccatgcgtgcccagtcggggaagtaaggcgcgggagtgtcgtcgaggatgtggctgtccagggagtatttgccaacgacgaggaggaactcatcgcgccagcgggtgtagttgttgttggcgaggtcgaggacgacgtgaacgagactccgtatgttctagacaacgacggtctgggagtggaggttgacgatagcagcagcctcgtgaaggaagatggtgtggtggatgcccttgtcagcaccacccgatggatcagagaggtgggactgattgtcgtcggttggaatgccatcggtggcagcctaagcagcgagggcgcggccgcgcgcgcgtactgcgcgctcgagagcagcgcgaacgcgttcgtggcgacgtcccgctcctggtccgcggtggccgcgttctgctctcctgaagggcttgggcgagtgcagcatcgcgccaggcggtag

SEQ ID NO: 34799 - DNA, 564 bp, Zea mays
  Peptide Sequence Number=SeqID_78174
atggagggagaggtaaaaagtggtggtgggaacacacagtggacctcaagccagtccacttttgtgcaaaattttcttgccaaccttgtagctaatggcaccaaaacatccactggcttcaagaaggatgaaagaaacaagggtgatgatgaattcataaacaagcctcttccctactatggcaaccttgctacaatttttggcaatagtgttgcatcaggacaatttgcaaagacatcaaatgaccctcttgctgttgatgatgaggtcggcttcctggaacagctgctcggaggtagtcggcgctttctgcaatatggctcggacgaaggccgagtcattggatcctctgtagaagtcctcgatcacggccgcctccgtgacctcggggatacgatttctcatggtctggaaccttttgaggtacgaccggagagtttcgtccccccggcacttgatggatttgaggtcccatggttgcgccggtttgtcggagagggactgaaagttggcggtgaagcgtcgactgaaatcgctccagtcgtcgatgcagtgtcggggtag

SEQ ID NO: 34800 - DNA, 288 bp, Zea mays
  Peptide Sequence Number=SeqID_78175
atggggagccaaaacccgacggagaattccccgttgccatctctgatcctggcaagagcgacggattgccggggcagcaggcaaagccgtggacgtggaggtccatgcggagcgcaacttcctttcggcgctggccccagcagcacagtcacagatgctgctccaacaggcaacaggcccacggtctcgaaacgaagcatgcatgcatgcatgcatgacagatgcccaaacgctagcggggcagattgcctgattaggctgaagagggcacagagcagtgatggctga

SEQ ID NO: 34801 - DNA, 1506 bp, Zea mays
  Peptide Sequence Number=SeqID_78176
atggacaagagcggcggcgaggcggcggcggcggcagcagcagcagacgacgtcgagcggcgggggggcgactacgagcaagacgagcacgagcggagagggacggtgtggacggcgacggcgcacattgtgacggcggtgatcggctccggcgtgctggcgctggcctggagcgtggcgcagctgggctgggtcgcggggcccctcgcgctcgccggcttcgcgtgcgtcacctactacacctccacgctgctcgccggcgcctaccgcgcgccgcaccccgtcaccggccacaggaaccgcacctacatggacgccgtcagatcgtacctcagtcccagggaggtgttcatgtgcggggtcgcgcagtacgtgaacctgtggggcaccatggtcgggtacaccatcacggcgaccataagcatggcccaggacgctctagctcgttctctgacatgtccatgcgccgcgcgcgccagcgcgatcaggcaggccgactgcctccgccgggacggcgccggcgccggcgcgcgctgcgacgcgccagggaccgtgctgatgctggcgttcagcgtggtccaggtggtgctgtcccagttcccgggcctggagcacatcacctggctgtccgtcgtcgcggcggccatgtcgttcgcctactccttcgccggcctcggcctctccgtagggcactgggtgtctcgtggcggcggcggcctcgggggcagggttgcaggtgccgccgcggcatcctccaccaggaagctctggaacgtgcttctcgccctggggaacattgccttcgcctacactttcgctgaagtattgatcgagatccaggatacactcaagtcaccaccaccggagaacaggacgatgaagaaggcagcaatgtacgggatcggagccaccaccatcttctacatctccgtcggctgcgctgggtacgccgcgttcggttcgaatgctccgggcaacatcttggcggcaggcgggctgggtcccttgtggctcgtcgacattgccaacatgtgcctcatcctccacctgatcggtgcataccaggtatacgctcagcctgtcttcgcttcggttgagaggtgggccgcctcacggtggccagaagccaagttcatgagcagcgcatacaccgtgtccgtcagcatccccctcttgcagagaggatcggtcaccgtcgcgccgcacaagctcgtcctgaggaccgccatagtcggcgcgacgactgcggtggcgctggcgatacccttcttcaacgccgtgctggggctcctcggcgcgttcagcttctggccgctcacggtctacttccccatcagcatgcacatcgcccagggcaagatcgccagggggaccaagtggtggtgccttctgcaggctctgagcatggtttgcttggtgatctcggtggccgtgggtgtaggctctgtcactgacattgtcgatagcctcaaggcctcttctagccctttcaaaattgtaggctaa

SEQ ID NO: 34802 - DNA, 240 bp, Zea mays
  Peptide Sequence Number=SeqID_78177
atgacaagcacggcaccagttgcacttgcaccaccagaggcagagtctatcgcgtgctcgcttggttccaatccaattcctttctatgtttatcccctttcctccgtgccgactgccgaggagaggagacatgtcgcgctagctgctatcctatcatcaccttcccctcctctcgatccacgctactggttccttgctcctactgcagtgtcatggcatattgcatatcaagctatatag

SEQ ID NO: 34803 - DNA, 402 bp, Zea mays
  Peptide Sequence Number=SeqID_78178
atgcggctgtttggttcagcttctgggcggcttctggccgccagaagcagaagctggagccaaacgcgccgcttctcgcgccgcttctccacgacgcgcttccgcaggaagccgtgcggccacttaacgcccgaagcgggcgtgagttggcttcggttccgcgctccgaggacccagcctcatccccgtcgcgaaagaagctctccccccgtcgtcgtcgtcgcagtttgcccttatcaactcgctgtcttcgtcttaggttccaatttgcagtgcaagcaagatctcggggtgttacctgattgtctctctgttgcatcacagaatctccactccaacgaaggtgatgttcacatttattttccccttcgtatcattaccattgtgtatgttaagcagtaa

SEQ ID NO: 34804 - DNA, 1638 bp, Zea mays
  Peptide Sequence Number=SeqID_78179
atggatcatggtcgacatgctgctgctgaggacgggcctggacagtcgatgaatcacaccaagaagggtcgacatcgtaccagggggagaaggccccgatctaggagcgctgctagcttgccaccagtggatgatgacagctccgctcggctaccctcacatcagtcggccgtggtgaagaatgcaggttcggcggcacggccggtttgcgtccttgagcgtgcaagggatttaactctggtggagaacaatcttcggcattgtgctctgttcgtcgtggtcattggttcgcggccgccggtgacagctgagcttttggcggcagaaattgcagcggagtatgagcttgatcctgcaagtttttcagtccaccgttcggtgcctgaagatttcgttattatcatgcaaaatgagcaagcggtgttacgtgtcttcaacaacggagctgttctcaactcaccttctgggtctttcaagttcatcaagtggtcaaggcttgcacacgctgaagcggtttccctgccttcctttgtgtctgtgagcttcgagggagtcccgttgcacgcatggagtgtggaaactgctagaagtttgctgcgagcgcactgcacggcattggagcttcatcccgacactgttgctcgtctgaacttctcctccttcagggttcttggttggagccggcatccagagctcattccggttgctgttgatcttttgattctgaagccggttcagagttttgaagtggagaccactgtgaagcatcttctagcttatcaggaagtgttggaacaggaggtttccaaggaggcatctttaaatggttcttctaatttagaggagcatatccctgctgtcaaggaattaaatattggggctatgattgaggcgtcagaagataatgtggagagtaacggcaggagacatgagcaggcctgcatggtggaggctggggcgtcggggctgtccggtggttgcccatctcactcccccctgccagtaccatcttccccctcttcacccttgagagctccggcagtttgttgctctatgggtggatgcgagaaggagcaggcaattcaggtgctacccccgggatctccatctcgggccacattcgacatgggagggcagaagtcagccttggtggatgcgcgaacgtcgagtcgcctatcacggagaagccccatcattacttactttcggcagaggaggaagaaggatagtcaacccagtctgctgcttggcgcgtccccgtcccccccttcgggtgcaaaagagttcatcgataagctgaccagaccagcaggtgggattctgagggcgccagtcagaaggccgcgacagggcaaggctacagccactgaggtggtaccccgacacaatagaagggtcgctggtgcaggagtggagagactggctactcctccaccggccacgcagggcaagaaacatattttgaaggaacttggtattgtgaatgctgaagagactgtaactattaggccaaaagaccttgatgagtatgccagagttttcagcaaagggctttccgaggtgcaggtcacggccatggcagcgttattcgactggtctaggcctatggagctgttgcagggcggaccaatctgctga

SEQ ID NO: 34805 - DNA, 576 bp, Zea mays
  Peptide Sequence Number=SeqID_78180
atggcattggaaacttgggcttcatgggtgaaagagagaattgatttaaggcgaacacatgtattcttccgtacatatgaaccgtctcattggagtggcttaaatcaaaaggtgtgtgaagtaacacaacaacctaccgctgaggccaatggaaatgacaggagagaatttggggatatacttgctggtgttgtggcaaatatgagtgtccctgtgacagtactaaatgtgactttgatgggggcctttagaagtgatgctcatattggactttggagtcatcctaataccatactagattgcagccactggtgccttccaggagttcctgatgcttggaatgagcttgtattttcgcaccttttgactaatggcttatatcctcaagagttgagagcagcatgggtgctcgactactcactaatggaatttagctgggcacatgtggtactcggctggcctgggttcatgaagttagtttctgtggtgcctggatcgattcttaagcccctagaataccaatccgtactgggaaaaacctcgatgattagatctaatctgctgaggtgtaggtaa

SEQ ID NO: 34806 - DNA, 1488 bp, Zea mays
  Peptide Sequence Number=SeqID_78181
atggccgacgccgccgcagcagcagcacggcgcctccgcgccttcaagcggtggatgcgcgcgcacggcgtcgtctgcagcgacgcgctcagcctcgacgtctccgatcccctcggcgtccacgtgcgcgcggccacgccgctacgcgacggagaccttgtcgccaccatcccgcgcggagcgtgcctcaccccgcgcaccaccggtgccgcggcagccatcgaggcagccgagctcggcggatgcctcgcgctcacggtcgccgtcatgtacgagcgcgcacaaggcgccgactcgccgtgggacgcctacctccaactgcttcccgactgcgagtccgtgccgctcgtgtggcccgctggcgaggcagagtgcctactcgccggcactgagctagacaagattgtgaagcaagacaaggaattcctttgtgaggattggaaagaatgcatcgagcccctcatgttatctggagagctggatgttgacccagatgattttagcttggagaaatatttatctgcaaaaactcttgtttcttcaaggtccttccagatagatagctatcatggatctggaatggttccattggctgaccttttcaatcacaagactgattgtgaacacgtgcatttcacgtctgcatcagatgcctcagactcagatggtgaagaagaagaagatgatcgaagtgatgcttctgctgatgacaaaccgactacaaaaaatcccacaagtagtcctccaggttcgagagctaacgacgaagatttggaaataatcattgttagagatgtcaatgaaggggaggaggtgtataatacatatggaacgatggggaatgctgctttgcttcacagatatggtttcacagaacttgacaatcaatacgacattgtcaacattgatttagcattggttactaagtggtgcacatccatattctccggtcgacatacaagagcaagggtatcactatggcgtaatctgggttattctgggtgcactagccaagataccgagtactttgagattgcatatgatggagagccccagcttgaactctcaatcctcctttacatcatcaacatgaaacctgatgtttatgacaagctgatctgcgtggcccatggtttcgttagtgacgaagagcatgagactatctgtaacgtgttcaagtttgtcaaagcaacaagctccaaccaaaattctgaagtcaatggcctcgagaaactgcctgatgtgaagaagttattgcatagtgagagcgtttgttcggcgcttctatcactcgctgacatgagggaaagcctctatggttcgaacactttggaagatgacgaggaagagcttcacgcatgctgcgttgtcaacgaaaggaagctctaccattctctggttttgcgggtgagtgagagaaggatacttcgtagattgagggagtttgcctctagtgggtcaaagggccggaagaggaagcacccctag

SEQ ID NO: 34807 - DNA, 672 bp, Zea mays
  Peptide Sequence Number=SeqID_78182
atggctgaaaggtgccaactcccacggagttgtgttcccccaacgacgaggcggaaagacggtggatctcccccatccgagggcttggaaggtggaaagacacgacgcataagggagcgcgaaggcatggtctccttccaagggggtcaccctccttttaaaggcggatctccctacttgcgtccccagccgtcacgggctgagtcttctccaacacactccaaggtcctcccccacggcgcgggggctgggtcccacacgtcatgcgagccgactcagagcagaagaagccaaaccgccgcgcgcgagaattttataagctttccaaaaagtccaagatcatcaaaatcggagttcggagctaaaagttatgcccacaatacgaagtcggaattgctgaaaaacaagagcagcatatgggatgtccggtgcacaccggactgtccgggaccgggaaagggggataccccaaaaaggatccttccccgagaaggaaccaggctccgagcccccctactgatcagaggttcgaaggctggcccccagaagggttcaacagccgcctcagatcgcgtgggccctgcacccactactggtcagaggttcgcaggtcgaccctcgaaagggttccacggccgcctcaggctactcgggctctgtgcccattactga

SEQ ID NO: 34808 - DNA, 324 bp, Zea mays
  Peptide Sequence Number=SeqID_78183
atggagggggcctccatcacgacgagcttcgacgggctccacaacctgctggcggccaagatctcgctccgccaccgcggctacaggggctccgtgtccgtccttgggggctcccacaacaccaagccctcggtgtacccggtggtgggcggcaccggcgattttctgtacacggaggggtacgtccggtcgtcgccggtggactcggaccggccaaaggtgatatacaagttggaaattcacttgtactggccaccgaaagttacaggagtacaatttgacagcggatgtgtgacactacacagcggcacattttttaagtga

SEQ ID NO: 34809 - DNA, 597 bp, Zea mays
  Peptide Sequence Number=SeqID_78184
atgcagctcaagtaccccgctccgggcgccccggacctggccctgcggaccaaagggctcctggagcaagccgggttcggccccgtgaaggaggaccacagccgcgggctggaccacggcgcctgggtgccgctgatgctcatgtacccggacgccgacatccccgtgtgccagctgtcggtgcagagcgaccgggacggcgcgtaccactacagcctcggcagggcgctggcgccgctgcgggaggagggcgtcctcgtcctcggctccggcagcgccacgcacaacctgcgcaagatggggccgttcgacgcgcccgtgccgcagtgggccgccgagttcgacgcctggctcaaggactcgctcctcgacggaaggtacgaggacgtgaaccggttcgaggagaaagcgccgcatgggagggtggcgcacccgtggccggaccacttctacccgctgcacgtggcgctcggcgccgccggggacggcgcaaaggcggagcagatccaccagtgctggaccaacgccacgctctcctacgcgtcctacagtcgccaggttgaacagattgatgtcgtccttgatgacaagggctaa

SEQ ID NO: 34810 - DNA, 249 bp, Zea mays
  Peptide Sequence Number=SeqID_78185
atggaccgggccgattccggccaccaccgctgtcgagccgtaaccttcactggtgaccgccagaacctcccggagccaaccctgcccctcgccggacctctctcgccgccgggggagggacttccgggggagaagagggaaaaggccagggggattttttgcagtgtcagcgactcagagaaaatggtggcgcaggggtataacttgaaggggattggatttagaaagaacccaggggtcttccgatga

SEQ ID NO: 34811 - DNA, 1020 bp, Zea mays
  Peptide Sequence Number=SeqID_78186
atgtcttcgcactcccttcatgcatcgcgtccttccacctcccgagcccctgaatggggagcactcacgtcgctttgtcttgctgtcgttggaggaacgcaacttcgcggaagttggtacctttcagccatcgctcggcttcaaggattttcatcaggcagcccggctgcatcccctcgccggtggtcacccaagacggtgaccaccagttctatggtggggagaagcgagccgagctgtggcctctgccccgccctcagcttcaaggatcttcattatccttgctggggcggagggcgggctgagccggagctctaccttccgcacgggttcgtgggtcaccctctccttcagcattcaggggagagggtgctcactggcctagcggaaggggcggactccaacaacgcggagctggtcggccgcgagcgtcgtcagcttcagcgcgttgggctcgctggctcagctggctctagctcggctcccggtgccccctcccgccgtacgagcggtcgccgtgccacgcgctacgaagggccacccaagacgtcgtgcgctgctagggcggcgttcgtgttcttgggctatcctgcctttgctccggtacgacgcctcttgcgcggaggtcagtggtcccctgtccgagaggatccgagtggggatctgcgggtgggcagatggctgccgtcgttgacgttgaggtggtggcggctgaagaagtcctcgttgccgacgagatcgccgccaccatccgcgctccgggcctccggctctttggctttgatagcttgtcctcgcccctcgagtggggacgtgggcgaggagctcgtcgcagcagcgtctgccctaaggtcatcgctgctgctgtttggccactcggagcggaggtcgttgtcgctactgccggagtgggcgtcggcgagccaccaggggttttgtcgccccgcaggccctccaatgtggggggttgttcgtacctgcgggagtggaaccggagttccatttgtaatggcaccttga

SEQ ID NO: 34812 - DNA, 282 bp, Zea mays
  Peptide Sequence Number=SeqID_78187
atgaagaccctgacgacgttctgtggctaccatcccctggagatggtgatgcaccccttgggactcttccctgctgagaagaaggatgcccccatgtggtgtaaccgtgttgggagggtcactgttcagtgcatcagtgcgttgtaccgcctccaggccctgcagagcgacgctatggcacatcttgctaacatcgcccaaaccaccaagctcaccctcgacagccgagaagattttgtggtcgacttgtgtggcggaaccgcccgaattattccaacttaa

SEQ ID NO: 34813 - DNA, 2730 bp, Zea mays
  Peptide Sequence Number=SeqID_78188
atggaggtagttgagttggttccttgcgcccgcaataaatggggcaactggcatgagttttggttctacgttgcggagggcacagtcgaagaccatccggggctccccgtggccgagatgtgctcgcattattactcagcgtacccaccgtttgaagtggcggaggaggatgcagacgaaggggcccttcggtgcgcggccggcctgagcagcgggcgcgatttggttgaggagtttgtggcgtatggggtgtggcctttggcgcatggctgggcgctgggcgaagtatgccctcgccagatgccttcctgtggtgggatgttggtgcgaagtcccgccttcgcactggatctacatagccgcgatccggccgcctttgtgcgtgaggcggaggatggggcggtgcggattgttggtcggtacgtgccgaagacagagggccagcgtagctgggatatacgcgggtctaatgaccgcttgaacagggtcttcgagttgaaccgtctgccgtatggcggttatcccgggcaagacgatgtggatcgtcgcgggaagaagccggcggcagaggctggagacgaccccgcgccggcggccgccccatcctctaagaagaggaagctaggtattgctacgggaggactgggggtttctgatggttttgctagagaattgatgaggacatgcgcggccccagggggaaggatgtcttcgcccgagctccgggagtcttcggcgcggatgctgaggaatattgctgttgttgtgtcggtagtgatggacaaggatcgtcaaggagctgcgcagaagcgccaggcggtcgtcaggctgcatgaggccaggccgaagaggtcgcgggggactgcgaaggctgctgcccccggcggaagccagccgacgctggcggcgaagtcggccgcccctgggtccagcagggtgccggaggctgtgaaggcggctgccggcggcggtaccaagtctgtccctgccggagccgcgaaggcccgagagttgcctccgccgggcaagcgtgttgccgacttcgccaccgatattagcgtggatgattatcttgttgggtcgggcgaaggccagcttgttgttgttccgcctaccgtggcgaccgcggcggctgccgtggtgccaagggcgaagggtagtgctcttagtgccggtggtgagattccggcactcactgccgtcagggacgaggcgggcgttgtgtcacgccgtctgaaggaggcattaagtcaagcagctgacttcgcagaccgcgcggcgtcgggggcccttacggcagttgtgtctgccgaagtcgagagacttcgggcgcaacatgctgacgccgtccgggaaaagtcggccgccgacagcaagtgccgcaagttggcggataaggtggccgcgctggagggtgagaggactgacctctggcgccaactggcggaggagaggaaggaggctaatgaggccctcgccaaggcgcagtctgcgcaggcggaggccaatttggcgcgggcggagggcagtcttgccagacagcgcgtcgaggaattggaggagcgattcaacgctctgcagacccgtgtggagagggccgaggcttcgacgcgctcggaggctgagcggacgcgcaaacagcttatggactcataccatgagctgggcgcgcggaccgctgacttcgaagtgctagaccgagagcccggactttgctgcctcgagtggctgcaggaggagttgctggcgctccccgccatcgtggaggggtttatgtcctatgcctccctggttacctgcgaaggggcgatgaacgcgctgtcccgcgaagggtgtcggcactatgaggtcttcgaccaagctgatgaggatttcgagcgcgagatttacaaggttgaggaccctgtggtgaaggaatccgcgggagccctcttcgaccggatgtggggccctcatggtcgggaggtggtcagggagcggtccgagacggcgaggggtcatgcggcgcgtaacgagaaggtggaggacttcggggctttgaacagcgtgcatcctgattcagagtcgaacccagttgcggttgtgcccgaggccgccccggcgccgcccccagaaaccgtcgaaggcgcccctgatgcccccgcagccactgcggccggcggtggctcatcgccaactgctgcgccgagggctgaggatcctgtgaagatggcggcggagccggcagcggaggatcccgcgacggctgggtcttcgcaggttcaagattttgggcctacgcacgcaaccgctactgctaattttttggcggcttcgaccgtggatgatgggaatgaatcggatgaatctgcgtctaagttttctgattttggtgactctgggacttcggttgagtggactgaagagtcgtcggatgaggacttggattactttgcggccttggatgtggcagcggcggaggcttcgccgcgtgctgtggatgctgaagctgtgtctggttcaagtgctgggtgcaggcggcgaagggcggttgcgaagcgtagagtgagtgaggcggacggcggtcggcttcgtgtgggcagggttggcaggcaggagctgttgtccttgccggccgctgcgagtgcaggtgagggggagctgcgaagtctttttgcgggtgaggagctgaggataatgctatttaactatagggagatgggaattattccgaaggttgagccgatgtaa

SEQ ID NO: 34814 - DNA, 75 bp, Zea mays
  Peptide Sequence Number=SeqID_78189
atggcggtcaagaacaggtaccgcagggatgaggcgcatggaggatgctgcgaggagttcgtgagagagatctag

SEQ ID NO: 34815 - DNA, 816 bp, Zea mays
  Peptide Sequence Number=SeqID_78190
gccggagaactcgccgccgacgagttcacccgcctgcgcacatggaccggcccgattccggccaccaccgctgtcgagccgtacctcactgtgaccgccagaacctcccggagccaaccctgcccctcgccggacctctctcgccgccgtgtcagcgactcagagaaatggtggcgcaggggtataactgaagggattgatttagaaagaacccaggctagtgcttttggcaaacaaacccctcagccaaacagctgcatgtctagaggtagaggagtagactcctcacaccagatgacttctcacggatcctcggacgaagggaatgcacagtcccacacggacggacttgcacgagagggttttccccgtatcttgtgggaggtacttcagggagctggttacacgacgcctccccagtatgcggtgcagctgtttgagaagcaccgagtgccccgctgtagggtgaggatgaccctagagcctcatcccctacagccaggctggcgttcgctggattctgagtcttttggatacagggctgaggatactatcgaggcgattgctcttcacggactgaccaccttctgtggttttcaccccttagagctgcccactcaccccattggtttgttccccgcggagaaggaggacgacccaatgtggaaggaccgagtggagcatgccaaggatatatgggtacgagcaagctcagactgctcacttgacggtgcggtgcatgaatgccctgtatcgtctgcaagtgatgcgaggagaggcaatgtctcacctaatggcattgttggaggctactaa

SEQ ID NO: 34816 - DNA, 300 bp, Zea mays
  Peptide Sequence Number=SeqID_78191
atggctgcgcacagcacgaagaggatagaccatgatgagagaggggtgcaagatgaaaccatcgctcacctcagcggatacggcgagtgcgcgaacgacgacgtctccagcagatcgcagcacagacgttcgggtctggcgacattggcactatggacgtgttccggcgaggaacctagacgcgacggcgaggcacgcgtcacggtggatagtgattgcgcgagggcaagaacggacacggttgctgcgtttgtgcaagggagaggggtgagcggggccggcactcaaatgtgcgtctag

SEQ ID NO: 34817 - DNA, 300 bp, Zea mays
  Peptide Sequence Number=SeqID_78192
atggctgcgcacagcacgaagaggatagaccatgatgagagaggggtgcaagatgaaaccatcgctcacctcagcggatacggcgagtgcgcgaacgacgacgtctccagcagatcgcagcacagacgttcgggtctggcgacattggcactatggacgtgttccggcgaggaacctagacgcgacggcgaggcacgcgtcgcggtggatagtgattgcgcgagggcaagaacggacacggttgctgcgtttgtgcaagggagaggggtgagcggggccggcactcaaatgtgcgtctag

SEQ ID NO: 34818 - DNA, 429 bp, Zea mays
  Peptide Sequence Number=SeqID_78193
atgacccaatcaaaacagcagcaccaaccccctcttcatcggcaacaacattgggcatcatgtgaaatacagaacatagacacacatgcacatggcctcccggtccaaaatacacacaaaggtgcaactataggtcaggtggtctggtggtgcttcaacgccaaagctggggtccacgtgtccatagtgaacgacaaaccccgaggcatcttgatcggcatctcgctcactcttctccgcccgtgtctgggacatgccttctccgatgaacgagcgatccgatccacagataagattggcgccgccctcgtcgactgctacggccgcgacaacttctccagcgactccaaacgcggagggccatggacccgctacggcggaggggtggggcaggatctcggggaggggctggatctcatggagagatga

SEQ ID NO: 34819 - DNA, 577 bp, Zea mays
  Peptide Sequence Number=SeqID_78194
gcgcaagaacaagggcagaaagcaacggccacgtgttcgatgcgctctgggctcgccagagcacgcccgacgcgcgcccgcgtgccccgcgtcgcgccaaagcccagccggcgccatggcctgcgcccgcgcctataaagcccccagggacttcgaccgtacccctccgcacgcgctcgacctcaccggagcccaaacccaccggcgtttgcccgtgcacggcgtgtccgcggccgcccgatccccctgccaccgtagaccggccaacaggaccctttccaaccctgtccagccctcggagaagactgtgcacacctcggtgaagctccccgaacgaggaatcggagtttgcttcgccggagaggccagtccacggtcgctagactccacccgaccgccggcgagcgtagaccgggtcaccgtggtttggccggagcacccgccgccgacgagagcacccgcctgcgcgcgtggaccagacgattccggccacccccgccgtcaagccgtacaccgttgtgaccgccaggacctcccggagccaaccccgcccctcgccggacctctctcgccgccg

SEQ ID NO: 34820 - DNA, 486 bp, Zea mays
  Peptide Sequence Number=SeqID_78195
atggcgtcgggcgcttcagtggggagagcctgggcgggcggttggcgagagtatcgcgtcgtgtacggttccctcggagaagacgaacaggaacagcgtgacgcgcggttctggagaaaatatcgcgtccactgcacctggtgggctgctgggcgagaaagtgccaagcgggccgcgggggcgctgttgggccgttggctgcatcgccggctggcgcgggagcactggggtgggattgggccaagcgcgcgcacccgactggggagcgcagcgcgttgggccatccaggcgtggggcagcgaggtgggcctcggccacgggaatggggcgcgcgcgaggggtgccggtgcgctgggccgggcgcgcagcgcatgcgaacgtgggtcgtgcggacaaggagcaaggcacgggctgagacggcttgcgcgtgggtcgcggctgactgatgagccgagtgggtcggggaagcaggtcgagggggcatag

SEQ ID NO: 34821 - DNA, 150 bp, Zea mays
  Peptide Sequence Number=SeqID_78196
atgtatgggttacaggtggtgatgaggaggatggttatgattatgactatggttgcttttggtgcaatctattctcaggtaaagaagaaggagaacggtgtcgaggtggatctccgggagttccaggacgtcaacgagttcgaggattag

SEQ ID NO: 34822 - DNA, 396 bp, Zea mays
  Peptide Sequence Number=SeqID_78197
atggcgctcgcgcccgccctccccggcgcggccctccccctccctccctgcgcggcgcgctcggcgcgtctgctcgccccggagcgtccccggcgtcccacctcatcccggccccatccccctatcctggccatggcggcctggcctaaccgcctatggcgcgcggccatggcgcgcccagcgcgtccgcccgcccccggcgtcccgctcctgtccccgcggcccggcgtggtggcgcagcgcggcgtcctgcgccgccccggcagcccgcccgcaccggcgtgccttgtcccgcccgcctcagcgtgctctgcccctacccggcgcggccttgagctcgagaacgatctggttgaggagcccgaagaactcgcaggagaagcccctgagcagtag

SEQ ID NO: 34823 - DNA, 516 bp, Zea mays
  Peptide Sequence Number=SeqID_78198
atgaagctgtggaaggagacttccaggagttccaagattacgacgagttctaggtgtgggttagcggcaacccccagtcggctgcctgtgaaggccgcgttatctacgtttcttttccgcactttgatttatttatcagagatggaaaaagagccacttgacatggttgagagctcagttcgagtcatcgagacacatgttgacatcattcgcagtctagtgactgatggggttgtggatactagtgaaccggaatcagtgtacacacttaagaccactttgtttcaaattggagatgtatgcgacatgcttgagaagtgtgctctgtccatcaaaaagtatgctgactccaagagggctaaaattattcaagatgaagccctgcaatatgctgaagatgatgaaactgcagatgatttggaggaactcccaagcccagatctccttactcaagccaacatattggaaaaatattttggaattcagtatgatagcgaccagtcaaggggttgttga

SEQ ID NO: 34824 - DNA, 432 bp, Zea mays
  Peptide Sequence Number=SeqID_78199
atggtgtcgagcgctggtgacacgtcgtcgtcactggtgaagatcgagtcctacatgagtgctgtcaagatctacctcaagagcctagacatccaactggagaaacagctagccaagacatggagaagcacaaggggatatgaactcgtctccaatgggattgacaaccatttagtttcggtgaatctcaataataagtgccttgtcattgatgaagccgatcgcatacttgagcaaaactttgaggaagacatgaaacaaatatttaaacgccttccccagaataggcagattgttcttttttctgctacacagactccagaggctactgttgaaggcctgcaacagggttattgtgtcatttctagcgataaaaggttcttggttctgtatgctttcctaagaaagaagcggaataataagatcatgtaa

SEQ ID NO: 34825 - DNA, 825 bp, Zea mays
  Peptide Sequence Number=SeqID_78200
atgggcatgacgtcctccacactcgccggcttgtcccctgcagcacacccaagcgaccaccggcactcgatcagcgttggacgacgccagggaatcgagaggagcgggctggtgcggcggtggaaagcggctggtgcggccgaaagcggcagccgccgaggagagcggggcgacgcgggctgcagaggagcggacgccgcaggggccccggcggcgacggaggtagccctgcgcaaggcgggggctagggtgtggaggcggcgccacatggtggtggatgggtggggttggggtctctcggtggcggcggcggaagtggagatggatgggcgcactgttgacaacagggatattcgccgtggaaggaaacttgtcgcccagagatctcctcgaagagtgtcggggcgaggaccgagatccggggcgcagcggacgcgtccgctgatgctgtgcgggggcgacgatccggggcaagagtgccggggcgcaaaggaggcgatctccttccatggagagtgtgggcgaggaccgagatctccggggctgcttggaagccgacctacccaggcgtcctcgagaccgagatccggggctcgtggagcagtgggggatccgcggcaaccttcctcatgcgacgtcgtggggaggaggtgcgcgttgatggcggcctcggatccccggatcggcgttgatggcggggagagaaggtgggggatccgcggcaaccttccttcggccggtgggtggggcggatcggcgtcgcgttacgacggatgggcagaaccagaaccgtgtggacgcctacagttgtatcttaaacagtag

SEQ ID NO: 34826 - DNA, 681 bp, Zea mays
  Peptide Sequence Number=SeqID_78201
atgacggcgaaggtacacccgaacgtcgccgcgccgtccccaggcctcggccagcaaccggcggtggcgccgggcgacggggaaccggcggcggtcaccctgacggtgtggcgcaagtcgctgctgttcaactgcagggggttcacggtgttcgacgcccgcggcgacctcgtgtaccgcgtggacagctacgcgtccgactcgcgcgcggaggtggtgctgatggacgccgcgggccgccccgtgctcacggtccgccgccgctgcaggaagctgatcggcctggtggggctggggctgtcgtccgaccagtggctgctgtaccggggcgtggacgaggcccggcgcctgccgccgctctacgccatgaagcgggcggccgcgcaatcgcaacacatgcgtggaggtgccaagtccgtggcgcacgtcgcggcgtgctctgcgggcgccgggtacgaggtggaggggtcgtacctgcggcggcgctgcacggtgtacgagtacgacgggcggcggcgagccgtggcggaggtgcggcccagccccaaggaggcggtgggctcggacgtgttccggctggtggtgcggcccgggatggaggtgtcgctggccatggccgtcgtgctcgcgctcgaccagatgttcggcaagccgtccctgctcaggagctggtcctcgtag

SEQ ID NO: 34827 - DNA, 852 bp, Zea mays
  Peptide Sequence Number=SeqID_78202
atgtgggtcggcgagggcagtgcgaacggaggagggtaccggggaagcgtcgggtggagtgctggtcgtagcggctgccaggatgagccggtcaacggggcggagaacgccagcagcgcgccgagtcaccatcgggtggacgtgcccggggtcgcggtggatggcgaccgggtggtatacagacgactcggagtgagccgccggaacgtcgggagcggctggtggggccagctcacggcggtgatagacgacggcggggtcggcgaatcgggccgcgctcgtcgacgggcccgagtcggggggcgccgaggtagtggcgtggccgcagcgacggtagacgagggcggggttggcaaatcgagccggagtcgacggggccgcgcgtggcgcaggcggggtcgacggggccgcgcggagcgccaggcaggatcgacggggccgcgcgtggcgcaggcggggttgacggggccgcgcgtggcgcaggcaggatcgacggggccgcgcgtggcgcaggcggggtcggcggggccgcgcgtggcgcaggcggggtcgacggggccgcgcgtggcgcgaaagaggtcgtgggggccgcacgaggagcagagcacggaccgggcgacgaaactgagtggatacccaggtgaagaagtgtgtgagggtggtgaatgtgtccgacttcaaccgaagcgggaaggtccagagaaaatgggaaaaatcatccaaaatcaccagataatatttataaccagaaagactgagtacaggggaggtccaaaggtcacaatgaaccaggtcaaaagcctgctcagcccgagaagaagtagtaaatgggagacgagtatgtcggcctaa

SEQ ID NO: 34828 - DNA, 1116 bp, Zea mays
  Peptide Sequence Number=SeqID_78203
atggccaatgagcatagaatggtgatgcagggatgtacgaagacaaagtgcagcacacatctagaaaaaaggaagacaagtaaaaatgttattgatgcaatgaaggtccacgtaacaggaagaagcaacctggattggagttggatgccaattcactggcagcaaaacaaaagcaacgcgagaaatcacgtcaggaaaagggacggtttcttggaggcattgtctcggttgacgcatgagcagctgcgctcgtcacggtggcgagaccgcgaggaggatgcaaacatacttgatgtgtttgtccccagggtgcggcaaacatttgatacaagggaacaagcctacctcttttaccttgactatgcaaagttggttggttttagtgtcaggacaaagagatgcaactgctggtctggttcgaaaattgtagcattctgtcgggagcgtgcgggaggaacaaagacgaagcgtcggttcggcttgggtggggcggttggctcggaccaggtaaggatacaactctgtgggggtggcagagctcaacgacgccgggctcgctctcgcaagcagcgagccacccaccaagcctggccaaatatgtcggagttcggcggcacgccgctcgagcgccactgcccacaccagcaccaaggcccacaaaaggcccggtgtcggcggcggcgcatcatcctctgcctggccttcgccgtcctggtcttgctcctcctcgctgcggccgccgccatcgcgctgctggtcatgctccgcacgcgggacctggtcacggagctgctctccgtcactgccacgggcgtcctcccgagcgtcgtacgtcccgctgccgaccgtctccgtccacctcaacgccaccttctgcctcgtggtccgcgtccggaacccgaacccggtcgtgttccgccacggcgctgccgccacgtccctctactaccgctgcgcgaccgtgggctacggcgaggtgccggtccagggcgcggccaccgtccggatggacgtcacggtgcaggccgaccgggtcgtggcggccgtcgaggtcggcccgggggcctcgtcgcggacgtgctcgccggtgagatggagttcgaggcgaggacctag

SEQ ID NO: 34829 - DNA, 1341 bp, Zea mays
  Peptide Sequence Number=SeqID_78204
atggctccgccgagctccctcctcgcctgcgcgcggcctcacggcctcgtccaaagctcgccggcgcgtccccggcgtccccagccctggcctcggcggctcgtccgcgggcccggcgtggcgcgctcgcgcggccgcggcgcgtccgcccgccccagccccccccacgcggtctctgcccggcgtccgtggcgcctggcgcggcacgcggtcccggcgccggctctatgctcgcgcggcccccgttgccgacgcggtggcaatgagactgatggttttggttatgactatggtgctggtaagtggtattctttccgtttggaaaggatggctcgacttagacacactacacgaaagaccgtcatccccttcttaccctcccgccttgctgagcgtccgcttcgccgtcccgtggccggacagtccagccacttggagaggctgcaccaccgcctgcatgaggagcaggagcgtcgacgacaggagcagcagggctcttccttctcgctccaacaggaaatagagtctgtgaggagctgctcccctgtgcttcctctggaggcaccccctgcaccaccactgggcgcaccagcctctggagtagctgctggaggagacccagacgacggaggtggcgacgacagctcgagccatgacaccgacttctctgctgaccaggagccggaaggttgggttgctcgatccatcactcgcgacgctgctcgcgggtgtcacttccatgacgcgctcgacatcctgctacgtcgggcacttaaccggcgtacttggtccatcgagtatcgctgtgtggtctaccagcacagtcgcggggtctacctggactgctgggaggcgacctgcttggtgcgccgcccggagaacagtctccaaggtgctgaggtccgctcagagcactattctatctctgagcgggactcagctgaggcggccatgcaagatgctgcacggcgtgcactttcgcactactgctcggttctcggtggggtagctgacggtctcaacctgaagtactacccccgccgtccatctggcagcacaggaggcgtgattgtctcacctgttggtgaggacaatcctaggttgagcagcacagtcaacctagccgccgtgctaaacacggagctggaccatgcactagacgagctgagtagggctcgtgctgagatcgcccagctgtgggccgagcgcgtggagtgtcgtcacctagatggtggttcccccgctcccgtcgggactcagcacccgtaccgctcacctcggcgtggacaccagccttatggcaatcccgactgcaagaccaagatagacttggaaccatag

SEQ ID NO: 34830 - DNA, 1296 bp, Zea mays
  Peptide Sequence Number=SeqID_78205
atggccacagtagagctgccagcggcgggcatggccggcatgctgccgccgaggaacgccacggcgcaggtggcgccgggcaacaacttctccaaccccgcctcggtcgtgtgctactcgccgatgatggtgacggcctacggcatctggcagggggtcaacccgctggagttctcgctcccgctcttcatcctccagacggccatcatcgtcgccaccacccgcctcctcgtcctcctcctcaagcccatccgccagccccgcgtcatcgctgagatcctcgccggcgtgattcttgggccttccgtgatggggcaggtggaagtctgggggaccacggtgttcccggtgcggagcctgctgacgctggagacggtggcgcacctcggcctcctctacttcctcttcctggtcggccttgagatggatgtcaacgtcatccggcggtcggggaagaaggccctcatcatcgcggtggcggggatggcgctgccgttctgcatcggcaccgccacgtccttcgtcttccggcaccaggtgtccaagaacgtgcaccaggcctccttcctgctcttcctgggcgtcgctctctccgtgacggcgttcccggtgctggcccgcatcctcgccgagatcaagctgctcaactccgacctcggccgcatcgccatgtccgccgccatcgtcaacgacatgtgcgcgtggatcctactcgcgctcgccatcgccatctccgaggtcaacagctccgccttctcctccctgtgggtgctcctctccggggtcttcttcgtgctcgcctgcttctacggcgtgcgcccgctcatgtggtggatcgcccgccgcgtccccgagggcgaggccatcagcgacgtgcacgtcacgctcgtgctcaccggcgtcatggtcgccggcgtctgcaccgacgccatcggcatccactcggtgttcggcgcgttcgtctacgggctggtcatacccagcgggcagctgggcgtcgtgctcatcgagaagctcgaggacttcgtcaccgggctgctcctcccgctcttcttcgccatcagtggcctccgcagtccgcaccaacatttcccgggtgcacgatcccgtcaccgtggggctcctcgtcctcgtgttcaccatggccagcttcgccaaggtcatgggcaccatcctcatcgctgtctcttacaccatgaccttccgcgacggcgtcgccctcggctttctcatgaacaccagaggactcgtggagatgatcgtcctcaacatcggaagggacaaggaggtcagtag

SEQ ID NO: 34831 - DNA, 1506 bp, Zea mays
  Peptide Sequence Number=SeqID_78206
atggtgctggtgtctgtggcgatgacggcgctcgtgacgcccgtggtgacgtcggtgtaccggccggcgcggcggctggtcggttacaagcggcgcaacctgcagcggtccaagcacgacgcagagctgcgcatgctggcgtgcgtgcacaccacccgcaacgtgccgtccatcatctcgctgctggagctgtcaaacccgaccaagcggtcccccatcttcatctacgcgctgcacctggtggagctcaccgggcgcgcgtccaacatgctcgccgcccaccactccgccgccaaccagaaccgcggctccagctcggaccacatcttcaacgccttcgagaggtacgaggagagcgtgggcggcgtgtccatccaggcgctgacggcggtgtcgccgtaccagacgatgcacgaggacgtgtccgtcctggcggaggacaagcacgtgtccatcatcgtgctcccgttccacaagcagcagacggtggacggcgggatggagcccatcaacgcgtccctccggggcttcaacgagagcatcctctcggcggcgccgtgctcggtgggcatcctcgtggaccgcggcctcagcgccgcggcggcgcgcatggcgagcgtgcaccacgtggcgctgctcttcttcggcgggcccgacgaccgggaggggctcgcgtacgcgtggcgcatggtggagcacccgggcgtctgcctcaccgtcgtccggttcatcccgccggactacagggcccccgcgctggcgccgccgcagcacatgcccgcgtccagcgtccacgcgcgcgccatcaccatcgtccccaagagcgagcggcagatggacgaggagtacctgaacgagttccggacgcgcaacgtcggcaacaacgcgatcctgtacatggagcaggtggtggccaacagcgaggacacgctggcggccatccgggacctggacagcgcgcacgagctgtacatcgtgggcaggcaccccggcgaggccgggtcggcgctgacgtcggccctggcggagtggatggagtcgccggagctggggcccatcggcgacctgctggtgtcgtccgagttctccaagatggtgtccgtgctggtgatgcagcagtacgtgatcacgacgccgcagccggcggccgtgggaccagcagcggcagcgcccgtgacggacgaccccgtccggcagtacgtgaccaacgccaaccagcggacgtcggtggccggtctcggcgtcggcggcaaccagatgggccgcggcgggtggggcggcgcagatggtgaggcggcgtcgcgcggccctcccgacggctcgccggccgcgctacggggcctgctgcagcagcccctcctccacgcctacgaggccaaggacccggccgcgtgcatggacatccggcgccctcgtggagcggcggctgcctcgccacctgcagtcttcaaagcctgcggcacgttgaacttttcactggcggtttccgttatcaaacgtcagtga

SEQ ID NO: 34832 - DNA, 428 bp, Zea mays
  Peptide Sequence Number=SeqID_78207
cggcgcatgaacagaggaccgatgcttgggttgccgacggagacagaatcaatgaactgagaagggacatccgacacttgcaggatcaactcgctgatcgagacttagcacttgactgggctgtacagtctcgtttgctaatgtgtgctaaggaagcaagggctcaggcccgagttaaagaacttagctcgactgttgataacctgcaggtttactgcaatacgttgcacgaggaagtccatgtattatactcacaattacacccaagtgagcctgcacaacctgaggcggaagctggaccatctcacgttgcgggacgtgcactgggtggggagttagacctttttgagccccctccttctttgaggttggttgatgtctggactcccacacctgacgatgaagccgccaagagtaatggcaagtag

SEQ ID NO: 34833 - DNA, 120 bp, Zea mays
  Peptide Sequence Number=SeqID_78208
atggctctggcgagccccgggcggcggcggtgggcaaagccgggcgcgggcggctcgaggcgcggcggcggcggcgcgctgtgcggggtcggggcaggcaccgtctcgtgcaacttgtag

SEQ ID NO: 34834 - DNA, 867 bp, Zea mays
  Peptide Sequence Number=SeqID_78209
atggcgacggcgtgggtgcgctcgctcagctgcaggtcctcctacgccatgaccgacgccgccatcgcgccgtccccggccaagaagcccccgccgccgccgccactccccttcccctgcgccactgcggcggcagcggacgtgatggatgccgtggcctacgcccagcgggcccggaggaagaagatggaggggcagaggttagcgcgggagccgcgcccgcggcccaagaagaagcccaagccgatggcgaacgacgcgggcgccgaggcgctgtccacgccgtcgccggcgcccgtaagctcggcgttcctcacgatggcggagctgccggagggccactcgtcgcggcgggtcgtggagctgatcttcgcgtccggatggggaggcgcggggtccccggagctgtctccgtcgccgccgccgtcggtggaggcgctgttccgcgtccgcagcgcgccgcgcgcggtggcgcggttcgaggaggcgagggcggcggcggcccgcgcgcgcggcgccgcgacgcgttgcggcgccgacggctatgagatgatgcggttccagtgccgcgccccggtcccagcggcgtgtcggcgcgggcgtcgccacctgccgcctcagcgcgtcggcctcggccgtgcgcagtttgcctgcagcggcgccgactcacgccagctgctgcagccgcaccgcggcgtagtggctacggagatgctggtgtgccgcgtcatcgcaggcagcgttctgccagctactagcgggacagacaatgccatagctcgcgagacgcgtacgatccctgaacatggcaacggtagctgtgtctcgatagcgacatgtcctgactctcattgtctaaagttctag

SEQ ID NO: 34835 - DNA, 192 bp, Zea mays
  Peptide Sequence Number=SeqID_78210
atggctgaatgggtcgcggccgcggagcacatgcattcccatataggggtggaaacgaggcttggctcgctccggctcgctcatgcaataagcccagctcggttcggctcgtccatcttgcgagttcgaaaaagtggctcggctcggctcgctcctggcgaacgagccgactcgacgaaccaacgagcctag

SEQ ID NO: 34836 - DNA, 129 bp, Zea mays
  Peptide Sequence Number=SeqID_78211
atggcgggtgtgatagatcttgaacaagtcatggatgatgatgtcacagaatttagagatctagttgatgaagttgcggataagtatccttgtgattttggtggcacgtttgtcgggactctcaactag

SEQ ID NO: 34837 - DNA, 900 bp, Zea mays
  Peptide Sequence Number=SeqID_78212
atgaagccaaaaaaaaaaaagggctccacctccaccagctttggcttgcgcgcatggtacgaagagacgcagccggtcttggtaccgcaccgacgcgcggctcctgaaacgaggctgcttgaccgacgacgcggccaaagccgatgccgtgttcgtgccctactaggctactacgcggctctcgacgcactgccgtcgtgctcgatccgggccgcaggagcatgcgatcccgcactcgacgtccttccacccgtcgtctctcgcgcacctccgcgccacgctgatgctctaagcgggcgcggcgcctcccgcccgtcccggcccaacatccggggctccatcctctccgagtgcgcgaaccgcaccgacgcatgcgtcgtcgtcgactgctccggcggcagatgcgcgcacgacccagtccggtacatgcgccccatgctgcgcgcggtccaggttctgcctgcagccgccgggggggacgccgacgcggcgctccacgttcgacgccatcctcgccggctgcgtgcccgtgttcttcgaggacctgcggcgcggaggcagtacgggtggcacctgcccccggtgcggtacggcgagttctcggtgcacatgcccaaggaggccgcggtgttcggcggcgtccggatcgtcgagacgctcgaggccgtgccggaggaggaggtgcggcggatgcggcagcgcgcgctggagatggcgccgagggtggtgtaccggcggcacgggagcacgcccgagctgaggcaggccgtgaacgacgccgtcgacctcgctgtggacggcgtgctgcagagaattcgaaggcggacgcacgcactggaggaaggactgccggagaggctttacgcgcaagaggaggatagcgttagcgttgacatatag

SEQ ID NO: 34838 - DNA, 1941 bp, Zea mays
  Peptide Sequence Number=SeqID_78213
atggaggatctgaataagttttatgcttctttctggaagcagtctagcagttcacttagtagcctgcactctgttcatgagcataagctgatgaacttgggttcgaagcgcaatcaaacccaagaagtttccaccaactacaataaacgtaaatcgttgtccggaattgtggaactgagttcagatgttaggagttcaatccggaggaaatctgatgcttatcgcgaagtgattgacttggagaagccatcggtttatggtgatgccgtggaagctatcggttgctctggccttggcaaccttgccaaccaaaatggcaagtctcaggatgtttctccacagaacaactcacttgcagagtctcttcagttgtgtagagactggaagacatcgcgcgtaagtgttggttcagttggatctagtcacactccggattgccagtcccctaccaaaacaagtaacaatgaagcaagacaatcactatttgacctgaatgttcctccagaagaaagccttcttatgccttctactctatttccttcttcctcaacgtattgtggaaatttttcagacagacctagagaaacttctgaaaaagaacgtgtctctggtattggatcaacgaaaggatcttccatcacggtgatcacgcccgactcagctgcagacagttcaagggatgtggtaactgaatcgtcagtccaacagaagttcccttttgaccttaacgtgtcacctgaaaacaccaacatgccatcagaaatcaacgattatagagataaggttgtaaataatggtgtaagtaaaggaacagcacccgatcattctttctccacgaaaaatggcctgcttgcagaaacgtccaccaaacatgtggttcttggacatgatagtgtattggcacacaagcaggatgacagtcacgtgcttctcacagtcccgacagctaatggtatcgataaagctcactcgccacagcctggaaccattaacaaggagtttttagaccctggatctcctcttcttgataacaatttccatccaagacttgggacatcccacaatggagcatcagatattcaggagttaagcatgcttcaatgtaaggtcgacgatggtggcaccacagctgatactgcagctagaacccttctttccatgtttcagcatagttctgaatgtgttgctcatcgccctggaagcagcaaccagacagcagctcagaaggtggacgacgagcctcagccttcgttggactcgttcgagaaaaccgtgttggattcagaggaggccaaagatgacgggcaatccgtcaccgtgaccccacctttcaaggaagggccagcatgtcggatcaagctaaagagagggaggggcatgagaaatttccagagggagatagttcctgggctccttctagggaggcaggagatatgcgaggacctgaaagctataggttacgaggcaaagaaggctcggtctaggaaacctcgcaagggtccagagcccgtatcgttcgttgctcgtacgttcgtcgtaccggtcaaggcgaggccagatcttgacaaagaccagcacgaatctataattcagagagatactgaaacgcaggcaggttgctgctgggtgctgattgctgtgcaggctgcagggcaggtgtacggctgcgcatggaataactcccgtgggccccggggtccagagagagccggctctgggaactgggtgcggatggtcagcgttggcgtcatcagctggaataccagaggtgaagagacgcaggggcatgtaaaatctcctgtcgtcggagagctcgcgctgttcccagaagggaaagaagccagccaaaaaggcgtgcgctaccaggacatgccgctgcgagatcgtgaggttccgacagtggtccaggtcaggtgcctccgatccgcaagagacacctga

SEQ ID NO: 34839 - DNA, 1035 bp, Zea mays
  Peptide Sequence Number=SeqID_78214
atgcaggcagcatgcaaccgcaccaagggggcgcaccctttcgacttcgacgcatccaacatgaaggcccaggcccacacgtcatgtaacctgcgcgctggttgctacgtgcaagaaactgcaccgccactcacgccactaccgtgcctcctcgactgtggaaccagtaccgcgactcgaggcaaccctgcgtatgacccaacagtgccagccaggcacgtcggtcacgggtcagtcagtcgcaggagaaagcgcgacagtcgaaacggccagaaatgggccggcagtaaaggcggtggcaggcgggcggaagcagcggtcgagtcgtcagccaagctcacgcggcacctttggcaggagaagcgggcgacgcttcaccttcgccataatgaccgtgtcaaaaagggaccgggaaaaggggataccccgaaagggatccttctccgcgaaggaaacgggccccgagcccccctactgatcagaggttcgaaggctggcccctcggaggggttcaacagccgcctcagagcgctcgggctccgcgcccgctactggttagaggttcgaaggtcggcccctcggaagggttcaacggccgcctcaggccactcgggctccgcgcccactactgatcagggcgccgcccgcatcgctccgactgatgtgccactcgacagagtgaggctgacagcggccaagtccggcctcaggcgccataggaagctccgcctcgcccgacccagggctcggactcgggctcggccccggaagacaacgaactccacctcgcccgacccagggctcggactcgggctcggccccggaagacgacgaactccgcctcgcccgacccagggctcggactcggcctcggcctcagccgacggtctccgcctcgcccgacccaagggctcggactcgacctcgacctcggaagacagactcaacctcgacctcggaggagcctccgcctcgccctacccagggctcggaccgaccacgtcacaggaagggccatcattaccctacccctag

SEQ ID NO: 34840 - DNA, 807 bp, Zea mays
  Peptide Sequence Number=SeqID_78215
atggtggggagaagcgagccgggctgtgatcttggtcccgccctcagcttcaaggatcttcatcattctggctggggcggaggctgggctgagccggagctctacctcccgcgcgggttcgtgggtcaccttctccctcagcattcaagggagagggcgctcaccggcctagcaggagggtcggacttcgacaacgcggggctggtcggcggcgagcgccgtcagcttcagcgcgttgggcttgctggcttagctggctctggctcggctcccggcgccccctcccgccgcaagagcggttgtcgcgccgcgcgcaccggaggaccgcccaagacgtcgcgcgctgctagggcgacgttcgtgttctggggctgtcctgcctttgccccggtacgacgcctctgcacggaggtcggtgctccgctcgtccgggaggatccgagtggggatctgccggtgggcagatggcttccgtcgtcggtgctgaggtggtggcggctgaagaagtcctcatcgccgacgggatcaccgccaccatccgcgccccgggcctccggctttttggctttgatagcttgtcctcgcccctcgagcggagacgtgggcgagggcattgttgcagcggcgtccaccctgaggccattgctgctgcagttcggccacccggagcggaggtcgttgtcgctgctgctggagcgggcggcggtgggcgacctggagccttattgccccgcgggccctccgatgtggggggttgtttgtacccgcggaggtggaatcggagttccgtttgtaatggcaccttga

SEQ ID NO: 34841 - DNA, 225 bp, Zea mays
  Peptide Sequence Number=SeqID_78216
atggcggtcccaggaaggaggaatcttacaagggtgatgccacgcctgaccctgtccacggcgcggcggagatggtgctcgtcggcggcgtgcgtggagttcgggagggagggagatctggccactgggcccaccgaggcagtggtcgaggatgtacaaggcgcgcagagggagcggctgacgggggcggcccacacgtcagcgccgttgcgcgtgatgaggtaa

SEQ ID NO: 34842 - DNA, 1299 bp, Zea mays
  Peptide Sequence Number=SeqID_78217
atggcggagcgaggggcaggaagggcggttcttcctcttctctggctaagtctctcgggtcgcaaaaacctaagaggaaggcaggaagcggagcgaagaaccatcaccagaccctctcccgggaaaggcgggcgacgcttcgccttcgccaaaataaccgcaccaaaaaaggctccgagcctccttactgatcagaggttcgaaggctggccctccgaggggttcaacagccgcctcagatcgcgtgggccctacacccactactggtcagaggttcgaaggccggccccccgaagggttccacgaccgcctcaggctacccgggctccgcacccattactgatcaggggttcgaaggctggcccccgaagggttcacagtcgcctcagacaccgagcgagggatgaccagggaatcccaccagagggaggcatcgagccctcggaccccgtcgccaggggaccgggtctggcagatcacccgcagctcaccggagacaccatgttcggtgcccatcgagggcccgggggctgctctcgcaaacccggctccggccaaaccgttgacagcgtcaacataccagcccgagaacttgggccccgaccgtacacccgggctacggccagttcgcatgagggaacaaccaggccagccgaagcattacacgaggcattaagacctcgaaggagtgaaatcactcctccgaggcctcgggggctacacccggcgggtgcgctcgcgcgcacccaccggaacaaaatgcaaccgagaaaggctggtccccttgcaaaaaagtgcgacgaaagcctccaagcgagtgttaacactcccttcgaggctcgggggctactgtcggggaccataattaggggtaccctcaagactcctatttctcagctggtaacccccatcagcattaagctgctaaggcctgatggggctcggactcgggctaagtcccggaagacggcgaactccgctccgcccaacccagggctcggactcgggctaagtcccggaagacggcgaactccgctccgcccgacccagggctcggactcgggctcagtcccagaagacgacgaactccgcttcgcacgaccccagggctcggactccaccctggcctccgccgaacgacctccgcctcgcccgacccaggggctcggcctcggccacggaagacaaactcgacctcggcttcggaggagcctccacgtcgcccgacctagggcgcgggccagccacgtcaacaggaggcaccatcatcaccctaccccgagccgcctcgggccgtag

SEQ ID NO: 34843 - DNA, 186 bp, Zea mays
  Peptide Sequence Number=SeqID_78218
atggagcggcgaagtgactacggtcacttcggctctgtcgactggggggcgtgcgtcaggataaagctttgtgctaatgggggttaccggctgagatttaggagccttgagggtacccctaattatggtcctcgacagaggaaattcttcggccgggtggcggaacgcacccgccctaaatcctaa

SEQ ID NO: 34844 - DNA, 1020 bp, Zea mays
  Peptide Sequence Number=SeqID_78219
atggaggttcgctgccaaaccagcttttgccagaatgaagatggtttccccaagttgctgagagcatgcacagtccgcctcggaatcaggagccagccagagtatgatggtcgtgaattcgtcgagcatggcacagagaagtgtgtcgtgactgtatacattggatccagtccacaccatgtggaatggagtgtcactgctgctgggcacagattcaaagacacctgccaagtcgtcgctcgcaaggcattgagggccctgtgtcagatctacgaagaagaagtggctgacaccccactcagattctttccgccctttcagagagaccgtctagtttggatggccaggatgtgtgcattggaagggaagcagctgcttgaggacgactccacagtcatgtacctcactgcatacctgctcaccctggatgcgcagtatgatttcttggctcggcaccaccctcaagcccgtgcaactgccttggagagtcgtgaagtcattgctgttgaagccctgaagcaagccgaggatgagcacgtccagaagttgatggaggcctacttggtcacccataaccaacatagagccctgcggatccaagagcccgctccatccaaccctgttgaacccatcaaagctgaagacccccagattcttgaaggtcacccggactctatcagaggagagaagaagatttgggaactaccggaaggagccatagtcttggaaggaattacagtctcccctaaggctatggataagcaagagtacaccgagtcctcccaagatcccccgctagagatgttggagcccctcgccatgaagaagattctagcaccgtcccttgaggtcaaggaagaagctgcaagcaccccgccagcaccaccgccctctgaggagctacaagagccagtccagcttgaagaagagttcaaccccgtgttgccatctcagtcgccgccagaagaagtcatcaacatcaactccctcttaacccatccaggagatatctcagattga

SEQ ID NO: 34845 - DNA, 213 bp, Zea mays
  Peptide Sequence Number=SeqID_78220
atggggaaggatggtgttgctggcggtgatggtggtgggtgcgctgcaaaggtgaagtggggtggtggtggtgcgcatggaggcgggcacgcgtgcggggggcacggcttgttccaggcttcaagggtaagcttcccggtatcttcttggggctctagccaaagtgaagaaaaacttcactacccaatgcatgcagaggactgggcatactaa

SEQ ID NO: 34846 - DNA, 237 bp, Zea mays
  Peptide Sequence Number=SeqID_78221
atggagtggaaggtatttctcaagaggaaaatatctggagatatatcggtggaatatttgggcaatatttctggaaagaacttgaaggggattactcgggaaatatctgggcgactcttcgaggagatagagcttcaacaaaatctggccttgaggggcatccggttgctaattgcaagcgctgattctggctactcaaagatcatcttcaagctccagctttcgcttggcagctag

SEQ ID NO: 34847 - DNA, 387 bp, Zea mays
  Peptide Sequence Number=SeqID_78222
atgcaggcggcatgcaaccgcgccaagtgggcgcgcccctccgacttccaacgctcccagcatgggggcccacgcccatgcgtcatgcaaccagcgcgccggtcgctacgtgcaagcaactgcaccgccactcgcgccactgccacgcctcctcgactgcggaaccagtaccgcgactcgaggcaaccctgctacgacccagcagtgccagccaggcgcgacggtcaatacggccaaaaatgggccggcagtaatggcggtggcaggccgcgggacaggcggcgcctctggcaggggaagcgagcgacgcttcgccttcgccatgatgaccgcgtcaaaaaagggaccgggaaagggggataccccgaaaaggatccttctccgtga

SEQ ID NO: 34848 - DNA, 258 bp, Zea mays
  Peptide Sequence Number=SeqID_78223
atggagactgaaagctctcttctgggttttggtggtttggatgataacccaattaaaggactaacaagtgtgctaagtgttgaacagagacaatcgatcaagccaaggatggaggcaagaagagcttcgaggtaccaagtgcacgggagaaggtcaaggaggctgaggaacccaaagccaagggtgaagaagaaggcttgcaaagtcaagggtgatcgagttgagaacatctatggcacatcaaggatcactacataa

SEQ ID NO: 34849 - DNA, 195 bp, Zea mays
  Peptide Sequence Number=SeqID_78224
atgatgggttcaacgtcggaaaagatatacctctgccagccgccccaattcctctcctcttggctccagccgcccactccccatcaaaccctagccacccccttccccaatccccctcccaaggtgcagcccctctcctttgggatctccatcgagtggtgcaagcctctaattggagaattggtggaggaataa

SEQ ID NO: 34850 - DNA, 681 bp, Zea mays
  Peptide Sequence Number=SeqID_78225
atggagaagtgcaaaccaatcaagacatccatgccaacaaatggacatctcgacctagatgcgggagcctgtgctatggcacttctgatcctcctcgacaccctcacggcggagtcgctccagctacatctcacgtcgcggccctgttccgaccgcctttcacagatgggccgcgacgctctccggcaaatttcactccagtggccaaccgttcctgatgatgatgacgatgattttgggattttgcctctgcctcctatgcctccacgctcacatgatcatgaggccaggagttccagtgctgcccctgctggccctcctgctattgaccctgctttgtctatgatactccagtctcttactcagcagcaggctcatctggcagtagcccagcagcagatgtccgagagaatgctccccatgtttcagactattgaggacagacatgacactctgcagcaacaacttttggcagatagggctgagcatcgggccttcatgactcacatccttcagcataccagtgttcagctccctcctgttcagtctgcacccctccagctcttcaggtcgctgttctccatcagtgctcagccaccagtgccaccagcgcctgctgttaccactgctgttgtggcggtgtctgttaccacttcagctccagcaactcctacagcatag

SEQ ID NO: 34851 - DNA, 189 bp, Zea mays
  Peptide Sequence Number=SeqID_78226
atggatgaaggccttaagccaaagtttttcaagctctctgagcttcggtttaaaagacgtgttttcaccatttctgaagaaaaaatgtctcaagacaagaaggttgctgctgagacaaagttgactgaagaggagaagctgtttgaggagaagaagattgtggatccttatattgctggatttgtctag

SEQ ID NO: 34852 - DNA, 424 bp, Zea mays
  Peptide Sequence Number=SeqID_78227
atgcccagcaaggttccaatgatgctgtcaaaaacattttttgttacatgcatcaaatcaatgatctacgccgccaggctgctgcgccgccgttcccgtccccgtctccgagccgtgagcgcccgccacgccgtcgccgagcccgagcccaagcgccaccgtctccgagctgggcgcccgtccccgtccccgagcgccaccgtctccgaggccaagcgccgccgtccccgtccccgagcccgagcgccgccgagcccgagcgccgagcgcgccgccgtgcccatctccgagtgcgccaccgtccccgtccccgagcccaagcgccaccgtctccgaggccaagcgccgccgtccccgtcctcgagcccgagcgccgccgagcccgagcgcctactgcgccgccgtgcccatctccgagccctcg

SEQ ID NO: 34853 - DNA, 789 bp, Zea mays
  Peptide Sequence Number=SeqID_78228
atggaggacccaacatatagccctgaggttgtacaacctacagcagatgcaacaaaacctgatggatcctcagttaccgcctgcaactgggttatccctgaattcgtcaggacacctttcccgccggcttcaacaccggccgaggttgtcggttcattcgatatgtctactgaatcaataagacgtaaacatcatgttctgcgtggggaaagacaagctatcttagcccatcgaaaccagcaatttcaagcatccattgcaaggaacgtgactacttcgaatggggatactatcggtgacgctgagatcaacaacaatgatgatgatgatgatgaggatgtcatattcggagaagatgatgatgacgacgagggatacatattcgctagccaatgtacatatgtcaatttttattatgacagcaaggcttatataaatacacatgtcttagtcgttgttttccaaaaaatatcagatgaggagactagcgaggacatcgagatcgatggtactcaacatgaatctactggcactgatgtgcctgacccatacaagaaggtatataataacctccctgaagaaacacatatgttgaagcctgttcctaactgtggttattgcactgggaagaagtttgagtacgagccacctgggttttgctgtcgtggtgggaaggttgatcagctagcaccactggatacacctccccagctcatgaggttgtgggatagtgcagattctgatgctaagcactttcgtgataacattaggtttttaatggccaattaa

SEQ ID NO: 34854 - DNA, 402 bp, Zea mays
  Peptide Sequence Number=SeqID_78229
atgcccgcggctcggcgaggttccacgttcttcctgggctggttctggctgctggctaatccttctggaactcgatcagacctgtgcaagatcccgcgaggggctcagagtaatgaacatgcaagtgatattggagctattggtggacccaacgagctacacctaaggctttgttcgggttgttccgttcccggtcgaggtgcggtggcaaacctcgtggatcagcccgcatgcaaacaagcccggtccgagcttcccaacaatattcgtttagccctaggtttctaccccggtccaatcccagtgaaatcccttcaccctgccccggtattcgacccacgactcctgactcgtggaatttttcctcgtcagtcgcaggcctgtgctggagaaaaaatataa

SEQ ID NO: 34855 - DNA, 621 bp, Zea mays
  Peptide Sequence Number=SeqID_78230
atggaaggtccgcggccctacgcccccaaatcgcagaacgtgtgcaccatccggccgctggtgacggcgatgtgcttccaccagctctccgagggcatgagactcggcggctgcatcctgcaggcgaagtacgtcgcgaggatgaaggcggggctggtgttcttcttctccacgacgacgacgttcgggatcgcgctggagctggcgctcaccaagatgtacagggagcacagccccacgacgctcgtcgtggtgggtctttttgtttatccaattgttaagaagggtctcccaaagaaaatcagagaagtcactgactgctattttctccctcgtcggtcctggccttctgcactgacaacctacgatgttgtatgtgctgctagctttggtgcagggatgcttcttgaggtttggataaacaaaagatcaaagaggacagtggcattatctgggagatggataaatgatgcaccacatgctttgtcatggcctctttctaaccttgaggtttcaaatgcaattgttgaaaaagttgcagattatgctcttgtatggatcaataggctgttggttgtcggtcatgacatcaccatcaagacagataggaaagttttataa

SEQ ID NO: 34856 - DNA, 378 bp, Zea mays
  Peptide Sequence Number=SeqID_78231
atgtggtgcaagcgtggtccaaaatgttataagaaacaatccttgcatatcttgtgccaaaggttcatctataactatactaaatcgactgtccggaataccgtagattattccggacaggagaagccttttggaaaaacaggccaagcgcggaccgtccgggcccttgcggcggaccgtccgcgacacaaggatgtctctcggacagaaccaatgcaaaatacaagtttccactacagactgtccggaggaaaagcaaagaccgtccgagccctcgcgcggaccgtccggcctcaggcgcggaccgtccggtcggggcggaccgtccgcaccaggagggcggaccgtccgcgctcagcagaaaggcccaacggctag

SEQ ID NO: 34857 - DNA, 786 bp, Zea mays
  Peptide Sequence Number=SeqID_78232
atgctcgttcttgcagtgtttaaatactacgtcgtctcctggcttcgcgtctctcatcaccattggtgtgaagttctttcacaagtatcagatctgtcgaatagtcctccctgcttttattttgcctcttcctctgacggcggcactccaaagaaagccaaggtggtggtggaggatgaggaagaggcggggttagaggatgaggaagaggcgactgtgacactatccgtggagaaggacgcgctggagtgcgacatctgctgcctacccttccagtccgaagttttcatggcaagtcagattaccatgcattgcaagaacgggcattctgacggcggcactccaaagaaagccaaggtggtggtggaggatgaggaagaggcggggttggaggatgaggaagaggcgactgtgacactatccgtggagaaggacgcgctggagtgcgacatctgctgcctacccttccagtccgaagttttcatggcaagtcagattaccatgcattgcaagaacgggcattctgacggcggcactccaaagaaagccaaggtggtggtggaggatgaggaagaggcggggttggaggatgaggaagaggcgactgtgacactatccgtggagaaggacgcgctggagtgcgacatctgctgcctacccttccagtccgaagttttcatggcaagtcagattaccatgcatgtatatatacagtacatattgatcggtaggctccagcatgatgttctgctctgtgtaaaatcagtgcaagaacgggcattctag

SEQ ID NO: 34858 - DNA, 471 bp, Zea mays
  Peptide Sequence Number=SeqID_78233
atggtgcacgtcgtcgaatcccaggtagggctcggtcatgacctcgagcggactttcacctcgcccgagaccggttctgccctcgatatcagtgacagaggatgccccaatgtcaccggttacagtggagatgacgcattccacaacccctcaccaagggggctccggtacgtgaccgagcccttggcctcggcctcgactctcagcaagaaacaagccggcacaagtcaacaacaaagtacaagaccataccgtctacaggatataaatacatcccctcacagtatgcagccgactcccatcctccaggaagcaccccttgagcctataaatagggtagtctatggcttctcaaggggtaggcgaatacttcacaagtcttctcgtccactcggtattggcacttgcctcaatcaacttgggactcttccatctcccactctacttgtaaaccctattgcaagcacttag

SEQ ID NO: 34859 - DNA, 258 bp, Zea mays
  Peptide Sequence Number=SeqID_78234
atgaagccgtggaaggagacttccaggagttccaagactacgacgagttctaggtgtgggttagcggcaacccccagtcggctgcctgtgaaggccgcatttatctacgtttcttttccgcactttgatttattcaccatcaccctcgtggcgctagcgacgaccgtggtgctcatggggctggtcacgtacagcttcggcatcctcgccatcgccggcgtgctgctttcggactgggagttctttgaccgcgactaa

SEQ ID NO: 34860 - DNA, 348 bp, Zea mays
  Peptide Sequence Number=SeqID_78235
atgccccgcacctcatgtccccgcctccgttcgcgatgcctctgtccacgtcgccaccatgacagtcgcctccgcgtccgccgcaagatcctcgcccttcccccgaaccctgcccccgcacccctccacgagctccgccacgtcttccctgccccccggaaccccattcccccagccctccccgcgtccccgcaacgctacagctgccgggttggcctgcgcaccatcaccctcgtggcgctagcggtggccgtggtgctcatggggctggccacgtacgggcgaccggtgtggcagctatggagccaattctctcgagtgggtcaacagtacgcagtgcaattttga

SEQ ID NO: 34861 - DNA, 903 bp, Zea mays
  Peptide Sequence Number=SeqID_78236
atggggcacgcctgtgtggctttcttctcgctgttgtttgagaagcgcgaccttatgggggttggcgctctccagtcgtcgctcggcttcaaggatttttatcatgcagcccggctgcattccctcaccaatggttccaggatcttcgtcatccgggctgaggcggaggagcgcatcgagtgggtgggccgcctccgcgtgggtcgctttccgtcctccacccgggcggcggtcatgccgcgcgcgggccagccacgtccaggtcctcctcgcaccgtcagctgcaccggggggtcgctcaacacgtcgtatgccacgagggcggtactcgtgttctgggatggcctcggcgaggacgggagtgagtacctgccggtgcgctttggggcggccgttgttcgccggcgcggtgttggtgggcaggtggccgctgtcgtcggtgctgaggtggtggtcgccataggcctccggctctttggctttaatggctggttctcgtcctccgtgagggaccggtcgccggcgagccggtcggagcttgttatcccgcaggccctctggtcggggaagcccgccgagggcgctgccgacgcctacatagtgtaccttgagacttgcccgtcgaaccttcggctgctctgcgatgaggcaaagctaaaggcagtggtggcgtggacagaggcgatgtcggctcgaacagaggctttcttggcgcgggagcaggtggcttcccacgtcgaggagatgcagcagtggcagctggggtttggccagatcacccacgagcaggaccaatcccggagccaagccaccgaagccgtgagccgggctgagatcctcgggggacagatggctggggcttcggagcggctggccgaggcgcctgctcgcatcgtcgtctga

SEQ ID NO: 34862 - DNA, 768 bp, Zea mays
  Peptide Sequence Number=SeqID_78237
atgacttcccacggatcctccgatgacggaaatgcactcacccacactgacggacttgcacgagagggctttccccgcattctgtgggaggtacttcagggggtcggatacacgacaccccctcagtacgcggtgcagcagttcgagaagcaccgagtgcctcgctgtagggtgaggatgactttggagcctcatcccctgcagccaggctggcgctctttggactccgagtctttcgggtaccgagcagaggacacgatcgaggcgatcgctctgcatggattgactaccttctgcggattccatcctttggagctggccacccaccctattggcttgttccccgctgaaagggaggacgacccaatgtggaaggatcgggtggagcatgccaaggatatctgggccatctacccaggacagactgcgcacttgacagtacggtgcatgaatgctctgtaccgtctgcaggtgatgcgcggtgaggcaatgtcccatctgatggcgctgctggaggcaacaaagattacgctggataacagagaggagctcgtggttgacttgtctcaagaaatggtggagaaggacttgcaggtggagcagctatccactgatattcaggagttggaggagctggagatccaggaccaggaggccaacgaggacgtcgacatcgagggaggagatgagcctgcctccagtgtggacactgccggctcgggaagaccaccttcccccgagtcgagtgttgcttcgttcgctcactag

SEQ ID NO: 34863 - DNA, 396 bp, Zea mays
  Peptide Sequence Number=SeqID_78238
atggcccgcgcccgctcttataaaaccctcccagacttagattgtacccttccgcgcaccctcaaacctcactggagtcgagctcgtcgccgtttgcccgtgcgcagcgagtccgcggccgcccactccctctgccaccgtagaccggccagtggagccattcccaactccgtccagccctcggagaagattgtgcacacctccgtgaggctccccgagcgaggaatcggagtttacttcgccggagaggccagtccacgctcgccggagctctcaaccccgccggagtacgtggaccgggaaatggttgctgggataacttggccgtccaccttgccaccgggttggactgtcgagtgggaccctgcctcggctgaggaggagcatgaggggtga

SEQ ID NO: 34864 - DNA, 432 bp, Zea mays
  Peptide Sequence Number=SeqID_78239
atggatgaaaagaaaggcctaaaaactgcttcagcaatcttcgaaatgtgcttcagactattgaccttcgacattgtcatcatgtacacaacaaagcagtttaaggtaaaaagtaattacaagagagtaaacaacaggtataagtatcgtaccggcttaagcaagctttgggcctcgtcactagccaaatctcgaccatccttcgcccaaatctgtgttataaatctgctccctatgctccgggctttactggggatgtcaaccaaatctgatggagataggctaaagtttggcctatttacaatttttgcgtgcgtacaaccagccttcaaaaatgttgcagctgtgccacgagaagctagcagggcacagaagtcaccgtgcccggctattacttcgtcaagcgcctccacttcgccttcaatgtgttag

SEQ ID NO: 34865 - DNA, 132 bp, Zea mays
  Peptide Sequence Number=SeqID_78240
atggagaacagaatagaacctctcaagctaaaggtcggcatcgaagaagacccaacacccaaaaggcttcaagtagcaaggctgaggagctctttgtgcaagagagctttagtaaatccatgggccacctga

SEQ ID NO: 34866 - DNA, 924 bp, Zea mays
  Peptide Sequence Number=SeqID_78241
atgaccgcgccagtaaaggctccgagcctccctactgatcagaggttcaaaggctggccccccgaagggttcgacagccgcctcagatcgcgtgggccctacacccactactggtcagaggctggcccccgaagggttcacagccgcctcagacgccgagcgagggatgaccatgggtacgttcgatacataaccaaggcttgggctgcgctcccgagctcaccggagacaccatgttcggcgcccatcgggggcaacatggcgctttcccccctcctccttgcggaaaggcgacacaggggcaggctcgggggctgctctcgcaaacccggctccggccgaaccgttgacagcgtcaacataccagcccgagaacttgggacccgaccgtacacccgggctacggccagctcacatgagggaacaaccagaccaaccgaagcattacgcgaggcattaagacctcggaggagtgaaaccactcctccgaggcctcgggggctacacccggcgggtgcgctcgcgcgcacccaccggaacaaaatgcaaccgagaaaggctggtccccttgtaaaaaagtgcgacaaaagcctccaagcgagtgctaacactcccttcgaggctcgggggctaccgtcggggaccataattaggggtaccctcaagactcctaattctcagctggcagtcaggccccactggaggcaccataggaaactccgcttcgcccgacccagggctcggactcgggctaagtccccggaagacggcgaactccgctccgcccgacccagggctcggactcgggctaagtcccggaagacggcgaactccgctccgcccgacccagggctcggactcgggctaagtcccggaagacggcgaactccgctccgcccgacccagggctcggactcgggctaa

SEQ ID NO: 34867 - DNA, 498 bp, Zea mays
  Peptide Sequence Number=SeqID_78242
atgtctttcgtgctttttgactacttcgaaaagtggatcctgaaaacgacggagtacacgagacacacgctacaagacgatctgatcctgcaggctcgggtcttgacgctggaagggggtagcagcaccctcggcatcgacgacaccttcggcgagggtcttctccggaaatctggcccgagcaggcggctcgaccggtcactctggggcctcggccaaccatcctccaagggcgccagcccgacccgaggcctcggctggtcaactccggcgtcggtcccgctaacggacgacccggctgggctccggccaaccaggtttcattttcgagccaactccgcccctgttcatgctgatatcgctacccctagcctcggctcatcgaagagcggccaaggggtccctttaactaagctagagaagcctcagacaacaaggccgaccgagccgagggactcctacgcctccgggatacggatacctcactcgtcaccttga

SEQ ID NO: 34868 - DNA, 474 bp, Zea mays
  Peptide Sequence Number=SeqID_78243
atgcatcgacacagggtcaaggtgaggaatatgactccagggagccagttcgagccgatgggccgtggctccagggacctcgtgccctcgctgatgtgtcgcgactccattgcaaggagctcacgccctcgcagccatccgctagcacagggaccaagccttcgcgccgagatcacacctccgcaccggggagcttcgcctgctctaggaatcatcctcgctaatgggtcgcggcgttgggggctcacgcccaggcagcccgcctatgtgttgggatcgtcgttgtcggggaccataattaggggtaccctcaagactcctaattctcagctgagtgaggctgacaggcagtcaggccccgccggaggcaccataggaaactccgctccgcccaacccggggcttggactcgggctaagtcccggaagacggcgaactccgctccgcccgacccagggctcggactcgggctaa

SEQ ID NO: 34869 - DNA, 219 bp, Zea mays
  Peptide Sequence Number=SeqID_78244
atgactattgtcctcctcctgaacgagctggtgtaccctgaggctgagaatagcgaggacgactaccactactcccctgtctctagtcgctcacttgagggaaaggacctccttcttaatcttcatcaagccagcaggaatatggttccaactttgttgcagctacgagtggagcatgacttccccacagatcccaagtactttgacataagcaactga

SEQ ID NO: 34870 - DNA, 132 bp, Zea mays
  Peptide Sequence Number=SeqID_78245
atgacgaccgacatgctgcttgaactactccacatggatctattcggcccaattgtttatataagcatcggcgggagaaaaatctcaaacccaagagatcttaaagggattcttaagacgcgctcaaaatga

SEQ ID NO: 34871 - DNA, 645 bp, Zea mays
  Peptide Sequence Number=SeqID_78246
atggcgcatcctattgacgtggcgagcctgtgccctaggttaggcgatgtggaagctcctccgaagccgaggtcgagactgtcttccatggctgagtccgagcccccgggtcgggcgaggcggaggtcgtcggcagaggccagggcggtgtccgagccctggggtcgggcgaagcggagttcgtcgtcttctggggctgggcccgagtccgagccctgggtcgggcggagcggagttcgtcgtcttccgggccttagcccgagtccgagccctaggtcgggcggagcggagttcgccgtcttccggggcttagcccgagtccgagccctgggtcgggcagagcggagtgacactgcagtcggagtggcgcaggcggcgctgtccttctgtcaggccggtcagtggagcggcgaagtgacggcggtcacttcggctctgccggagggcgcgcgtcaggataaaggtggcctcgggcgagccggaaatacgttcgccgtcggaggggggcctcgggcgagacggaaatcctccggggtcggctgcccctgtccgaggctaggctcaggcgagctttatgctgatgggggttaccagctgagaaataggagtcttgagggtacccctaattatggtccccgacagtag

SEQ ID NO: 34872 - DNA, 1116 bp, Zea mays
  Peptide Sequence Number=SeqID_78247
atgtctgcggtagtctgtggcaagaggtcctcctccatcttcgccgacgagctcctcccgccatcccctacctcccctcactcctcccaccagccggcgcccaagaggtcccgccggtccccctcgcaccgcggcagctccgacggacaccgacgggaggcgctcgtccaccatctgcttttactcttccccgacatggatccacagtgtaatttccgatctgaccttgtgccagaaatcggagatgatggtgccttggaagctgaaatggatcgaaaaattatcggaaatgaggtcatacgtgggatgtatgtgcgggacgacgaaaacgaacttaatccaaacggaaatgtatcgatgacgttgcttgaaaaagctctggaagcatctggagatgacttggattctgcaataaagagtttgaatttgctacgcttagagtcagcagaggctatcttgtcatctactggtttcaatgaaaatggtcagcatactgcaattcagcctcctgttgaagaattgggccatcaaatatcctatgttgtatctggctttaccttcatcctgaaagcactgaagcagtttcaagactgtattgctgacagtagcatcaattttgcattccttgcaggaattcctaatggtggtgtggatacgactacagaacatcatcctactgtagataattaccagacaagtaaaaatggctctgaatgggttgagctatttgtcagggagatgacaaatgcttctgacatagatgatgcacgggctcgtgcgtccagagctttggaggctttggagaaatcaattgtagagcgtgcaggagctgaagctacacagaaccttcataaggaaaacatgatgctcaaagagcaactgactgttgttctgcgagagaatgctgtgctgaagcgggcggttgccattcaacatgagcgccaaaaggagtttgacgagaggtctcacgaggtccagagcttgaagcaacttgttttgcagtaccaggagcaagttaggacactagagataaacaactatgccctcacaatgcacctcaagcaggctcagcagagcagctccattcctgggcgtttcaaccctgatgttttctga

SEQ ID NO: 34873 - DNA, 384 bp, Zea mays
  Peptide Sequence Number=SeqID_78248
atggactatgctagcctttctcctggcccatggggcccttccaatggattccagggaggcttaatagaattaatagagtatccataccaacaaggtgcatcttcttttttggaagcctgtctcgaaagaacctccaagttaagcgtgcttggcttggagcaatttgggatgggtgaccgaccggggaagttttctcgggtgtgcatgagtgaggacatagtgcacacaaaagacccgggttggtctgtgggaacaatatatgatcctagagagctgccaggagtaagtaccgccagtccagggattggacggggtgttacaaagaagtcacccccacaagtgggggagatgactccatcaactatggagcatagtggccgatag

SEQ ID NO: 34874 - DNA, 1920 bp, Zea mays
  Peptide Sequence Number=SeqID_78249
atgaaggggcgcttaaccgcggggcggttgcatgccccttgtgcggcggttcgccttcctgaccgccggttgccccgaatatgggggtcgcataactgtggggcagttgcacgccccttcttcgggtcagtctgtatgacatgtggggcctggcccccgtgtcataaggtgggaaccttggtgcacgtcgggggagacttcgcccgtgacacttcgggggcgccagcctccagatggggtgtgccggtgttctctggagggatccgcgtcagggtcgtctcctccggcgatctcatcgccgaagagctcgcgctcgtggtggctccaccgcttcaaggatgttcatcatccgtgctggggaggaggacgagccgagtcgaggctccgccttccgtgtgggctggcggcccgcttcttcctccagcattcgggggagaagggcgttcgccagtcttgcgaaggaggcgaactccggatacacggggccggccgtctgaggcaccgtcaactgccgcgtgtctggctcctcggcctaggtggctttggtgccacctccagcgctgcctcctaccgcttggacggggcatggctgttcgtccaccgcacgggcgacggtcgcgtcgtgtgcggatcggccacacccacggcttctcctgcgtcgccggccgcaccggggggtcgtacaagacgtcgtacgccgtgggggcggcggcagcgttcttggatggtcttgtcctcactcccgcagtgaggacaggagcgaggacctcttcgcacgcgctggggcggccaccattcgctggtacgacactggtgcgcaggtggccgctgtcgttggtgctgaggtggtcgccgccgctggtgaggctccccactgcagaggtggttgcctccgctgacgataccatctgtgccacctgccgccggacctccggctctttggctttaatggcctgtttgtcgccccccgtaggaagacggaggcgaggaccctttcgcagcggcgtacatgctgatatgatcaccgctgcttggcgagtcgtcggtgtagaggtggtcgccaccgtcgatgctaatgtggtcgcctccgccggcgagccgctcggagctagctatcctgcggtccttactggtgtggagatactaagtccccgtcacagtgtggcggagcatgcaggcccacggtacgggaccaggcttagcgactacatgggctccggaccaccccatggaacggggtcccgttctctagagccggcccaggctgtcggacctccctactttcgtatcagtggccctaaactgcaagcctggctgctcaattcggatgtcgtcatgtcagacagatggaaaccgtacgggtggctgggggagagttgcggagcccttcttggtttggtacttgccgtagggctaggtcccgaccctgggtccccacctgcatttgacacgggagcccttgtctttggttgtggtcacttccgcgtgtacctgttggctgcctggatccgtgggggaattcagaagggtttccggaggaaggcatatttcagctccgtagactggggagctcggggtccctctggggtccatctagttgtcttcaccggagtaagagcctccggcgaagacatccttcaggtccccttcgggcgactgatgctcgaggtcccgctcagccgtggccacctcaccatcgtccaccttttctttgccaggtcggcggcgaggtggagagtcgtccttggaaaactgctcgcgccgctcactaacgcgtttcgcgaggtcaatgatctcgcgatactccgcggcgctatggcgacagttggggtgcacggggcatgggccgctgttacccctcttcggtcgtgggcgtttgttgcggtcgccctggcccccagtcgcggctgcgactactag

SEQ ID NO: 34875 - DNA, 717 bp, Zea mays
  Peptide Sequence Number=SeqID_78250
atgcccccgctcgcgcaatcctcgcccccgcactcgctctccgagctcgaacaggcgtcgtcctctcgactccatgattctcgcctctgtggtcctcaccgccactccggatcctcgcccttccatcggcgcccatccaggtacgtccccaccctgcactcctcgtcctttccatcggtgcttccaggagaccctcgcctcaccgctctctccctcccgttcctctgtgccgccttctcccactctgccactaacgctctactggatgccctcacgtcgccgcccgcctccttttgtctgcccagatccccgcaatcaccacatatccacagcatcctcggggggttcgaccccaccatcgcctcccagttcttcgttcagccatggaggcgccgcagcgacggaggggagtgtcgtgtgggtccagttcctcagagggttcaactgctgctgtgcgcgcatgacggcctcacgctccctcgcgtcagaggaaatcccggtgttcctctgggtgtgctgggtcatggcgtggagcgcttcggcctcgagggtggccggttacggatgggagaagttgcaacctattgtggactcgtggtgctcctcccggacgtgacgcacctggtgctgttggcgctcgtctcgatggacgttgtcgcggtcgtggatgatgcagacgtttggggctgggacgtctccagcgctgggaaggggtga

SEQ ID NO: 34876 - DNA, 210 bp, Zea mays
  Peptide Sequence Number=SeqID_78251
atggtcccggtcgagaaaatccccgaacactggcccccgatcactaacgggctggcgtcaactgtccactctgcaatggcccaactggagggtgccgcacaggacatcgcaacccgagagcggatggggcacaacgagcacctaagtaagaggtcaagagactctaaagtcgttcctaaggggatacagagtctaggtgctttgatgtga

SEQ ID NO: 34877 - DNA, 813 bp, Zea mays
  Peptide Sequence Number=SeqID_78252
atggcagtgacgccttcgggaatattctctgtcctggcgctaggatggctaggggatcatatctgtgtttcctccgttcaaatgtctcccaccttgctccaaagtgggctttccactgctgctgtgtggtgtagggtgccagatactgtatcatcccaataccagcctcttcacagaactccactatctctttgttcaggttcattgaatgtgcaatgctgccgtaacctgagagaaacggcgctgaagaaaggaaccccactagctagagagttggatgaaaaggtttgtgatgcacttcatctttacattgaagcccgcggcataaatgagaagctcttccgttttctccaagcttggctttatgtaaaggatcactgcaatcttgtacgctggttcaagagcgttggttcattcatcagtgaccaaagccaaagcaaggttatggttggcaaacgccatggacctgttactgctttagctgggcgagctcatccaaagagcacaattcatctgttccctcttattcttcatcttctgggaagtgcatccttcaagcatagagttgtgacaggccatgtattgcttcagttggcaaatcttattaagattttggaggcaccatttcaggtgctatttaagaaccttactgttgacataaaggatgtgaaaccaacgtccctgctcaaagatcgtctgcgtgaagtcgagggaaatccaaagctcggctcccttggtccacaactgcaatatagcaagtatgcctccaagtttctgaaaggattgttatatttcatttcgtatttaatctga

SEQ ID NO: 34878 - DNA, 504 bp, Zea mays
  Peptide Sequence Number=SeqID_78253
atgacgccgcgtgtgccgggagcctccctattcatccttcttctctccgtgcccataaatagcgcctgccgggtggctcctccacacagtacccccagctcggtctccatagcgcgctgcaccttaagcgctggacctcccttcaacactccgtcgcgccctgcctctctgcccagcccccacgaccaccttgaccctccgaacaaagtcggcctgtctcctcatggccggtgcggcggaatcgatgctcacccgggggaggagctcgaggcatggccgctgttgccgctaggcatagaatttggacctcgccactacacaatcgccggtaaatcctacactttcgtgtttgccatggcctcggcatcgtattgcgtcaaccaatttcgaggaattgggctccagggaattgaatcctggattccggcgaacccgccgccgtggggtgagtcggtgcgccgctatctggccaccaggtttggggaatgctgggatgaccattga

SEQ ID NO: 34879 - DNA, 1299 bp, Zea mays
  Peptide Sequence Number=SeqID_78254
atgcgccgtgctacacattgctccatcctctcctcacctgtgaagatatgcagcaaaatgcaaagcctgactgcaaaaggatatgaactcgtctccaatgggattgacaaccatttagtttcggtgaatctcaagaataagaataggcagactgttcttttttctgctacacagactccggaggctactattgaaggcctgcagcagggttattgtgtcatttctagcgataaaaggttcttggttctgtatgctttcctaagaaagaagcggaataagaagatcatcttttgcaaggcaggaaaggtcatcttattgtgcactaatgtggctgcccgtggacttgatattcctgacgtggaaacaagtacacttttggctacattagagaagattgagtcttggatattttctcgcattgttgagactatggtggcagttttcttatggatgtttctcttccaggcactaactcctcacatgcaaaaacgggcagaaggatcaccaactccaaagtctggtagagtgctaggtcctgctttgggtgatcagcagcagggaaccttttctgttaacctgtggaaggctgcgtttcacgacacattcaacagaatgtgccccctcagtgctggcggacatgagtgtggctgtttaccggtattagcaaaacaggtgatggagcagtgtgtagcccgtttggatgttgccatgttcaatgccatccttcgtgaatcagcaagtgagataccaacagaccctatatctgacccaattgttaacccaaaagtcctaccaattccagctggtgatctaagctttgggtcaggcgcgcagctgaagaactctattggaaactggtccagatggctgacagataagcttggtatagatcatgatgattctgaggacataggagaggttgaagacgaaagaagagccgcagctgaaacgaaatcgtttcaacttctcaatgagctaagtgatctcctgatgctcccaaaggacatgctccttgaaaaatctatcaggaaagaggtttgtccctcaattggccttcagttagtgactaggatcctgtgcaacttcaccacagatgagttttgccctgatccggttctaagcacggtcttagaagagctgaattccgagagcttgatggagcgtcacgccaacaaagacgcgaccagtgtgtttccgtgcaccgctgcccctatagtgtaccgcacaccttcaacgttggacgcgacagagagagcagcagacataggaggtgcgcggcagagagagcagcagacatag

SEQ ID NO: 34880 - DNA, 294 bp, Zea mays
  Peptide Sequence Number=SeqID_78255
atgaggagacaggccgactttgttcggagggtcaaggtggtcgtggggctggacagagaggcagggcgcgacggagtgttgaagggaggtccagcgcttaaggtgcagcgcgctatggagaccgagctgggggtactgtgtggaggagccgcccggcaggcgctatttatgggcacagagagaagaaggatgaacagggaggctcccggcacacgcggcgtcatccgttcacaacctctcggcgagatccgcttgagcccgccgtttgcgcgcgattgttcactaattatatag

SEQ ID NO: 34881 - DNA, 603 bp, Zea mays
  Peptide Sequence Number=SeqID_78256
atggaggaggcggttgttgtccggtctaataaggtgaagaagctgaatgtggcggtggtcaggatcacgtttaaaaaaggttgcatcaaagtgagcctggcagtgtgtgctgctgctcgtgctattaggaggttggtggccttactagcaaccacctcaattcagcctcgaatcattttcaacatagcatcttgtatccctgatgtttactgtattttggcagctaagcaaagagaatacgcttaccaagataagtctcatgttaatggcaagaatgggaaggagcttctatctatagctaaactgcagggtgagattagaaaagcatctaagagaaaactatttgctattcaggtttcttctgagtgctctaatcatgatgttttagctggtagcattcgaactcaaaagcatcatatgagaaagattaatgatgttatggggcatggaatgagaattcaccttcttgtttcagtggttgagggtgagattaaagaagcgttaagagaccattatgaccgccacaaaaggcaattaacaaaacatgatagaagtttctctcgcagaatgatttcagattatttggcatgtgtcggcctataa

SEQ ID NO: 34882 - DNA, 81 bp, Zea mays
  Peptide Sequence Number=SeqID_78257
atggtgtttgttgtcagcaagcctgttggcaacttctttgcttttgatatgccactgatattaaatagcatttcctcttaa

SEQ ID NO: 34883 - DNA, 321 bp, Zea mays
  Peptide Sequence Number=SeqID_78258
atggccatcctaggcaggacttgcccggacgagaaccctctgagggctcaattccggccggacaccacgccacctctatcgtgcccatcccgtaccaccctcaatgttggcccgacaccacgtcccctgcagtcggtgcgtcatccatccgctgctgcatctcctccttcagcgtcgtcaggactatatctggagcagaacggggtgtgggtggttgcaagcgggaatgagtcggctagggagagagcaggaaagtggcagacgaacatggagggactaccggatctgggcaacgagggtgggggtggacgcagtggctag

SEQ ID NO: 34884 - DNA, 543 bp, Zea mays
  Peptide Sequence Number=SeqID_78259
atgttggagcgaaggcaaagacgccacccttcgctcgaggccttcgctgcagccgctggtccgccggaggcaaagcgggcagggacacccttcgcaggactcggcgccttgacgaaggcctgcggcgacgacctcacacggcgcggcctcgttcagccccaaggcccaccagagagcaagttccaacatagtgaatccggctcccagcagcaggcgtctgctggccttgatgccggcgacctgcctccgcctgccactgttgaggtggcgccatcgggcccccaggttccacctgccactaccgaggcggcaccgtcaggcccccaggttccgactgctactgccgaggtagcaccgtcgggcccccaggttccagctgccacttccgaggtagcgccgtcaggccctcaggctctagccgggggtccggtagcaacagcgccgccgacggctacagcagacccaacggcggcggcgatgtcgtcgactataccgtcggcaacggcggaagacgcggggggtgtgacggaacctcccaagtaa

SEQ ID NO: 34885 - DNA, 2004 bp, Zea mays
  Peptide Sequence Number=SeqID_78260
atggacaaggatcgccaagcggcggcgcggaaacgccaggcgaccgtgagggttcatgaagcccggccgaaaaggcagcggggagcatcgaaggctgaggcctccggcggaggcaagccgccattgccggcgaaggcgggtgcctccgcgcctggcaaggcgccggaggcgacggtgggcgccggaggccccaagctgtcgaaggtggtgccgtccgccagcggagtggcggaggctgcgaaggcggcccgatcgctaccgccgcccggcaaacgcgttgccgacttcggcactgagattgatgtggaggattatcttggggggttggacgagggcccgctcgctctagttgtgcctggcgcggcggtcgcgacggctgcgccagcgccgaaggcgggggtagagacccttggcgctggaggcgaggtgactgccctcgcgttggtcagagacgaggcggacgcggcgacccgccggctgaaaggagcaatggaggcgctgagtcaggtggctgacttcaccagccgtactgcgtcgggggcccttacggcgacgttgtctgccgaggtcgagagacttcggacgcaacacgcggacgctgtccgtgagaagtcggcctccgacagcaagtgccgcaagctggcggagaaggtggccgcccttgagaaggagaaggcagacctccggcgccagctgatggaggagagaagggaggccaacgaagccatcgccaaggagcagtctgcgcaggcggaggccaggctggcgcgggcggagggcaatgtcgccaaggagctcgccggggagctgcagcggcggcttgctgccttcgagagccgcgcggagggggccgaggccgcggcgcgagcggaggccgaacggacgcgcacgcagctcatgacttcatatcgcgagctgggtgtgcggacgagcgacttcgaggtgccggagcgagaggccggacttcgctgtctggagtgggtgcaggaggaactgcaggagctccccactgtcttggcggggttgatgtcgttcacctccctggtcacctgcgaggcagcgatgaacacgctctctcgcgaaggctgccggcactttgaggccctcgaccaggtggatgaagattttgggcgagatatctttgaggtcgaagaccccgtggtgaaggagtccgccggggccctctatgaccggatgtggggttcatacggtcaagaggtggtccgggcgcgggccgaggctgcaagggctcaggcggagcgcggcgagcgggtggacgattttggggcgctgaacagcgcgccgcctgagccggagaccacccctgcggaggccgccactggagtcgccccggtgaccgcggaagatgcaccaggcgcccttgtacctgctgcggccggcgaaggcctactcccaagggtggccgaaggcgcgtctgatgcccccgcagctgctgtgccgggcgctgaagatccagcggagacaacggcggaggcggcggcggaggctcccgcagcggcagggccttcgcaggttcaagattttgggcctgcgcacgcaaccgctactactggttttttggcggcttcgaccgcggaaggtggaaatgaatgtggtgggtctgtttctgagttttttgattttactgactctgggagctcggctgaatggaccgaggagtcgtcggaggaggacttggactattttgcggccctggacgaggctgcggcggaggctgcgctacatgctgcggacgcgccaggcgtgcccggtcctagcaccgggcaccgacgacgaagggcggttgcgaagcgtaggattagtgcggaggaaggggctcggcttcgcgttagtagggttggtcggcaggagctgctgtctttgccggccgtctcgggtgtgggggaaggggagctgcgaagcctttttgctggtgaggagcttaggataatgttatttaattatagagagatggggattattcctaaggttgagccgatgtag

SEQ ID NO: 34886 - DNA, 354 bp, Zea mays
  Peptide Sequence Number=SeqID_78261
atggagtggagagagtttgagaaaatttcaagatttgaatttttgggatgctacaaacatgccgacgccgtccgggaaaagtcggccgccaacagcaagtgccacaagctggcggataaggtggtcgcgctggagggtgagaagactgacctccggcgccaactggcggaggagaggaaggaggctaatgaggccctcgccaaggcgcagtctgcgcaggcggaggccaatttggcgcgggcggagggcagtcttgccaggcagcgcgccgaggaattggaggagcggctcaacgctctgcagacccgtgtggagagggctgaggcttcgacgcgctcggaggttgagcgacgc

SEQ ID NO: 34887 - DNA, 912 bp, Zea mays
  Peptide Sequence Number=SeqID_78262
atggatgcggtgggagagaagaagggagcgacggcggcatcggactcggaggcggagaaggagaagatgatggcggagcagtttgagaaggcagtggtggtatcggaggcagagactgggaaggaaaaggcagtggcgccctcggaggcggagaatgagaagatggtggaggtgcagcagggagacaaggcagtggcgcccttggatgcggggaatgtgaagatggtggaggggcagcaggggggcaagggcaaggcagtggcgccctcggactcggagcagggagacaaggcagcggcggcctcgggtgcggagaatgtgcagccgcaggaagagaatgcagtggcggcctcggaggcggagataggggcggcggaagcgaatgatgtgaccggcgggaggcttatcaccttgaggagctcggacggggaggtccatcgcgtgtcggaggcggcggcacggctgtcgggccttctccgtggcatcatagaaaccaacgtcaccgtcacaaaaggagtcatactccctaccgtcgacgggaccaccctggtcacggtgctggagtactgcaacaagcacgccgaggccgaggccgccgccggagtcaccaccagcgcagtcgacagagccgcggcgtccgaggccctcgaggcttgggaccgcgacttactcgaccgcctttccgttcgcgcgctctccaacctcttcaacgcctcctccttcctcaaaatttataggctcgccggcgccatcgccctgaaggtcgccgccgacctcgcaagggcaataccaccggcagagagcagacccaggtcgcctccaagtccaacatccgagacgccttcaacgtcaacgccgtcaacgtcgacgccctcaccccgcaggaacaggagccgaaggccgcagagatga

SEQ ID NO: 34888 - DNA, 126 bp, Zea mays
  Peptide Sequence Number=SeqID_78263
atggccgggagcgagaaagtggccgtcgtccgggttatgcccgaacctaggattagagctctaacaaagcagtgcgatcacgaggatccgaagaatcaccctggtaactggaatctcaagtgctag

SEQ ID NO: 34889 - DNA, 171 bp, Zea mays
  Peptide Sequence Number=SeqID_78264
atgtcggcgtggacagaggcagagtcgtctcgaaaagaggcttcatcggcccaggagaaggtggcttcccaggccgaggaggtgcagcagcggcggctggggcttggccaggtcgtccgcgagcgggaccaaccctggagtcacgctgccgaggccgaacagtttgtctga

SEQ ID NO: 34890 - DNA, 159 bp, Zea mays
  Peptide Sequence Number=SeqID_78265
atggagctagggctccgcttgaaggcggatgtaataactctgctttttgtaagcaatagcacaaactacccaagtgattcatgggtaaccaaggatcctcagtcacgggctcttctactcgccacaatacaaacaagcacagtatatagagaaaattaa

SEQ ID NO: 34891 - DNA, 330 bp, Zea mays
  Peptide Sequence Number=SeqID_78266
atggccttgctagatcctcccgagcgcctccagcctgaggtggcacaacttggtgcaaggcctcgtgggggtggcgctcttccaccggtgcttagcttcaaggatgttcatcagccttgcggtggtggagagcgagctgggctgcggctccgtcttccacatgagctggtgaccagcctcttcctccagcattcagaggagaggatgatcaccagccttgtgaaggttggaggcgaactttggctacgcggcaccgaccagaccgcaagcgccgtctgccgccgtgcttccacctccttggcttggatggtcttgtcgtcatccctgtag

SEQ ID NO: 34892 - DNA, 1594 bp, Zea mays
  Peptide Sequence Number=SeqID_78267
atgcgcgcttgggcggaccagcctctggcacgggggctcgggcccacgagtcatgctccttgggcgtcggcctccgtgtgtggagaaggcaaaccgtcgcgtgaggaatacgccaccgcctgcggtagtgcgcctcttcgcctccgccgaaaccaacggaccagcctctgccatgggggcccgggcccacgagtcatgctctttgggtgtcggcctccgtgtgcggagaaagcgaaccgtcgcgtgaggagcacgccaccgcctgtggtggtgcgtctcttcacctccgccgaacgccgcggaccagtctgccgcgtggggaatacgccaccgcctgcgatagtgcgcctcttcatctccgacgaaaacaacggcccaacttctggcatgggggcccgggcccacgagtcatcctccttgggcgccgtttcctgggtgcagggaagccaaaccgccgctcgcgccagcaccgcgcctcctcggggccgccgcagaagacagaaaaattttcaaaaccaatgcagcgaaatcgaggcaccccgcgcgtgtcccaagcaaaagcatcaagtgcggaggtcacgggtcagtcagctgaggggacatgcgtggcagtgggcgtgttcgaaggcgggctggcaaataattacgacagcaagcgcacggaagcagcacgccaatcgctggtcaaactttggccccacctgcaggcttgtatcctcccctgaggcgggcttgggggccactgtcggtaccctgaatcagggctccgaggccaccacacggccagaggagacaatatcccccaaggtatcaacggtgggtccggaccccagcatatccggaacagacctccgggcagggtccgaggcctccgcgggcgggggtccggagccgacacgtgtccggaccatgccatgtactcttatgctgcccgctcaggcggagacccgatgctgccacgtggcctactgcccaagacgtgatgtgccgcctcggcatttaatgagccctgtcactccactagcaggcgatgtgccgcctcagcatttaatgtgccctgtccactccgctgacgggcgacaaccagaccatcctgcaggcggtgtgcctatccattccgttggcaggcggtacgcctgcattgcggcatacactgtgctcatcttcacttgtacgttaccagtgaagcttccgccgcacgccgatactactgtcggcgtttcagaccctgggggaccctcaaccgagctgaccagtgaattcatcgctgcgtgcccctgcctagatgggttggcgcaagatggaacacaaggggggaatgccaacgtggctgtcagagaagtgcctgagccctgtagaagcacagttggcgagcttcctgttgcgcccgaggctgaacttggctgttgtcagccttacccgggtggttggcacaacagtcggagcggggtgagcggcgctgttttcctgtcagatcggtcagtgaaggggcgaagtgactgcggtcacttcgaccttgccgactacggcacgcgtgtcaggataaggtgccaggcgatctttgcattgaatgcgcctgcgatatggtcggctg

SEQ ID NO: 34893 - DNA, 957 bp, Zea mays
  Peptide Sequence Number=SeqID_78268
atgaagcagtggcgagacaacgtcgacttactgctcggcatggcacattctacctcgaccaggtcgaggccacggccatcccggtgccaacatgaggcgtcggcgtctgtgcgctcaccctcagtggggggtgcacagaccaacgacctccgggcagaactcaaccgcaggcgtgcgagagaggacgcccggatctctctagagagggcacgggagcgccggcaaaacatcgagggttgcaaccttgatcaagacttcgctgcggtaggaccgcaacccccagtgggcgcccggttccaggcgggtgtccccttggccgacgtgggttgcatcgctctcgctgatcatctttgtgcggcgtcctggccatccaagttccggccgcacctgccggaaaagtacgacgagctctgcgcgcggttcatagcgaacttcgccagcgcttaccaacagcacgacgtggaggcccacctccacacagtgaggcaggaacccagggagactctctggacgtttacctcccgcttcaccaagtgcgctagagccgccgagggccgggcatggcactcggccccacaagccggagtcacccagacgggtggctcgggtgccgtcccccgggacggtaaaaagaaaaagaagggtcgcggccacgagaagccacagtcaaccgctatagtcgtcgcagctgcgactgggggccggggcaaccacaacaaacgctcacgcccgcagaggggtaacagcggctcatgccctgtgcaccccaatagtcgccacagcgctgcggagtgtcgcgagatcatcgacctcgcgaaacgcgtcagcgagcagcacgagcagtcttccaaggacggtccccacctcatcgccgacctggcaaggaaagggtcgacgacggcgaggtggccgcggctgaacgagacctcgggtatcagtcacccgagggggtcctaa

SEQ ID NO: 34894 - DNA, 1047 bp, Zea mays
  Peptide Sequence Number=SeqID_78269
atgggtgcgattaagtcaaggctcggtccactcaagggacacgatctcgcctcgcccgagcgcagcctcgggcaaggggagccgacctcgaaggattcacgcctcgcccgaggaccccctcaagcaacggacacaccttcagctcgcccgaggcccagtcttcgccaagaagcaaccttggccagagtgaggctgacagcagccaagtccggcttcgggcgccataggaagctccgcctcgcccgaccccagggctcagactcggcctcggccccgaaagacgacgaactccgcctcgcccgaccccagggctcggactcggcctcggccccggaagacgacgaactccgcctcgcccgaccccagggctcggactcggcctcggccccggaagacgacgaactccgcctcgcccgaccccagggctcggactcggcctcggccccggaagacgacaaactccgcctcgcccgacccggggctcggactcgacctcgaccttggaagatagactcgacctcgacctcggaggagcctccgcctcgcccgacccagggctcggaccgaccacatcacggggggggcatcattaccctacccttagctagctcaggctacggggaacaagaccggcgtcccatctggctcgccccggttgttcttttagtgcaggctattttgagacagggacttcatttccgctgcgactattccattgtgatccagatttcgagtagagcgacatctagatctgtgttcttgggcaaaggaaactttcaattagtgtcgaagctaggctctccagtggaaaatgagacagagaatgtggaggaaaagaatatttgctacttctacacgtgtctcaacaaagaagacaagacaatcttgatgaagctattgagaagaaatgaggaacaaggcaagacgcttctcagcctagaggaaactctcatcatgacccaaggacaccttgagaagatgaccaagaacatgagaagcaacagtgctctcatgatgatttggtccaacggtatgattcgattttaa

SEQ ID NO: 34895 - DNA, 231 bp, Zea mays
  Peptide Sequence Number=SeqID_78270
atggcgcagtggcttaccccggtctacgctcgctggcggtcagagggagtccgacgaccgtggactggcctctccggcgaagcagacttcgattcctcgctcggggagcttcaccgagctcgcccaagtcgcaaatatgcgaatcttggcaaaaatccggcgcgagtcttttcctggcacctagggctgtctctcatccgtgagtcgccatggcagatatgccctaggtag

SEQ ID NO: 34896 - DNA, 390 bp, Zea mays
  Peptide Sequence Number=SeqID_78271
atgtgcacaaggaatcaaagaatggggcagagatttacccggtctacgttcaccggcgatcgggtgaagtccggcgaccgtggactggcttctccggcgaagcaaagtccgattccttgctcggggagcttcaccgaggcatgcatggtctcttccgagggtcgggcgtggctgggaagggctctgttggccggtctatggtggcaggggctcaggtggccgcgggcatgccgggcgtggggcaaatgccagtggtttcgggctccggtagcacttcagtgggtaagcggacacatttccgtagctgagacacatggaacacatcatgaacagttgacatgtgtggtggcaacttcaattgataggctacaggtccacaaatttccttga

SEQ ID NO: 34897 - DNA, 729 bp, Zea mays
  Peptide Sequence Number=SeqID_78272
atgtctacttgcgcggcgtctcagaagcgtggccgcgacgtggacgctgcgtcgtcgccactgtgggtccggatggacacggagttcctcgccatccaaggccacctcaagagagcgaagaactacgcgctagcgccacgacgccaacgatcatcaccatcaggggctcgtcgtggtgtgtcgtcgacaccaaggaggacgacgtcgcaacccaaggcagcaacggaggctgcgtatcagactcggattacggcaccagaagcgatctcgaagcaacagcaccacctgtacccaatccctccggcagttcctgataacaagctgcgaccggccgaggcgtctacttcgtcgtctcagaagcgtggccgcgacgtcgacgctgcgtcatcggcactacaggtccggatggatgaggagcttccagtcctccaaggcatcctcaagaaagtgaagcccttgctcccttccacgttccctgccgccgacgagaagaactatgcaccatcacctgtaggacggtcatccacatcagggtctcctattgtgtcgtcgacagcaaacacgacgacgtcgcaacccaatgcagaaaccgagtttgtgtatcagaaagaaagggaggagttccgccagatgctgatggagatggagaagtcggcgctgcctgatgagacgatatacccaaaggacctagaggagctcggcctctcgcgccattggtacatgtcatga

SEQ ID NO: 34898 - DNA, 888 bp, Zea mays
  Peptide Sequence Number=SeqID_78273
atgcggctccccagccccactgcgtggcctccccggcccccggtggcgcggcccaacggcccccagcggcgcggcctccctggcccggtggtggggctcttcggcccccgcggcgtggcctttctggcccctcgcgcgcggcctctcggcccctgcacgcggtcgtcctggccccggtgcgtggcccctaccctcgacagcgtggccccccggcgcgcggctcctggcccccagcagctcagcccctcgcggctcgccaagcggcccagatgggtcgagcgcgtgggcgagcgcgaaggggggaaagcgaggtggccggagacgggcgtgagagaggtggaaatcccgcggccttcgtgttcgtcccgcgcccaggtcgggcgtaaggagaggatccaggtgtacaatggggatgtagcagagtgctacgcgtctagcggagggagagctagcgccctaagtacatgccaatgtggcagccggagagatcttggcaccctgctgctgagagccgccgtcgtcacagggctagcggggcgccatcattgcctatctggcggagctagccagatgggacaccggtcttgttctctgcggcccgagtcggctcgaggtagggtgatgatggcgcttcctgttgacgtggcgggcctgtgccctaggtcgggcgacgtggaggctcctctgaagccgaggtcgagtctgtcttccatggccgaggccgagcccgagcccctgggtcgggcgaggcggaggttgtccggcagaggccagggcggagtccgagccctggggtcgggcgaagcggagttcgtcgtcttctggggcttagcccgagtccgagccctgggtcgggcggagcggagttcgccgtcttccggggcttag

SEQ ID NO: 34899 - DNA, 303 bp, Zea mays
  Peptide Sequence Number=SeqID_78274
atggagcctggcggagggacatctgtcggagcggttgagtccttgctgacgtccccctgcttccgcctgtgccctaggtcgggcgacgtggaggctcctccgaagccgaggtcgagtctgtcttccatggccgaggccgagcccgagccccttggtcgggcgaggcggaggttgtccggcagaggccagggcggagtccgagccctggggtcgggcgaagcggagttcgtcgtcttctggggcttagcccgagtccgagccctgggtcgggcggagcggagttcgccgtcttccggggcctag

SEQ ID NO: 34900 - DNA, 249 bp, Zea mays
  Peptide Sequence Number=SeqID_78275
atggcgggcggaggagagctcgccggatctaagggagggtgtttggccagcgagggtgctaaaggttcaacacaaaccaataaaaaggtccaagttagggttcaaaagaaaggagcaaaagaaaccgaagagaaccctggtctggcgcaccggactgtccggtgtgccaccggacagtgttcggtgcaccagggtggatctactcgaactcgccaccttcgggtttctggaaaagccactaggctataa

SEQ ID NO: 34901 - DNA, 195 bp, Zea mays
  Peptide Sequence Number=SeqID_78276
atgtcgggaaatatggtaaccgtcggggtcagtggagcattgtatgccaaggcggtgaggtctggccgcgaacggggaatcgatggggatgatcctgatgccaaacaattgcatggtctagagcttccatatgaagtcatgacacctcttcaagcagcagttgccggtgttcaaaagtgtttggtggggaagtaa

SEQ ID NO: 34902 - DNA, 1854 bp, Zea mays
  Peptide Sequence Number=SeqID_78277
atggcgagcgggggaggggggattcgggcgacgacttcggggaggatgaagccgcgggggtggggggattcaagcgacgactttgggacaacagctattgcgctgaggcgtggggcgacggtagtggcacgacggtctcccccgcctaagtcgcgggagatgggggcgtggggtcgttgggcggggaagccgggcgggggcatgacgctgtggacgctgggggagagggggcgcgagtatcacggtgtcgggggtggtggctcgggaatggcgggcgggggcaggccgaacccgaagctcgccgtcatacgctacggcgccgaggtaacacagctcggcgctatagcctatgacgccgagctcttacgtggcgggggcgagcggtggcatgaggtcggcgttaggatgccagagctgcgaagcagtactcgccaagcatgcctaaggtcgaagaagcttgaagatctgcagctaggagagccgcctgcgaaaccggtctcacctgctccgccgagggcaggaaagcgtgctcctacacgtgctgctaggggcagaaagggtgccactgggaaaggagtgccccctgcacctacgactagaagaaagcggggtaatattgtcgacttggaagctgatccagcttgtgaagacccccctaaagctgtcaagggactggaagttgctgctgctgctgcacccaagaaccttcctttgaaggaggtagccgaggttggtgttctgaaaatgaatggtgtgagtgcagagaagattattggggctgaagatgaatcaacagcgacacctgtgccagagagggttcaagtaggtaattctccagagtacataactgacaggaagttaggtaaaggtggttttggtcaggtctatgttggtcgaagggtttctggtggagctgcccgcactggtcctgatgcatatgaggtaatggatatgcttggtcccagcctttgggacgtgtggaattcaatggggcaggcgatgactccaaatatggctgcttgcattgctgtagagagcatatcgattcttgagaagctccattctaaagggggaacaattagatatgcgagtgtccatgctcatttggggcgcactggtagtaggagggatgatttagagtcactggcatacacccttattttcctgattagaggaagattgccttggcaaggctaccagggagataccaagagtttccttgtttgcaagaagaaaatggctacttctccagagatgctttgttgtttctgtccagctccattcaaacagtttcttgagattgtcacaaatatgaaatttgatgaagagccaaattatgccaagcttatctctatttttgatggtttgattgaagcacctgcgtcgagaccagtcagaattgatggggccctcaaggactggataatggagcagtgggagaaaagttactacataacagcaattgctggatcaaccaatgggagttcattggttgtcatgtccaaaggaactccttacacacagcaatcatacaaggttagcgaatcgttcccttacaagtggatcaataaaaagtggaaagaagggttccatgtaacatctatggccactgctggaaatcgctggggcgtagttatgtcaaggaactcagggttttctactcaggttgtagagttggacttcctgtaccctagcgaaggcattcatcggcgatgggagagtggttacaggataacttccacagcggccaccaatgaccaagctgctttcatcttgagcatgccaaagcggaagccgatggacgagacgcaagaaaccctccggacctctgcctttcccagttcacatgtcaag

SEQ ID NO: 34903 - DNA, 219 bp, Zea mays
  Peptide Sequence Number=SeqID_78278
atggccggttcggccgccccctgcgccgccccctgcgccgccccctgcgccgccccctgcgccgccccctgcgccgcccccctgccccgccggttcggccgccccctgccccgccggggactcgagcggtttctcgagtgcctctccgtaaggacctgttctatggatgaccgcccgggaaaacagtgcaaccataagggtggaatggggtgcccttag

SEQ ID NO: 34904 - DNA, 195 bp, Zea mays
  Peptide Sequence Number=SeqID_78279
atggccggttcggccgccccctgcgccgccccctgcgccgccccctgcgccgcccccctgccccgccggttcggccgccccctgccccgccgggggctcgagcggtttctcgagtgcctctccgtaaggacctgttctatggatgaccgcccgggaaaacagtgcaaccatgagggtggaatggggtgcccttag

SEQ ID NO: 34905 - DNA, 1170 bp, Zea mays
  Peptide Sequence Number=SeqID_78280
atggcggcggcggaagcttcgaggacttcggaggcccgccgtgacgccgtgttcgggcggtgggtcgtcttctctccggcgcgctcgcgccgccccaccgacctcaagtcccacaaccccaccaaccctagcccgggcccgggggccgacgcgccgcccaagccgtcctgccccttctgcgccggccgcgagtccgagtgcgcgccccagatcttccgcgtgccgcccgacggctcgctgccgtggcggatccgcgtcatccagaacctctaccccgcgctgcgccgcgacgtggacccgccgcctgtgccagaggcagagggggatgtctcctcggacgagcctggggagcgcgccgtccccggcttcggcttccacgatgtggtcatcgagacaccgcgccacgacgtgcgcctctgggacctggacgccgagggggtccgcgacgtgctgctcgcctacgcggagcgcgtgcggcagctcggggagcaccccgcggtgcagtatgttcagccaatagcaatgcttgttattatggtctgtgcaggtggactgtctgttttgtgtagatatgtagtttggtgcagttctcgtgtttaccgcaaggacataggtgtggtgtttaagaaccatggggcatctgctggagcttcgatggcacattcacacagccaaatgttgggaactccctttgtccctccctctgttacaactcggcttaactgcatgaaggagatttttgacagatcagggaactgcagcctttgtgagattaggcccaaagatatcctgatcagtgaaacacctaatttttctgccattgttccttttgcagcatcatatccatttgagatatggattattcctcgacaacatatttcttattttcatgaaatagatcaagataaggcactggaccttgggtctctgttaaagactatgctgcaaaagttgtctaagcagcttaatgacccaccattcaattttatggtccacagcgcaccatttaagatttcatcatcctgcctgccttatacacactggttcctccagattgtgccccagttaagtgtagtaggcggatttgagcttggaagtgggtgctacatcaacccagttttccctgaggatgccgcaaagattctcagggaacttgactgctcagtctag

SEQ ID NO: 34906 - DNA, 906 bp, Zea mays
  Peptide Sequence Number=SeqID_78281
atggcgctggctagccaggtcgccgctaaccagccgccgccgccgacgctctcctcccccgcccgccgcctcccaagagccagcagcaacgctctgctgctgctccagccggcggccgcggtcctcggcggccggaccctgaggcttcggcctcccggcgcgcggaggagggccctggacgccgtcgtcgtcgcgcgggcgtcgtctgaggcgaaggcggagaccgccgaggcgggcggcggcggcgggggagcggaggaggagcggccgtacgaggagtacgaggtgacgatcgagaagccgtacgggctcaagttcaccaagggccgcgacggcggcacgtacgtggaggccatccagcccggcgccgccgccgacctgaccggccagttcgaggtgggcgacaaggtgctggccaccagctccgtcttcggggaggagatctggccggcggcggggtacggccagaccatgtactgcatccgccagaggatcggccctctgtacatgaagatggagaggaggtttggtaagtgggacggcgccggcgacctcaccgagaaggagatcatcaggttcgagaggaactccggagtggtcagcggcagggtgcgggagatccagctgcaaaactaccagaggaagatggagcagaagatgcagagggaagaggacctccgcatggggctcaagctgtacaagtcggtagaggctgcgctttctgcgctggaggatgcgctcaagtcagggtatgaagacttcaaggcagttcgcaccgacccggatctcgcgaacctgaggaagtcggaggagttcgagcccttgctgaagaactacgacgagtcgttcatcaacgagaacgccatcaacgccatcaagtccttgttcggactcggaaacaagtga

SEQ ID NO: 34907 - DNA, 1755 bp, Zea mays
  Peptide Sequence Number=SeqID_78282
atgtctttcgtgctttttgactacttcgaaagtattcctgaaaacgacggagtacacgctcgggtcttgacgctggaagggagcagcagcaccctcggcatcgacgacaccttcggcgagggtcttctccgggaatccggcccgagcaggcggctcggccggtcaccccggggcctcggccagccgtcctccaaggacgtcagcccgacccgaggcctcagctggtcaactccggcgtcggtcccgctaacggacgacccggctaggctccggccaaccaggttttcttttcgagccaactctgcctctgttcatgctgacaccgctacccctggcctcgactcatcgaagagcggccgaggggttcctttaactaagctagagaagcctcggacaacaaggtcgaccgagccgagggactcctacgcctccgggatacggatacctcactcgtcacctttacatggggtacgaacaacaccactcgatggggggcctgcggagcaacagaagaccgacgaacggcgcgctgtcgcccgctccagcggcggcgacgacgacgacttctgctccggggggccgaacagcggcagcgatgaccttagggcggatgctgctgccaggaggcccccgcccatgcccaaactcgtgaggcaaggacgggcagaaggccgtagagttggaggtcggtccgtgggcggccctggctatctcgtcggcggaagaacctcttccagctgccgtggcagacgccggcaccgggagcggctccgaagccactcgcgtccgagagccaggcacgcggcagctgccggtgccacggacaacaaccgcccttccccccgatcactgagggaaggagcgggccgccgcccacgcaggggctggccccaactcagcacactcccctccccagccctgccgggctgcatgatgaaaatccttgaagccgaacgatggctgaaaggtaccaactcccacggagttgcgttcctccaacgacgaggcgaaaagacggcgggtatcccccatccgggggcttggaagctgtcgcgggctgagtcttctccaacacgctccaaggtcctcctcctacggcgcgggggctgggtcccacacgtcatgcaagccggctcagagcagaagaagccaaaccgccgtgcgcggtgcgtacaaccgcccaacggttacaagcgaccctccacttttgcccagaccagcgggcgaaagggcgggcagccatgcaggcggcatgcaaccgcgccaagtgggcgcacttctccgactcccaacacgcccggcatgggggcccaggcccacgcgtcatgcaaccggcgtgtcgaatgcttcgtgcatgcaactgcacagccacttgcgccaccaccgcgcctcctcgactgcggaaccaatgtcgcgactcgaggcgacccagcgcacgacccagcagcgccagcctggcgcgacgggatcgagaaaggggataccctgaaaaggatccttccctgtgaaggaaccaggctccgagcctccctactgatcagaggttcgaaggctggcccctcagaagggttcgacagccgcctcagatcacgtgggccctacacccactactggtcagaggttcgaaggccgcccccccggaagggttcaacgaccgcctcaggctactcgggctccgcgcccactactgatcaggggttcgaaggctggcccccgaagggttcacagccgcctcagacacagagcgagggatga

SEQ ID NO: 34908 - DNA, 306 bp, Zea mays
  Peptide Sequence Number=SeqID_78283
atgtccggtgcaccagaggactccaacgccaacttgccaccttcgggaatttccagaggcgactccgctataattcaccggactgtccggtgtacaccggacagtgtccggtgcgccaaggagggtcggcctcaggaactcgccagcttcgggaaactccaacgactagtccgctataattcaccggactgtccggttctagtggtggggcgatcgtcgtttaagatgagtccaattgatgatttagtttgtttcggaaagtcaatagctgtacgggcatctccatgtttcgagtttgaccgatga

SEQ ID NO: 34909 - DNA, 318 bp, Zea mays
  Peptide Sequence Number=SeqID_78284
atggacatcacaagtaagttggacattgcaaaagtgatacttgggtgcgtagctcggagacaactgatcaagccaaggacggaggcaagaagagcttcgaggtaccaagtgcacgggagaaggtcaaggagactgaggaacccaaggccaagggtgaagaagaaagcttgcaaagtcaagggtgatcgagttgagaacagctacagcacatcaagggatgttggagctaagaaatgtcaatccagatcaagtcaagccgacttgatgatttatgagtccaacatcaaagctcaagcatgtgaaatgctatggatgtaa

SEQ ID NO: 34910 - DNA, 294 bp, Zea mays
  Peptide Sequence Number=SeqID_78285
atggacatcacaagtaagttggacattgcaaaagtgatactcgggtgcgtagctcggagacaactgatcaagccaaggacggaggcaagaagagcttcgaggtaccaagtgcacgggagaaggtcaaggagactgaggaacccaaggccaagggtgaagaagaaagcttgcaaagtcaagggtgatcgagttgagaacagctacagcacatcaagggatgttggagctaagaaatgtcaatccagatcaagtcaagccgacttgatgatttatgagtccaacatcaaagcttaa

SEQ ID NO: 34911 - DNA, 417 bp, Zea mays
  Peptide Sequence Number=SeqID_78286
atgtcccatctgatggcattgttggaggcgacaaagatcaccctggacaatagagaggagctcgtggttgatttgtccactgagatggtggaaaaggacttgcaggtggagcagctatccaatgatatccaagagttggaggaattagtggggactagggagaacaccattgagccaataaaaagatcaagttttggattcaacaaaggagcaaagaggcaaccgaaggcacctctggtctggggcaccggactgtccggtgtacaccggacagtgtccggtgcaccaccggacagtgtccggtgcaccagaggactccagctcgaactcgccaccttcgggaattcctcaggccggcgcgctataattcaccggactgtccggtgtacaccggacagtgtccggtgctccaagtaa

SEQ ID NO: 34912 - DNA, 744 bp, Zea mays
  Peptide Sequence Number=SeqID_78287
atggggaagcctgtcccctcactcctaatgctcctcctcagccgaggaccaccatcgcagcaaaatcctcccgagggcctccctacactgaccactcccctactgcccttgcccctttcgggtaagagaagggggtcggtgctaaccttgatgctccggctgtcgcagaggcccgatcccacggcgctgcggaagcggtacacgacggcgagcaattctggggtcctcgttcaccaacacagcgttccgaggccaccagcacctcacccacgccccggcgaaaccactagccacggcgcagaggaagcggcggcgacgagcgcccgattccacaactccgagccgcggcggctaattcctcagacccgaccatggcaatttcgtcgaaggtggccagcaaggtacaacaagatgggatggatgcacgaaggaatagcggcgctcggtgtttatacccgtgatgacttcgtaacggcccgagaagaggtgaagatccggtcggtggagcgcgcgatgcgcacggcgtctgttacgggcagcaagcgaaggagaaggagcagatggtggtgtgggaatctggcaagggggtccgccctgccagagacagcacacgagctaggagtgctggtgggtcgtgcgggggaagaaagcagatatgggccgaaatgggtgtgtgcggcccacgatcagggtttgtccttttcttttatatttcctgctttatttcaccctctttatttgtaa

SEQ ID NO: 34913 - DNA, 591 bp, Zea mays
  Peptide Sequence Number=SeqID_78288
atggccacctgcattgatctttcatacggaagggctgtcagcacgacgctggcagttgaggccaaatatgcaggctccagaaaatcaaaggggaatggaggcgattggcccaatcaggggtccgagaaaagacaaaggatggtaatccgaccttttattcagaatcattcttcatcgcgcccaccctcctaccctttcaagcaaccggtttttatccgtcctaccgctgccccaccgctacaaatcagccgggtgcccctggcactcgttttcccgttctcccaagctcttcaacaagccaagggaaatgcggcaatcaataccgcgggcaaaagtacaaggaaaacgagacagatttattatactcaagtggccacaacaccggaaggcgaaccgattacgatgggtacgtttcttgtggccaatcaccctgcagttattctctttgattctagtgcttcacatactttcataagcaagaagtttgtggaaaacattgcattctatataccgaatcaagggaagggcttactattcattcgcccgggggacaaatatttactaaagaagtggcttaccaagtgcccgtaa

SEQ ID NO: 34914 - DNA, 540 bp, Zea mays
  Peptide Sequence Number=SeqID_78289
atggcggccgacaacccgcccaccggcggcggaatcgatgacgtcttccccacgtggcggaagaacaacattcgggtttgtcccgtcgcctcccccgccaacggaggcggagggggggcaaccaaggccaagcaggaggtggcacctcatcggctgtcgagcgagtcgacggcgtgtaacacctcaggccatatctgccatggcaactcacggatgagagacagccctaggtgccaggaaaagactcacgccggatttttgccaagattcacacgtttgcgacttggggtgagctgtggaacacgggcagaagaaaagctccacgtgttcgacgcgctctgtatgcgccagagcaggcccgcgcgcgccccgcgtcgcgccaacggccagccgacgccatggcccacgcccgcgcctataaagcccactcaggcgtcgaccacactcttccgcgcacgctcaaacctcaccggagctcaactcaccgtcgtttgcccgtgcgcggcgtgtccgcggccacccgagcccctgccgccgtag

SEQ ID NO: 34915 - DNA, 219 bp, Zea mays
  Peptide Sequence Number=SeqID_78290
atggtctcccaattcggttatggtgggtacaagtgcggtcactgcacgacggcagtcggggtcagtgaggcattgtacgccaaggcgccttgcttgtggcataattttacaggttctctggaggacatggttgctggagtgacttggccgtccatcttgccaccgggttggactgtcgagtgggaccctacctcggctgaggaggagcatgaggagtga

SEQ ID NO: 34916 - DNA, 219 bp, Zea mays
  Peptide Sequence Number=SeqID_78291
atggcgagagtagcatgtgccctccgtggcaagaggctggacggtgagtcattgattattgataagccttaccttgactcccttaaagccagcacatccttgagagtccttttactttgttgggtgaagaagcaacaaacttttgttgcttctgttcaaaggtggtaccaaaggaagagaaccaagactaaagctgcgggaggaaaggccctctgttaa

SEQ ID NO: 34917 - DNA, 312 bp, Zea mays
  Peptide Sequence Number=SeqID_78292
atggcatcccaaggccccggcgccgatgtgggcgtgcaaccacggcggcgacccgagccatctttctctcactctctctctctctcatgcgacgaggctctctgttccctgaggtatccgtggcgacttccagttggcgtggatgaaggtgggggcatcgggacacgatctatagggatgaggagtcaccaggttggtgtgaggaggttggagaaagctttgacaaagcggacctcgcgggtcagcgacgtgggggagttggaaggggttggcaacgtggggaagcgcctgacatcctggccccatcagtag

SEQ ID NO: 34918 - DNA, 2631 bp, Zea mays
  Peptide Sequence Number=SeqID_78293
atggaggtcgttgagttggttccttgcgcccgcaataaatggggcaactggtatgagttttggttctacgttgcggagggcacggtcgaggaccatccggggctccccgtggccgagatgtgctcgcattattactcagcatacccgcagtttgaagtggcggaggaggatgcagacgaaggggccctttggtgcgcggccggcctgagcagcaggcgcgatttggttgaggtgtttgtggcgtatggggtgtggcctttggcgcatggctgggcgctgggcgaagtatgccctcgccagatgccttcccgtggtgggatgctggtgcgaagtcccgcctttgcactggatctacatagtcgtgatccggccgcctttgtgcatgaggcggaggatggggcggtgcggattgttggtcggtacgtgccgaagacagagggccagcgtagctgggatatacgcgggtccaatgaccgcttgaacagggtcttcgagttgaaccgtctgccgtatggcagttatctcgggcaagacgatgtggatcgtcgcgggaagaagccgacggcagagattggagacgaccccgcgccggcggccgccccatcctctaagaagaggaagctaggtattgctacgggaggactgggggtttccaatggttttgctagggaattgatgaggacatgcgtggcccccgggaggaggatgtcttcgcccgagctccgggagtcttcggcgcggatgctgaaggttaccgggggttggtggcctaagaatgttcctatcccccacgcggccggcgaagacttttttacatctcgcatggttcgtgactggagagtgtttccttatgggcgaaatattgctgctgttgtgtcggcagtgatggacaaggatcgtcagggagctgcgcagaagcgccaggcggtcgtcaggctgcctgaggctaggccgaagaggtcgcgggggactgcgaaggctgctgcccccggcggcagccaaccgacgctggcggcgaagtctgccgcccctgggtccagcagggtgccggaggccgtgaaggcggccagcactggcggaaccaagcctgccccggccgtagctgcgaaggcccgagaattgcctccaccgggcaagcgcgttgccgacttcgccactgatattagcgtggaagattatctcgttgggtcgggcgaagggcaacttgttgttgttccgcctgcggtggcgaccgcggcggctgccgtggtgcctagggcgaggggtagcgctgtcagcgctggtggtgagattccggcactcactgccgtcaaggatgaggcgggcggtgtgtcccgccggttgaaggaggcattaagtcaggcagctgacttcactgaccgcgtggcgtcgggggcccttacggcggttgtgtctaccgaagtcaagagacttcgggcgcaacatgctgacgccgtccgggaaaagtcggccaccgacagcaagtgccgcaagctggcggagaaggtggccgcgctggagggcgagaggactgacctccggcgccaactggcggaggagagaagggaggctaatgaggccttcgccaaggcgcagtctgcgcaggtggaggccaatttggcttgggtggagggtagccttgccagacaacgcgccgaggaatgggaggagcggttcaacgctctgcagacccgtgtggagagggccgaggcttcgacgcgcacgaaggctgagcggacgcgcaaacagcttatggactcgtaccacgagatgggcgcgcggaccgctgactttgaagtgccagaacaagagcccggacttcgttgcctcgagtggctgcagaaggagttgctggcgctccccgccattgtggagggctttatgtcctatgcctccctggtcacctgcgaaggggcgatgaacgcgctgtcccgcgaagggtgccgacactatgaggtcttcgaccaatctgatgaggatttcgagcgcgagatttacaaggttgaggaccctgtggtgaaggaatctgcgggagccctcttcgaccggatgtggggtccccacggtcgggaggtggtcagggagcggttcgacacggcgaggggtcaggcggcgcgtaacgagaaagtggaggacttcggggctttgaacagcgcgcagcctgattcggagtcgaacccggtggcagctgtgtccgaggtcggcccggcgccgcccccagaaactgtcgaaggcgcccctgatgcccccgcagccactgcgaccggcggtggctcgtcgccgactgctgcgccgagggctgaggatcctatgaagatggcagcggagtctgcagcggaggatcccgcgacggctgggtcttcgcaggttcaagattttgggcctgcgcacgcaaccgctactgctaattttttggcggcttcgaccgtggatgatgggaatgaatcggatgaatctgtgtctaagttttctgattttggtgactctgggagttcggttgagtggactgaagagtcgtcggatgaggacttggattactttgcggccttggatgtggcagcggtggaggcttcgccgcgtgctgtggatgctgaagttgtgcctggtccaagtgtggggcgtaggcggtga

SEQ ID NO: 34919 - DNA, 1338 bp, Zea mays
  Peptide Sequence Number=SeqID_78294
atggactggatcacacgcgggcctccattctggacgaggtcgcaagatgagatgacctcgtcacaggtcttcgtccggcggcgtatgagacgaaggcgagtacggcgaaggcctcgagcgaagggtggcgtcttcgtcttcgccccaacaggatctcagaccagtctagtaggatttccgcgagacagccgcctccgcgacgagattggcgacgccctccctgcgcccgcagcccccctcctcgttccctccgcccccaggccgtcgcacgcacgcccctgcttcactcacacggtcacgtccggctcctccctcttcgctcggctccccaccctgtcgtcgctcctccttgagtggaactggtgtcgcaccgccatcccttcaccccactgctgcatcgcacctgaccttgctggtgaagcacaaccgctcgcctccaccagcacgtcatcctctccatgtccaccgagggtctcaagcaccgatgccaagccactcccctactctagcaccacaccactgtctccctccatggccgcaacaaacgcaaacgtccgctcctccctccaccctccgcccaagattgccgtcatcagtccgttctgcgccggatccgtccgctccccccgcattcccctgggtaggtcggcttccatgcgcctcggatcttggtcctcgcccaccctgcgccccggatctcgatcctcgcccaccctctccatggaaggggatcccgtgtatcgcgagcagaccgtggtcgggagaggatgcggtatccgaagcgcgaggacgccttccatcgatgtcggcgacatgcacgggacgcagcccttgttccctgatttggaaacgccggcatctgcgcccggcatcagcgcccaccttcaaacccatgacggcatcagcacccagcgttgcatcaaggatttggaaacgctcgcccgcatgcgtcgcctcccagatttcctctctgttgtctccctggttgtcggcccctgctgtcgcggccgcgggcatgggaagggaggaagcttccctttggtgagggtcgtcaaggttagtgccatccacgccgtcggagataaattttctaggaagactctcccatccgaaccttgtggagctcttggatgggaggactgtgaactgcttctcgtgtacgagttcatggccaaagggagcttggaaaaccatctgttcagtgtgcatgcgaagaagagcgttgcggcattgcagttcgtggcctggccactcgtcaggtataaggaaggcaactaccaacttgttttcaagttgttctcaaagctgcttgatgatgagattgaaaatattgtgtag

SEQ ID NO: 34920 - DNA, 681 bp, Zea mays
  Peptide Sequence Number=SeqID_78295
atggactggatcacacgcgggcctccattctggatgaggtcgcaagatgagacgacctcgtcacagcgagtacgacgaaggcctcgagcgaagggtggcgtcttcgccttcgccccaacatttgcccccaacggaccagttcgactaagtcatctggtgccgaagacgtcgctagatggcggagacgctgccctcgctcgaagtggttccacggggaccgcccgctgccgccgactgtacgtagcgatgccgacctcttcttcttctgcttccgctacgccgccggccgacgcgtcgtctgaggagacgctgagcactgtggtggcggaggagttgcgcgccggcgacacggtggatttcggtgtgtcacggatgtcctcggtccgcgtgcaagatatgcagcagcttggttactttggcggcggagtcgctcgtgtcccggggacggaggaggtccccgagccagaaggcgagttggttgtcttcgaggcgttctttgccgctggtcttcacctacctacacaccgattcgtgggagaagtcctgtgcagattcaacgtccagatcgaccagctgactctgaatgccgtggtgaccctgtcgaagtatgtctgggcgacgacttcgtacggcggacagccatcggtcgaagtcttcgcgaagtactattgtctgcactag

SEQ ID NO: 34921 - DNA, 663 bp, Zea mays
  Peptide Sequence Number=SeqID_78296
atggaattactcagcaagtcttacccgactaaagaaaagactctcaagggtatgctggttatatgggagtcaagacggagacactacaccgagactctcttctcgtgcaagtcacccgcccggtctcagcttaatcatttaaccccaaagggtttcaaggagggtaatcaagatcaaggaagatttccaaagtctttcggaaaaagaaaaagaaaaagatcaaatagtgctgggccggttctggcccagacggcccaggtccagggcaaaacgcgcccgcgctggcaactttacaggaaaggcctcggggtttttactatctgcgaactggttctctcactgtttaacagagtcactgacactttgcaagaaagtccctcgagttctattcctttacgtttcacggtccccgatggcgtggagcacggccgagctctggcgagctgtttgtgccggccgattggggcaaggactagtgcccggctttggattaaactaaattcgagacccagagaggattttccccaacataattgcacgaatggcgacctattaagctctgtccgcgtgaaccgagaatgttgcggatgggtgaaggtgttcccggtgattggtggcgatataattcaattaagtgggtcagtgagcattgcggacatatga

SEQ ID NO: 34922 - DNA, 273 bp, Zea mays
  Peptide Sequence Number=SeqID_78297
atgaagccactgaagaaatgcgccaaatcgcatgggatgatcaaggacgagggcctcaacatagagagattcgtcaagaaactccaatcaacaatgatggatgtccttcgtgatggtagtcaggagtgtggctcagacttggtattcttctcttcgaccgggaacaatcacattgtggtagaagctgaaggatatgctagtcacaagctttcagggcttccaaacaaagtcagtgactgcataagctttattccagtgcacgcaagaccatga

SEQ ID NO: 34923 - DNA, 786 bp, Zea mays
  Peptide Sequence Number=SeqID_78298
atgcaggtggcgtgcaaccgcaccgcagtgacgcaccccttcggcttcgtcgcatccagcatggaggcccaggcccacacgtcatgcgcgacggttgatatggccaaaagtggaccggcagtaatggctgcagcagacgagcggaagcagtgggaccgggaaaggggatatttcgaaagggatccttctccgcgaaggaagcgggccccgagccctcctactgatcaggggtttgaaggctggcccctcggaagtgttcgacagccgccccagagcactcggactccgcgcccactactgatcaggggttcgaaggctggcccctcagaagggttcgacagccgccccaaagcatgcaaattgagggatgactctgggtacgttcgttacatggccgaggctcgggctacgctcccgagtcggcaaggtcgaagtgaccgcagtcacttcgccctttcactgaccgacctgacaggaaaacagcgtcgctcgccccgctccgactgctatgccacccaccagggtgaggctgacaacaaccaagttcagcttcgggcgcaacaggaaactccgcctcgcccgaccttaggcattggcctcgcaaggaggtctccgcctcgcccgaccccaaggctcggcctcaacctcagcctcagaaggtggtctccgcctcgcccgaccccagggcttggcctcaacctcggcctcaggagaagtctccgcctcgcccgaccttgggctcggaccgaccgtgccactggggatacatcattaccctacccctag

SEQ ID NO: 34924 - DNA, 1140 bp, Zea mays
  Peptide Sequence Number=SeqID_78299
atgactaccagtttggtggtggggagaagcaagccgggctgcggcctctgccccgcccttagcttcaaggatcttcatcatcctcgctgtggtggtggcccgcttcttccttcgatgctcgggggagaggggcatcctccagctgtgcggaggaggcatcctctagtcatgcgggggaaggcgcactgctactgcttggacagggtgcagctatccgtcctccaccccgggcggtggtcgtgccatgcacgggtggctgctgtcaccggcctcacggagggggcgaacttggacgacgcgggcctggtcggccgcgagcgtcatcagctgcagcgtgcctggcacgctggctcagctggctctggcgccgcctccgatgttgcctcctgccgcttggtccgggcgtggctgtccgtccaccgcatgggtgactatcgtgccgcgcgcaggtcgggcatgtctgtggccctccccgcgtcgccgactgcaccgggggatcgtccaagacgtcgcatgccgctagggcggcgttcgtgttctttgattgtcttgtcctcactccagcatgatgcctccgcgctgaggtcggtgccgccgcccgaagcggaggtcgttattgctgctggtgcagtggtcgccggcgagccacctggaatttgtcgccccgtaggccctctgaatcttcggctgctttgcgatgagctggagccggaggcagcggtgtcggcgtggacagaggcggagtcggctcgagaagaggcttcgtcggcccaggagcaggtggcttcccaggccaaggaggtgcagcagcggcggctggagcttggccaggtcatccgcaagcgggaccaaccccggggtcatgctgccgaggccgtgagccgggttgaggtcctcgggggacagctggctgaggctacggagcggccaaccgaggtgtctgctcgggccggggccctggccaagatcctggctgcgatggcccaagcgcagtgctggcgtcctccttcgaggtggagatccttccgcctgtgtcgccgtccgagaccgggccagattccgctaaaggtggaaacgacaccgagggtgttgctgctccctctgccgatgtccgaacctgcaggaacagtttgtctgtag

SEQ ID NO: 34925 - DNA, 204 bp, Zea mays
  Peptide Sequence Number=SeqID_78300
atggccgccgccggggtgaccggcgccgtcgtttgccagcatcagggttgggggaaacggtctggaccattagatgggggcgcaacagccgggatcagcgatgggcagtcggatgggagcgatagcgctcgaccgttggatggcgatcgcgcgattagagtatggtctattggattaacttctgatcttatggttataatttga

SEQ ID NO: 34926 - DNA, 471 bp, Zea mays
  Peptide Sequence Number=SeqID_78301
atggccatgatgggttcaacatctgaaaagatgtacctctgtcagatatggcgcgaaccaagactacccagcgcaaagcaacgggaccgcatggtgtaccccgacatcagctggcctctagacatgaaggaagcagaagtggaaatgtcattgcgaactcgtgctcatgatggggcgggaacttcccgcggctggaaggacactcccaacccgctacttgtacctcctacactggctgaggctatcgctgccttagtcaacgctatcaccgacaacacgcgtttcttgcgtgaaatggcaggaaatcaatttcagcaacacggaggaagaggtcaacctcaaggaccacgagactccacgggctccagcgacgacagcggtggctctaacggcgaggagagtgagagagagagaagggggcgagcttgggtagaaaggaaaagagagaagctcggcgttcggtttttatag

SEQ ID NO: 34927 - DNA, 324 bp, Zea mays
  Peptide Sequence Number=SeqID_78302
atgggcaccagagcagatcaggagcaagtagccacccacattttctggtgctctcagcagacgagcgcactatctcaggaaacgtgcaatacacagcaagaacagattcaaacatttcagaagcagcttgcagttgcgactgagaagttgaaggttccgcatgtgcagcaggccttcacctgggactacggcctcgcttgcgtgctcatggtgctcaggacgctagggattgattgctgcgatggcattgccgatctcgagaggctctgccgcaccacgaggttctctctaggactcgaacttcacaattttaagtacaattag

SEQ ID NO: 34928 - DNA, 132 bp, Zea mays
  Peptide Sequence Number=SeqID_78303
atggccgagacgttacacgtgactatctcggttgcttacggattgaaggatcgttttcgggaccaggggcttgggggcttcggtgatggcgccaccgtgtcaaccaagggcgccaccgcgtctgtgttctag

SEQ ID NO: 34929 - DNA, 384 bp, Zea mays
  Peptide Sequence Number=SeqID_78304
atgggcgattctgacttctgcgcgcgtagagggcgcattaaatgcgcggcagagagccgttggcgcggagatgaccgttgctccggaggtgcaccggacagtccggtgcacaccggacagtccgctggcgagttcctgaggccgacctcccttggcgcaccggacactgtccggtgtacaccggacagtccggtgaattatagccgagtcgccctggaaattcccgaaggtggcgagtttgagtctgagtcccctggtgcaccggacaggtactgtttactgtccggtggcacaccggacagtccggtgcgccagaccaggggtgccttcggttgcccctttgctcctttgttgaatccaaaacttggtctttttattggctga

SEQ ID NO: 34930 - DNA, 615 bp, Zea mays
  Peptide Sequence Number=SeqID_78305
atggcggatctaacggtctctgattcaacccacgtcatcttctccacacgactggccaggacggcggcgccgcgccgccacgcctgcccgacggagcaccaccgcacagacgcgcaagtccataaacccggcttctaccagagctacgccatagaggaaggagaaggtgaacctttgggaagggtcttttcggcgaccgtggagcggggtcagttgttcacggcgtgcagcagccttgcggggatggacaagctccgacgagcaattattgaagcctcggtgcatcacttcgacagagacgaccacgaccccattccaagggatgttatgaagctccagcagacctgtgtttgcctcaatcgccaacgtagaagagtgccctcggcgacgcgcgagtccgcggccatggcttggcccgacgagcaatttgctggtgcaaatgttgttccagcaccgatgactgccactaccatcatcgcgacacccaggcgaggattccgagcgacggggcaaagcggcgccggattttatactgaggcacagtccgcgttcaaggaggccatggccgagaatctagccgacgtcgttgcccgagatccctggcggctccactag

SEQ ID NO: 34931 - DNA, 834 bp, Zea mays
  Peptide Sequence Number=SeqID_78306
atggggggcgcccgccttgccttcgtcttgctgccgttggaggagcgcaacttcgcgggagttggcacctttcagccatcgctcggcttcaaggattttcatcaggcagcccggctgcatcccctcaccaatgcttcaagaatcttcatcatccttgctggggaggagggcgaggcgagccagggcctgccttcgcgtgggctggcgtcccgcttcttcctccggcttcagggggtggaaaccatcctccagctctacggaggaggcgtcctccagccatgccggggaaggcgaactgctgctgcccagccagggtgcagcattccgtcctctatccgggcgacggtggccagccgcatcagggggtctcacaacacgtcgtacgccgcgagggcggtactcgtgttctgggacagtcccattctcgtttttgtggcgaggacgggagtgaggacctgctggtgcggtgttggtgggcaggtggacgccgtcgtcggtgctgaggcagccgaagaaggcttctctgtcgacgagaccgtcaatgccacccacggactgacccccgactctttggctttaatatctggtcctcgtcctccacgaggggacgcgaacgagagccttccagcggtagcgtccgccctgggaccattgctgctgctgcagaggtcgccggtgagtcacccggagcttgttgtcccgcaggccctccgatgtggaggttgttcatacccgcgggagtggaaccggagttctgtttgtaatggcaccttgagtgccggtgtatgttcattgcggctgtcgaggcctgaacatttgtgtatttgggcgtga

SEQ ID NO: 34932 - DNA, 585 bp, Zea mays
  Peptide Sequence Number=SeqID_78307
atgcccggccttaacagcgaagcaccagccaccagctatgctggttggcctgtgggcataaagaagtgtgatgatgcatgccactttttgttttctgttttctaccccaatgacgtgttctggtctttttggaagaaaaataaagaagctaatgggtatagacacaagacattcttatattgggactcgatcaacttggtgtttgggaaagatcatgcaaccggtgaagcggcaaagaccccagctgatggtgcgagagatatgagtatggaagagggaaccggtaaagagcttacttcattaacaacctcaggaagcttgaagaggcaacgatccagtgattccttcacctcaatgatggcggagcaattagacaagttcactgaagctattagggatgaagcaccaaaagacccgacatcaaaagaaatttttagcacattggaggagatagatgggttagatgaagacacatttttagacttgtttgatatcttaacaggtgatgcgcgcaagtacgagtccttattggcacttccattgattctgaggaagagatggttgttcaagcaacttaaaaagtga

SEQ ID NO: 34933 - DNA, 432 bp, Zea mays
  Peptide Sequence Number=SeqID_78308
atggaaacagcgagggtgcagaaaaatattgaagaacttcgggattctagagaaaaatgctacaaagtctccatggattgtgtgagaaaactaaaagatagttttgtaaagcttcgaaaattcatcattatgctttttattaatatcggcctttcgccaccaccggagccatacaatcctaaggcggatccaattatgaaagaggctttagatgtgatgaaaattgctaacgaggttgttgacgaagtcatcgacaaacttttgcatgaagccaccgaaagaatactgaagggcccgtttggcaaagctccagctcctgcttctttagctccagatcctgatcctcgtgaggagctgatcctcctgattctcctagagaatcaaagtcattttgaaaaccgtttggcaagtaaactgattcttgtctgctga

SEQ ID NO: 34934 - DNA, 438 bp, Zea mays
  Peptide Sequence Number=SeqID_78309
atgacgcctaggaaacttaacaactaccctcgcaaagatactctttacgtgtggacagcaagcgccagtgaaatagttgcttcagcacttcatgacaattgcaaagctgttcttgttggcgaaaggacttttggcaagtctagggtgatgcagggcttaatccaatctgtatttgaacttcatgatggttctggtattgtcgtcacagttggcaaatacatgacaccaaaccacaaggatatcaatgggaatggaatagaaccggattacaatcgtcttcctggtactctaagaaaacgccagatttcttttgtggcaattgaattctgcaatatttcaatgaagccagaggttacatttcacgatgcggaacaaataaagcggatgctctgcctgactactacacgaccctccatgtcgcgcgcgctgatacgataa

SEQ ID NO: 34935 - DNA, 420 bp, Zea mays
  Peptide Sequence Number=SeqID_78310
atggcgcgtacacatatgatcccattcccatccacggaaatgattgttattgttttgtttgcttctggctattgggtagttgtgatagggagtggggagaagcaaccaaaagcccacaacacaaattacgaaaccaagtcaagttctatcaaggaacctagttctagcagcaagctagcagagcagcctctaccaaagaaggagcgacagatcatcaaagaagatggaggcgacaaggatgaagctttcctgtgcggtacatgtggagggatgtactcggaaaatggagtattctggatcggctgcgacatttgcgacaagtggtaccatggtgactgtgtccgcatcacacctgcggaggcaaagcacatcgatcagtacggttgtcccgcttgcagcaacaagaggaacatagagtga

SEQ ID NO: 34936 - DNA, 147 bp, Zea mays
  Peptide Sequence Number=SeqID_78311
atggctcaagaaattatacggagaagcgagaaagagcctgccgagccatcggcggacccccacgtaaagggggatgacgagattagaaaaatggccgaagctatcatggacaaagttgttgatcaactactaaacgaagctgcataa

SEQ ID NO: 34937 - DNA, 387 bp, Zea mays
  Peptide Sequence Number=SeqID_78312
atggttgtcgccaacgtcgacgactctcgggttgttctggacaccgcatccgacgacgatgccatcacgccgtccagctcatcgtcacctgaagcccaacctgccacccaggggtactacctcgctgatgagcccggggtgcacttcgtttggcagctcaaccaagagtcatcggtactcgtcatgtcgcgcgcgttcgacgactactatatcgaggattgtggcgttatcttggcgccggaggtgacacagaggaggatcgacaacagtgaccagttcgtcatcctcgccaccgtcagggaccatcccaaggatgatgagtactcgaatgtacctttgatgcactacatgccaatgtctaaggaaaatggacctcgacccatttaa

SEQ ID NO: 34938 - DNA, 747 bp, Zea mays
  Peptide Sequence Number=SeqID_78313
atgctcaccgcgcgcggccttcgtcggctagcagcggcggtctgcttcgcacgccgctccgcgtcggctgtggcggcgctccccggtgccggcgccgcgcggttccacgactacgacgccgccatcacggagtgtgtcgggaggcgggcgctccgcgaggggcggcaggtgcacgcgcgcatggtgaccgcggggtaccgcccggcgctgtacctggcgacgcggctggtgatcatgtacgctaggtgcggtgcgctggaggacgcacacaacgtgctcgatggaatgcccgagcggaacgtggtctcgtggacggcaatgatatccggatattctcagaatgaacggcctgccgaggcctgggatctgttcatcatgatgctcagagctggatgcgagcctaacgaattcactttggcatccgtccttacctcctgtactggctctcaaggcatacaccaacaccagattaagcaagtccatgcttttgccatcaagaaaaattttgagttacacatgtttgtagggagttcccttcttgacatgtatgccaggtcagagaatatccaagaagctcggagggtgtttgatatgcttcctgcaagagatgttgtttcctataccaccattttatctggctacacccgactgggccttgatgaggaagccctgaactttttcaggcagctgtacaatgaagggatgcaatgcaatttttttccttctcagtccttctcaatgcattaa

SEQ ID NO: 34939 - DNA, 588 bp, Zea mays
  Peptide Sequence Number=SeqID_78314
atggaaggacaaactccctcaatcctcttcaccgcgccttcgacgccgcggccgccgcgggaggcgccgccgcctccgtggaggaggggatcgaggcgctgcagtcctactccaaggagcatctgtttccacattctgattagcctgtatgaagtcagatcaaggtcaatagactataaatgtcaaaaacatgattttgatgagctaagactgaaggtggataaggttggacggataaatggacatggttattcttgtggctgcccaaagtgtcactctcattccttcttcgacaactgttgttcacacctcaagatcctccacaccatcgagttggataagtcgtaccctcaggatattttccaggcggggagggccagggtgcagctcaagaaagatgatggctcccccatcaatcctgcgattaaaacaagtgaacagactgcatacttgctttcacctaagctgaatttagaatgggactacatacatattatactctatatttttcgaagcatgatcaaatatgtcatggactggtgtctgcggcagaagtttaatttagctggcattattgcatatgcatag

SEQ ID NO: 34940 - DNA, 1044 bp, Zea mays
  Peptide Sequence Number=SeqID_78315
atgggagagtgggagacctctttaggctccaagggtgtgcaggagataaatttgtggtccgagttccaaaatcccacgagtgacgttgtctcacgtgcgacgttcaggagcagcttcagtgaagggagaaggatcgtccagttgcaaatcagagcaggcacaaacactgtaaatacaacaaacatgatgcatatcctagcctacagcactgatcacatgctttcgctcgcaacagaacttcctgcagcgcattcatgtgggcaagtggatgatgatggggatcaatggtatgaaatcaaagcagcattcaagcttgaaaagcagccatccaaagttactgcatatgttcaaggccctcctgcaggtgttgatcttagagtcatgatgttagaattcttccaattcatgatgcttgtaattgtcagtcttgctgtggataaaaaccaattggtcaattgtgggcaagtggatgctgatggggatcaatggtatgaaatcaaagcagcattcaagcttgaaaagcagccatccaatgttactgcatatgttcaaggccctcttgcaggtgttgatcttagagtcatggacttttatatatatgctgtcggagaaaatagacaagcttccatacgaagacatgacaccttttcaggcagcagttgccattgttcaaaaggtgtcatcaagatcgactatatctatatgggattgactctgctcgtgctgaaggagaaagagtacttttatcgatatatcaagaagagcgtaagcttcccccaatcctcaaaagccccttacaaggatgccctcataaggggtacccccttctgcggtatgaagacgccgcacccgtacgacaccgcccagtcgcacgggaagcagcacccgaccccaccgcatgggcagggttgggagtaccgcgtggccaggaaagataaaactccccaaggtgcatcgataggtccggacctccgcagaaggacgccggatccctgtactacgggtccggagctcccaagagggcatgccgggtccctcgggtaa

SEQ ID NO: 34941 - DNA, 384 bp, Zea mays
  Peptide Sequence Number=SeqID_78316
atgcatctgtggaatgagatggacagcttctcctccagctttagaaactgggtcaccgctcacaaatcgtacgtcgaggctctcaacgcgtggctccagaactcctccgcggctcgttcgagcactgcgacgagcaaaacaggcccagaagcggcgagtagcgggaatgcgggatgctggagaacagtagcgagcaggaggcggcagctgagtgggagttgtgcagcatcagctgaagggctacagtcgagactgacggcggttcttgaccgtctgacaaagttcttggaggcatcactgaagtgctacgaggagctcaagcagaactacgagatggcctgtgctgattataggagagttggaccaaatgctcggcttgcttag

SEQ ID NO: 34942 - DNA, 354 bp, Zea mays
  Peptide Sequence Number=SeqID_78317
atgtacaaccagctcaagaacatcgtcaactatctaaggagcctcagaagcaagaagaaggtcaccctagaagaagtgtttgggaggatcatcaacaaagacatcttgcaagaagaagccaagtacatcatgaacctctccatgggcatccccactgacaagccacaagaggttgctctaaaagcaaccaagaggcaaaaggccaaggtggtgaaggaggagtcatcgagtgacgatggcgaagatgaagaaaaatcaaaccttaatgagaaggagatggccctcttcatccaaaacttcaagaagaccatgaaggattggaagggcagaggaaaaaagacctacaagccatga

SEQ ID NO: 34943 - DNA, 300 bp, Zea mays
  Peptide Sequence Number=SeqID_78318
atgcaggaatcccttgcaggaccgccatcacagcaaaatcctcccgagggcctccccaggaatcccttgcaggaccgccatcacagcgaaatcctcccgagggcctccccaggaatcccttgcaggaccgccatcacagcaaaatcctcccgagggcctccctacactgaccactcccctactgcccttgcccctttcagtgataataaacagataaaaagtgtgatcatgaataatgtatcttcatacccaaaaccacataaagcactagcaagtactacccaaaaagttcagtggtaa

SEQ ID NO: 34944 - DNA, 261 bp, Zea mays
  Peptide Sequence Number=SeqID_78319
atgcgggtcccacctggaagtgccccaacaggaaaagaaaaggaagaggagcagagtgggctggcgcggtggaaaagtagtattgggccgaggcgcgcaagaattcggcccaaggttgatacagaggggttatgcaaccatatgatgggtaagatgttaattgtggacattactccacaactcatcgcactcaatcaaagatccacatcagacatgtatcacaagaacaaacattcaagcatacaaaatatatttttttaa

SEQ ID NO: 34945 - DNA, 981 bp, Zea mays
  Peptide Sequence Number=SeqID_78320
atgcccgccggcgggtctggtccccaccagcatacatatgctgggaatgttaccggtgatcctccaacggctaccgcagccccatcagtgtcggcgccaagcccaccatcagcggcggccgaggggattccagctgcatctgcccccaccgtgcaggatgacgctggtgttgaggtggcgccatcaggcccccaagatccgcctgttaccgtcgaggcaacaccttcgggttcccaagttccagctgggggtccagaagtggtggcgctgccaacagctattgcagacccaacaacggcgataccgtcggatgcaccgccggtggtaggcgtgggggcgcgtccggctctgtcccctgccaactccggagggtccggaggttattcttgggcgtccactccggagcgtgaggacttcaaggaggacattcggaaggtgtctgaccgagaggagaaggaggaggacctcgccttcaaggaggagatgtgggcaaggcggaacaagctgcttgatgagcttgagctcgaggcagaggagaaagtgaagcgtcaggaagggaaagtgcgaacgctggaggggcaggtctgccagttccaggtagcacaggcgacgcagtcggccccgggcccccaggcattggaggtgctgaggaagacacttgacgacctccgggcagagcaacgcgtcggagctcagcgcatcaccgcttgggctggcgaggcaagcacatcgctagtaccattggggatgagtcccatccaggcattggtgcggccagcgtccatctccgatgcgctccaatactggattccgctgctgaccgcctccgacgtctggatcaggttcttggcgcccgcttggaggccgagggcggcagactctgccgtggccgacactgaagatgctgcccgggagggcgtacaagatgctgtggacgcggtggttgggcgcttccagcgggatcctgttgacgatgagtag

SEQ ID NO: 34946 - DNA, 381 bp, Zea mays
  Peptide Sequence Number=SeqID_78321
atggcgcgggcccacacgtcagcgagaggagggggggttaacggcgtggagcgggcgacagaggggggaaagccgaccgaggctcggccgccggtgaaatcccgaggtggttctctgccatgggtccggttctgtggcgggggagaggtggcgaggcacgggcggggacgaggggtgaggggatggctcgggtacagtggcggggaggtcgctgaggctggtgagagcgttaatggcgaagcgacggggcgggaggcggtcggcggcgaacccgccggtgatggcatgggcgagatgatggtcctgacaggcgggcccgggctgccagtgggagagcggcgcgagagggagaggggtggagccgctgaccggtggggctag

SEQ ID NO: 34947 - DNA, 387 bp, Zea mays
  Peptide Sequence Number=SeqID_78322
atggccacgctggtttgtcccgatcgctaccagactgaggtggagctcgacacatttttcgtgctggtgaggtctgggaagggcaaggatcacctcggggactacttccagtcaaggggatttcgccgctctacgacaatcctgggctacggtcagcggtcctggcccgactgccgaccctcgatgagagtggtgtggcggtccgccaaaccggtggtcgggatccccaccgggggatccacattcccggtgcaccggtcggcggcccccaaccagctgatgtggctcccagagtttcttctacagtccccagtccctcggacaagggcaaggggcccgcaagcagctcctccactccggacgccgccgggaggtcggaggaagtaa

SEQ ID NO: 34948 - DNA, 1050 bp, Zea mays
  Peptide Sequence Number=SeqID_78323
atgtcttcgtgctcccttatgcatcgtgtctttccaccttccgagcccccggatgggggatgcccgcagtccttctgccttgtcgttgggggaacgcaactccgtgggagttggtacctttcagtcatcgtttggcttcaacgattttcatcatgcagcccggctgcacccctccgccggcggtcacccaagacggtgaccaccagcgcctgggtggggagaagcaagccgggctgcgatcttggtcccaccctcagcttcaaggatgttcatcatcctcgctggggtggaggccgggctgagccggagctctacctcccgcgcggtttcgtgggtcagcctctccttcatcgttcgagggagagggcgctcattggccctgcgagaggggcggacttcgacaacgcggggctggtcgactgcgggcgtcgtcagcctcgacgcgttggactcgccggcttggctcccggtgccccctcctgccgcgaaggcggttgtcgcgccgggcgcacgggaggaccgcccaagatgtcacgcgctgccagggcggcgttcgtgttctggggcggtcctgcctttgcaccggtacggcgcctccacgcggaggagtccctcggctcggtcagccttgttgtccgaggcttctcttgcttagttaaaggaacccctcggccgctctttgatgagccgaggccaggggtagcggtgtcagcacggacagaggcagagttggctcgaaaagaagacttggtcggccggagcctggccgggtcgtccgttagcgggaccgacgccggagttgatcttccgaggcctcgggccgggctgatgtcttcgggggacagctggccgaggcctcggggtgatcagccgagccgcctgctcgggccggattctcggagaagaccctggcggcgatggcccgggcgtggtgatgacgtcgtccttcagagtggagatcctcggaccgcgtcgccgtccgaggctaggtcggacctcgccgaaggtgtagttgacgccgagggttctgcggctcccttcaaccgttaa

SEQ ID NO: 34949 - DNA, 744 bp, Zea mays
  Peptide Sequence Number=SeqID_78324
atggcgccactctcccctacccccgcctccgcctctgctcccgtgtcctcctcccctcgttccctcgtcccggacgcctccgccgcgccgatgcgccccgcctcgccgccgcaggagctccccgccgccgggggcgagatccaggcggcgctggcccctgccaatgcctccaccgcgggcgcccgcggaggcggaggctccttcacggcgctgctgggactccccacctcgcaggccatggagctgctcctcccccgcacgacgccccccgccctagccacagcgcccgcgccaaccttcccctccgacccgcacctcgtggaccgcgccgcgcgcttatccacgttcgcgcccccgtccccgtccccatcctccacgtccccggcccggcccctccccgccgccgctaacgccggcaagcgcaaggccgaccccgtcgaccgtgcctccaaggggaaggcggcgaagaaggggaagacggcggaggagaagctcgcgggcggcgacggcgacgacgagaagccggcgtacgtgcacgtgcgggccaggcggggccaggccacggacagccacagcctcgccgagcgggcgagacgcgagaagatcaatgcgaggatggagctgctcaaggagctggtccccggctgcagtaaggtgtgcctccattatctcaccatctattaccccccctcatctttactcctatctgcatctcgcacgccccaccttcaatttgagtactga

SEQ ID NO: 34950 - DNA, 81 bp, Zea mays
  Peptide Sequence Number=SeqID_78325
atggacaccatcatgtcctatctctcctccaaagaacaaggctacgacgatcaagctgtcaccgtgtattgcagggaatga

SEQ ID NO: 34951 - DNA, 1832 bp, Zea mays
  Peptide Sequence Number=SeqID_78326
atgccgccgaccgacgcatcgtccgaggataccttgagcaatgtggcggcgatggaactacatccaggatatgcagcagctggggtattttggcagcggagttgggcgtgtctcggggtagaggaggttcccgagcctgagggcgagttgatcgtgtttgaggcgtttttcaccgctggcctttgtctgcctgcacatcgctttgtggcgaaggtcctgcagagatttgaggtccaggtccaccagctggcacctaacgctgtggtggccctggcgaagtatgtctgggcggcgacttcgtttggcggtcagccttctgtggagggcgaagtcgaagaccacccagggctccccgtggccgtgatgtgctcccattattatgtggcgtacccgcaatttgaggtggcggaggatgatgaaaatgaaggagcccttcggtgcgctgcccgcatgagtagcgggcgcgatttagttgaggaattcattgggtatggggtatggcccttggcacatggctgggcgttgggcgaagtatgccctcacgagatgccctccctgggtgggcagcgagtgcgaagtccagccttcgcgttggatctgcatggctgggatcccaccgcgttcgtgcgtgaagcggaagatggggctgcacgtattgtggggcgttatgtgcctaggacggaggccctgtggagttgggatatccgtggatccaacgttcgcctgaatagggtcttcgagctcaatcgcttgccatacgacggctatcctggggatgacgctgtcgaccgccgtgggaagaggccagtggctgtgactgagaaaggcccttcgcaggaggccgccccagccactaagaagagaaaactaggtactgcagcagggggactgggcccctgggggaaggatgtcttcgcccgagctccgggagtcttcggcgcgaatgctggaggttactgggggtcgatggcccaagaatgttccgatcccccacgcggctggcgaagacttctttacgtctccaaggcgtcggcgagtgtgaaggctgccgcctctggcgggagtaagccgcccccgtgcgggcccgtgaaagaacgaaggccgccttcgccggcgcgacgtgttgccgacttcggcaaggacatcagtgtcgatgattattttgttgggccgggtgaggggcaactggctgttgtcccgcctccggtgtcaaccacttcgccgacggcggtggcggccaacttcgccgaccacgttgcgtcaggtgccttgactgcggacgttgctgccgaggttgagagtctccaggcacagcatgcggatgctgtgcgggagaagtcggctgcggagagcaaaagccacaggctgtcggagaaggccgaggccaaagtggcgcgggcggagggcggtctcgcccgccaacgcgccgaggagctggaggcgaggttcaatgccctgcgcagccgcgtggacaaggccgaggcctcgacgcgcgtggaggtcgagcggacgcacgcgcagttcgtggatgcgtaccaggagctgggtgcacggactgctgacttcgaagaggagctgctggtgctcccgaccattgtgacgggtttcatgtcctttgcctccctcgtcacctgcgagggggccgtgaatgctttgtcccgcgaggggtgcaggcattacgaggtcttcgaccaagcggacgaaaattttgaacgtgaaatcttcaaggtcgaagaccctgtgctgaagcagtcggcgggggtgctcttcgataggatgtggggtctgcatggccgagaggcggtcagggagcagtccgaccgggcaataga

SEQ ID NO: 34952 - DNA, 456 bp, Zea mays
  Peptide Sequence Number=SeqID_78327
atgagaaaaactcaagaccacactctccttcaaagtctctcacaggcgttaatcactaaagatcactatctcaattatggcacttggacgatttctattgttttgaatgatatgaatgaatgcttgggttgctcgaatcacttgtatgcctttgaatatgttggttggggtggtatttctagccttcaaccaccttctagccattattgtcgctctggccacttgtggacggtgtcagataaagtgtatgacggatggtatgcttgtatacccgaacgatccgcgattcacgctaaaaatcaatttaccaaacttggcacatttgggttgatcggacttgaactggtggacgatctacctctggtctcagacgttccacgaataatggcccacgaaagaacgaccttacgatttattgggcctttgggcctttcgggaggtcttttacttctttag

SEQ ID NO: 34953 - DNA, 297 bp, Zea mays
  Peptide Sequence Number=SeqID_78328
atgggagaatcgggtgtctgcgcaggatgggttggggaaggggtctgccgccgccgtcaagggcacgattggccacctcctggacctcagcatgggcccgggctcgcgctggccaccgcagctggagctgatgaagaaggtggaggtgggagagttcacggtggccgtggatcggcagatgagcgcactggattaagtcaagccaggatagatccataccccttcgcagggcatttttctaaagagaccccgaggaaagcagtaatcaacccgccatccatagctgatgtgggctga

SEQ ID NO: 34954 - DNA, 111 bp, Zea mays
  Peptide Sequence Number=SeqID_78329
atggctgatactagggacatcgacagacaagagcctgtgaccgaggatcctggtgagcagcaggttgaggtagctgagcaggagctcattgaaggcaagttgtgcccttga

SEQ ID NO: 34955 - DNA, 2181 bp, Zea mays
  Peptide Sequence Number=SeqID_78330
atgaacaggctcctgccggccattgtgctggcgagctcggtgttgacgccccccgcgacccagccgctggtggcctgcggcgcccggaacgcgttcgccgcgtggttcgtccagtacaggctggcgccgcgcacggggagacaagcaaaagatgtggtaaagtccctcaagaaacgcattgcacacaagaacccaaaagtccaacttcttgctctcacgttgctggagacgatgataaaaaattgtggggacgttgtgcatatggttgttgctgagagagacatacttcatgagatggtcaagatagtaaagaaaaggcatgattatcatgttaaagagaagattctcacgctgatagatacttggcaagaagtttttggtggtgcacgtgcaagatatccacaatattatgcagcatatgaggagctcttgcgtgctggagtggtatttcctcaaagattgaatggttctgtgccaatcatcactcctccacagactcagcctctccaaaactatccctcatctttacacatttcacagcaggaggaacttgaattaccagtttcagatttccctgcattaagcttagggatgactggagaaaattttgagctggccaactgggcttggggacacctgggcactgggctttttgttcttggttcacaatgtttagtcaagaagctgagaatattatggaatgtttgtgaacttgctgttgtcattggtttagcctatccagcatacaagtttgaaattcagaacgcacgtggcatcatggatgttctttcagagatgctggatgctttagatccaggtaacagagagtgcaagatttcaaatcaatctacttaccgtgccagatttcaggggcttagacaggatgtcattgcagaccttgtggatcaatgccgttcttacaagcaaagagtagtgcagcttgtcaacagtacctcgaacgaggagttgctcaaccagggtctttctttgaatgatgatatgcagcgtgttctggcaaaacatgatgctattgatgcaggtctagcagttcgagtggagaagccgaaatctctgcagtcccaaattggaagttcttcaacaagaaagccagataccatggaagaaacaattcagaggccttcagcaagtacaactgccaccagtcagtctccctttgggattttagcacttcctgcacctccatccagtagttcaaaagcacctgcaatacctgcttctagtatcgacctacttagtggagatgattatgtcaaacccgaacctgcaaactccctagcacttgttcctgtcactgaatattcagctgcagacaagaatgtcttagcttttgctgatatgtttgaacaaaatacagccaacaatagcaaccataaccttccatattcttttctatcttcgacttcaaattctactatctctacatcacaaacatatcatgcaccggtgcgacctgtattgcctcagcattcagctgcttatccaaatggggccagatccaatgccattgtaccttatgatcagcaggcccaatcgaactctacaggcacaggtgatcaaaatggagacattccaccagcaccatggggaactaagagatccactaacccatttgacgacgatcagcttggtggaatggcagtgcaaccaaaaggcatgcaaccccaaccagtgcaacccagtcagcatgggaacaaattcatgtcagcaccaccaatgccgaggggacagccaggaagaatgcagttgcaacaggtgcctggtgctcagcttggcgctctacaaccaacacaggctacactgaacatgcagtacaggggcatgcatccatcgatgcaaatgaatcatggaatgggcatgtattcccaaccaacgttcggaggatattatggaatgaaccaaacacagctttacggcgttcatatgtctggttatggatatggtcagcaatctgggggctactatattccgaatgctgcatatgcctatactagtgcaaacgaacttgcccagaggatgaatgacctttcagttcaaaacggtgatccaaatggagccgcagcaaataagcagagcagacctgaggatgcactctttggtgatctcttgagcatcgccaagatgaagcaaaacaaacctgcagctggcaaggttggcggctaa

SEQ ID NO: 34956 - DNA, 297 bp, Zea mays
  Peptide Sequence Number=SeqID_78331
atgggagaatcgggtgtctgcgcaggatgggttggggaaggggtctgccgccgccgtcaagggcacgattggccacctcctggacctcagcatgggcccgggctcgcgctggccaccgcagctggagctgatgaagaaggtggaggtgggagagttcacggtggccgtggatcggcagatgagcgcactggattaagacaagccaggatagatccataccctttcgtggggcatttttctaaagagactccgaggaaagcagtaatcaacccgccatccatagctgatgtgggctga

SEQ ID NO: 34957 - DNA, 327 bp, Zea mays
  Peptide Sequence Number=SeqID_78332
atggaccagaaatcccttgatgacacaagatatgaccatagcatcattgtgagggtaatctttgagctgaaggtcatcctgggagaagccggctctgaacctgagccgcctgttatcggaagcaccagcttcgtagccgaaggaccttcggcgatgaagcagacccccaacaggagagttttgtctcctttgttggtatccaggtttgtgaggacagcaccggttgttgttgttttctttggcggtacgatgaggcttcttgtggtcgtagtgagttcaccggaggtgggcgccaatgttggtcacttccttttgattactatatga

SEQ ID NO: 34958 - DNA, 117 bp, Zea mays
  Peptide Sequence Number=SeqID_78333
atggcatccattcttatacctatgtatggaacagacacattcctaaggatggaaatacttaaattgaaacttgggttaggaacaggtgatgttctacccaagttggttaaggattaa

SEQ ID NO: 34959 - DNA, 639 bp, Zea mays
  Peptide Sequence Number=SeqID_78334
atggtggtcggcggcgcacggcaacaaggagacacgacgagcgctgggaaggcaatgcttggcgagcaccagcaacagcacaaggcacagcgaggggctaaacatgggcattcggagatggagttgtcggcgtttcgagacaggggggtccctaagccgacgagtgagtgtgctgcgtgccccagcccagatgggtcgagcgcgtgggcgagcgcgaaggggggagaggcgaggtggccggagccgagcgtgagagaggtggaagtcccgcggccttcgtgttcgtcccgcgcccaggtcaggtgcgcttgcagtaggggggttacaagcgtccacgcgggtgagggaagtgagcggccccaagagagcgcctgtcccgtcctcggtcccgcgcggccaacctcctctgagaaggccctggtccttccttttatagtcgtaaggagaggatccagggtgtacatgggggatgtagcagagtgctacgtgtctagcggagggagagctagcgcccctaggtacttgccaatgtggttcccggagagatctgggcaccctgctggcgtgatgtcgtggctgtctgaggtgcggcggagcctgatggagggacagctgttggagcggtcgagtcactggtga

SEQ ID NO: 34960 - DNA, 306 bp, Zea mays
  Peptide Sequence Number=SeqID_78335
aggaagtcagcaacagaggccacaatattcctcgcaagcttcggggcagcaacaaagctatcttcggccgccaactccaagaggcagaggcgccaggggcttcggaggaaggtaaccatcctgcagcttctgttgcttcggctagccagccacaggcatcttggccacaacctccacctccgccaccactacaacctgcatatccacgagcgaacatggacatccatccacaggaagatgaccgggggtatcactagactagcatccatggagttcagcatcatatcttcatctgcaaacttctga

SEQ ID NO: 34961 - DNA, 558 bp, Zea mays
  Peptide Sequence Number=SeqID_78336
atggtgaaaaaattaaatctcattcagaaatatgatcggacaaagagcacttcattacaggcgtcgaaatattatctgatgcagtcatccgtatttttttcagccggggtataccaagacaaccaccaaagtcacccgttggagggaggtgtaagctggagggcgcaccggacattccggtgcacaccggacattccggattccctctcacgtcatcattgccgttggattctgaccgttggagcttctgacttgtgggcccgcctgggtgtccggtgcacaccggacaggtactgtttgatgtccggtgtgccagcatgggcgattctgacttctgcgcgcgcagagggcgcattaaatgcgcggcagagagccgttggcgcggagatgaccattgctccggaggcgcaccggacagtccggtgcacaccggacagtccggtgaattttagcgggttagccgttggcgtttcccgaacctggcgagttcctgaggccgacctcccttggcgcaccggacactgtccggtgtacaccggacagtccggtgaattatag

SEQ ID NO: 34962 - DNA, 864 bp, Zea mays
  Peptide Sequence Number=SeqID_78337
atgcagacgctccacgcctactatcgctccactacctcccaccaggctccagcgccttcctcctccgtgcatgcttcctatgtcctctccgactgctcagaaatgttcttcaagtccagtgacccaaacctccccgtcgtccacctgccacctccatgcccaccggccagcctctacaattttggcaggcggcacctcaaatcttcctacccaccactcactgccagaacaccttcccggatctccttctacagctgccagaacagggcaaatctattgaatacggacgtcggagcgaatggccgagacgatagcgcggcgagcccagagccaggacgagacgtggctgcctgcgacccgggagtccgaacgctgggggcagtagcggctccagataattccgaagccccgggccaaacaaaaggaaggacgttgtctgccactgctcctccctgtccctggcagaatcgccactgttcctccttgttcctggcagagccgcagagttgcagtggccgctgcccgctggggtgggccggtggccggtggggggcgccaccaaagcccgaaggccggatgcccagacgccggcggagccgcggagcgacgaagggagagcaggactgggcgagggcgcgagagcgcgagacggcgcgcagtgagcggcgagcaacgccggaggccgctggcagcttggggctgggccttggcggggcgcggaccagagccgcgggcgaagctgcgaggcggcggcccgacgagatgacgacggcgagctcgagcgccctggcggcgcgagcgtggacagaaggatggagccgtgcgtgtggcgtggagagggaagatgccaggctgggagtgtga

SEQ ID NO: 34963 - DNA, 1674 bp, Zea mays
  Peptide Sequence Number=SeqID_78338
atggctggtcctgttcctgtaaatatgcataagggctgtagggacgaccaggcagcatcagaggaagtggattcaatccacttcagcttctatagtgatgatgaaattaagaggatcagcattaaaaagatcaccaagtcggagcgccttgatgccaaaaaccttcctgtgccaggtggattactggaccctgcaatgggacctatcaatgatattgatatctgcaagagttgtggtcagcattctgttcgttgccctggtcacttcggtcatattgagttggcaaaaccattgttcaatcctttgctgtttatgagtctgaaaaaccttctccatgtcacgtgtttccattgtcacaagttccgcctgaacaaggaacaggttgacagatatgtgaatgaacttgaacttttagtaaagggtgatattgtctgtgctaaaaatttggaagactcagtagaagaagcatatctttccaaggaagatgaaaacatgaacaagaccacttcaggtgataactcatcttctgtgaaagacaagaaaacctggacatctatccaattgaaagaggttttgtctattttttccaagataatgaaaaagagacagaagaagtgtgcaaaatgtgacatgaagagcccaacaatctcaagtcctatatttggttggctggtcaaggacacaaaggcttctgctgtaagaacaaatgcaattgctgattttaaactcaagggagatggtgatattcacaactcaggggaaacaggggtttctggtcttgaggaagagtcatcttcacctggaatggtgtctaaagactcaatcaatgaagttagaggtctttctgatgatacaattaaagaattggtagcatcatcaggaaaaaaacatctattgcctacagaggttgaatctattctcaaggacttgtggaaaaatgaagctaggttctgcatgttactttgtgatttccagaagaatatgtcaagtgaaccagaaaagagaaggggctatgaaatgttcttcttgagtagtctccttgtggcaccaaatagattccgcccatcaactagctctagtcttggaattatggaacatcctcaaagtgttctgctaagtaaagtgcaagaatccaatcttgcgctacaacataacaatgcatcttctaaccatatggatgttcttcaaagatggatggatctacaacggagtgtaaatgtgctatatgatagtagcaaaggccttgcaagaagcgagaagaatgctcatggtatacgccagctattggaaaagaaagaaggaattcttcgacaaaagatgatggggaagagggttaattatgcatgccgatctgttatatctccagatccgtacttggctgttaatgaaattggcattcctcctgtttttgcgacacgattgacatatcctgaggtagtgctttatgcattgttcaacatcctgtatgattcaatttggcacaactttgtttacgtttgtgttctgacttgctttgccctctgcgatagggatgacaatgggatgggtaaggcgggggggtggggtagtaaaaatctgccctacacccaccctcaatgtgactcgcgggtgcaatgtcgcacccatgggtgtgttaacaagaagctaatctatatctatacttctatactataa

SEQ ID NO: 34964 - DNA, 270 bp, Zea mays
  Peptide Sequence Number=SeqID_78339
atggtggccggcgctgctcccgttcacgacggcggagtcgccagagacgaggcaggcacgggcttcgagggtctgaggtcgccggagctgaccaggaccgagacaaccgatcaagccaaggatagaagcaagaagagcttcgaggtaccaagtgcatgggagaaagtcaaggagaccaggaacccaaggccaggggtgaagaagaagacttgcggaatcaaggttgatcgagttaagaaaagttatggtgcatcaaggaacactacataa

SEQ ID NO: 34965 - DNA, 612 bp, Zea mays
  Peptide Sequence Number=SeqID_78340
atgggagttgctgccgcgcgagagagtaggagcagggggcgtcgtgccattgctggccgaggggaggaaggggagcacgccataggagaagaacagcagtgggagggatgggcgctgttcctgctaccaagcctgaagggggggcgcccatgggagcttgtcccgctgcgcaagagaagcctgggaggaggtagctcgcagggaggagcggcgaccggaaggggagctcggctggcgtccagcttggaggaaggagctcgccgcaggggccgtcgggacctgggcgtccctgctggaatggagcttggccagggaactgctccctgcgcctgcaccagggaaggagggaacaggaacagtcctgtctccgttgtcagccctcacaatagatatgtctcggaaataccttcctctcatgttatcaagatgactctgtctgatagtcaatttcccgaagactgcgtgacttggtcgccagggccgagcttcggagtcttcgcccccactttccgcatcataactgtcgctgtcaccgagccgaagctgtgcgcaggggagcttcagcatgatagcagaaaggggaaccgacttaaaagggaaaaggctatttag

SEQ ID NO: 34966 - DNA, 267 bp, Zea mays
  Peptide Sequence Number=SeqID_78341
atgtccagcacccctgcagtagccccagcccgctcgaccctccactccacagcgccgtcgttgcccctgcctaagcgccgtccaaattcctgcagcaagcctcacccagcaacgcccagtggcggcatggtgctttgcctcgcgcttgcgtgctcgacgaatcgccgcagcgagccacgccctccgacgtcgtttcggtctcccgtgcgcgacggcgcgttcgtcttcacgccacatgtgcagcaaccacgactgaggtttgatatg

SEQ ID NO: 34967 - DNA, 510 bp, Zea mays
  Peptide Sequence Number=SeqID_78342
atgacgacgcgcacccaggtccgcgtgatgatgcggttgtgccgcggtgaaggcggaaactgcagtcgggtcacagctccggcgagcaattcacaggctccgaaaagtttatgcacccacccctacacacatgcaagctccaccagctctcgcggtggcctccgaccagttgccagggccggaatcaacccacacccgagaaggtcaacggcggcggcaagcttcaattcgcctcgcactaaaccccttgtcggtgaggttcaagcatgtggttcagggttaaatgcgggggtccgcaaccagtccttaaatagtcacagggggcgaagttcacgtggttgttgtgctgacctccgcggaattcgtggtggttgtttccgtcgccgccgcgcgaggtggaggacaacactggcatccctggcccacctgctagaggcgcgaagcgcccaggtgaccgcctgcccatgggaccctcccgaccgcgaccaaggcagcgtggatgaggagtag

SEQ ID NO: 34968 - DNA, 438 bp, Zea mays
  Peptide Sequence Number=SeqID_78343
atggcgccttacacttcacatgaactcccacctttgggcattctagcatgtaccaccataaggaagggaggaggaattgatctacccgccaatccacacaactggaggatacttagacaacaacaacaagcagagatgaatcctccaaatcttccaccagccggaaccgttccagtggttgtagcccagatgcagatgatgcaacaaatggcttataccatggtgtgtgagccaagactgatgaagcttggctccagagatgcgaccaatctgcttgtatctggtgagcctggcctagggtgctttgaggatcgtgcgagcctggatctaaatctgcatgcaggcaaccaaacacagagcccgcacgcacatagcctggctcacagcaaccaaacaactactacccgcattccgcgatgcaagcacgcgcagatgtag

SEQ ID NO: 34969 - DNA, 192 bp, Zea mays
  Peptide Sequence Number=SeqID_78344
atggcggggtgtgagcgtggctgcccgatgggcccaatgcgtcagccagtgcccatgcgcgatggaggctgggcagtgggcccagactgccggcgccagtggcgtagttgggcagcgcgggatgccgccagtgctaggggccagtggaaatcgccatttccactggcagttttcttaagcaaacgccagtga

SEQ ID NO: 34970 - DNA, 741 bp, Zea mays
  Peptide Sequence Number=SeqID_78345
atggagcatcgtcccgagtcagaaaggttgctggagactacccatctggagcttgacgggaagcttttcgtcaacacgcagcaggcccctacctggcgcgccaactgtcggcgtttcgaccccggggggtccctggaccgacgagtcgggcaaggcggagttcgtcgtcttccggagccgaggctgagtccgagccctggggtcgagcgaggcggagttcatcgtcttccggagccaaaggctgagtccgagccctgggctcgggcgaggcggagttcgtcgtcttccggagccgaggctgagtccgagccctggggtcaggcgaggcggagttcgtcgtcttccggagccaaggctgagtctgagccctgggctcgggcgaggcggagttcgtcgtcttctggagccgaggctgagtccgagccctggggtcgggcgaggcggagttcgtcgtcttctggagtcgaggctgagtccgagccctggggtcaggcgaggcggagttcgtcgtcttccggagccaaggctgagtccgatccctgggctcagacgaggcggagttcatcgtcttcgggagccgaggctgagtccgagccctggggtcgggcgaggcggagttcgtcgtcttccggagccaaggctgagtccgagccctgggctctggcgaggcggagttcgtcgtcttccggagccgagacgggggccgagccctggggtcgggcgagggggagcttcctatga

SEQ ID NO: 34971 - DNA, 177 bp, Zea mays
  Peptide Sequence Number=SeqID_78346
atggtgatcaccgggaacacgcagggcatattgggttatgggatgtggatcatctcatggaggatgaggatggtgttgatggtcttgaaaggttgtggagaatgcaaggggtcacggtcgcaaccccgatggcatccttggccttctgtgcagggaacacttccatgtactggttga

SEQ ID NO: 34972 - DNA, 222 bp, Zea mays
  Peptide Sequence Number=SeqID_78347
atggggaagcctgtcccatcactcctcatgctcctcctcagccgagctgaaaatgatttaaatggcaaactctacctcaatggggtgtacagaggggtttctaatttttttacaggttctctggaggacatggttgctggagtgacttggccgtccatcttgccaccaggttggacagtcaagtgggaccctacctcggctgaggaggagcatgaggagtga

SEQ ID NO: 34973 - DNA, 465 bp, Zea mays
  Peptide Sequence Number=SeqID_78348
atggacgtgcccagggtcacagtggatggcgaccgggtggtacataggagactcgatgcgggccgtcagggtgtcgggagccgtgggcatggcctgctctcgacggtgatagatgatgacagggtcaatgaagcaagccactctcgtcaaaggggctgcgcttggtgctggatggctaagacgataatgccaaatggtggaggaggtggtgcaaaccaggatgggaggcggagacgcatcggtggaggagggtcaaagcgtgtggagtggccccaagctatcacatcgggcgagtggggtcctggtggccagatccttcacaagaaaactagaggggtcaaactcaatggaacaagagttgttgatggtgaaccaacaaacggaaagaagattatgaatgatatgaggggctacgagaacatcgttgagatagaatggcctagggagaaccgaggcacctactga

SEQ ID NO: 34974 - DNA, 171 bp, Zea mays
  Peptide Sequence Number=SeqID_78349
atggacgaccaagtcactccagcaaccatgtcctccagagaacctgtaaaaaattatgccacaagttctctggaggacatggttgctggagtgacttggccgtccatcttgccaccaggttggacagtcgagtgggaccctacctcagctgaggaggagcatgaggagtga

SEQ ID NO: 34975 - DNA, 477 bp, Zea mays
  Peptide Sequence Number=SeqID_78350
atggagatggccggctctggacaatcgccggcgatgttaggatatggaggtcatcttggtccaaacactaagggagtagttgatggtaacttaatggttacaccacctccggctctactagggcctgtaatcgacgcttcaagcatgggggatgaaagtcaacaacggattcgaccgccaatgtccaacattagctccagggagatggatacgcctcaaatactgcattcacatgttgtagctgcaaaaatcgaactggtgaatttggagcataaccatgagttcataactgacgaagcagagaaacaacatttacgttgcaacaaaattagggatgctgagttcattaattttgttgatgcaatacatgatagccgagtgccgcagcattgcatagttgattttatatcagacttgcatgatgggccagagaacgtaccggagggcaacaaggagacgagaaaactgcgcaaatga

SEQ ID NO: 34976 - DNA, 386 bp, Zea mays
  Peptide Sequence Number=SeqID_78351
ggaggggagagtaagggccggccatggcttaaggctgctattgatggcgtccatcaatggggagaggggctcggcgcgggtcagaagtgccggtcgttcctggcgcgggggctcggggtcgctggcgtcggtctgcagctgcgtcgcgcgctgggcgcggctcggcgcgggcacgaggttggggcaggggcgatcgtcttcggtccatggcgcgtgtggtcggggacgcggggaagcaggagcgtcgtggctcggcccttgcggttgctcctggcgtggggtggcgcgcggtcggcggctggagcagggttgggtcgcgtgctgggcgcggtcgcgggctgctcggcgacctggtgcgatgcgcagcagaggagggagagggaagg

SEQ ID NO: 34977 - DNA, 914 bp, Zea mays
  Peptide Sequence Number=SeqID_78352
atggctactgcccaggggatcgatccctttttaaaggcggctctccccactcgcattccaagcatcacgggcaaagtctccaccgacgagctccagagttcccaccctccgacgcgggggctgggtcccacatgtcatgcgagcggaccggaaacagaagaagccaaaccgctgcacgcgaagcagggaccggaaaagggggtatttcgagaaaggatccttcccagcgaaggaaatgggccccgagccctcctactgatcaggggttcgaaggttgcgccctccggggttcggcgatcgccccagagcactcgggctccgtgccctttactgatcaggggttcgaaggctggcccctcagaagggttcgatagccgccccagagcacgcagagtgagggatgactctgggtacgtccgttacatggccgaggctcgggctatgctcccgagcgccgctcgccccgctccgactgctgtgccaaccacccgagtaaggctgacaacagccgagttcagcctcgggcgcaacaggaagctccgccttgcccgaccttatgcctcagcctcgggaggaagtctccgccttgctcgaccttgggactcagcctcagcctcggcctcgggaggaatcgcgtcctcgcccgaccccagcctcggcctcaggagaaggttcaggcacttctccgacggccacgttatcacgtacacagggctcaagcacttctccaacaaccacgttggcatggccttcctgcgggagggtggcacgggggacgagcaaacaaacaggctcactctctctcgtgacgcttgtaacccctactacgagcacccccgggtcccccgggtccgaaacgccgacagacacgtcgctgaccgctgtgtcgtccacctcgccgagtcgaacccaag

SEQ ID NO: 34978 - DNA, 1197 bp, Zea mays
  Peptide Sequence Number=SeqID_78353
atgatgaccaccagcttcgcggtgggggagagcaagccgggctgcggcctccctcctgccctcagcttcaaggatcggcccgctccttccctcagtgatcgggggagaagggcgttcgccgcctgtggcgctggcagctctgcggaggaggcgtcctccagccatgcgggggaaggcaaactgctgctgcctagacagggtgcagctgtccgtcctccacccgggcaacggtcgtgccgcgcgcgggccgaccacgtccaggtcctccttgcgctgttggctgtactgggaggtcgcacaacacgtcatactcgtgttctgggacggtcccgttctcgttcttgtggcgagaacgggagtgaggacctgccggtgcgctttggggcggccgccgctcgctggtgcggtgttggtgggcaggtggccgctgtcgtcggtgctaaggtggtggtcgccataggtgaggctgcctctgccgaagcggttgcctccgccgacgaggccatcagtgccacctgcgctccaggcctccggctctttggctttaatggctggttctcgtcccccgggtcaccggcgagccacctggagtttgttgtcccgcaggccctctggtgtggaggttgttcatacccgcaggagtggaaccggagtcctgtttgtgatggtaccctgagtatgggtaaccttcggccgctctgtgatgagctgaagccggaggcagcggtgtcggcgtggacggaggcagcgtcagctcgaatagaggcttcgtcggcccgggagcgggtggcttcccaggccgaggaggtgcagcagcggcggctggagcttggccgggtcatccgtgagtgggaccaaccccagagtcacgctgccgaggccatgagccgggctgaggtcctcgggggacagctgactgaggctacggagcggccagccgaggcgtccgctcgggccggggcccttgcggagagcctggctgtgagggcccaagcgcggtgctggcgttctccttcgaggtggatatccttccgcccgtgtcactgtctgaggccgggccagattccgccaagggtggaaatgacgccgagggtgctgctcctccccctgccgatgtctgaacctgcaggaacagtttgtctgaagcacaaccacttatccgagcgagagttacttttcgcggaaggtgatgagtga

SEQ ID NO: 34979 - DNA, 630 bp, Zea mays
  Peptide Sequence Number=SeqID_78354
atgagtgacagtggaagccattgggtacaagcagatggcaaagaagtgagctttacggaggagattctagttgccaagtggtcatcatcggagagctctgacagagggctgattgtggcgtggaacaatccaagcagtgctttacatgctggagttctgccttcttttctgtatggaagaggagcacagaattggtggctggctcacgaggttctgtcgtctgagatgaggcttttctttgatgcaagcagtctggttcttggactgtatcctgagagcattagctccatgcagcatgtcatggcctcgagtaagaatggcaggttaacttctgtatcctgggagtacgacgtcaatcaccatcttgctacggtttatggctcgtattgctgtcaatcaccagcgagacgctttcctatgttgcatagagtggtaaagcaatctgaagattatatgctcagcaaagttgacacactcgtatcatcagatttcttcattagtaaacattgtggagaaaatgagaagcacagaacctataaggccacccatttcattgtctatacaattctgaagtattctattgaaaagcttgtgtactcagcgtctagaaaggaagaaatgagggtctag

SEQ ID NO: 34980 - DNA, 744 bp, Zea mays
  Peptide Sequence Number=SeqID_78355
atggggagcgctcgcgtcgctttcgtcttgctgtcgttggaggaacgcaacttcgcggaagttggcagcccggctgcatcccctcgccggtggtcacccaagacggtgaccaccaatttgatggtggggagaagcaaaccgggctgcggcctctgccccgccctcagcttcaagtatgttcatcatcctggctggggcggaggccgggctgagtcggagctctacctctcgcacgggttcgtgggtcaccttctccctcagcattcaggggagagggcgctcaccgacctagcggaaggggcggactccgacaacgcggggctggtcggccacgagcgtcgtcagcttcagcgtgttgggctcgctggctcagctggccctggctcggctcccggtgccccctcccgccgtacgagcggtcgtcgcgccgcgcgcaccggaggactgcccaagacgtcgcgcgccgctagggcggcgttcgtgttcttgggctgtcctgcctttgctccgatggctgccgtcgtcggtgccgaggtggtggcggctggagaagtcctcgtcgccgacgagattgccgccaccatccgcgctccgggcctctggctctttggctttgatagcttgtcctcgcccctcgagtggggatgcgggcgaggaccttatcgcagcagcgtctgccatgaggccctccaatgtggggggttgttcgtacctgcgggggtggaaccggagttccgtttgtaa

SEQ ID NO: 34981 - DNA, 657 bp, Zea mays
  Peptide Sequence Number=SeqID_78356
atgggctgcccaagaggtcctagcgtcctggtgctcctgcacggcttcggcctccaggcaaagcgacagtggtggtgccaggtctgctcaagaccgacgctgacgaccaagcctggctcctccgcgccggcgcgagcgcgtcgaggacacatcatgcttctgcgcttccctcggtctcgtgcctcccctgccgtaacagctgcctccgcgtccctcgtcgcgccccaacccccaaatccctacaccatcgtctgctccccacccttctcgtcgccgcgcacgcccggagagccatcgacgacggctatcttggtctgcgtccccacgtttgtgggcaggcagagatctggatctgctctcatccgcttcgccactcggcgggctcggcgcagcagaagaagaacaagcagctcgccgtcgagtaaggccacgtgtcctgtccgtgtccgcaccgtcttttcacccccgcatcagcgttgcgtctccaatgagcgtgcgtgtcaccagggagaggcgagggcaggcggtggtggcgatgccgattgcgtccgccgacgcgcgcttggtgggattgcctcctccatccatgtcatccctgacttccccaagccaggtgggtgtcaccccgacttccatactcaatcccttttgttctaa

SEQ ID NO: 34982 - DNA, 726 bp, Zea mays
  Peptide Sequence Number=SeqID_78357
atggcagccggagaggttttggcgccctgttcatgtgatgtcgtggccgtcggaggagtgcttgagccttgtggaagtacagctgtcggggctgtcggatccttgctgacgtctccttgctttcgtaaggggctgagagccgccgtcgtcatggagcacgcggggtgccatcattacttgtttaccggggggttgggtaatgatggccttccctgcaacgtggcgggtccgagcccgaggtcaggcgaggcggaggctcctccgaggtcgaggtcgagtctgggccctggggccgggcgaggcggagttcgtcttccggggtcgaggctgagtccaaacctgggtcgggcgaggcggagaccgtcttccgaggccgaggctgagtccgagccctggggtcgggcgaggcgaagtccatcttccggggtcgaggctgagtccgagccctgggtcgggcgaggcggagaccgtcttctgaggccgaggctaagtccgagccctggggtcgggcgaggcggagtccgtcttccggggtcgaggctgagtccgagccctgggtcgggcgaggcggagcttcccatggcgcccgaggctggacttagctgctgtcagcctcactctgtcgagtggcacagtagttggagcggggtaggcggcgctgttttcctgtcaggtcggtcagtggagcggcagagtgactgcggtcacttcggctctgtcgactga

SEQ ID NO: 34983 - DNA, 300 bp, Zea mays
  Peptide Sequence Number=SeqID_78358
atgcaggcggcatgcaaccacaccaagggggcgcaccctttcgactccgacgcatccagcgtggaggcccaggcccacacatcatgtaaccggccgccggttactatgtgcgggaagctgcaccgctacttgcgccagtaccacgccttctcgactgcggaaccggtgccccgactcgaggcaaccctgcgcatggcccaacagtgccaaccgagcacatcgatcacggggaccgggaaaggggatactctgaaagggatccttctccgcgaagaaagcaggccccgagccccctactga

SEQ ID NO: 34984 - DNA, 480 bp, Zea mays
  Peptide Sequence Number=SeqID_78359
atggcgccgccggggtcgcggcggtgggcttacgtgcgcgtgatggccggcaccatcctcggtggcgtacttggattctacgtcatgcaccgcgtcgagacctcgtacaaggcacgccagatccagccctgccctactcccccacccctatggctatggctagcgctgtcgccagtttccagcggactcgctcagcatttctcttgcaggcgagaatggaggagaggctgcggagatacgaggcgcatctgcttgccaaagccaaggagtcgcagcagttgcaggacgaggcacagcgggaggataaagcccagttcctgcccgactcgtgacaccgacattcttcccctcttgcgcctgctcttttccaagctgttagtagtcctgcctaattgggccactcagcagcaagacgaaacttttggatcgttcaataacagaacaacccttccaagggtgggcatggcatcagtgtgctaa

SEQ ID NO: 34985 - DNA, 2424 bp, Zea mays
  Peptide Sequence Number=SeqID_78360
atgcaggtagtcgagttggttccttgcgcccgcaacaagtggggcaactggaatgaattttggttttacgttgctgagggtaccgtcgaaggccatgagggactccccgtgtctgagatgtgctctcatttttactcagtgtacccgccctttgaagtggcggaggaggatgtggacgagggggcccttcggtgcaccgccggcgtgagcagtgggcgcgatttggttgaagagtttgtggcatacggggtatggcccttggcgcatggctgggcgttgggcgaagtgtgccctcgccagatgccttttcatggtgggagggtggtgcgaagttctgccttcgcgctgaatctgcaaagccgcgacccggccgcctttgtgcgtgaggcggaggatggggcggtgcggctcgttggacgttacgtgccgaggacagagggccagcgcagctttgacatccgcgagtcgaatgaccgtttgaacagggtttttgaattaaatcaattgccatatgacggctatcctggtcaagacgaagtggaccgccgtgggaagaagccggtggtggagactggagacgaccctgcgccggcggccgcctcatcctctaaaaagagaaaattaggtactgctatgggaggtcttggggtttctgatggttttgctagagagttgatgaggacgtgcgcggcccccgggggaaggatgtcttcgcccgagctccgggagtcgtcggctcggatgctgagggttaccgggggttgctggcctaggaatgttcctatcccccgcgcgggtggcgaggacttttttacatctcgcatggttcatgaatggagggtttttccttacgggcggaatattgctgctgttgtgtcggcagtgatggacaaggatcgccagggagccgcacaaaagcgacaggcggttgtcaggctcgttgaagccaggccgaagaggcatcggggggctgcgaaggctgcggcccccggcggaggcaagccgccactggcggcgaagtcgggcgcccctgcatctagcaaggcgccgaaggcaacggcaggcgccggaggctccaaatcgacgaagatggtgccgccatccagcggagtggcggaggtcgtgaaggcggcccgagcgttgccgttgtcaggcaaacgtgtcgccgacttcgccactgatattaatgtggacgactatcttgttgggtcggacgaaggccaacttgctatagttgcgcccgccgcggcggccacgacggctgccgtggtgccgaagacgaaggtcggggctcttagcgccggaggcgaggtgtcggccctcgcagcggtcagggatgaggcgggcgctgcgtcccgccggctgaaggaggtgacggaggcgctgagtcaggtggctgatttcgccaaccgtacaacgtcgggggccctcacgacggctgtatctgccgaagtcgagagacttcggacacaacatgctgacgccgtccgtgaaaaatcggccgccgacagtaagtgccgtaagctgacggacaaggtggccgcacttgagagggagaaggctgacctccggcgccaactggcgggggagaggagggagactaacgaggctctcgtcaaggagcaggctgcgcaggcggaggccaaattggcgcgggcggagggcaatattgccagggagcgcgccgagcagctgcaggagcggctcaccgccctggagagccgcgtggagagggccgaggccgtgtcgcgcgcggaggcagagcggacgcgcaaacagcttatggatacataccgtgagctgggcgcgtggaccggtgatttcgaagtgccggaccgagagcccggacttcgctgcctggagtgggtgcaggaggagttgcaggcactccctactgtcgtggaggggttaatgtcgtatgcctccctagtcacctgcgagggggcgatgaacgcgctctcccgcgaggggtgccggcacttcgaggtcttcgaccaagccgatgaagattttgagcgagatatctataaggttgaggacctcgtagtgaaggaatccgccggagccatctacgaccggctgtggggtccgtatggtggcgaggtggtcagggagcgggccgagacggcgatggctcaggcggcgcgtggcgagagggtggacgacttcggggcgttgaacagcgcgctgcctgacccggagccgaccccggagactgcggaaggcgcaccggatgcccccgcatccgctgcgcccggcggagacctgcccccagaggtcaccgaaggcgcacctgatgcccccgcagccgctgcgccgagtgctgaagatcccgcggcagtggcggcggaaacaacagcggaagcaatggcggagccaacggcggaggctcccgcaacgtcagggccttcgcaggtggcgtag

SEQ ID NO: 34986 - DNA, 276 bp, Zea mays
  Peptide Sequence Number=SeqID_78361
atgcccgcgcagaagcgcccgctcccgtcgtctgcctcgcccggctccgacgccgacgtcgaggaagctcctggcgccgacgcggacggctgcggcggggccgaccaacggtcgccgaaggtgacgctgaacggagtggaggagcgggacggcgggccgctgcaggccaaggaccagcgccacggtactactgggctttcaacgacgcgcggcccgccgactcgggtcatcttctcgcgatgcgcgtacgcgtcgcgcggtgctgcgtctctaagg

SEQ ID NO: 34987 - DNA, 327 bp, Zea mays
  Peptide Sequence Number=SeqID_78362
atgcgccacgcctacgtgcgcgcctgcgagttcgtcgccatgttcgacgccgacttccagccaccgccggacttcctcgtcagaaccgtctcgttcctcgtccacaaccccagcctcgcgctcatgcagacacgctggaagttcggaactgctggagtatggagaacgcaagcgatcgtcgagtccgggggctgggaggaccaaaccactgctgaggacatggacttggcgctgagggcatggctcatgggctgggagttcgtctacgttggaagcataaaggttaagagtgagctgccgagcactctcaaggcgtaccagtcctag

SEQ ID NO: 34988 - DNA, 1003 bp, Zea mays
  Peptide Sequence Number=SeqID_78363
aaataacgaatgcccagcgtgccgcactcattgtgctagtagacgttccttgagggatgatcctaactacgatgctttgattctagctttatatccagatattgataagtatgaggaagaggaacttgcattcagtgaagaggaaaggacccgtaacaaaaggattcaagaatccattgctgagacatttcggaggcaaacagaagcacttgtgaagaagcgctccactgtaaaagcaacagatgcagcttctacaaggaagactcgacggaatatgcgaccaaggaggagaggacgaattagttctcctgatattgccccaactgattttgacgatgatgatagagaagagaacggtgatgatggaagcaaggagtcgtcttctgttgatgatcactccccagatgtaaggccaaaaagatctcggaggtggcccatgccacgccgttcccctgctaaggccattggcaataccgacaatagcattgaggataatgacgactcaggaggtgctagggactttatgactgcttctccgctgcggggagagatgcttgcatgggggaaaaatggcacccgcagccaaacccggcatggcaactccagtggctccagcggaaggatgggcaggagtggccgtgttgccaagttggtagatcagttccgtaatgctgatgacttcgataatgagaatgttcgtaatactaacatgccgatggatacatttgttagaaaagttactgagttgaacctgtatcttgtcctgcttccacttgatggtcaaagtgtgcctaaactggaaaagccctacctcagttgcctgccaacactatctgttcggcatctctgccagctgctgcgtcgttttcatatgtacccaggaattgttatactctctgaaagcacaaggacaggggtagatcagatattcactatcaactcgaccagtcgcctcaacgccactgtctgcaaggaccttcaactggtggaagcttgtacataa

SEQ ID NO: 34989 - DNA, 234 bp, Zea mays
  Peptide Sequence Number=SeqID_78364
atggtcgtgtttgccacactcctccgaacctccctgaggcccgtcccggcgcccaaggcccccagcgtgcatgcaccctcgtctccggcagactccgccacggactcgaatgaggccgccgctggcgacaacgagcagttcgaggtttccgagtgtgttgcaggagacttccctgagcagcaacttggtgaaggcaagtgtcctctgacccattatgtcctacttactttataa

SEQ ID NO: 34990 - DNA, 1145 bp, Zea mays
  Peptide Sequence Number=SeqID_78365
atgacttcccacggatcctccgatgacggaaatgcactgacccacactgacggacttgcacgagagggctttccccgcattctgtgggaggtacttcagggggctggatacacgacaccccctcagtacgcggtgcagcagttcgagaagcaccgagtgccccgctgtagggtgaggatgactttggagcctcatcccctgcagccaggctggcgctccttggattccgagtctttcgggtaccgggcagaggacacgatcgaggcaatcgctctgcatggattgactaccttctgcggattccatcccttggagctggctacccatcccattggcttgttccccgctgagaaggaggacgacccaatgtggaaggatcgggtggagcatgccaaggacatctgggccatctacccaggacagactgcgcacttgacagtacggtgcatgaatgctctgtaccgtctgcaagtaatgcgcggtgaggcaatgtcccatctgatggcactactggaggcaacgaagatcacgctggataacagagaggagctagtggttgacctatctcaggaaatggtggaaaaggacttgcaggtggagcagctatccactgatattcaggagttggaggagctggtaggtacgagggagaacaccattgaggttctcgaggatcagctcattaacactcagcagcagcttgctgaggctaacgagcacctggacatgcatcaccaggagatccaggaccaggaggccaacgaggacgtcgacattgagggaggagatgagcctgcctccagtgtggacaccgctggctcgggaagaccaccttcccccgagtcaagtgttgcctcctggctcaacgtcagccaccaccccagcattatggtggtggagaccaccaacgtcaccccgcggcagccacctatcaggaattcctcagcacccagcctccactgttcacaagggcggaggacccacttgacgcagatgtatggctgcgagtggtggaatccaaattcccactactccatggagtttgctcagaggtcaccaaggtcaggttcgccacccagcagcttcgcggacctccaaggacttggtgggatcactttcttgctatgcagccagaggaccgagag

SEQ ID NO: 34991 - DNA, 828 bp, Zea mays
  Peptide Sequence Number=SeqID_78366
atgcaggaatcccttgcaggaccgccatcgcagcaaaatcctcccgagggcctccctacactgaccactcccctactgcccttgcccctttcggataataaaagtgtgatcatgaataatgtatcttcatacccaaaaccacataaagcactagcaagtactacccaaaaagttcagtgtcactggactaagcacactaatacagagaagaccggggttatcggtgtaaagtttcccaagactcaggacgctgtttcactggacggcgggttgaaacactgtaaacataagggctcaattacaaaaaggcaccgcgaagcggtatcatggatctggggccatccgatcaacaccggacgctccagattaaatcgccaggggtttaaatcggtcggtaaaacctactgtccaccgaggagggcggaccacggtggttctaatggcgccgacgagcaattaaacgtaccccagtgcgacagggaactcaaacacttggttctacattcaatggagataatgaggacattcgaggaagtcttacctaggtccggtgacgcggagaactcaatccacgcggagacgtggcttggcggcggtagcggttttggcgagcaattcctatggacacaacaaggtacttcctcgattgcccaccccctaccgccacaacgcagtcagtacgagctccgggtggccacgatagaggacgaaccccactgggggtggttatccgcggcggcagcgggcagccttcgtgtggaacgcggcggcgcaggtgttggcgtggagtgggacagcgaagaaagggggcgcaggggcgatacttga

SEQ ID NO: 34992 - DNA, 321 bp, Zea mays
  Peptide Sequence Number=SeqID_78367
atggagataatgaggacattcggggaagtcttacctaggtccggtgacgcggagaactcaatccacgtggagacgtggcttggcggcggtagcggtttcggcgagcaattcctatggacacaacaaggtacttcctcgattgcccaccccctaccgccacaacgcagtcagtacgagctccgggtggccacgatagaggacgaaccccactgggggtggttatccgcggcggcagcgggcagccttcgtgtggaacgcggcggcgcaggtgttggcgtggagtgggacagcgaagaaagggggcgcaggggcgatacttga

SEQ ID NO: 34993 - DNA, 207 bp, Zea mays
  Peptide Sequence Number=SeqID_78368
atgggatcggcgcggcggcgcttgctgcctgctgctgccgtgctgcggcagccgggagtctgggctagggttgctagaactagaggccgtgaatgcgtttgcaaagaggatgacattcgaagagcagttaacgagagaaactggagtataaggaagagtaacacaccatcgtaccttagtagcacccctctagaggactctgcctaa

SEQ ID NO: 34994 - DNA, 412 bp, Zea mays
  Peptide Sequence Number=SeqID_78369
atggagcacggccacggtcggtgtgataggagaaccgagcagaggataactcgagctcgaaggacagaggcagaaggccggaagcgagaccaccgacgacgcagtcaagctccgttttccaacaatggcggctccagttcttcatccgatgcgcacagccctgcacccagccggcaatgctcccaggcgcgcgagatatggatgaggaaggtgcgccaggtacagcgcgatgaactgggaaggcatcgcgcccccccgcatttatactctggaacgctgcttggatcccggtggcaatcacgtgattcacggatgccgttgcgcagcgacggagttcggcgatggggtttggctgcagcagcgggattcgtggaggatcccaacctcccgccgaagccgcggtctccgatcc

SEQ ID NO: 34995 - DNA, 651 bp, Zea mays
  Peptide Sequence Number=SeqID_78370
atgccgccgcgtacaaggaaaacggcacgaaagcatactgggcctattggtgtaccccgacaccaacttgccccacgggaggaagacagcagtagcgggagtaacgacccaattggagatctcgaagctcgcatgaatcaacttcaagcagagttgcatcgcaggaccaatttatgggttgcggacggtgaccgaataaatgatttaagaagttacatccgcactctgcaagatcaattagctgaccgagatttggcgcttgattgggcggtacaatcttgctcagtagctttagctaaggaagcaaaggctcgagcacgagtcgacgaacttagcgttgctattgacaacttgcagatgcctaccaggactcgagggcaggatgcagcaggaacttctgggggaagggatgttaccccaaatccacctctggttcctcccacattggccgaggcgattgccgccttggtgaacgcgactgcggacaatacccgctttcttagagaaatggcgggccaacagctccagcagcagggtggaaggggttatcagcaaggcccccgtgaaaccacctatctggatttctctgaaacccgtccaccactatttgttaaggctgaggacccgttggaagctgatgagtggatacgg

SEQ ID NO: 34996 - DNA, 2424 bp, Zea mays
  Peptide Sequence Number=SeqID_78371
atggcggcggcgccgactgcggatgccatggacgtcgacgcgccggctaggacgctgactacctctccggccaccaagttgcgctcccctcacgacctcctggcagagacacgcgcctccatcgagaaagtcgcagcccggatactcgccatcaagaaagacggcgcccccaagtcggagctccgcgagcttgtcactcagatgtctctgcacctcgtcacgctacgccaagtgaacagagagatactgatggaggaggacaaggtcaaggcggagacggaggccgcgaaggcgccggtggactccacgacgctgcagctgcataacctgttgtacgagaagaaccactacgtgaaggccataagagcgtgtcttgactttcagacgaagtatccggggatagagcttgtgcccgaggaggagttccagcgttccgcgcccgcagacatccttgagaagaccctcgctgccgacgcctcccacgacctcatgctcaagcgcctcaactttgagctcgtccagaggaaagagttatgcaagctacatgagaaattaggacaacagaggggcagcttgctggagacaattgctaatcagaaaaagtttctttcaagcctgccatcacatttgaaatcattgaagaaagcatcactgccagtgcagcaacagttggggatgcaacataccaagaaactaaagcagcaccatgctgctgagttacttcctactccgctttatatagcatacactcagctgctagggcagaaagaagcatttggagagaatattgaagtagagatcgcgggaagcacaaaggatgcccaaatatttgctcaacaacaagccaagaaggaaaacagcactctttcaagtggcgacaacagaatggatgatgatgtgattgatgatgaagaagatgctcagagaagaagatcaagatccaaaaagaatgtggtgaaggaagctaataatccagcagtggcctatcaacttcacccacttaaaattatacttcatgtatatgatactgaagattctggtagcaaacgccgtaaactcatcaccctgaggtttgaatacttggcaaagttgaatgttgtttgtgtcggaattgaagattcagagggtctggacagtaatatcttgtccaacctatttccagatgacactggtttagatctgcctcaccagatggctaagatttatgttggggaggttccaaacttcagcgacaaggattcaaggccatacaagtgggcacaacatttaggtggtatcgactttttgcctgaagtgcctccatctgttggggatgattctagcagagcattaaacactgctgatttgtcatctgggcttgctctgtaccgtcagcagaaccgtgcacagactattttgcagaggatccgcttgcggaaagttgcacagatggctcttatcatccctttgaagttttcgagtctctttgattacaggtggcaacttgattatttgacaaagctgaagtggcctcgaatagaacataagaatgcaccatgggcatcacgcaacccactgtgcagtctacatagttggtcattgacaagttatcctgagtcatctcgttctattttgatgctaagtggtgctgcaagcaatgttgacagtgatgtagagagatctgtgacaaactgggaagaaactgagagtatcagggaggatggggagcttccagttgttattcctgctgagaatgagccaaatggttctacaattttgcaacctgaggtgtcagctgagatccggagccattctagaggcttatctcttatatcaaagagtgcaacaccatctaagctaagcatctcacgaagttttggtagaaatgaggacgatcttgatctcttgatgtatagcgacagcgagttggaggaccagccctgcattcttgacgaaactgaaaaagctactagcccgattagagacagattctgggaggagtatgcttccaaggaattcaccatggtcctgagtaaaactatgaagaatggtctaaaagtcatgctggaagccaaggttaagataagtatggagtatcctcttagacctccccttttcagattacgtttgctctcagaaaagtctgaaattttgaagtggcacaatgatcttcgtgcaatggaagctgaggtaaatcttcacatccttcgaagcatacctctatcatatgaggattatatattgactcaccaagttatgtgcctggctatgctgtttgacatgcattttgatgaggaaaacgagaaaagaaaagtcacttcagtgatcgatgttggtctttgcaaacctgttagtggaactatgcttactagatcggttaggggtagagacagaaggcaaactatttattggagaggtgctgattgctcttccagttacttgtag

SEQ ID NO: 34997 - DNA, 807 bp, Zea mays
  Peptide Sequence Number=SeqID_78372
atggggggcgagacgcacctgagcgtgcaggagctggcggcgtcgctgggcgcgctaccgccggagttcgtgcggtctgagcaggaccagccgggcgcgaccacgtaccgcggggccgccgtgccggacgcgccggtgatcgacatgtcggagcccgggttcggcgcgcgcatgggccgcagccgccagggagtgggggctgttccagccggagctcacgctcggcgtcgcgccgcacaccgacatgagcacgctcaccgtcctcgtgcccaacgaggtgcaggggctccaggtcttcaaagatggtcaatgattttcagcaacggggcatacaaggcggtgctgcaccgtacgacggtgaacaaggagaagacgcggatgtcatggccgatgttcgtggagccgccgggggagctcgtcgtcgggccgcaccccaagctggtcacggaggagagcccggccaagtacaaggccaagaagtacaaggactaccagcactgcaagatcaacaagctccccatgcttcactaccagaaacgggcgctttgccgagtgcccgaagcactcgacaaagccctaaaaacactcggcaaaggctttgccgagtgtcgcactcggcaaagaaagctcggcaaacagtacatcggcaaagccttctttgccgagtactttttctcgggcactcggcaaaaaggtttgccgagtgccagggagcactcgacaaagaaaagtggtcgttacggcgacgaggtaacggagacggcgtctttgccgagtgtcaaggatgacactcggcaaaggagttaa

SEQ ID NO: 34998 - DNA, 174 bp, Zea mays
  Peptide Sequence Number=SeqID_78373
atggggagtagctctctccgggcagaaagggaatcacggcttgtgggtggctatgagatcgatggttttgattatgactatggtgctggttgtcagcattgcaaccactgctcaggcgaagatgaagctgtggaaggagacttccaggagttccaagactacgacgagttctag

SEQ ID NO: 34999 - DNA, 1891 bp, Zea mays
  Peptide Sequence Number=SeqID_78374
atggcgctctccgaccgctcccgcgagtcgctcctcccgagcttcctctacggctcctcggcgcgctctttcgctgccacaggagccgccgcgcgcctccctgtctcctccccggcgcctgccgcggctggagcaggaggcggcgtgccgttctcgatccaggcgcccaaggagaagatcgagatgtactcgccggccttctatgccgcctgcactgccggaggaatcgccagctgcgggctcacccacatggccgtcacgcctctcgacctcgtcaagtgcaatatgcagattgacccagcgaaatacaagagtatctcatctggatttggtatcctgttaaaggagcaaggggccaggggtttcttcaggggatgggtgcctactttgcttggttacagtgctcagggggcttgcaagtttggcttctatgagttctttaagaagtattactcggacatcgcagggcctgagtatgcccaaaagtacaagactctaatctacctcgcaggatctgcatctgctgaggtaattgctgatgtggctctctgcccttttgaagctgtgaaggtacgtgtgcagacacaacctggatttgctcgtggattgagtgatgggctccccaaatttgtccgatctgagggtgttcttgggctctacaagggaattgttcctctctggggtcgtcagattccttataccatgatgaagtttgcttcctttgagaccatcgttgagcttatctacaagcatgctgtgcctgttccgaagtctgagtgcagcaagactacccagttgggtattagctttgctggtggttacgttgccggtgtcttctgtgctattgtttctcacccggctgacaaccttgtgtctttcctgaacaatgccaagggagctacagtgggagatgctgttaagaagcttggtctctggggtctcttcactagaggacttcctcttcgtatcgtcatgattggtacccttactggtgctcagtggggaatttacgatgcattcaaagtgatggttggactacgtacacaatttgtggtgcacggttctgccaccgccgacgtcctctccgcgacgcacgcccgcgcagaaccttccaactgcgctctccaccgcgatctccgcgcgtcgtctctctcgctgtccagccgcgtccgctctcccatggaaggaaactcttcaccgcgatctgcgcgcgcaccgttcctctccccgttactcctctccccattatcgcgctcgagtcagtgggaggtccgccacctccgcctcgccccgccgtcaatggaaggtcccagtctctccccaccatgcccccgcccacgcgtccccgctcccgcgctgagatctcgcgcccgtagacaccgccacagtgcccccggcccgccgcgcgatctccagcccccgccccgttcgccttcgtcaaacccctccgccgcgaggcaccgcgcggacacgacgacgtcgtgtgctgtggtgaaggaggtcgtcctgaacaggttggccacgaaagcgacaagctgggtggtgtcgcggaactccacgaataggcccgcgagcgccgagagcgagcgcgcgcactcctcagtcatgaggtccacgatgcctcaccttcctcaagctccacgacgccttcaccctcgcgagctagcaacgccttcctctccgttgttcatgtacgccaagaccagtcggctcgagctggtgctgcaggtgctcggcgaaatgcctagcaggaatgtggtctcgcggaccatgctcgccgcctcgctggcaagtctgacgttgaaaggatcttcagaagtcttcgaggacctgtcagacagacacgggctctggacatcactcccgccatgtcgctaccctcatgattaca

SEQ ID NO: 35000 - DNA, 318 bp, Zea mays
  Peptide Sequence Number=SeqID_78375
atgtcgtcgcggccccttccccaaacagaaaccagtacactaaaggggccatggaggatgaggtcatggacctcaaggtcatggtgccttgtcgtggcgatggatcttctaggcgatggggccgcgaaggatgaggtcatggacctcaaggtcatgatgcctgtcagctgggagcaacggcttggcctcctggtggatcaagtgcatcatgccttaggggaagctggttctggtcactggtggaaccaacggcatcgggcagctggttgtagcatcattgctgagcaggaacatcaagtcaaggttgctcctaagtga

SEQ ID NO: 35001 - DNA, 417 bp, Zea mays
  Peptide Sequence Number=SeqID_78376
atgaagagagcatctctatgtgaaggtgaagtgattttattgtcaaagagcttaaagcttaaccttgtaacgaggataagctacctttgtttcaaaggtggagggtccttaagtctctttgaaatccgtaagggtgccaatggttcaacacaaaccaataaaaagaacgagttaggcttcaaaagaaaggagcaaaaaggaaaccgaagtgtgccctggtctggcgcaccggactgtgtccggtgcaccagggtgaatcaactcaaactccgcaccttcgggtttcccaggcgcagctccgctataattcaccggactgtccggtgcgccagcagagcaacgattatatgcgcgcaacagtcgactctgacggatgaacaatgcaacacagtaccgcggcagaagtcagagcagcag

SEQ ID NO: 35002 - DNA, 594 bp, Zea mays
  Peptide Sequence Number=SeqID_78377
gttgaaatgttggagaagcaaaagaatgaggtaatcacttcccattttgaagaagctgcttttgcttcggttacatgctatactctcttttggtttattactggcagcgaacttggtcctggagaggatgagacggcaagttgggccaacggcaaagagaatttgtctgcggaggacattgacaggtccatgattttgcaaccagaaatcggcaaggtattggcaggtgagcctgcaagtccattccgggcatcgtcggtggtgctcgccggtcgcgtcgcttttgttgtgcttgattggaagggaatcagcgagtgccttcaatcatacgacggtacagacgtatgcatggtccctacacgtgcagtgtcggaggaatctgtcagaccagttggccgtcttggcccgtgtaacgcatcgaagaaccctgaactgaaggcatctcacggcgctcgtggaatcggtcctgaagacgcctgctgcattccgttgattgttaggcaggtgctggaccagggccaaagcagtgcagttcaacagactgcacccagcatcgcggcactgcttgcaattgccaatgtcatctgccattga

SEQ ID NO: 35003 - DNA, 1347 bp, Zea mays
  Peptide Sequence Number=SeqID_78378
atggagggccaagccatcactggcgccagagttcctgcccgtactggacaggatcaagaccttggcaaccggtggtctgatgtggatgcacgtggctggatccagcgtgggctgggtaccgacttgtcctgggaggagctggaactcctggtgaaggggattactgggttgaggacggcgatcttggccacgctgccgaccctcgacgagagcggcgtagcggttcaccagaccggccgctgggacccccaccgcgggatccggatctccgatgcgccagctggaggcccccagcgtgacatcgtggctcctagcgcccccgtcgtggccccccgccccttggacaagggcaaagggactgcaagcagttcctccgccctaggtggcaccggggagtcagaggaagagaggcgacgctggctgcgccaagccgatgggtcatttgtttcggaccccccagaagcgtcagaggactactggtggggccgaggaggctggctcccatgcccagggcgcgcagaggcgtgtcagtcctctgccaccaccaccatcgggtccgccgccaccataaccaccaccacccaggggcatctgctgggagtggtgccggcgctcaccgatggctaccgcagcctcaacgacggcgatgccgtcgagtacaccactgaggcggcgatcctgcgggagtgggaggcgctgggatctaagcaccagcgcctcaacgactggtgcacacagctggaggagtgcaccaaggcggcgtcccaccagttcgcctttgagcggtccgaactcgcgcgggaccgcaaagactacaaaaggacctccagaagagctccaggccaagctgaaagccctggaccagaccctggaggcccagcgaacccagcaggcggcgcaggtggcaccaggccccaggtggtggaggccaccaggaaggctcttgaggaccttcaggcggagcatcgcgtcggggtccagcgcatcgccgcatgggccggcgaggcgagcaaggcactagtgccgctagggatgagtcccatcccggtgtcagagctgccaacgtccatctccgacgcgctcccggtgctggactccgtcgccgatcgcctccgccgcctgaaccaaattattggcgcccgcttggaggccgagggcagcaggctctgccaggcggtgaccgaatatatcctgacgtgcttctggagccacgacccggccatatccttagagttggtgatcgctggtccggtggccgacactgaagacgccgcccgagagggcgtacaagacgtcgtggagctggtggccgagcgcttccagcgggatcctgctgatgacgagtag

SEQ ID NO: 35004 - DNA, 1068 bp, Zea mays
  Peptide Sequence Number=SeqID_78379
atggggggcgagacgcacctgagcgtgcaggagctggcggcgtcgctgggcgcgctaccgccggagttcgtgcggtctgagcaggaccagccgggcgcgaccacgtaccgcggggccgccgtgccggacgcgccggtgatcgacatatcggagcccgggttcggcgcgcgcatggccgcagccgccagggagtgggggctgttccaggtggtgaaccacggcgtgccctcagcggcggtggcggagctccagcgcgtcgggcgggccttcttcgcgcttccgacggaggagaaggagcgctacgccatggacccggcgtccggcaagatcgagggctacggcaccaagctgcagagggacctcgagggcaagaagacgtggaacgacttcttcttccacgtcgtcgcgccgccggagaaggtggaccacgccgtctggccccggagcctcgccgggtacagggaggccaacgaggagtactgccgccacatgcagcgcctgacgcgcgagctgttcgagcacctctcgctggggctggggctccacgggggcgccatggcggaggcgttcggcggagacggcctggtgttcctgcagaagatcaacttctacccgccgtgcccgcagccggagctcacgctcggcgtcgcgccgcacaccgacatgagcacgctcaccgtcctcgtgcccaacgaggtgcaggggctccaggtcttcaaagatggtcaatggtacgaggccaagtacgtgcccgacgcactcatcgtccatatcggcgatcagatcgaggcaagcgacctacgtagcatcttttttttttcattctattgtgttgtgatgatcttgctccctcaaattttcagcaacggggcatacaaggcggtgctgcaccgtacgacggtgaacaaggagaagacgcggatgtcatggccgatgttcgtggagccgccgggggagctcgtcgtcgggccgcaccccaagctggtcacggaggagagcccggccaagtacaaggccaagaagtacaaggactaccagcactgcaagatcaacaagctccccatgtaa

SEQ ID NO: 35005 - DNA, 1047 bp, Zea mays
  Peptide Sequence Number=SeqID_78380
atggcgctctccgaccgctcccgcgagtcgctcctcccgagcttcctctacgcctcctcggcgcgctctttcgctgccacaggagccgccgcgcgcctccctgtctcctccccagcgcctgccacggctggagcaggaggcggcgtgccgttctcgatccaggcgcccaaggagaagatcgagatgtactcgccggccttctatgccgcctgcactgccggaggaatcgccagctgcgggctcacccacatggccgtcacgcctctcgacctcgtcaagtgcaatatgcagattgacccagcgaaatacaagagtatctcatctggatttggtatcctgttaaaggagcaaggggccaggggtttcttcaggggatgggtgcctactttgcttggttacagtgctcagggggcttgcaagtttggcttctatgagttctttaagaagtattactcggacattgcagggcctgagtatgcccaaaagtacaagactctaatctacctcgcaggatctgcatctgctgagacacaacctggatttgctcgtggattgagtgatgggctccccaaatttgtccgatctgagggtgttcttgggctctacaagggaattgttcctctctggggtcgtcagattccttataccatgatgaagtttgcttcctttgagaccatcgttgagcttatctacaagcatgctgtgcctgttccgaagtctgagtgcagcaagactacccagttgggtattagctttgctggtggttacattgccggtgtcttctgtgctattgtttctcacccggctgacaaccttgtgtctttcctgaacaatgccaagggagctacagtgggagatgctgttaagaagcttggtctctggggtctcttcactagaggacttcctcttcgtatcgtcatgattggtacccttactggtgctcagtggggaatttacgatgcattcaaagtgatggttggactcccaacaacgggaggtgttacacctgccccagcagcagaggctgaattgaaagccagtgcttga

SEQ ID NO: 35006 - DNA, 786 bp, Zea mays
  Peptide Sequence Number=SeqID_78381
atgggactaaacattagtctctacaaaccaaacacccccttaagtatttccactggcagttctagaataaccgccagtggaaatgacgatttccactggcccctagtactggcggcactgaaaaacgtcagtgcaaacgtctctagaaccaccactatagagcctctatatactagtgctcgtcccttcgggcgggtggagacggggcggctctgggcgagtgatgcctgcaccgaggaggaagagcgtgatcatcctgaacttcgctctgaaatcctacgtcttcaaggtgaggtatcatccttgcgcgtggagtgtgacggtgcttgcggcgacgtggatcgcctccgggacgaaagttctcgactcggggagacgcttcgtggagtgaagtctcacaccgagctggcggatcatcctcatgggaggtggagagctctgcaagatgctcgcttaatcatgggatgcgaaagctgcgacaaacaagtgctcctggttgaacgcccacaagagctccccgaccacgtggagcgatctgtcgctaaaggtgtttgccgaggtggtggtgttgcccttggccaaatggtttctcactttgatgagattgacaccgctgtcattgttgagggttacgccgccggccaaagcgacgaggagctggacaccatcgagaatcaagtccgtcccttcgcccaatcgattgcgagctggattgatgtcaggtccctcctgaccgaccccctaaccaagaagccttccgctagtgacccatcttcctctgtttag

SEQ ID NO: 35007 - DNA, 381 bp, Zea mays
  Peptide Sequence Number=SeqID_78382
atgagcaagaacacaagagacaaaagatttatcctgaggttcggtcacaccacaaaggtgccctgcttccttgttgaggcgcccacaaagagttgggtctctttcaaccataatcctcccttcgccaaccacaaagctgaagtcaagttcaactcagctgaagaaacgtttaactcagctgaagtcaagtttaatttagctgaagaaaaggtcaactcagctaaagtcaagttcaactcagctgaagaaaagctcaactcagctgaagtcaagttcaactcagctgaagaaaagctcaactcaactaaagtcaagttcaacttttctgaaagaaagttcagctgcttctcaatacgaagactctccatctctcaaacctaa

SEQ ID NO: 35008 - DNA, 267 bp, Zea mays
  Peptide Sequence Number=SeqID_78383
atgcgcccctggcccgcctgtcagcgcccgtgtcccctggcgctgggcccgctcgacaacgagcagtccgaggttcctgagtgtgttgttggagaccttcctgagcaacaacctggtgaagggggctcaggcctttttcctgagtacctctccgctggaaagggatcacgactcatgggtaaagtgtgcaacctctgcagagtgttaggaactggtatatcagccgagctcacggttaagagcagccttgggatcctctttgattag

SEQ ID NO: 35009 - DNA, 396 bp, Zea mays
  Peptide Sequence Number=SeqID_78384
atggaggacttcgaggagttccaggaatacgatgagttttattttactttagtggcaaacccccaactctatggatgtctcagacatcttgatgtaattaagtacctttccgctatttatgtcgagcattgtgtgatgatgtccaattatgtaatcgctgtgtacatgagttctgatcctggcacatatgcaagctcagatgcggcaggaacgtcaagagatgcaccgagaaaggcaggatgtgagagaagaaatgaggcaagaaaggatggtacaacagcaataagcaccaatgcctcaaccaccaccactagttccaccccgggacaagcaccgggagttcatgagccacaagacaccgacattcgtcagctcttcggatcctctacaagctga

SEQ ID NO: 35010 - DNA, 87 bp, Zea mays
  Peptide Sequence Number=SeqID_78385
atgtatgatactccaccaccggtggtacagcactcggagcttctggacgggagcaagcttctagacaggagactccaaaccagatag

SEQ ID NO: 35011 - DNA, 354 bp, Zea mays
  Peptide Sequence Number=SeqID_78386
atgccgatgaggtttatcaagaagaggaattgccaaccacttttactgtcgatgagggaagagaaggacgaggaggaggaggtccagcaccacgatgaagagattgcagcatcagatgtcggggtgcagggccatgatgaggaggaggtcgcgggcatagatgctgaggcggatgacgataccatcgaggctcctgccgttcgatggaggggcactcggaagggccactttgtcctacctccgtcagcgcctgcacaatcggaagctcgagtattgatcatcccggttggtgatagccaatgggatgacacgtctttcgatggccgatgtcactgttgggggtatgcttcgtag

SEQ ID NO: 35012 - DNA, 291 bp, Zea mays
  Peptide Sequence Number=SeqID_78387
atgggctccggcgacgagcggcgagcgagagagtgcgaggaatgggagagagctcaggtagggaggatgggagagaggagagggtgttggatttatagggtagagggaggggcgcggaacggcaagggaaacgacggttgggttgctcgggctcctggcgagtcgctcgatcgggcgatgctcggcgtcgtcatcgggcgcggcctgggctcgggtgcgagcggggcgggagtcgcgacggctcgcgcggttgggcaggagctcgctccctggcgcgtggtttttctttaa

SEQ ID NO: 35013 - DNA, 1185 bp, Zea mays
  Peptide Sequence Number=SeqID_78388
atggcgtgtttgggcctcggcggccgcagaaaacacacgctacaagataatccgatcctgcaggctcggatctcgatagttgaagggagcagcagcaccctcggcgtcaactacaccttcggcgaggtccgacctagccttggacgacgacgcggtccgaggatctccactctgaaggacgacgtcatcatcacgcccgggccgtcgtcgccagggtcttctccaagaatccggctcgagcaggcggctcggctggtcaccccgaggcctcggtcggctgtcccccgaagacatcagcccggcccgaggcctcggcagatcaactctggcgtcggccccgacagccacaatgaacaaaagaccggcattcaaggtgccattacaaacggaactccggttccacctccgcaggtacgaacaaccccacacgattgggggggggcctacggagcaacaaaaggccgacggacggctcaccgtcgcccgctccagcagcagcgacaacaaccccctctacgggtggccgaactgcagccgcgatggcctcagggcgaacgcagctgcaaccttgccctcgcccacgccgacgctcgaggggcgaagacaagtacaaagagccggaggcccgaagcgcggatggtggcggtgatcccgtcggcgacggggacttctcgagccgcctccgcctcggcaccgacgacaggggccgtcagcccaccggcagatccccactcagatcctcccggacgagcggagcaccgacctccgcgcggaggcgccgtaccagtgcaaaggcaggaccgccccagaacacaaagccgccctggcagcgcgcgacatcttgggcggtcctcccgtgcgcacggcgcgacaaccgcccttgcggcaagagggggcgtcggaagccaagccagcgagcccaacgcgctgaagctgacgacgcccgccgtcgaccagccccgcgttgtcgaagtccgcccctctcgcagggccagtgagcgccctctccctcgaacgctgaaggagaggctgacccacgaaccagcgcgggaggtagagctccggctcagcccggcctccgccccagcgaggatgatgaacatccttgaagctaagggcgggaccaagatcgcagcccggcttgcttctccccacccaggggctggtgatcaccgtcttgggtga

SEQ ID NO: 35014 - DNA, 672 bp, Zea mays
  Peptide Sequence Number=SeqID_78389
atgactgcgtccccacccgaggttggcctcgacgagtcgatattgtgtcccccgcctagggttgaccttgggcgagtggtggttgaggtccctcgtgtcttggtacacctaattatggtacccaacagagttgttcttcctcctggcttggagggaacatcttcctcagcttctggtgttatggggactatggtgctggtgggtggtccgttgtgccacggcgatgccgcaactagctctaatgtttcggctgaagtgggcggaccgaccatggatcccgcccttatcgtggcgcctgctgtcaacatcgtgatagctgctacttcgctaggaggtgccctcctccagttccggggagcgattccccaggcgatcctcctcccttgtggcaacggcgtcgtcatctcatgtggtggcagctcagaggtggggcagccagcccccgggtccttcggccttcaagagcaatcaatagctgccatggtcgctggcggggtcacactgctcgcgccactcgtggagggtggcgatgcggaggccgaggagtggaggcggcttgagtcagccccgctgcgagctgacgcgacccttgaaaccactgattgcatgcttagtggttttggggatgtgatctcgatttctcgggcatccgtgacggggaacctccactag

SEQ ID NO: 35015 - DNA, 435 bp, Zea mays
  Peptide Sequence Number=SeqID_78390
atggcctccacagtctgtggaaggcatttctactggcggttctcgatgacaaccgccagtagaaatggcctccacagtctgtggaaggcatttctactggcggttctcaatgacaaccgccgctcaatgagttctccaatcaaggaccaaggattagggcccgaccacatggacaagagtgttgctcaagaacaatccagcagtgaaggatatgaaatgcctagcgacccttttcccaccactagcatatatagggccgctgcgcgaggtcttgtctcaatttcgtgtgatgctcgaaaaagctgtggcacgatgccaagacgcaccggaaccgacccaagacgcaccggaaccgacccaaggcgcaccggaatcgaccaagacaaccaccgagaggtcaaggaaaaggaagcagagcgatcggaacagaggtga

SEQ ID NO: 35016 - DNA, 345 bp, Zea mays
  Peptide Sequence Number=SeqID_78391
atggacacgagagaccgattttatgagggcagacctcatcgggtacaaaacaattgtgcgatggattccagagacccccgatttatgagggcggacctcaccgactggatcataggtgtcgagggtggagcttggctggtggtcgacgatggcaacctcatacgccacgtggctcgactaatgatcatcgtggtggaccacgtagatcttggggctacccttccaacccctagcgcgcccgatgtcggcgagtcgcccgggattctgtcggagtggacggggcgaggtttgccagtggtggtgaggaagtcgagagaaccaaacttgatcgtgctcttgaggtga

SEQ ID NO: 35017 - DNA, 480 bp, Zea mays
  Peptide Sequence Number=SeqID_78392
atggggcacgggcgtccactcggattaccccgccagcagctcaccggagacaccatgttcggcgccctccgagggcaacatggcggtttcccccccctcctccttgcggaaaggcgacgcaggggcagccaaagtgaccgcagtcacttcgccgctccactgaccggcctgacagaaggacagcgctgcctgcgccgctccgactgctgtgccactcgacagagtgaggctgacaggcggccaggcccggcctcaggcaccatagggaactccgctccggaagacagcgaactgcgctccgcccgacccagggctcggacccgggctcagccccggaagacggcgaactgcgctccgcccgacccagggctcggactcgggctcagccccggaagacggcgaactccgctccgcccgacccagggctcggacttgggctcagccccggaagacggcgaactccgatccgcccgaccctag

SEQ ID NO: 35018 - DNA, 1425 bp, Zea mays
  Peptide Sequence Number=SeqID_78393
atgtcagcgccgttctctcactatttcgtgttcaccgggcataattcctacctcactgggaaccagctcaatagtgactccagtgacgtcccaattgtaaaggcgttgcagggaggtgttagagtcattgaactcgatatgtggcccaatccttcaaaggacaatgtcgatattcttcatggagggacattgactgccccagtggaaatgatcaaatgtttgaagtccatcaaagaatacgccttctgtgcctcaaattatcctcttgttattactcttgaggatcacctcacaccagatctccaagctaaagttgctacgatgctcactgaaacatttggagatcttcttttcgtccctaatccagacccgatgaaagagtttccttctccagcatctctaatgaagagaataatcatatcaaccaaacctccacaagaatataaggagtttctcaaagctgagaataatcgcagtggcagcggaaacatagctgagttgccagaccaaggaagcctgagaagaatagattcaaatgccgatgaatctgatggaaaggatgaactggatgagcaagacgaggaagactccgactccgacgatcccaaatttcagcaggatacagcctgtgagtataggaaactcatcaccatccaagctggcaaaccaaaaggccatttgcgggatgcgctaaaagtggatccagataaagtcaggcggctttctttgagcgagacacagttagctaaagcgacaatctctcatggtgctgaagtcataagaagaatatactccgtgtgtatccaaagggcacgagggttaattctttcaaactacgatccaatgaacgcctggacccatggtgcgcagatggttgcattcaacatgcagggccatgataaagcgctccggttgatgcaagggtttttcagagccaatgggggctgtggttatgttaaaaagcctgacttcttgctaagaacaggcccaaatggggaagtatttgaccccaaggctagtttgccagtgaagaaaaccctcaaggtgaaagtatatatgggagacgggtggcgcatggacttcagtaaaactcatttcgatgccttttcgcctccagatttctatactagggtagggatcgcaggtgtgaaggcagacagtgtgatgaagaagacaagggtgattgaggaccagtgggtgccgatgtgggatgaggagttcacgttccttctgacggttccggagctggccctcctgagggtagaggtccaggagtacgacatgtcggagaagcacgacttcggggggcagacagtgttgccggtatgggagctgaagcagggcatccgtgctgtgcccctgcacgatcgcaagggtgtcaggtacaagtccgtcaggctcctcatgcgatttgattttgtgtag

SEQ ID NO: 35019 - DNA, 153 bp, Zea mays
  Peptide Sequence Number=SeqID_78394
atggttacttttatgatgatgattaacaatggtgattataatcctgatctctgggctctcaagcttgctgaacatgaagggcaaggaggggtgggcacctttttactctccgacaactctctaatcattgacatcctgcttgagcgaggatag

SEQ ID NO: 35020 - DNA, 1887 bp, Zea mays
  Peptide Sequence Number=SeqID_78395
atggctgcaagttcctccccttctagccggagcctcctcgccacacggcccctcttcttgccgttgaggacgaggaggtcgcttccacccacgtccatcccgcctcgcctcagctgtctccgatctccttctgcgtcctcctccccgtcggcgtcggcatcggcgtacaacggctgggccgacctcgccgcggcgcccgacaccccttttcccttccccctatccttcccgctgcagcccaccacgcatggcctcctcgtcctcctccccgccgccgccatcgccctctccctctccctcgcccgcctacctcccctccccctcctcgcggccgcctttaccgctggattcgcagccaggcacctgtcctcctcagcgcaggcacagtcccccggccgcctctccgccctcctcgccgatctcgacgcccatgcccgcgccttgagggagcagctggtctccgacgcccacccgggtctcctcgtccaggccgtcgatcgcctgcgggatgctgtcgccgacgccgccacagtggccgccgaacagggcgacaccggccgcaccatgtcagacgcgctcggaccgctcggggaggtcgccgactatctcggtgcctgggctcgccacgccgtgcgggacctcagcctcagcccgccaaggaagaagcctgcaaaaggcaacaacagttcagatgttcaagccgcggccaatcccaacaaccgggctgctcaacagcaacaggaaattgggagcaataagcccgtggactctactctgcaacagcagccttttgcatttgatccatctgcagtcgatgatgcaaatggaaggccgcttggcatgttgcagtttgacgaggatgacaatggatccaaggatgcagggaccggtgctcaggccacgctggagagactggtgtccaagcacaggcatcggcgtgaccctgatggccccccgtttgaaggcaggttttccgacgagtcatcatctttgctggagaggacgcttgaaatccgggacaggtcctacaggctcaagatcggtgtgatgagcgaagcgcatcctcctgtatatggtgacgatgaaagcgccgccagtgctgctgattcagatggcgaggagtttagccgaaacgtcaaggaagctgcggagatcctgaggaaggccagggcatccatggctgacgaagagaccgcagacgcactgctgtacaaatcagctaggctcctttccacagctgtggctttgaggccaacaagcctggtagcagtgggtcagctagggaacacgtacctcctccacggagagctcaagctcaaggttagtcgcgagctgaggacactcttggccagcagcggcgcctttctgaacggaagagagcgtgctccacggtccaggaaggtagacaggaggatggtaagcagagagagcatctcatccgctcttgtggatgtatgcgaggaatgcgagagcctccttgtcgaggccggcagaagctacaggatggccctctccatcgattcaggtgacgccaaggcattgtacaactgggggctggcacttattttccgggcacaattgctcgctgacatcggaccggaagcagcagccgacgctgaccgggtgtatctagctgcaatcgacaagttcgacgccatgttgtcgaggagcaacacttatgctccagaagctctctacagatggggcactgcgttgcagcagcgctcccatctgcggcctcggagcaacggtgagaagataaggcttctggagcaggcgaagagcttgttcgaagatgtgctgtatgtggaagcagacaacaagatggtgagggaggcgctgtcatcgtgcatatcagagctcaactaccatggccgctggttataa

SEQ ID NO: 35021 - DNA, 837 bp, Zea mays
  Peptide Sequence Number=SeqID_78396
atggcttcaactaaaaataatgtactgacaaatgcacttattgttaaggatggccatgaagacctactgaatgttgaggccagaggttctagtggcatggtagatatcaatgtggcatcagcgataatgtttgtggtggttgcgtcatgcttcttaataatgctttacaaactgatgtcttactggtttgtggagctactggtggtaatcttctgcattggcggtgtagagggtctacaaacatgcttggtggctctgttatcaagctccccctttgcttggattgggcaagacattctgggtattgcattgatagttacagtcatccaaattgtgagagtacctaacctcaaggtgggttcggttcttctcggctgtgccttcctgtatgatatcttctgggtgtttatctccaagagatggtttcatgagagcgtgatgattgtggttgcgcgtggcgacaagaccgacgaggatggtgtgcccatgctgctaaaaatcccgcgaatgtttgatccatggggtggatacagcatcattggctttggtgatatccttcttcctggtcttttagttgctttctcgctaagatacgatttttctgcaaagaagggcttacggtctggttactttttgtgggcaatggtggcctatggctctggcaccttgatcgcgcttggatggaagagaggggagctgcagaacctgtgggcgaggggagagccagagagatttaaaaggaggcactgcttcttggagacagcaaagtctgattgtgagctaactgctgcccaatgtgcagccatgcatgcgacaaatattcaagaacggaggtag

SEQ ID NO: 35022 - DNA, 342 bp, Zea mays
  Peptide Sequence Number=SeqID_78397
atggaaaatgacactattgtcgtgatacaggttgcatgtgattctggtgagcttgcactggatcttgtgtatggacttatagctgaaggggaaaatctctctgtagactttgagaaggaactaaagttactgagggatcgcagtgtcctctactgcatctgctgtaagcccgacgataacagggccatgattgcatgcgaccagtgtgatgagtggtaccattttgattgcatcaacctgcttggaccccctccagaaagcttcttctgccctgcttgccatccaaacaatggtgaagaatctgtatcacttgcacgctcagaggatgatgaggataggtag

SEQ ID NO: 35023 - DNA, 3315 bp, Zea mays
  Peptide Sequence Number=SeqID_78398
atgtccataagccgtcttgagaatggtgtggatgctgagtcacttacccatttgaagggagaaataaaaaggctttttataaatgagagaagacgtcgagtagagctttggattaatgggactgtcaaatctagcctaatgttgccaaggattaatccaaactttatcggaagtgaagaggatcctacatgcattatttgtcgacagtatctgtatctttcagcagtctcctgtaactgtaggctgtcttcttatgtttgccttgagcactggaagcacctttgtgaatgcagtccgaagaagcattgcttactttatcgacacacccttgcagagttgggggatttagtgtgcgaggtctctttggttagcccccaaagggacaatgttatgcagaatccacacttgctcaatgatgtttatgtgccgtctaaaaaggtcaaagatcactatatattatatagacagcttgcagaagattgggtttcaaactctgaacatattctccagatgccatttgtggaaaggtcttatgccactgctttggaagaagctgaacaatttctttggggtgatcatgccatggattctgtccggaacataacagtaagactaacaaaggctatgaagtgggccttgggtgttagaaaatgtctctccaaaattcaggactttctgaaagatggctgctctgaaaaagtaaattatgtggaaatagaagaactagttgctacgaaatgtgccccgtgctgtgagcctagtcttacaaaattgcaggcgtatgcagaggaagcgaaattgctgattaatgaagtaaacaatgcactatcatctttcttaacagtagacaaattggaaacattatactcaagggtttcagaattcccagttaagctaacagaatcatcgactttgttttgggagttatcttctgcaaagtcctggttgaagaaagcaagtgattgccttgaacagaataaactgggcattatcgacatagatgtcctcaataaactaaaatcagagataatacaacttcgagttctacttccagagattgatcttatctcaaagctgtggaaagatgtggaatcatggcaaacccgttgtcaattatatctccaagacttccctgatctaaaggagctggagggttttctccttgctgcggatggtgccaactttagcattccagagctgaacattcttaagcaacattactcaaattgttgctcttggctattatcctatgcagttgatgaattgcctattgtggagaaagaactaaagaggtccttatgtaggaagcaagcatctgaggcacttgcaacagtaatgccaatggaggtggttgaagaaattttaaaagaagcttcgatactacatattgaagaggagcaaccatttgatgatctgtctcggatgctcaaagaggccacttcctgggaagagaaggctagacttattcttgaacgatcagcttctctctctgagtttgaagaccatatgaggtgttcagagggaataagagttatccttccgtctaaactgcatatgaaagcagaggttgatattgctaaattgtggatagacaaatgtcaggcctatttgagaccaggctgcaataaacttgcatttggagactttcttaaagttgatgatatcaaggatttaatcaatcagcctgcaaatttgaaagtcattcttgacacttcagaacttaattctgttctcaacaatattgaaaaatgggaacacagttcactaagtctactcaataattttagagccttacttcatttgaatagtattggctctacagttgacacacttcaaagaaaattggaggagctgcaaggtaaaatgaacacagaaatagaagttggattatctcttggttttgagttcaaggttctttgggaactgaaggattcttcgttgatgctaagatggatattgaatgcactgtctctgtgctgtatgattcctttattgcaggatgttgatagattaattgaagaagcagtccaccttcctgcttccttagcagattgttctttggttacattgttgatgagggcattgtcttgtctaagaaaatcacttattttgcttcctggttctggaacatctgcaaaatccaaattggaagatgttgaaaatattctagcagaattcaaggaggttgatgttccttatcctatcatgactgccaagctggaggatgctgtaaacaatcataattcatggatagagcaatgcaataccttcttcatgctgtctgatggccagtcgtgggctatgctgcaaaatctcagggacaatgggcagtctgttgcatttgattgccctgagatggataaagttgttgatgaggttaaaaacgttgaagagtggctcaatcagtgccactgtactctacttctagatggaaataatagttctttgctctccatacttgtaaagataagaggattattggatgatgtttgcacgttatatgctgaggattgtatgaagttaagattatgtgctagtgaggaccaattgaagaaccaactatctgtaaagatgtctaaaggaaactgccctgcacttgccgcacttgatgaactcatctcttctgcaaagggtttatacactgggattgaggaaattaatttgctaaaagaaattgttgataaggctcgtaacttgaatgcctacttgatgcaaattctggatgattcagactgttatcatggagaagatcttactgtcatattcaaatctcttttagttgctctcaaggcgacatcagcttctggcttgtatgatgacaatgtcagttgcagaattgagtctgttttgagcagatatttgtggaagaaacaaatacataaactattgtatggtggtaaaaagtcatcgattcaagaagtactgtgccttgatgaagagcactttaaaactgctactcccctgcatctcttcaatcatccatcttgctcaaaaactgctacaatgtccgcggccgtttcgaggagacgtgccaagaacccatgccaagattttccctacgttgaaacagaagagtggctggcgtgggcccatgttcgcatggacctattatcaatgattctcagaggcgtatcatcaagaacctgggttactccactgatgcagcaaggattgaccaaagagcacaagacatacagtgagctgttcaagacgactatcaatgatgttcatctttctgctctagcggcgatttttggctggaggacagataaaatggatgatccttgtgcctctggtgcattggtgggtcattga

SEQ ID NO: 35024 - DNA, 1545 bp, Zea mays
  Peptide Sequence Number=SeqID_78399
atgggcaaaggggcccctcctgccgttgccacagccacctccgtccctgaggcgccggtcttccaccccacagacgaggagttcgccgaccccctcgcctacgtcgcccgtatccgccccctcgccgagccctacggcatctgccgcatcgtcccgccgtcctcatggtccccgccttacgccctcgacttcaaggctctctccttccccaccaagaggcagcccatccaccgcctcctcgcccgccccgcccccgctgaccccgacaccttcctcctcgactatcgccgtttcctcggggcttcctccgcacatcgccgtggccgcaggaagggccttcccaagtcgccctctctctcggatggtcgcccgctcgacctctgccgcctgttccatgctgtcaagcgcttcggcggttactacggtgcctgtgaggggaagcgctggggcgacgtcgtccgcctcgttgatgataaggcgccaatgcacatatcagagtgcgccaagcacgacgaagagagcaacatatctgttactggggagatggttgaggaggttacaggccggaaaaggagaaatttctcacgcaaggaattaggcagagggacatctcatggtcgttatggccgtgttgttaacatcactggaaataatgtggcatctgctgttgcccagaagcggacgaggaggaactctgatgctgtggttaccacagtcgatgaggtgtctgctggtgtccggaagcggaaaaggagaaagtctgatgccgcgtctaccgtgtttaatgatgaagtggatcaagtttgtgagcagtgtagtagtgggttacatggggatgtcatgctcctatgcgatcgctgtgataaaggctggcatttgtactgtttgtcgccgccgctcgagcgagtgcctccagggaattggtattgctcagattgcctcaactccgatagagattgttttgggtttatccaaaggaggaagtcctgcttgcttgagactttccggcggtttgacgacagggtgagaaagagatggtttgggcagaggaatcccagccgtattcaaattgagaagcagttctgggagattgtggaggggaaggcaggggaacttgaggttatgtatgggagtgacttggacacttcaatttatgggagcgggtttcctcgtcttggtgatacagtgccatcatctatggacctagagacgtggcagaaatactgttcaagcccgtggaatttgaacaattttccgaatctgcctggctcagttcttaggacagtcaaggataaaattcctggggtgagccaaaatgttgggtatggggtgcctggagcaaaagcaaatgcctttgagcagagggtggtggagctcgacacaatcacggagaacagggttcatgacctgatcgaaggccacaaacgtgccttgaagaagctgatcgttgtgaagggaggcacacacatgggcggtgaccggaacctcgccaccggagaagggggcgacaccggtcgaggtaggagatttaggagatttggctag

SEQ ID NO: 35025 - DNA, 411 bp, Zea mays
  Peptide Sequence Number=SeqID_78400
atggggggtagaggagaggatttcggatgcatgaagtccattaatggggaaacgaaacggcgcggcggctcggtggcttggtcgggcgcggtcgcgacggctgcagttgggcgtcggctcgcgggactgcgcagggcgaagtcggtgcagggcgccgggtcgtcgcgccgggtggccggtcggcatggggctcgctcggcggagtcgcgggctggtgcagagcgcctgggcgtggcggctgcaagcgcggggaagccaggctcggccggttgcgcgcgggcgtgcttgggcgctgcgggacgccggtcgggacaggggcagcctctggccggggcaactcagtgcagggtcgtgaggggccggtcgcgtggggccgcgggagctcctagcacgcggcgctcggacagatag

SEQ ID NO: 35026 - DNA, 1095 bp, Zea mays
  Peptide Sequence Number=SeqID_78401
atggggacgtattcttgtctaaggtacctcacccaaggggccaccaccatcgtctttagaaaccttagcgggttgcttcgtattaagatggttcgcactctccaaactacccgcatcaacaccagctacgcccctcagccccagcagatcccggtctacccagtggtagtcgaggaagttccgacggatctccctcccatccgagtggagaatgtagtcatcctggaggacagctcggaggaacagctgccgacccccaccccgttgccagagtccctggccttcgcagctgggtcatcaacgtcagcaccgtctgcaccagccttccaagcacctgcacccggaggcgacaaccccgacgactccggagacgacgatgacaaggatgatgacgacgacgaaggtggagacgaacacgtccacgaggaagctgactacgcccagcaggacaacttcatggggttcggtcctgttgtcgaacattacacatcaatgttcgaaacggggcacttccccaacctgctgcaagaagtgctgcatgcgctaggcacctacgtccgccccctgtacgaaacaaggcgagtgagcgagcctctccgggcttgctattacatcactcgcatccacgtcagggtgatggatgcaggtgacaggggattcaggactctgtctgctcatgagtccctgacaccactgtccacctacgctgcctcggtcagcgatgctgcccgttggaccctgtggtcgctcagccacacctaccagcagcagttgcagaacacaaggttcaggcatcttcctcagcgtctgcgtggaggaagccagaccagcatcgtcccaggtgaagctggtgaggatcgcctcaacaccctagcgggtgtagtggccgacctcaacaccgacctggacagtgccaccctggatctctctagggtgcacttggagctggagaatgcccatgccaggattgcagccctggaagcccaactgcaaggactggatccgcccgaagcccaggtccccgccatggcgttgtctcctccccgcaagaggctgcgctatggagagcccggatccgtcactaggctgctttag

SEQ ID NO: 35027 - DNA, 771 bp, Zea mays
  Peptide Sequence Number=SeqID_78402
atgggagcctcccatcgtcgttccagaggtaaaaccaccggcgctgccaccccttgtttgaagacacaaggatggcggggatgtactattgtgcacgcgcctgcctcaactggaggatgcagccaccggcccgcaccgccatgcggactctcttttcccctgtcgtcaaggaaaaaggctccgcggagaagagatgggtccacagatcccagtggggtcaatccccaaaaacccttcgcaaaccgccgtgaagatggctgcttgcgcgatagagttggggttgagattgtgcagctccaccccctagaaatgcagaatcgcccgcatgaaacggcttgccggcactccgaacccccgctcatggaaagagacgaaactcagcacgtaccccgacgacagggacggggaggctccgctcggagggaccatccactccggctgcgggtcaccgaagaggggacgaagcaagccatcggcaacaagggcctccaggtcgtccgccgtgacggtggagaaaggccatgggtcgcgaggtggaacgacgggaccgggaaaggggatactccgaaagggatccttctccacgaaggaagcgggccccaagccctcctactgatcaaaggttcgaaggctggtccctcggaagggttcgacagccgcctcagagcactcgggctccgagccctcctactgatcagaggttcgaaggctggcccctcggaagggttcgacggccgcctcaggccactcgggctccgcgcccactactga

SEQ ID NO: 35028 - DNA, 315 bp, Zea mays
  Peptide Sequence Number=SeqID_78403
atgatctccggggtgcagaagccttctcagagcactattctatcactcagagggatactgccgaggcagccatgcaagatgcagcacaacgagcactttcctagtattgctcgttgttcagcgggtgctggaggtgtgattgtcttgccagttgctgagggcaatctcaagctgagcagcatggtcaacttggtcgtcgtgctcaacacagagttggaccacacccttgacgagttgggcaaggttcgggcggaggtggcggaattgcatgctgaatgcgcggcacgccactatcttggtggtggttctccctga

SEQ ID NO: 35029 - DNA, 435 bp, Zea mays
  Peptide Sequence Number=SeqID_78404
atgctggtagactacacaacgatactcgatagaccaagtgtgtcggtcaaaggcccgacgcaacaaggtatcgagagcgtcgtggaagcgacacccgcgagtggcgtcacgagtgatgggtctagcgatctatctctccggctccggctcctccgagagctccgtgtcgtggctcgaactgccaccggcgtcgtcgttgtctccgtctctgtcagggggaaggaggcctctcaaactccacctctcactgagatgagggggaagagtccagttgctcctggtcctgctcctagcgtcggcgctcctgctcctcgtgcaggcgacgatgcagtctctccagctggctggactggcctgacaccgtacgacgcaggggacgctccgccagtcgagaaggcaaaaaggggatcacagacttacatgcagtgcacctga

SEQ ID NO: 35030 - DNA, 285 bp, Zea mays
  Peptide Sequence Number=SeqID_78405
atggcggggaaggccacgaatccacgggcagagaggggagaatggcggtgcgaagacctcgagcgggccggagcaactccgaaagaaattttataccccaaaatcagggtgttacacgagccaataacaaaagtggagttcgaatttgagcgaacaaaggtgaccaaagagggcgtcaaggaacttatactgagggagatactggagaatcacatgaatggaactgagaaaacaaactttatatatcctaggtatatgtttgctagtgataaaaatggagcttaa

SEQ ID NO: 35031 - DNA, 195 bp, Zea mays
  Peptide Sequence Number=SeqID_78406
atgagcatgtgcaccttggtgcggctcaggttcgttgtgcccactggccccaactcctgcaacatccaccgcgtgccgacgtttgagagggagataggactccacaacggcacggtgatggcgatggtgtttaagaaggagaagggagatatgactcctgcccgcgatagggggcggcagcagtggatccgcggg

SEQ ID NO: 35032 - DNA, 603 bp, Zea mays
  Peptide Sequence Number=SeqID_78407
atgaataatatgaaccaactaccgaatataaagcgcttgacaagaacacacaagaacacgcgatataacccgaggttcggcaaccaccacaaaggtgtcctactcctcgttgaggaacccacaaagggccgggtcttttccaccctaatcctccacaagccgaccaaaaaggtcaaggcaatctcttctcaaatcagctcaaagagcgggttggtcagccaagaattcgtgggagaggcagaagtaaatgagagagagagtgtgagggggtatataaaggatcccccaaaagctggcagccgttgggagaaaaggagcaaaaaccggttgaaccggttttcagaccggttgaaccggtttctaccagggggatcccggtccactgagctactcagccggagactcgaccggtttcaaaaccggctgagtagggaaaaaattcggctcaaccggtttctgaaaaatatctgctgcgacttttctgacagctctgactgtcagacagatcagagcagaggtggcagaatttctgtgtacatgctaggagcaaacttgttagaatctcagtttgttttgtcattaatcaccaaaaccctcaattag

SEQ ID NO: 35033 - DNA, 66 bp, Zea mays
  Peptide Sequence Number=SeqID_78408
atgaacatctgtgaagagcaggtgtacccggaggaggactactacgatgagttcgacgaggtctaa

SEQ ID NO: 35034 - DNA, 204 bp, Zea mays
  Peptide Sequence Number=SeqID_78409
atggagcccccagcccccacgtgcgtgtgcgttcttgcccctggccgcggctccccggcacctgcgccgaagcccagcaccgagcctcgaccaggccagtcccacccgtccccttgcgtcgttgcgtttgaagaatggagtggaggcacatggaaggttgaagagagaacaaccaataaagcagtatgcgacttccagatgtag

SEQ ID NO: 35035 - DNA, 204 bp, Zea mays
  Peptide Sequence Number=SeqID_78410
atggagcccccagcccccacgtgcgtgtgcgttcttgcccctggccgcggctccccgacacctgcgccgaagcccagcaccgagccccgaccaggccagtcccacccgtccccttgcgtcgttgcgtttgaagaatggagtggaggcacatggaaggttgaagagagaacaaccaataaagcagtatgcgacttccagatgtag

SEQ ID NO: 35036 - DNA, 372 bp, Zea mays
  Peptide Sequence Number=SeqID_78411
atgaagatcatacttaatatcattagatgcctccaacagcagcaagcagacaatcaagttactgcatactcagatggccaagtcaaggtctacgagctcttggattcattggaattagacaagtggcagcttcaggcagagttccaaaacattactgatccaatctctagatttggaaaacctgcatgcacttctgcatccatagcatggaatccaagaagaggtggaagccaacaagctagttttgcaattggctttaattcagattcgcctcatttcaactcttgtaagcaagattttaatacactgaagatgaacagatttgggagtttgaagaagctcatcagcgctggcttccacttgttgagctag

SEQ ID NO: 35037 - DNA, 174 bp, Zea mays
  Peptide Sequence Number=SeqID_78412
atggcgttgtggggacgagaaattacggcaggatctgcaagccaacgaaaattcacgagcgactcagtgaacggaatggagcgtgactgtgagagcgggatgggaacggagcggctccgtccggttgattttttagagcggattggttccggatctgaggagaatattctctaa

SEQ ID NO: 35038 - DNA, 669 bp, Zea mays
  Peptide Sequence Number=SeqID_78413
atgacaagccagagccacccggcgcaggagcaggggctgctcccggtggaggaggcccacgacataagagtagcaaccagtgaactgtccgacacaatgggcctgctgagggagggtgcagcagccggcccagttggcgcggcttgtgcgatagaaggcgcagcgtcggcccagcttggccatagaggtgaacagagtggggctaaggtcggtgctgaatcagccgagccttgcagcgctgctgccgctgggccacagggtgtgaccgcaccggagtgcctggtgcacgtggcagcacagtggtggtgccaaaagaacctgcaggggcaacacataatggcgggaaccgatacagggttggaacaatcatccaaaaaaatcaaacgcagccctggtggggcgagtgggatcctcaaaggggaaagaggactcctcaaagaccacatggcacaacatgatgattcggtttgtctgacgatcaaggcaaagctttaccattctggacagaggtgtaggggcaagacatgtggagatgaataccatgtgacaggaagaacaggcgctgaagttatcgaactcgcagccattatcgtactgaactacctgaatggcgacatcaaactgtgtgtgaacataagaaaagaagttgtgaaagggcctctagcgtaa

SEQ ID NO: 35039 - DNA, 645 bp, Zea mays
  Peptide Sequence Number=SeqID_78414
atgaccaatgtatatggcgtgacggtagcgataggaggtgccatgatgtttgtgacatgcatttttaaaacactagtaaaaattgttcgtccaagaccaaaagacagcgacgatcacatgccagcccacggaaagggatcctatcaggactccgtcaagcacgacgtcgcttgcaaccgcaagctcatcgacgccaggttcttcaatagggatatgtggctcatcaacccggccgtggacgtgcccctcgctgatgacgccaagtcccttttccacaagctcgtcacgcttggtcacctccacactgctatccacagtgtctctatcgtatgctccaccgacaactccggatcctacgatgacaccgtctttgacgctgcgccatgggtcaccaccatcgccgccaccaccatcgacagggacttccctaatatcctcaccctcggcaacgacgtgcgccttaggaggataagcctcgagtctaccacactgcactctagtgcgttctacccgatggtcgacactgccagggccagcccttgggggtgcagccggtgccaccgcaccgggccccacaaagctagtgggcccccacccatcaaaagtattctacggactcttaaccctgcagcctatagagattag

SEQ ID NO: 35040 - DNA, 339 bp, Zea mays
  Peptide Sequence Number=SeqID_78415
atggcctcggcagcttggctccggagttggtcccactcgctggtgatctggccaagctccagctgtcgctgctgcatctcctcggccagggaagccacctactcccaagccgatgaagccttcgtccgtgccgacgccgcctctatccgcgccgccgcttccaccgacttcagctcctcacaaagcagccgaaggtccgccgcctcggcgttctgttgggcgagacgctcattggcctcgaattctgaaattcagaccttgagccaaagatcagggatgttcaccttgatccctaactcgaatcctaatggccccattaacaaaaatgtgcctaactaa

SEQ ID NO: 35041 - DNA, 750 bp, Zea mays
  Peptide Sequence Number=SeqID_78416
atggcatgggatcgagaaaggagacatttcgaaggagtccttctcggcaaaggaaacgggccccgagccctcctactcatcaggggttcgaaggatgacgacactattcaccccgttcagaccactgtgccaaccatcagggtaagactgacaacaggtgaacgacagggatcgaggcaaacgacttcgacgttctcccatggccacccgagcggcaccgcccacgaccacgatggggaactcaccagagacgaaggaagcaggggttctaggggtcctagggtggttgaggtggtctacggagggtggggagggttcgacgaatttagtggtgaggcccaaaccgtggtgggagcactagaggggcagggaaagttccttacctcaaggcgagactcaggatcacctcagctcggaggaggcaacgtcatggtggcggcttggaacgacgacagcggctttgggactgcaccagggaagaggttaagcaaggatagggcggagaggccaggaaaagggaaaactgaggcgggttctcgtggcaaagggtggggaaaacagacagagagagtgcaaatgagaagtggagggggcgctggaggtccagggtcttcacttgaagctcagacgaggcgcgtgggacggggtcgtggggtgcgagcagcggtttatccgctcggaacacacgacgtgggtgcggacacgatagagcgggtggttgtggggagcgggacaggggctgacgggtga

SEQ ID NO: 35042 - DNA, 546 bp, Zea mays
  Peptide Sequence Number=SeqID_78417
atggaaggaaaaccaccgcgagaaaggaagtcagaactgaaacgagagtctcctccactggcgggggtgggtgaattcatctgcggaagggaatcaaaggcggggatgctcgtcggcggcgcggagtccggcctggtcacggcgagagagagcaattggatgggtcagagagctccacgggttgccagagaagatgtgggcgcaaggaattggtcggagactcactggatagctcggtccacgcgtggcggcggaagaccgaagttcggtgaggtcgatctcgggcctccggtgaaatctggctgggtccgagggcttggcgagcttcacgggctactggcggagctagccgaagcactggctcgacttgggggtggctggagtgggctggccacggtggccgaagctctggcggcaatggcgggcggaattaagctcgcaggagctaaggagagggggctggccggtgaagagatatggagccaggaaatccggtctgtctccctgctcaaacccgaggcaaatccagggttttgtcgtgtctag

SEQ ID NO: 35043 - DNA, 167 bp, Zea mays
  Peptide Sequence Number=SeqID_78418
atggccggctcggccgccccctgcccctgcgcccctgccggatcggccgcccgacccccgcaagctcggctgctcggcaccggcttgaccgccctagcccccgtcactacttccccggttcggattgcgaaatccctgaccagctcagaccgcgagaacattaccag

SEQ ID NO: 35044 - DNA, 660 bp, Zea mays
  Peptide Sequence Number=SeqID_78419
atggcgttgacacaatatctgatagacttactagctatactgataattgacagtctccacaggagcagtgcaacctcaatccactattgcaacaacaaatatgatagcttctgctggtcattctatgtttctgtcatgtatatgtcgcggatgtgtggcattgcgaccctaacaaaggctatatccgatgctgcccgtccagcatgtatattggagacaaggaaaaccgcccctggtttacgtcgcattgataagtgggcagtactgattggtggtggaaagaaccacaggcttggtttatttgatatggctatgataaaagataatcatatttctgttgctggtggcattgcaaatgcaatgagatctgttgatcaattcctacagaaggaaaaactcaattcctgtcgaggtaggtacttctttactgacgcgcatgttgacaaggacaaacctatgtgtctaggtattgatatctctgtggtcgagacaaggacaattgaagaaatggaagatttgttgaagtacgctgctgagaacaaaacttcattaacccgtataatgttggacaatatggttgttcctcttgcaaatggagatgtagatgtttcaatgcttaaagatgctgttcagttgataaatgatagatttgagactgag

SEQ ID NO: 35045 - DNA, 648 bp, Zea mays
  Peptide Sequence Number=SeqID_78420
atgctcctccccctcctcagatcccacccgctcctccaccacgccgcgcgcctgtcctccccacgcacccgcctgctcctccgccgcgacgcaatcccgctcgcacgctccccgcctatccgcatggcggcctcgtccggctccggcgccagctcccctgcctcggcgccgccagctgccgtggtgcacaagtcaaagatcaaattttgccctgcttgtggaagtccaacgaaactggccatacctgatggcgatgagaagatgagggctgtttgttcttcttgtggaagagttcactatgaaaaccccaaaatggttgttggttgccttgttgagcatgataataaggttctcctttgcagaagaaagattgaaccagcttatggtctttggacacttcctgctggttatttagaggtgggggagtctactgctgaaggagcctctagagaaacattagaagaagcatgtgcagatgtagagatagtctcgccttttgctcagttggatattccactgattggccaatatactgaagatgtgaggtctggaagcatcaaatttcactattgcacgataaacaaaaggttaggagccagcccttcagatcttcggagtttcgatattgataaccatatagccgtgtga

SEQ ID NO: 35046 - DNA, 1398 bp, Zea mays
  Peptide Sequence Number=SeqID_78421
atggcttgggcggaccggccggacccgacggccacggacaggccctccgcaaggggcaaaggctactatgaaaaggccctcgccccgtccccctatgaggggcgagaacaagccattaaagccaaagagccggaggtccggctgcaggtggcactgacggtctcgtcggctgaggcaaccccctctgcagtgggaagcctcacctgtggcggccaccacctcagcaccgatgacaacggccacctgcgcaccaacgctgcaccggcgaatggcgaccgccttagcgcgcacaaggaggtcctcactcccgtcctcgccataggagcgaggacaagactatccaagaacgcggacaccgcccccgcagcgtacgacgtcttgtacgaccccccgttcgcctcctccgtaaggctggtgaacgcccttctcccccaaatgctggaggaagaagcaggtcgccagcccatgcggaaggcaggacaacaactcggcttgccctcctccccagcacggatgatgaacatccttgaagttgagggcagggaggaggccacgacctggctcgctcttccccaccacaaggttggcggtcatcattctagggatcgggaaaggggatatttcgaaaggatccttctcagcgaagaaaacgggccccgagccctcctactgatcaggggttcgaaggttgcgccctgcggggttcgacaaccgccccagagcactcgggatccgagccctttactgatcagggggtctaaggctggcccctcggaagggttcgatagccgccccagagcatgtagattcagggatgaccctgggtacgtccgttacatggccgaggctcgggatacgctcccgaggtaccctaagacatttttgagaccagcgggaatgatttgtaatggaatcccaccgaagggaggcaccgagccctcggaccctatcaaatgggtctgggtccagcaaatcacccgtagaaaggcgacgaaggggcatacaataaaagtcgagacggtccttgatcgtcctcacgctccgagcagaggctcggaggctgctctcgcactaggctacggccaaattgttgaccaaggtaacaacactgttcgccccgttccgactactgtgccaaccaccagggtaagactaacaacattaagtcacggcctcccccgagttcagcctcgggcacaacaaggagccccgcctcgcccgaccccaggcctcggcctcgggggaaggtccccgtctcgcccgacctcggcctcggcctcgggaggagtcaccgtctcgcccgacctcggcctcggcctcaggaggagtcaccgcctcgcccgacctcggcctaggaccgactacgctacaggagatacatcattgccctacccctag

SEQ ID NO: 35047 - DNA, 1614 bp, Zea mays
  Peptide Sequence Number=SeqID_78422
atgatcatcagcttgtttgggcgtccgtgtccctgcccgcagaagcaccgaaaggtgtcacctctgctcgccttcgccttcaccttcaccttcaccttcaaatgtgactcggcttggcgcaaggggaatgaactccaggagacaggagcagcaggctcggcggaccatcagagcgctgctggccaagaacggagcgctgtgcacaggtgtttggagatgcaggagcggaggcgcagatatagcgagaacgagaagtccgggttcatcagcctcgtgtcacggtacctcagtggggaggcggagcagatcgagtggagcaagatccagacccctacggatgaggtggtggtgccctacgataccgtcgcgtcgcctcccgaagatctcgaggagacgaagaagctgctggataagctcgttgtgctcaagcttaacggagggctcgggacgaccatgggctgcactgggcccaatggagctttcaatgtctatggtctagaagaatatggaatacttaagttgtatctttcaagtgctcatactgttgtcccttttcactatattgcggttccaataggtttagatctccttccattttttgaaaatgagtggattgatgagtggctgtctgtcattgaagtccgcaatgggttcacattccttgaccttattgtgattcaaattgagtccctgaacaagaagtatggatgcaatgtccctttacttctgatgaactctttcaacacccatgatgacacacagaagattgttgagaagtattccaactccaacatcgaaattcatactttcaatcagagccagtatcctcgcattgttaccgaggacttcttgccacttcccagcaaagggaaatctgggaaggatggctgcacagagatcctaaaccatctgatcaataaccagaacgagtactgcatggaggttactccaaagacgctggctgacgttaagggtggcactctcatctcttacgaaggaagagttcagcttttggagattgcccaagtacccgatgagcatgtgaatgaatttaaatcaatcgagaagtttaagatattcaacactaacaacttgtgggtgaaccttaaagctatcaagagactcgtagaggctgaggcacttaagatggaaattattccaaaccccaaggaagttgatggtgtgaaagtccttcaactcgaaaccgcagctggtgcagctattcggttcttcgacaaagcgattggaattaatgttccccgctcaaggtttctcccagtgaaggctacatctgatctgttgcttgtgcagtctgatctttacaccttggttgatggctttgtcatccgcaacccatccagagcgaatccagctaacccttcaattgagcttggacctgagttcaagaaggttgccaatttccttgctcggttcaagtccatccccagcatagttgagcttgacagcttgaaggtgtctggtgatgtctggtttggctctggaattacactcaagggcaaggtgacaattatcgccaagcctggagtgaagttggagattccagatggagacgtacttgagaacaaggtgcacgtagttcttcgctatgcataa

SEQ ID NO: 35048 - DNA, 423 bp, Zea mays
  Peptide Sequence Number=SeqID_78423
atggggacctcgtctgaggatttgatcgaggcggccgacggctcggaggttgatttggcgtccgcttcctctcgaccttctccctggcaacgtttgcccgggcgtgggccaggattccctggtaatgttgttggcgtaaatatgcctgcgtcatcagctcctacgacagctactcttgctcctgaggacacagggaagatgaccaagatcgctgctgctatcatgagtcttttgaccatgcatatagcaactaatctgtcactaagcaaataccaggatcactatgtacctatcgttagtggtcaactgtactatgctgctacgatctttcagagagttggattctctagggcatttgatgccactcatgtgtcaattcttcttattactgaagttgagaaggacatgcctcgtgcaggttga

SEQ ID NO: 35049 - DNA, 507 bp, Zea mays
  Peptide Sequence Number=SeqID_78424
atggctcgcgctgaggagggggcgactgcggagggaggagtgagagctagcgctagggttgctcgcgtgggtttgacgatcgggagggggcggggagatacggacggtgatctcgtctcctcttgtggggcgccggggagttctcccccaacagccgatctgcgcaccgggctgggggcgcaaagagcttcttcaccaacgacatcctcgtgggacaaggatctggccgccaggggggatgacggggatgacggggttgtgggctgccagattatcgtcgacctagggcgatgtcggggcgatgacgacaatttggaggtcgcgcgctgtcgacactgtcgaggccacacggcgaagggaaggagtcgtggtaggaagccctcgaccatggcaggatttgggcgccgcgaggagaggtctcgcgctgtcgagggctcgatttgggggccgcgaacatctgatctggagaaattaactactctatatgccactgctaacatgaattag

SEQ ID NO: 35050 - DNA, 273 bp, Zea mays
  Peptide Sequence Number=SeqID_78425
atgaagatcattttccccacccagactatccgatccagggtaattacaaaaagactctgcaaaccattcaagaaaatttgggcttatctggctcgggagatctgctcgtctgtcctgtggcacagcaagttcgacagccgcccaggtggctatgagatcgatggttttggttatgactatggtgctggttgtcagcattgcaaccactgctcaggcgaagatgaagctgtggaaggagatttccaggagttccaagactacgacgagttctag

SEQ ID NO: 35051 - DNA, 201 bp, Zea mays
  Peptide Sequence Number=SeqID_78426
atggcgtctggcctctatgttgagggcaagaagattgacaagcataagtgttttgtcctcactatcactcgaatcagaatcgtgatccctatgcctggcccgtttggcaaagctccagctcctgcttctttagctccagatcctgatcctcgtgaggagttgatcctcctgattctcctagagaatcaaaatcatttttaa

SEQ ID NO: 35052 - DNA, 621 bp, Zea mays
  Peptide Sequence Number=SeqID_78427
atggatcccttcaaaatccgtcaacgccgccacatcctcacaaaagaaacacaccccaggtcccctccccgccatgtcactgatccgcacatccggaccttctccattttctgccacccatcccacatccaacggcacaaagctctcatcacgcggatcgtgccacaatctgcacccaaagaccccgcctatatagcccagccgcacatgcctgcaatacccacctcagcactagtctcctcttcgcacgagcgcaacaccatccacccaccagttcgaagcggaggcgaccggcaacctgcggcggagatgtcaggcaggggcaagggcggcaaggggctcgggaagggcggcgcgaagcgtcaccggaaggtgctgcgcgacaacatccaggggatcacgaagccggcgatccggaggctggcgaggaggggtggcgtgaagcgcatctccgggctgatctacgaggagacccgcggcgtgctcaagatctttctcgagaatgtcatccgcgacgctgtgacctacacggagcacgcccgtcgcaaaaccgtcaccgctatggacgtcgtgtacgccctcaaacgccagggccgcactctctatggcttcggcggctag

SEQ ID NO: 35053 - DNA, 132 bp, Zea mays
  Peptide Sequence Number=SeqID_78428
atggatgatgggatttcagaagcattcctgcatcgagcaacggaacaagagaatcctgatggtgctagtggaactatcatatgctaccagtctactgctacccctgtactactggaacttggaaatccctag

SEQ ID NO: 35054 - DNA, 951 bp, Zea mays
  Peptide Sequence Number=SeqID_78429
atggcgccggctgatctcccaccaggctttaggttccatccaactgatgaggagcttgtgaactattacctcaagaggaaggtccatgggctcagcatcgagcttgacataatccctgaagtagacctctacaaatgtgagccttgggagctagcagagaaatcattcctgcctggtagagactccgagtggtacttctttgggccaagggataggaagtatccaaatggatgccgcacaaaccgcgcaacccaggcaggatactggaagtcaacaggcaaagatcggcaaatcagctaccagaacagatcaatcggcatgaagaagacactggtctactacaagggtcgagctcctcaggggctgaggaccagctgggtgatgcatgagtaccgcatcgaggaaagcgaatgcgagaacaccatggggattcagtattccccgaggagccccaaacagagaacggggatccacgggtacgaggatggggatgagtttgtccccgttaagctaaacggggcggagacagggaatggattttggggaacggggcagggacgggggctggtccctcggcccggccctgttgccctctctagttcggttgaaaccttcccaactgcttgcacaccctgcaagacaggcaaaccacgaaggttaggccttctggccaacactcccagcaccacacctaaaccaggctatgtagagctatcagtacgtccatgcttggatcttgtcgccttagctgtagtgacctatgttctcccactcctgattaaggatttgcagcacctcccaactgatattgttgacagaagcatcggggaacatgaaagtagctacaaagtgctagagcaacaacctggcatgcctctcaacctcaacctcggtagctcctggcagacagatatcgaagtggtgggagatccaactaaagggcacccctaa

SEQ ID NO: 35055 - DNA, 738 bp, Zea mays
  Peptide Sequence Number=SeqID_78430
atggcgccggtggggctcccgccgggcttccggttccacccgacggacgaggagctggtgaactactacctgaagcgcaagatccacgggctgaagatcgagctggacatcatccctgaggtcgacctctacaagtgcgagccatgggagctcgcagacaagtcgttcctgccgagccgtgaccctgagtggtacttcttcgggccacgggaccgcaagtaccccaacgggttccgcaccaaccgcgcgacgcgggcggggtactggaagtccacgggcaaggaccgccgcgtgctgcaccacggcggccgctccatcggcatgaagaagacgctcgtctactaccgcggccgcgcgccgcagggggtccgcaccgactgggtcatgcacgagtaccgcctcgacgacaaggacgccgaggacacgctgcccatccaggacacctatgcattatgccgggtcttcaagaagaacgccatctgcaccgaggtggacggcctgcaagcgcagtgcagcatggcgctgctggagggcgcctgccagcagctgctcaccagcggcagccaggagtaccagacctcgtcgccggatgtgcccgtcgcgtccacatccggtggagccgacgacgacgcggaaaaggatgagtcctggatgcagttcatatccgacgacgcgtggtgctccagcacggcggacggcgccgaggagagcacctcccgtgtggccctggccagctga

SEQ ID NO: 35056 - DNA, 471 bp, Zea mays
  Peptide Sequence Number=SeqID_78431
atggaacaaccccgaggcaagactcagtcgaagtctgcaggagacaggaacattcaatgcgcatacataccccacgcagagttgcaggtgaacaggagcaacaagaccgcggtcctatcaagattcaccgactacgatgacgcatgtgaccactgttcctgcacgctgcttgcccactaccattgggacacacaatacgacaagagcgcgggatggccctcgggcgcaaactctgcctcgcttgaagtcgacttcgggctcgggcaaaactctgcctcgcgcgagcccggcctcgatacatgctcctcgcgaatcctgcaggaggccactccttcaactgtgcaccgtgtcaaccactacgacatgggcaacctccttggcaggggggctcgagtacgtgaccgaaccctcggccctggcctcggctctcagcagaaatcgagcgggcacaagtcaacagcaagtacatga

SEQ ID NO: 35057 - DNA, 783 bp, Zea mays
  Peptide Sequence Number=SeqID_78432
atgtatgagacgggtgaacaagaagaaaccaggatgttgccgcctgctggcttcctcggcgagcttgagcatgttgaagatacaaaaagcttctgggcggcttctggccgccagaagctgaagctgaaaccaaacgcccagattctcgcgcggcttctgggcgaagcgcttggcagtgacacctccgccctgactccgtcgcgaaggttccgcctcgaagcgaacggagcgccgtcggtccgcaccgaacgcatcgccgccggtgtacgcagactttcgtatcaagtcgaggtcaaggtgttcggatccaagttcaactgggattctagggttttttccatagattgccaacctgagtatctttatgattgtagttgcaaccctaattttgtagagtatctcaatggatcagactccatagccgacaaggcaattggaaggatgcaagagattgcggacaagatattttccgtagctcgtgaaacaatccgtccaggacgcgggttgtcctcatttgaggctaccaaattacgtgtagcattggaggacattgcttgcatgcttgagcaagactctctggtgttgcaagagaatttggacaacgtgaacaacgttgtaaacaaccctgctgacagcagctatgaaccgtcagctgtgtcctcaccacccccagctgacgagtttcttagtccggattgggactttgctgaccactttgcaaacttctggggtcttgaatatgactcagaccagatgccatcattcagtgacaatgaagtttaa

SEQ ID NO: 35058 - DNA, 1968 bp, Zea mays
  Peptide Sequence Number=SeqID_78433
atggtgcgcctcaaagcgctggaagctatccaagaatttgccagagaaactgatcaagacagggaagctgtgtcgcaaggggacaccattcgcacgatcatcaagttcatagattgtgaggactgtcaagagagggaactggcagtctctgcgttgtgcgacctttccaagtctgagctagtatgtggaaaggtgtgtggaagcaaagctgacaacccaacaatagctgagaaggctgagaagacacttgagaatttggacaggtgtgagaaaaatgccgtgcagatggctgaaaatggcaggctggaacctctacttaacctgcttattgaaggttctccagaaacgcagctgctgatggcatcctctctagaaaagattgtcttgtctaacgacttgaagatcttggttgcgcgaagagtgggttccttgtttggtggcatcgttgagaagggaagcttggaagcaaaagaggttgctttcaaggtgctagagcacgtatccgccaacgcagacagcgccaaggttcttatagaggaaaacgtcctcctccctctcttccgagttctctctatcaaccgcaccagcctccttccaccgaggctgcaagaggctgcggctgcggttctagccaatctggttgcgtccggtgtcgacttcgggacagtgccccttgacggagaccgtactctggtgtccgaagacatagttcacagcctgcttctcctgatcagcaacacctcgcctccaatccagtgcaagctccttgaatttttcggcaccctgagcagttccacggggacagtgctatcgatcgtctcggctataaaatcttccggcgctatcaccaacctggtgcagtttgtcgagagcgatcaccaggaaagccgcaccgcatccataaagctgatacacaaaatctcgttccacatggagtacgagatcgcccaagtcttccgtgcaagtccgacgctgcttggctgcctagtcaaagttgcattcgtaaacgatggaaacgccgcagcagatgagcaagatgctgcgcttcagatcctggcgaacctccccaaaagggacaagcacctcaccagagagctgatggagcaaggggctttcaaggtagccgccagcaaggttctgagcatctaccggagagatgctggaactggaagcgacatctacgacaacgcagtgctcgagggccttgcaaaggtcttggcaaggataacgtatgccttgcgggacgagccccggtgtgtttcccttgctcgagagtacaacctcgctgccctgttcgccagcttgcttcggctgaacgggcttgacgaggtacaggtggtctctgcgaaggcattgatgaatctctcgttggaatctaagtatctgaccagtacgccgaagtttgatgctgaacagaggtctaagctcgcactgtttgggaggaaaccgacaaacattcagctctgtcgtgttcattctggagtctgttcgatcagggacaacttctgcatcctagaagggagagctgtggaacgactgatccattgcttgaaccattctaacaagaaggtcgtcgaggctgctctggctgctatttgcaccctgcttgaagatggagtggaggctgcagagggcgtcttggtgctccataggtctaatggagttgcacctatattcgacatcttgaaggagaacccgacaggcagtcttcagcacagggtgacgtgggctgtggagaggattctaagggcagaggatatcgcccaagccgcttcaactgatcgcagtctgggatcggcacttgttcatgctttccaacatggagattccagaacgcgacgtatcgcagaggcagcgttgaagcatgtccagaagctacccgttttttcactcatcattgataagcgcccctcgatacgaggttcatccatgggaagcatggagcgctttatcaagtttgatcgctag

SEQ ID NO: 35059 - DNA, 351 bp, Zea mays
  Peptide Sequence Number=SeqID_78434
atgggaggaggaattccgtacctgcgtacaccggcggcgatgcgttcggtgcggaccgacggcgctccgttcgcttcgaggcggaaccttcgcgacggagtcagggcggaggttgcccatcagtgtgtacgcattggagacgtttgggtttacgacggcaacgtccacagacggttgatgagcaagatgctcgggcgcattggggattcaccattgatcaggttcggcacatacacatgcggcgcatgcgccgtgtcgtgcacgctcaagtgggacgtgaccactgtcatggagtacaagggcctacctctgcagcagaccgtcgactactatgttagggacacgatgtag

SEQ ID NO: 35060 - DNA, 846 bp, Zea mays
  Peptide Sequence Number=SeqID_78435
atgcgtctaggacaacgccaagctccatccaagcccttctcggccgtgctcgacttgctcggtgcctcgctggagcacgcactcatgtttgaggactccactgagacaaatgacctcattagtgctagcgagagccacctagagcacacaccacatgcattagacttctcttggtcaagtgaaagtctacggcttgttactcttggtgatcggcatcacctagatggctttggtggcgttgggagcaaggtgatcaccttggaggacttgttggtgtccgactcgagattccgtcaggtcatgatggtgcgcacgaagaatgtgtcaacaccagggggaggagacgatgaggactctccttgccccttcaggcagatcaagggcaagacagtttacctcgagcagcaggaaggccgcaagaagcgacatatggatagagtagcccgagaagctcttgcagcggcagcagcagtagagcagacagagcgaggtggacaattgcagatctcatcagatcagattgcctacaggggcaccctcgaggcctcacgcctccagtttggatcatatcgtctagcccctgaggacccagtgccagtaccagatccagtacccgatattcaggctgaggatgaggcattcagacaatttgagacccaaggcactactgataatgatgatgttgattttgggatcccgccaccgcctcttgtgcctccacgctcacatgatcacgaggcagggagttccagtgctgcccctgctgcccctcctgctattgatcctgctctggctgcgatactccattcccttactcagcagcaggctcatctggcagccaagtag

SEQ ID NO: 35061 - DNA, 487 bp, Zea mays
  Peptide Sequence Number=SeqID_78436
atgttgcagcttaacgagaataaacagtttgcatttttccaaagactggcatttccgctgcgtatctttttgctgattctggtgttctcaatatttgtcattgcagccctggcgcaatattttacggccagttttgaggactatttaacgcttcatgtacgcgacatggcaatgaatcaggcgaaaattattgcctccaatgacagtgtcatctctgcggtgaaaacgcgtgactacaaacggctggcgaccatcgctaacaaattacaaagagataccgattttgattatgtggtgattggggaccggcactcgatccgcctttaccatcctaatccggagaaaattggttatcctatgcagttcaccaaacagggcgcgctggagaaaggggagagctacttcattaccgggaaagggtcaatggggatggcgatgcgcgccaaaacgccaatctttgatgacgatggaaaagtcatcgggcgtg

SEQ ID NO: 35062 - DNA, 582 bp, Zea mays
  Peptide Sequence Number=SeqID_78437
atggcggaaatcgcccaattcctgcatgaaaatgatttgagcgttgacaccacagtcgaattcaaagaagattcttcacgcttcccctatgaaaactggctggatttggtgttaaaaggcaccgccgatattccacgcctgactgtgcatcgtggctccgaatacatcatctcccgcgctacgttcccttgctacttcattaaagaacagagcgtcattaaccattgttacaccgaaattgatctgaagattttccgtcagtacctcgctcccgcgctgggtgtaactcaccgctttgtcggtactgaacccttttgtcgcgttaccgcccagtacaaccaggatatgcgctactggctggaaacgccgactatctccgcaccgcccatcgaactggttgaaattgagcggctgcgttaccaggagatgccgatatccgcttcccgggtacgtcaactgctggcgaaaaacgatctcacggctatcgcgccgctggtccctgcagtcacgctgcattatttgcagaacctgcttgagcactcccgccaggacgcggcagctcgtcaaaagacccccgcatga

SEQ ID NO: 35063 - DNA, 273 bp, Zea mays
  Peptide Sequence Number=SeqID_78438
atggacgagagccttccggcggcagcgtccgtcctgggaccatcgctgctgctgcagaggtcgctggcgagtcgcctggagtttgtcgtcccgcaggctctccgatgtggaggttgttcatacccgcgggagtggaaccggagttccgtttgtaatggcaccttgagtgccggtggagatcctccgaccgtgtcgccgtccgaggccgggttggattccgccgaaggtggagtcgacgccgagggtgctgctgctccccctactgatgtctga

SEQ ID NO: 35064 - DNA, 504 bp, Zea mays
  Peptide Sequence Number=SeqID_78439
atgcaggcggcatgcaactgcaccaaggggacgcaccctttcgacttcgacacgtccagcatggggcccaggcccacacgtcatgtaaccggcgcgccagttactacgtgcgagaaactgcaccgccacttgcgccagtaccgcgccttctcgactgcggaaccagtgccgcgactcgaggcaaccctgcgcatggcccaacagtgccaactgagcacatcggtcacgggtcagtccgccgcgggagaaggcgcgacggtcgatatggccaaaagtggggaccgagaaaggggatactccgaaagggatccttctccacgaaggaagcgggccccgagcccacctactgataagaggttcgaaggctggcccctcgaaagggttcgacagccacctcagagcactcgggctccgcgcccactactggtcagaggttcgaaggctggcccctcagaagggttcgacagccgcctcaggccactcgggctccgcgcctactactga

SEQ ID NO: 35065 - DNA, 2199 bp, Zea mays
  Peptide Sequence Number=SeqID_78440
atggacttcaacgacaaacctagttctaactttgacgaggatttccaaagcaacatgtcggctacttctgggttctattcctttatccatccagccaatgagtcaaatgaattggagttattcttggaccaaccaagatctgcgcatcattatcctcctgtatcaaacgcttctaacgacagtggccacatcacatcgactacctcctgttcgactgaaatatgtggtcctcagttctgcgatctcagcagcaatgcgacaccagattggtacggaaccagcgtgacagactcttctaacaacagctggatcaactcggatataaccatcagctacttaaacaagctgttgaccgacgaggacagtgatgacaaggtaaaaccacatcatggagagtgtgcccttagagccatggaagagcctttctacagaattcttgcacaaaacaatccagcttatcccgagtcgccatcactctgtagccgcggccatctgaataacctcggtgacaacatcaacaagtctttgggtcagccatgcagtagctgctcagttgctattgactggagtaacagtcactctaatcacatcttgcaagcttttgaagctccatggagtttgtctgacgtagtcaaggagacaagccgttccgctgaatgtacacgaaacatggagcttggtgtgagaattgatggcctctcaatcgccgaaaagcgtagccgagataatcagtcgctccaggtaaatgttgcggatgcgagcaagcatacatcatctgagcttcccagtggaaactactcacgtcaggaagattcttatttgatagaagcgaggagcagcaagcaggttgccttttcgttcaatgggccaatccgagatgagatgtttgacagggttctactcttctctgagcataaacctacgtatgaagctattgttctgcaagaaatgatggcaaacaaatcgaccgggcatccacagaatgaacaaggaagaacaccagctcggcggaagatgcgaggtaagaagcagcagaagaaagaggtggtggatctaagaaccattcttatccactgtgcgcaagcagtatcggtgaataaccataccttggcaaatgacatgctgaacataataaggcagcattcctcaataactggggatgatacccaaaggttagcgttttgtctagtgaactgccttgaggcgcgattagctggaaccgggagtcagctgtatcgcaacttgatcgctacatgcagcgatgttgcggccattttaaaggtattccagttgtctttggcggtaattcctttgctgagggtatcacattatttctcaaacaagacaatcctcgatgtcttgaagggaaaatctaaggtgcacatcgtcgattttggcatttgctttggttttcaatggccatcactgttggagcaactcgcaaagagggaaggtgggcctcccaaggttcggatcacaggtattgacctaccaaagcaaggatttcgaccagatcggatgaataagcagaacacgggacaacgattagctgattatgccagcatgttcaatgtgccttttgaatatcaagcaatatcatcgaagtgggaaaccatacgtatagaagatctcaacatcgacgaagatgatgtgctgatagtcaactgcatagaccggatgaagaatctgggcgatgagacagtatccataaacagcgcaaggaatagggttctcaatacaatcagaatgatgaagccaaaagtttttgtgcatggcatagtgaatggatcattcggtacacccttctttttaacacgttttaaagaagtcatgtaccactactctgcgttctttgatatccttgataaaactgttccacgagacaatgagacaagaatgctcatagagaggggcatctttctgtgccaactgctcaatgtcatcgcatgtgaaggatccgaaaggatcgagaggccggagaattataagaaatggaagtcacgaaacctgaatgctggccttgagcagctccaactgaacccagacattgtgaaagtaacaagagatatgatgggaaaataccacaaagattatgttatcaacgaagacgatcactggctactaatgggatggaagggaaggatactgaatgcaatatctacatggaaacctagtgagtcatatgatggtgactactga

SEQ ID NO: 35066 - DNA, 717 bp, Zea mays
  Peptide Sequence Number=SeqID_78441
atgcgcctaggggtcccttctatagccccaaggcagctaggagccgttgagagcaaatttagaaggccatccttgccttctgtcgtctggcgcaccggacagtccggtgcacaccggacactgtccggtgccagatttctttccttaaatggcgaagccgaccgttggcagatttggagccgttggcgcaccggacatgtccggtgcacaccggacagtccggtgcccccttctagccgttggcttggccacgtgtcccacgcagatcgcgcggccgaccgttggctcggccgaccgatggctcaccggacagtccggtgcacaccggacagtccggttggcgtgttgcggggaaacgacgctcgtcttcgtctcggacgtgaggtcaacgcccgacgtgtcccccgctggggcgccagcgccgtcgactcgcttgacagccgacgaggtgccgcctcctgcttggccatggctgccccgcctcttcctctgttggcggggaaggtgacgggacagacccggatgttgctcttccgccacgtggggaagacgtcgtcgattctgccaccgacgggcgggctgacggccgccattgtcgttgtcgcgcggcagaggaaggagtatcatgtcgtagctgccgtcgagggacatgaactcaagactcccgaaatggagcagcgtcccgagctggaaaggttgctggagcttgacgggtag

SEQ ID NO: 35067 - DNA, 822 bp, Zea mays
  Peptide Sequence Number=SeqID_78442
atgtcgtcttcctcgcgtttccggcgacggctccctcgggagtccctccctctcctgccgacgacggagcttttccaaggcgtcccgagcccgcatccgctcgcgggcccgggccttctccgcgtccttctttttcttctcctccgcggcaacgcgtcgtgctgctcggtccaccgcattctgcgggacccgtggcagggaaggcttgtgccaccctacctcctgaagacggatggaaatcccgaccataagaaccaggggcaacctgatgcaagaggaaggaaggagcggacactcaccagagtcacgcacccttggtcagggcgcatcaaaggctgggagaaggcggtggggtccgatttccccaacgcgacggccacccgcccgtggagaacatcgaagggaacaggatccgaggacatccgcgagccctccaagtcagcatccggcatcatctcccagagcggcaaccgtcgctccgccaagggaagcaccctccggcggtggatggcggcaatcactcccgcggcgggaccgggaaagggggataccccgaaaaggatccttccccgtgaaggatccaggctccgagcctccctactgatcagaggttcgaaggctggcccctcggaagggctcgacagccgcctcagatcgcgtgggctctacacccactgctggtcagaggttcgaaggctggccccttggaagggttcaacgaccgcctcaggctactcgggctccgcgcccactactgatcaggggttcgaaggctggcccccgaagggttcacagccgcctcagacacagagcaagggatga

SEQ ID NO: 35068 - DNA, 2766 bp, Zea mays
  Peptide Sequence Number=SeqID_78443
atggcgaagacgaagcccatggcggcggcgggcgagaagaagaagagcaaaggaaagaagaaaggcaagaatggcccggccaaggtggccatgaaggctcgtggcgcggcggcggaggagcggaacaacccgttcgaggccatctggtcgcgccgcaagttcgacgtgctcggcaagaagcgcaagggcgaggagcggcgcgtatcgcgctcacgttccgaggccatccgcaagagggagaacacgctgctcaaggagttcgttgagagcgccaagtcgtccgtgttccacgaccggcgtatcggcgagagggacgacacactgcccgagttcgacaaggccatccttcgccagcaacgcgagcgcttggccaagttgaaacgagaaagcaagtacaatctatcagatgatgatgaagacgaaatcaatattcataatgtgctgctatcggaaaatgatgattttgatgaggaagtgcctctcgatgatgggagcgacgaggaaggtaaaatggtcctctcaaagaagcgtttatctctccaaagtgatgaccatccttcaataactgatctaccacaagaaacacacgggcagaagagcaagaaggaagttatgacggagatcatttcaaagagtaaattttataaggcccaaagagccaaggagagggaagaggatgaacatcttgtcgacaagttagacagtgattttgcatcattggcccagacacgggcgttattgtccttaactgagtcagctaaaggtcaagctttctatcaaaacattctgatagcatctgaagctgtcttctgtatattagcggcaaaggcagatacatatgaaaaactagtgaaagaaatggtgatggatcaacgtgctcggccttctgatagaactaaaactccagaggaaatagcacaagaagagaaagaacgtcttgagaagctggaggaggagcgccaaaaaagaatgcttggaactgctgatacgtctgatgaggacgatggcaacgaaaatgataaccacatgaagctaggaaactcaaaacctatatctggtgatgatcttggtgattccttctctttggatgagtcaacagtaaagaaaaagggctgggttgatgaaatttacgaaagggaaggtagaaagattggtgatgatgcagcagcatccgatgatggagaaagcgatgatgaaaatgctggtgatgatgaggctgatgatgaagattcggactccagtgacaatgactttggtaatatgtctgctagagattgggagcaaagtgatgatgatgaagttgatgtaggagacgatgaaatggaggatttcaaagagaaggggcaagagatcaatgacaaagtggtgaataaagatgcacacaatttgaaaggagaatctaatgtgaaacctcaagtaaaggatggcagtattccttttgttattgatgcaccaaatgacctgaaagatctatcttctttgttagatggtcgttcagaagccgaaataattgagattattagtcgaatacgtgcttgcaattcaataaggcttgcagctgaaaaccgaaggaaaatgcaagttttctatggtgttcttctgcagtactttgcagttttagctacccaaagtccagtgaagttcagaataattgacatacttgttaagcctttaattgagatgagtggagaaactccatattttgctgccatctgtgcaagagagcgacttattcatacacgtacccgtctatgcgaagacattaaggttccagggaagagcagctggccaaatttgaagacattacttctgctgagattatggtctcttatttttccctgctccgacttccgccatgttgttacaactccattgcttctacttatgtgcgaatatctgatgcggtgccctatacaatctggtcgagatgttgctgttggttctttcttgagttcaatggtgcttgtggttactaaagaatctaaaaagttctgccctgaagcaattggtttcctgcaatctcttttggtaacatcacttaaaggaaaagtggaaactcatctgcacaatcagattaacgatcaatttatggagctcaagactttaaaactgtggctcagtatccatgaccatgtgcatgaggtgaatccagtgaatatcctagaaatagttggcatggatcctgacgccccttatttctcatctgataactttaaggctggtgtacttttatctgtggcagaatgtttaagaggttttgttattatacatgaagggctatcttctttcccggaaatcttccttccaatatcctctttgctgcaagaaattttggatagatctgagttgcctggatcgttacaagacattttccatgaagtcattgacttgatcaaaaagagaagtgatgaacactatgcttcaagggagcccctccgaatgcggaagaagaagcccgaaccaattaagcaattgaatccaaaatttgaagagaactacatcaagggtcttgattatgatcctgatcgagaaagggcacaaatgaagaagctgcggaagcgtgtcaagagtgagatgaagggggcgaagcgtgagctgcaaaaggataattatttcctgtctgctgtgaaggagaaagagaggaggaagcgagatgaagagagagctgagatgtatggaaaagccatggcgttccttcaagaacaggaaagtgctttcaaatctggacagctggggaaaggaaagggtaggaaaaggatgcggtga

SEQ ID NO: 35069 - DNA, 411 bp, Zea mays
  Peptide Sequence Number=SeqID_78444
atgggcaagaacaacaagcgcaagcgtgaaccgactcctccatcggaggagtttggtgactcggaatactcggaggaggagttctcctccgagcccgaggggtctccggctcccgtctctcccccggcgtcgtctgatgactcggacgactcccaggggatagccgcggaggtctggacatacatccgagccgtcgagcgcgccgggctcgaaggctcggatgagtcggagtgctcctcggatgaggaggactcggacggcggcgacgagggtgaagacgacgacgacgacgacggcggcgacgacagtggcaggggcggcggcgacggcggcagggacagcaccaagggcgacagcagcaggggcagcaccaagggcggcggcggcggcaggggcagggccagtggctag

SEQ ID NO: 35070 - DNA, 474 bp, Zea mays
  Peptide Sequence Number=SeqID_78445
atgggcaggaggctgccagcggcggcggcgctgtgcggtagcgcccgggcggcggcgacgcgggtgaggaagaagcgggtgcagcggcgggcgccgccgtcgtcgtcctccaagctccctgcggcaccgcccagcggcggcggcaaggccgggagcgcaggaggaggcgcgtgctacgtcaacggcaacggcaacggcgagctgatggtggaggtcgtcgtcggcagcggaaagggcggcggcggtgggcggcgggtcatggtgctggccgacggccgcgccgaggccgccggcgcgctccagtgggcgctgtcgcaggccgtccggagcgacgacaccgtcgtcctcctcgccgtcgccaagccgccggtcgcccgagacgccgtcagtgattcctgtgtcaggatgctggggaccaagagccagcaacacctcgccgccctcaggaccgtctgtgaatcaacaaggccagag

SEQ ID NO: 35071 - DNA, 348 bp, Zea mays
  Peptide Sequence Number=SeqID_78446
atgggtaggcccctaaaccctagcgccgccaccccctcccccttcctccctcccgtcgccggagggctctaccggagtccagtggtcccaaggatggtggcggtgggcctttcttccttgattggtctcccagacgacgacggcgaccagaccccgcgagttgccgacgtgggtgccgaatggcatggcgaccacgtgtcggcggcaagggtcacgcacagtgacaatgactgtggcaacgggcatccggtgagcgacactgtgtcgcacatggcgaggcggtgcccggttccatgtgcccagtcagagggggtggcgggcgacgcagctatgcgactgttgcggtag

SEQ ID NO: 35072 - DNA, 222 bp, Zea mays
  Peptide Sequence Number=SeqID_78447
atgccgccgtggaagatctcgggcagcgcaatcgctcgctccgggcagttctcctcctgcttcgggatcgactggatgttcgccgtggagtgccgcgcccgccggggacggttacgattagactgggcgcttacctcttcgttggttgagtatgtaccgttgatctatgatctaacggttgtgatgcgcgcggggttaggcagccgagccaactttacataa

SEQ ID NO: 35073 - DNA, 909 bp, Zea mays
  Peptide Sequence Number=SeqID_78448
atgaccgtgtcaaaaaagggatcgagaaaggggatatttcgaaaagggacccttcccagcgaaggaaacgggtcccgagccctcctactgatcaggggttcgaaggttgcgccctgcgaggttcggcaaccaccccatagcactcgggctccgagccctttactgatcaggggttcgaaggctggcccctcggaagggttcgatagccgccccagagcacgcagagtcagggatgaccctgggtacgtctgttacatggccgaggctcggactacgctcccaaggtaccctaggacatttccgagaccagcgggaacggtttgtaatggaatcccaccggagggaggcatcgagccctcggaccctgtcgaatgggtccgggtccagcaaatcacctacagggtaaagctgagtcacgacctccctcgagttcagcctcgggcgcaacaaggagctccgcttcacccgacctcaggcctcggcctcagaagaaggtctccgcctcgcccgaccccaggcctcggcctcagcctcggcctcgggaggaggcacatcctcgcccgacctcagcctcggcctcaggagaagtatccgcctcgcccgacctcggcctcggaccgactacgctacaggggatacatcattaccctaccgctagctagccaccccttgctacgaaggaacaagaccggagtcacatcaaactactccgatagcagttcctcccttactccgtatttctttgtgaatctcaagtgtaaaggcgagaggctccaagttgtggagattcctcgcaaacgggatattgaaaggcaaagcaaaacaccgtggtattcaagctggtctttggaccgcttgagaggggttgattgcaaccctcgtccattgggacgccacaacgtggagtag

SEQ ID NO: 35074 - DNA, 240 bp, Zea mays
  Peptide Sequence Number=SeqID_78449
atgcccgcgcctgctctgccttctccactgtgtctcgcactcgtgacgctgcccctccccaacctgctccgccccgtccgcgtggacgtcgtccctcgtcgtccttgcctcgccgattccctgctccatcccaccgggcgtccctggggtccgcacccaagacgcctccccgttgtcctcacttcctctctccaacgcctgttgcctatctcactccacggcatggatctggaattgtga

SEQ ID NO: 35075 - DNA, 660 bp, Zea mays
  Peptide Sequence Number=SeqID_78450
atggcgaccagggcggcgtcgagattcctgcagcgcaggctcctgtcttccggcggcaaggtcctcagcgaggaggagaaggccgcggagaaagtgtacatcaaggtccagatttgtcccctatttctctcgcccttccttccttgctctgttcaggtagagccttcggttcctgatcgagacgcgattgtggtgttgagatggaggggcaaagatagctttgttttcaaaaacagaggggtaaaatcacaattaccaacgaagggtataatcacaattgtcccattttttaggttgccttatgctgatgaatgtggttatgtgtggtttaaatctagacatttaggtcacgccaatgagcttggcatgactcctccaactgccaagctgcttggtgtgacccaagagaaaatggaacaagagaagctggagaagctcgcacgcaagggccccagctcaggagagcaaccttcgtcgactacagtctctgcagcaagtgatgtgaagactggggctgggccaacagagtcagcgtctgcaaacgtgtctaccgacaagaacaggaactacgctgtcctggcaggcacaattgctgctctgagtggcctgggttggtatctattgtcaaagcctaagaagtcggaggaggttgtggactga

SEQ ID NO: 35076 - DNA, 462 bp, Zea mays
  Peptide Sequence Number=SeqID_78451
atgtacactttctccgcggccttctcctcctcgctgaggaccttgccgccggaagacaggagcctgcgctgcaggaatctcgacgccgccctggtcgccatagcagccgatcgagaaaccttggaaaacgatgacgccccgaagaaggataaggccccgccgccgtcgtccaagccggccaagtccggaggcgggaagcagaagaagaagaagtggagcaagggtaagcaaaaggagaaggtcaacaacgctgtgctcttcgaccaggccacctatgacaagttgctctccgaggtgcccaagtacaagcagatcaccccatccgtcctctccgagcgtctcaggagtgcccgctatggccgcagcggcgccccctgccagggcccctacgaggccgaagtaaacagcgctccgccacagccaccgtgctcctctaacactgttcacgtatttaatagttga

SEQ ID NO: 35077 - DNA, 1281 bp, Zea mays
  Peptide Sequence Number=SeqID_78452
atggcgaggtctcgtcgtcttggggacttgggacaggtcccgagcatggcctccaaagaattcctcctcgccttccttgttatcatcctccatggcgcagccgcaacgaccacggtccatgccgcaaacatcatcgaccggtgctggcgccggcagcccaactgggcggccaaccggcagcggctcgccgcgtgctcggtgggcttcgccgggaagatgcggcagaaccgcgggcccggggtcaccgcgtacacggtgaccgaccccggcgacgacccggtgcgcccgcggccgggcacgctgcggtacggcgcgacggtgctgggcgggaaggtctggatcaccttcgagaggggcatgcacatcaggctggcccagccgctgttcgtgaggagcttcacggccatcgacgggcgcggcgccgacgtgcacatcgccggcggcgcgggcatcgtgctgcacgaggtgagcggcgtcatcatccacgggctgcacatccacgacatccgctcgcagccggagggcccggcggtcaggcccggcggcgccgtgcggcctgctggcggtggcggtggcagcggcagcggcacggacggcgacgccatccgggtggtggcgagcagcaaggtgtggatcgaccacaactcgctgtcgcggtgcgaggacgggctggtggacgtgacggtcggctccaacgacgtgaccgtctcgaacaactggttcttcaaccacgacaaggtcatgctgctcggccacgacgacggccacgccgccgacagccggatgcgcgtcaccgtcgcgttcaaccggttcggacccaacgtcaaccagcgcatgccgaggattaggcacggctacgctcacgtcgtgaacaatgtgtacttgggatggagagattacgccatcggaggaagcatgggaccgagcgtcaagagcgagggcaacctgttcgtggcctccggcacagcggagaacaggaaggtgacgagaaggatgccgttcgccgggagggattgggattgggcctccgtcggggactccttcgagaacggcgctttcttcaagcagacgggcagcagggtgcagccgaattacaacaagcaccaggccttcgcggcggccagctccaaccaagtgaggtcgctgaccaaggacgccggcgctctcagctgctcggtcggtgttagaggagcacggtggctgtggcggagcgctgtttacttcggcctcgtaggggccctggcagggggcgccgctgcggccatagcgggcactctgtag

SEQ ID NO: 35078 - DNA, 312 bp, Zea mays
  Peptide Sequence Number=SeqID_78453
atggggaactgcctcaggctgcggcgcgcggcgacgtgggcggacggcgacgagtgggaggaggaggcggagccctgcagcaaggccaaggcggcgcccgcagccgtcgaggacaaggtggaggtcaagatccgggtgactcggcggcagctgcaggagctgcttgagaaggccagccggcggcaggtggaggaggtgctggcggagctgatgacttccggcacggtgtactacccgcgccagcgcgatgagattcggcggcactggaggcccgccctctacagcataccggagggcgtcgaggagtcgtga

SEQ ID NO: 35079 - DNA, 384 bp, Zea mays
  Peptide Sequence Number=SeqID_78454
atggccaccccctccctcagccatggcgggtgcactccctgcctgcttgcactcgccctcagctcccaggcatggagctcgcccaagctccgtctcccagcgctctccctcacagccgcgctctcctccacctgcagctcgcccccatctcctcctctccccatggcggctccccctgaatccctcccttatacttatcctggagatgataaggaggaatgtcttattggaacctggtttgggaaaaagagtattaaggaggataggctaataacagtttcacttgcaagcaagatggttgaatttgctaagtttcaggctgtccaggacactctaaaagattctgtcctctatatcttctgtgtctccagcaacgtcccctaa

SEQ ID NO: 35080 - DNA, 434 bp, Zea mays
  Peptide Sequence Number=SeqID_78455
cagacggcacttacttggatctcgcgcttgatctgttcgaagtcgtggaactggcggccggggacatggagaaattccccccattcctcaggggccgcgtggcgcacgagctcagggacgagggagggactggcgcaggaagggagaaccgaagacaagggagggcgagctcagctggcgctgctggcggccatgggagagggagcgcgcacagggagggattcagggggagccgccatggggagaggaggagatgggggcgagctgcaggtggaggagagcgcggctgtgagggagagcgctgggagacggagcttgggcgagctccatgcctgggagctgagggcgagtgcaagcaggcagggagtgcacccgccatggctgagggagggggtggccatgggagtagtgacggcggctgcggcgtggaatag

SEQ ID NO: 35081 - DNA, 342 bp, Zea mays
  Peptide Sequence Number=SeqID_78456
atggaagccagaactccaaacccgcagtcctcggaaggtagcaacctcatctcctcccgcgcccgcgtcatcaatggaaggaaaccaaatctcctcgcccgcagtcctcggaaggtccgcccattcacctccttccacgccgtcaatggaagccagatctccaaacccgcagtcctcgcaacgtcaatggaaggcacgccacaacaacccaagatcattcccggcgctctccatacatctactgctgccagagcgattcaccttcctgcccttgctctcgggcgtgtaaatcttcaggagaagcgcgtcagggcagtactagctcacgctttccggttttag

SEQ ID NO: 35082 - DNA, 378 bp, Zea mays
  Peptide Sequence Number=SeqID_78457
atggcggacgcgacggcgcgggcgtgggatagatgggcggggatcgcggtagtgtgggatctgctgatccctagaagggcatataaatcagtaacagattggagggggaaattggctaatatccaaaatcagaacaaccacttatatgttccttacctgggtctcttacctagcgacgagggagagcgcgtccaaatccggttccttgcggactaccagcgccaccagcaggaagataagaccaagcgattggcgtaccttgtgatactcctcgccgacgaagggcctaaagaagatctgggtatctggtgtatggcagcagcgactaaatctaccatagatgtagtaccgcaaagaatatcaaccgtgggaatataa

SEQ ID NO: 35083 - DNA, 297 bp, Zea mays
  Peptide Sequence Number=SeqID_78458
atggaggtggcgacgatgtttctccgagatccggtggaggcaacgacggtcctgctcccagatctggtggaggcggcaacggtcctgctcccagatctggtggaggtggcggcggtcctgctcctagatccgatggaggcaacagaggggagaggagcgtgggcggcgacaaatgcggtcgcatcacgagcgggatgttttcacgggggtgctccgagcggtgcggagatgaaggcgagcgaggcgggttggggatctgagccgattcatgcggccggggagaaggtactatggtga

SEQ ID NO: 35084 - DNA, 1794 bp, Zea mays
  Peptide Sequence Number=SeqID_78459
atggcatccatgtcgcatttaattgctaagccagctccagctgccacctttcctctatcccttccgagaacgagctccggcttcaggcctcgccgcgttaccgtccagcgcgtatcgtgcgcatctcccagaggcgaacgctacgagctagacgcccgaaagcacgaccgccgcgacgtcctcctcggcctcggagcgctcggtgccagtgccaccgctaccctggcgtccgcgcgccgcgccggcgccgaccccgtcgccacgcccgacatctcttcctgcggccaagcgaaccttccggtgagcgccaacgtgctgacgtgctgcccgccgccctcgagcgcgctgcccgtggacttcatcctccccgacgccacgtccttgccgctccggacgcgccccgccgcgcactcggtcaccacggactacgtcgccaagttcaacgccgggatcgctgcgatgaaggcgctcccggcggacgacccgcgcagcttcgcggcgcaggcgagcgtgcactgcgcctactgcgacgggtcgtacagccccgaggggttccccggtgtggagctccaggtgcacaactcgtggctctttttccccttccaccgctgctacctatacttcttcgagcgcatcctgggcagcctgatcggcgaccccggcttcgccgtaccgttctggaactgggacgcgccggacgggatgcgcatgccggccatgtacgcggaccggtcatcccagctgttcgatccgcggcgtgacagccggcacgcgccgccgaagctcatcaatctcgactacaacgccaacgttagggagccgaggttcacttacaaacaacaggttgatcacaacctcagggtcatgtaccgtcagatggtatcgctgagcccgacgccgtcgctcttcttcggcagcgcgtaccgcgccggcgacgacccgaaccaagggccagggccggtggagagcatcccgcatggcccggtgcacatctggtgcggcgacccgaaccagccggacggcgaggacatgggcaacttctactcggccgggttcgacccgctcttctacgcgcaccacgccaacatcgaccgcatgtggtccgtctggaaggggctcgacgtccggcgccacacggacctcaccgacccggactggctagacgcctccttcctcttgtacgacgagacccccaagctggtgcgcatccgcgtgcgcgacgtgctcgacaccgacaggctgcggtaccggtaccaggacgtacccctgcactggacggccgccaggccaaccgtgaccgccgggacgcggagagcggactcgttcctcgcgcccgcggcgcaggccgctcccgccgccgctaggaaggcgggcgagttccccatcacgctggacgaggcgacgatcgtgacggtgaagaggccggtcgcggggaagaggagcaaggcggagaaggactccaaggaggaggttctcgtcatcgacggcatcgaggtggacagggacgtggccgccaagttcgacgtgttcgtgaacaccgaggaccacggcgcggtgggatcgggcgggcgggagctcgcggggagcttcgtgaacgtgccgcaccggcacgggcacgggcacgggcacgccaagaaggggagagggatcaagaccaagctgcggctcgcgttgaacgagcagctcgaggacctcgaggccgaaggcgacgagagcgtggtggtgaccctcgtgccgcggcaaggcaagggtagggtgaagatcggaggcgtcaagattgagctgatgcattga

SEQ ID NO: 35085 - DNA, 675 bp, Zea mays
  Peptide Sequence Number=SeqID_78460
atggaaaaagagccacttgacatggttgagagctcagttcgagtcatcgagacacatgttgacatcattcgcagtctagtgactaatggggttgtggatactagtgaatcggaatcagtgtacacacttaagaccactttgtttcaaattggagatgtatgcgacatgcttgagaagtgtgctctgtccatcaaaaagtatgctgactccaagagggctaaaattattcaagatgaagccctgcaatatgctgaagatgatgaagctgcagatgctttggaggaactcccaagcccagatctccttactcaagccgacatattggaaaaatattttggaattgagtatgatattagacagagaaggcatggctgtgatgttataatgctgaaggaccccaataagagattacgccctgtcatccaccactgcccgttatttgtgggcttcaccgatggctggaaacatttggtgatatcaaacgaccttcgggctgaagacgtctgcgagcttgttaaggagccagacgatgcccacataagagaagagaagcgcacacatgaagccggggcgtctttaaattttgtgaccacacatccggacagagtacacaggctcaccattgtctggccccttaacaagctcgcagacatccccaacccgaaggtcgtttga

SEQ ID NO: 35086 - DNA, 804 bp, Zea mays
  Peptide Sequence Number=SeqID_78461
atgtggagaattccagacgtccggtatccgggcgaggggtcgggctcgcgcgggggtgaaaaatccggaggcgctgttgttccgtcgctggcgacttcgctccatctcggcgagggggcctcgcggcgctgctcctcggcggcgccggccaagctgggctccaagaggccgtgctcgagcgggtccagaggcggactgctctcggtggctggaggcaaggaggtggacgccgacgactcatcaaagatccaaggagcgggtgcttccgtcggtgttcgtcgccgtcgaaccgccatcgccaagaagctgagaagatccacggcgccgacgaaggaagttggggacaaacgcaagcgcatctcgacgccaccttcgtcatcgtcttccattaggtcgggtggtccagatccgaagaaaacaagcattgttgatataggaattgagaccctggattcggagaacgcaaagctccgaagagcactcgctcatttaatcagagtagtggagcagcgttgtgccgacatcgttgatgtcgtccacggtgccttccaaccagttagcggaccagtcctcaatgaaatgaatcgtgctttagttcagatcgaggacctcgccaaggaccttgatcacctagctctggaaaaagactgggagatggagcacatggccccttctccaattgctgaatcatcagaaacagaggatgagcttctgcttgattatgattcagagttgaatcctgacgatatcgttggctacgacgacggacgcgactactccaccgacgacacctatccctactag

SEQ ID NO: 35087 - DNA, 456 bp, Zea mays
  Peptide Sequence Number=SeqID_78462
atgggcaagaacaacaagcgcaagcgtgagccgactcctccatcggaggagtttggtgactcggaatactcagaggaggagttctcctctgagtccgaggggtctccggctcccatccccctgcgtgagtcgtctgatgactcagacgactcccaggggcttgcggcggaggtctggacgtacatccgggccgtcgagcgctccgggctcgagggctcggatgagtctgagttctcctcggacgaggaggactcggacggcggcgagggcgaggatgacgacgacgacgacggcgacgacgacgacggcgacgacgacgacggtggcgacggcgacggtgatggcggcaacggcggcggaggcagcggcggcaagggcggcaccaagggcggcagcagcgtgggcagcaccggaggcggcggcggcaagggcagtggcagcagggccagtggctaa

SEQ ID NO: 35088 - DNA, 993 bp, Zea mays
  Peptide Sequence Number=SeqID_78463
atgagggcagtgtggccaaaatcaatagagagggttaacctggtcgagccttccaaggaaatgcaaagagcagggcagagtcttctcgacaatctgaaggggttgccacttattcacagctatgacagcatccaagagttgaaccgcaaaatagaaaaacatgagcgaggccatgatcttgtagtatcatcttatgcacttggcgagattccttctttgagtgaccgaatcacaatagtgcgccagctttgggacctgacgagtgatgttttggttttgttagagcctgggacacctcaaggagcaaagatcataagtcaaatgcgctcttatattctttggatggaaaaaagaaagtgtcgcaaaattgaaaaatcctcaagccgtcctccaagtagcatgaagagtatcgtagcacaaaaagtctcattgaaaaatgggtcttttgtggttgccccttgtcctcatgatggtcgatgtcctttggagaattcagacaagtactgccactttgtccagagattggagaggacgtcatctcaacgtgccttcaagaggtcaaaagggaagcttggcccgcttgatgacttgaactttgagacacttaaagaacgcaatgccaagagaaagccagaagatcttgtcatcgactatgacgaccaatttccaagcgaggaagacgaagaggttcatgtcgatggtggggacagtctggtaccatatgcttcagatgaacatgaattaagtcttttccatgacagtgaagaagcagaggcggaacaaacggttcgtgctgaccttggaggaggttggggccggattatatacagccccatgcgaagagggaggcaagtacaaatggatgtatgccgttccaccaaacgggacgcatccgaaggcacatttgagcgtgtagttgtcacccgaagcaagaaccctaccttgcattttcaggcccgtaagtcactttggggtgacctctggccattttaa

SEQ ID NO: 35089 - DNA, 165 bp, Zea mays
  Peptide Sequence Number=SeqID_78464
atggattctcaggcgccaacaaactcagatggtgaccaaggaagttatcccttaattggggatggggacccattggggacccgaaacccgaatgggtatgggtatgggatgagttttgcacccatgatgggtatggggatgggtatggggacggatcaaacatga

SEQ ID NO: 35090 - DNA, 69 bp, Zea mays
  Peptide Sequence Number=SeqID_78465
atggacaagtctggtgtggtacgacaattagtgttttgttttcaaaaaaagaaggaggagatcgggtaa

SEQ ID NO: 35091 - DNA, 333 bp, Zea mays
  Peptide Sequence Number=SeqID_78466
atggggggagagggtgagggcgagtggggctcggggcacaagtggccgagggcgaggtggggcgagtcccacgcgcgacgtgggcgcggggaaggcgggcgcgagcagctcggcggcggttacgcggggacgacggggctgacaagccgggcccacaacgcagagagagagaagaaagcgggtgcgggcgcgagagaagcggggctgacgggttgggcccacgggcagagagagagcgagggagcgggcgcgcggggggaagtggcagcgccgacaggtatgaagtgggccacctttgttaagcggtccacaaccacccagatggaatcgtag

SEQ ID NO: 35092 - DNA, 288 bp, Zea mays
  Peptide Sequence Number=SeqID_78467
atgaccgggaaaaagaccacggcttcctctgacggcggcactccaaagaaagccaaggtggtggtggaggatgaggaagaggcggggttggaggatgaggaagaggcgactgtgacactatccgtggagaaggacgcgctggagtgcgacatctgctgcctacccttccagtccgaagttttcatggcaagtcagattaccatgcattgcaagaacgggcattctggatgtgcaaagtgctgcatccgcacggacgaaagtcgtgtaaaattacatgacatgtcctaa

SEQ ID NO: 35093 - DNA, 288 bp, Zea mays
  Peptide Sequence Number=SeqID_78468
atgaccgggaaaaagaccacgacttcctctgacggcggcactccaaagaaagccaaggtggtggtggaggatgaggaagaggcggggttggaggatgaggaagaggcgactgtgacactatccgtggagaaggacgcgctggagtgcgacatctgctgcctacccttccagtctgaagttttcatggcaagtcagattaccatgcattgcaagaacgggcattctggatgtgcaaagtgctgcatccgcacggacgaaagtcgtgtaaaattacatgacatgtcctaa

SEQ ID NO: 35094 - DNA, 276 bp, Zea mays
  Peptide Sequence Number=SeqID_78469
atgccgaagcttccttacgcacaacttcggctctgttccatccttcgttctctttgtgtttcttcatacaaagattttgacttgtccgaagagtccatgttcgaagtgaactgtatgctcgcagccaacttccattggaggcgattttggaggtccagatttcacaaaaatataaggggggaggttttggtcttcatttcttggaagaaggtggataagaaaggcacattttggttgcagcactttgcacatccagaatgcccgttcttgcactga

SEQ ID NO: 35095 - DNA, 693 bp, Zea mays
  Peptide Sequence Number=SeqID_78470
atggcccgcgcccgcgcctataaaaccctcccagacttcgactgtactcttccgtgcaccctcgaacctcaccggagtctagctcgccgccgtttgcccgtgcgcagtgtgtctgcggccgcccaatccctctgtcaccgtagaccggccaataaagccattcctaaccccgtccagccctcggagaagactgcgcacccctccgtgaagctccccgagcgaggaatcggagtttgcttcgccggagaggccagtccccgctcgccggagctctcaaccccgccggagtacgtggaccgggtaatccactcaaccatccttcaattccttgtgcacacggtcgctacgttaccccgtgaagctcaccgtgccttcggattgaaccagttcgccgtggtttggccggtacactcgccgccgacgaggacacccgcctgcgcgcgtggaccgggcgattccggccatccccgacatcaagccgtacctcgacgtgaccgccagagtctccccgagccaaccccgcccttcgtcggacctccctcgccgccggactgtaaccttgctgacggagagtacatcctcgtgccggagcaaggagctgctcaggaggtagccccggatccagcacccgagcctgcaccagaggacctgtcggccactgctttggaaggcaagccccggttttatgcataa

SEQ ID NO: 35096 - DNA, 726 bp, Zea mays
  Peptide Sequence Number=SeqID_78471
atgacttcccacggatcctccgatgacggaaatgcactgacccacactgacggacttgcacgagagggctttccccgcattttgtgggaggtacttcaggggggcggatacgcgacaccccctcagtacgcggtgcagcagttcgagaagcaccgagtgccccgctgtagggtgaggatgaccttggagcctcatcccctgcagccgggctggcgctctttggactccgagtctttcggataccgagcggaggatacgatcgaggcgatcgctctgcatggattgactactttctgcgggttccatcctttggagctggctacccaccccattggcttgttccccgctgagagggaggacgacccaatgtggaaggatcgggtggagcatgccaaggacatctgggccatctacccaggacagactgcgcacttgaccgtacggtgcatgaatgctctgtaccgtctgcaggtaatgcgcggtgaggcgatctcccatctgatggcactgctggaggcaacaaagattacgttggacaacagagaggaactcgtggttgacttgtcccaagagatggtggagaaggacttgcaggagatccaggacctggaggtcaacgaggacgtcgacatcgaggtaggagatgagcctgcctccagtgtggacactgctggctcgggaagaccaccttcccccgagtcgagtgttgcttcgttcgctcactag

SEQ ID NO: 35097 - DNA, 240 bp, Zea mays
  Peptide Sequence Number=SeqID_78472
atggcttctacctgcaagaatattttcattgggagcatggtgggatcttattgcaaagttccctataatgctcttttcatcctaggaacacaaacaatcctaaggatggaagtacttaaatcaggacttgggctaggaacaggtgaagagcctatggagctttgctacttttgtgcaaaggtggttcccaagcaggaggaagaaccgaaaatcgcagtgtgttgctgtggatggtgctaa

SEQ ID NO: 35098 - DNA, 345 bp, Zea mays
  Peptide Sequence Number=SeqID_78473
atggccaacagaagggcaaagacgaggtcgagcgagggaaaacgggttcaacggctcgacgacaaacgcgagcacgcacgaaacccgatgtacgagagcgggtgcaccgcagagacgacgagcaggcacgcgaccgtcgatgcgagccgaggggatggcgtcaaggaagcaaggacggctagcccaagcggcatcggcgagctccaaagagccgagcagggagaaagcgcggccatggctgggacgacgagatctgggagtagggcacagtccgagctaggcgtcatgggagatggggaggagcgtagcatgggagaaggggcgaccgggcgccgtaggagataa

SEQ ID NO: 35099 - DNA, 327 bp, Zea mays
  Peptide Sequence Number=SeqID_78474
atgtccatcactcagggctctcgtcgaacacgagatgtgcaagccgcgacatcggtagcgagtgaggtcgacaacaaggccggggctgctgcacacacaacgcgacgacgaacgacgacaactggtgaggtcgacgacgtgatggggattaaagccgagcagagaaaattcgcgtgcgcaactagaaggaactgggaagccacggcgctggaggaacttcatggcgcgcagacacaagagaacaagacggcggcgcgtgtgcagcgagaagaacgtcgtcctgggcgagctagagacgatggagcagagggcatgtgtagtggctag

SEQ ID NO: 35100 - DNA, 156 bp, Zea mays
  Peptide Sequence Number=SeqID_78475
atggcagaatcggataatcattatcgatctcgcagattcgtgacagctattggaaccgtgatgtcaaggttgcaagggaaaattaattgtgcttctgtgttgaagtcaatgatttgctttaggagtcttataatagtgataggagttgtgtgctaa

SEQ ID NO: 35101 - DNA, 763 bp, Zea mays
  Peptide Sequence Number=SeqID_78476
ggcgacgtgggggttcctccgaagctgaggttgagtctgccttccgttgccgtggccgagcccgagccatggggtcgggcgaggcggaagtcgttcggccgaggccagggcgaacccgagtccgagccctggggtcaggcggagcggagtttcgtcgtcttccgggtcttagcccgagtccgagccctggggtcgggcggagcggagttcgccgtcttccgggtcttagcccgagtccgagccctggggtcgggcggagcggagttcgccgtcttccgggtcttagcccgagtccgagccctggggtcgggcggagcggagttcgccgtcttccgggtcttagcccgagtccgagccctggggtcgggcggagcggagttcgccgtcttccgggtcttagcccgagtccgagccctggggtcgggcggagcggagttcgccgtcttccgggtcttagcccgagtccgagccctggggtcgggcggagcggagttcgccgtggcggcgctgtccttctgtcagactggccagtggagtggtggagtgacggcggtcacttcggctctgccgggggcgcgcgtcaggatgaagctttatgctgatgggggttaccagctgagaattaggcgtcttgagggtttctcaccggggaagaagaccctcgccggagccgaggagaaatccgtcgattgccggagattcggggatccaatcgacgaaccgaacgcgctgcgacgacgccctcgacgagacgaacgcagcg

SEQ ID NO: 35102 - DNA, 294 bp, Zea mays
  Peptide Sequence Number=SeqID_78477
atggagtctgctctccacttctcaagtgtttatccagaaccgaaggcctttgctggggaaggtcttcagacaaggatttttttggctgaaggcagcttcggatgcaacagatctgattcaaaagtgcgaaaattgtcaaaaatatgcaagagaccagaaacaaccttcgtcgctaacccagttaatacagccaacctggccattgcaaagatggtgcctagatttgttaggtccacttccaccaacacaaggcaatttaagatatgttgtggtggttgtagaatatttttctaa

SEQ ID NO: 35103 - DNA, 300 bp, Zea mays
  Peptide Sequence Number=SeqID_78478
atggcggagcggacaaggttgcgaaaaccaaagcaggaggcgagcagcagagtaaagaaccactgccggtccctcctccggggcaagcgccacctttggcaggcgaagcaggcgtcgtttcacctccgccatgatgaccgcgtcaaaaaagggatcaggaaaggggacatttcgaaagggatccttctccgcgaaggaagcgggccccgagccctcctactgatcaggggttcgaaggctggcccctcggaagggttcgacagccgctctagagcactcgggcttcaggctcattactga

SEQ ID NO: 35104 - DNA, 345 bp, Zea mays
  Peptide Sequence Number=SeqID_78479
atggccggaaggagagatggccgcgtggcagccggagttagtgcccttcaccgcggcggtcttatccggagcaaagaggtcttcgcggggagatgctcgccgcccgatcatctcgaccccgttgcaaatcgcggcgcggaaaggtcatcggcggtgagcacttgcgctggcggtctgatcaccaatagagcactgtaccatgggagagttgcattcagacagcctgacagtcaattttggagcccaattctctctcaatttctaatgacaacccatgtcaagctctgcagaaaaattgtagatcaatgtaccatataccatgttgcaatatggtgttgccactaa

SEQ ID NO: 35105 - DNA, 1014 bp, Zea mays
  Peptide Sequence Number=SeqID_78480
atggtgggtacaagtgcggtcactgcacggcggcagccggggtcagtggagcattgtaccattcaggaaatggttgatggtgtgacttggcctaccaccctgccaccgggttggacagtcgagtgggatgttgctccgatgaatttgcccacccccgccagtggaggagacactcgttttagttctgacttcctttctcgcgatggctttccttccatcttgtgggaagtgcttaactccgccggctaccctacgcgccctttgtacacggtgcagttgtatgtggagcatcgagtacctcgttgtcgggtctggctgactttggaggctcatccccttcagccgggttggcgttctcttgattctgagacaattggactcaggacggacgacaccgttgaagcagcagccatgaagactctgacgactttgtgtggctaccatcccctggagatggtgatgcaccccttgggactcttccctgctgagaagaaggatgatcccatgtggtgtaaccgcgtgagccatgtgaaggatgtgtgggcaatgtatcctgacttggttgggagggtcaccattcagtgcatgggtgcgctgtaccgctttcaggcccttcagagcgacgctatgacacatcttgctaacatcgctcaaaccaccaagctcactctcgacagtcgagaagattttgtggtcgatttatcctccgagttggtagagaaggatctgcaggtggaaaggctgagccagcgcattgccaccttggagcagcaggtggagatccgagacaacaccattgatgtcttggagaaccaactccacgatgtgcagagggaactcgaagaagcaaatgaccacttggacatgcaccacctggagatggaggccaatgaagccggaagcgagggagaagaggctcctggggagctaggaccagcccctggtgcccatgggactacctccgcgatgcctccttcacccgtatccagtgtcgcttccaccactcagggttga

SEQ ID NO: 35106 - DNA, 505 bp, Zea mays
  Peptide Sequence Number=SeqID_78481
atggggtcggggcgaggcggaagtcgttcggccgaggccagggcggagtccgagccctggggtcgggcgaggcggagtttcgtcgtcttccggcccgagtccgagccctggggtcggggcggagcggagttcgccgtcttccggggtcttagcccgagtccgagccctgggggtcgggcggagcgggagttcgccgtcttccgggtcttagcccgagtccgagccctggggtcgggcggagcggagttcgccgtgttccgggtcttagcccgagtccgagccctggggtcgggcggagcggagttcgccgtcttccgggtcttagcccgagtccgagccctggggtcgggcggagcggagttcgccgtggcggcgctgtccttctgtcagactggccagtggagtggtggagtgacggcggtcacttcggctctgccgggggcgcgcgtcaggatgaagctttatgctgatgggggttaccagctgagaattaggcgtcttgagg

SEQ ID NO: 35107 - DNA, 201 bp, Zea mays
  Peptide Sequence Number=SeqID_78482
atggccatgatggattcaacattggaaaagatgtacctctgccaggtgccaagtttttgggttgaaatgattaagctgagaccgggcaggatccactttagtaagcatttctgcaaaacagagtctttgattattgaaaagccttaccttgactcccatataaccagcatacccttgagagtcttttctttagtcgggtaa

SEQ ID NO: 35108 - DNA, 519 bp, Zea mays
  Peptide Sequence Number=SeqID_78483
atggcctggcatggctgggcgctgctcctgcgctcctgcggtcttgcccacgcgcacgctgggagcgagcgaccgcggccggggagcatgtgggttgcgcaggcgtggctgaggcgctcgctaggtgggctggggcgcgcgcagcggcctgggcggctgcggagtgggctgcgcgcacgcgctggctgctgggccaggaaggggggcgctggcaaggagatgggccgcgcgcgtaggccggcgggggaggggcgcgctgggctgccgagcaggccaagggaaactgggccacgcgaggaggagggggtgtgggccggccgagaggggctaattagagcggctaacccccttaacaggagcgttgatatgcacttggtgaaagcgttgccgactctgatcttcactgatttggaggagttggaggttgccaaatggacaggtgcaacaggaaagaatagcgagaaaaggtgcaagataagcatcatggtaaagatcaagggattacaagggttaaggtga

SEQ ID NO: 35109 - DNA, 501 bp, Zea mays
  Peptide Sequence Number=SeqID_78484
atgacagtccccaagctcctagtaaaaggtcgggcgaggcggagactcctcctgaggccgaggccggggtcgggcgaggacgcgattcctcccgaggtcgaggttgaggccgagccctggggtcgggcgaggcggagaccaccttccgaggccgaggttgaggccgagccctggggtcgggcgaggcggagaccaccttccgaggccgaggcgggggctgagccctggggtcgggcgaggcggagacctcctcctgaggccgaggctcaaggtcgggcgaggcggagacctcctcctgaggccgaggcccaaggtcgggcgaggcggagcttcctgttgcgcctgaggctgaacttagctgttgtcagcctcaccctggcgggtggcacagcagtcggagaggggcgagcggcgctgttttcctgtcaggtcggtcagtggaagggcgaagtgactgtggtcacttcgaccttgccgactaaggcacgtgtgtcaggataa

SEQ ID NO: 35110 - DNA, 2637 bp, Zea mays
  Peptide Sequence Number=SeqID_78485
atggaccgtcggagctggctgtggcggcgcaagtcgacggacaagagccccgcagagacggagacctcggcgtcctcggcgtccgagaggatcactgatgaacagctgcactgcatgcctgtgggccgcgtggtggtggcacaacccaaatggctcgctcgtcctgttgctgctgcgcgtactggcacagggaccgagtacctggcgccattgctcctcatctttgaccggaaatctagtgcttccggtggacgatccctattgcatcactggcacttcaaatctttgaaccatctcactgtttctgtaataactaatactgctccaagcgtaatggatactgccaagagctccccaaactcgactcagtcgccggaggtcacatcgaaggaactggaagacggtgacaatgtgaaggtgaaggtattgagtgagaggctctcatccgtagttctggatattcgtgcgaaggatgatctcgtgaagcagcattccaaggttgcagaggaggctgttctaggatgggagaaggccgagacagagatcgcgtcactgaaggcgcagctgaacgctgcggcggccaagaactctgcgctggaggaccgcctcgtccacctggacggcgccctcaaggaatgcgtccggcagctccggcgcgccaaggacgagcaggaccagacggtgcagggcgcgctagcacagcaagcgcggcagtgggagtcgcacaaggccgacctcgagctgcgcgtcgtcgagctcacggcgaggttggaggccaagtccgagcgctcggtggccgccgccgactgcgacaccggctccaggctagccgcgctggagaaggagaactcggcgctcaggacgcagctgctcgccaagacggaggagctggagctcaggacgatcgagaaggagctcaaccggcgggcggcggagactgcgagcaagcagcagctggagggcatcaagaaggtggccaagctccaagttgagtgcaggaggctgcaggccgcggcacaacggaggccctccgtgaacgtcgaactcaggcgttctccgagctcggcctgcgccgagtcggtgacggattgccagtcggactgctccgactcatgggcctcggtcctcgtcgccgagctcgaccagttcaggatcgacaggagcggcgcgagcagcagggccgccagcctcgcgaccgcggacattggcgtgatggacgacttcctcgagatggagaagctcgcctctgcgtcaaaaggcgacgccgtcgaggacgcgagcgggcaggtgctcaggctcgaggagaaggtcaagaagctggcagccgagaaggccgagcgggagaaggcgctgcacgaggctcagcgcgagctgaggacttcccgccagcgggtaatggtggcagaggagagatcagctgagctacagcggcagctgaaccttgccaatggcgagaaacatgccatgggggccgaggtgaaagctgctgaggcgaagagaggagagctggagggcttgctcgagctcgcccgcgccgagatcgcggggttgctggacaaggggcgcatcctggaggaacggctcgagtctgagaaggcgctgacacttgagctcgcagcaaagtaccaggacatggaggcgctgagggcagagaagagggagctgagcgctcagctggagacgtcacggtccgaagccaagaagctcggtgacaagatcgccctgatggagaggaagctggaggtggagaaggccttgtcgatccgactggcgacgaaatgccatggcattgatgctctggaagcaaagaagaagggagtcgagctcgagctggagacggcgcgcgaggaaatcgcttcgctgcaaaacaaggctagcagcttggaactgcgacgagtcgaggaagagaaagcgtcgtctgctgcactcgcactgcggtgccaagaactggatgaccttagatcccagctggagtcttcgaattcacggatcgttgagctcaatgagaaggttaaaacgctcgaggatgtagtcgaggaacagaggccagtgacggtggaattggagtctcagctccggtcgaggcgcgctgaaatcagtagcctgaaggaggatataagcctgttgcagaagaagctggagagccagaagaacctgtcatcagcttacatatctgcacttggtgcttctgaaacagagaagaaggagctggctagtcggtttgagctcggagagaaagaagccgaggaattacgtgggaagatgagcttgcttgaggaacagatccgtaaagagaaggcacggtcatccgagtttgcggtaaaatgtcagaagatggaggaacaaatctcctgtagatctcttcttggccaccaaccagtgaaatcatctgcggcgatcaaagatcttcagctcagaaaggagacagagctggccaaggctgcagagaaactggccgactgccagaagacgatagcttcactgagcagccagctgaaatcgttggctgatttcgacgaattcccccctgaaactgagaccagtggcgctgactcagacgacgcctgggacagcgatctgaagcttctccaacccgcaagctatcccacgcagattggctgtttggcagtcacatga

SEQ ID NO: 35111 - DNA, 336 bp, Zea mays
  Peptide Sequence Number=SeqID_78486
atgtccggtgcaccagggggactcagactcaaactcgccaccttcgggaatttccagaggcactcgcactataattcaccggactgtccggtgtacaccggacagtgtccggtgcgccaaggaggagcggcctcaggaactcgccagcttcgggaatcgccaacggctagtccgctaaaaatcaccggactgtccggtgtgcaccggactgtccggtgcgactccggagcaacggctacctccgcgccaacggctctctgcggtgcaataaatgcgcgcgcagcgcgcgcagatggcaggcttgcccatactggcacaccggacaaggaacagtag

SEQ ID NO: 35112 - DNA, 2085 bp, Zea mays
  Peptide Sequence Number=SeqID_78487
atggcgctggacacaggaacggtggcggcgggggcgatcgacgaggcgtacgagttctctgcgcccaggttcttcgatttcatcaccgaggaaacggaggaggccgtacgcgccgccgagagctggttcgaggccgcccgcagccacgccccgtcgccgttcaaccccaggataaaggaatcgagggcggaagccaaggtcgctgtcctctgcgatttcgcggaagccgaggagccggctccagaggcggtgcccgtggaggtggcagcaggaagcgtctcggtacacggagcagatgctattgatgggcaagtttgtgtgccatatgttttggtcagtgctcaatgtcctgaggcaatatcggaatcgccgccggcttcacatccggctcaagaagagaaggataaatcgccccaatcgttcgagttcctctcggcgacagacctatccgtaaaatcagatggtggtgctgccagcacgcctaagatgcagacgcgtcctccttctccttctaccaaaattgcacctccaatttcgacatgtgacagctcttcagtgaatactggtgcgcgcacgccaaagacgcaggcgaacatgtgcagagcagctactatggctgcttcgacgaatgccaaggggagcgtgatcaagggtggttgtgatttggttgggactggaaaggcagccactgctggcgctgaaattgcacaagcgaaccaagcggtgaagaggcagaagcttgatgatggaagagccagacagatactcaatgttaagactaaggtcctgcctcataaacggagaactgatttagctgtaagcaatgaagtgaggaggtcccgtgaggatatgtgttctctgaaggaagcaacaacatatgtatcaactgcagaattggttaagaagtttgaatcagggaccagaaagctgagcatcactcacagcagatctcgttctcgtgacgatgctgcattacagggaaggcctaagcttgtgttaactagacctaaggaacctgagttccagacttcccaaagaatccgagcagtaaaagtaaagagctctgcagagatagaggaggaaatgttggcaaagatacccaagttcagggcacggccattcaacaaaaaaattgctgaagccccttcgttccctccacttccaaggaaacccccacagatttctgaattcagtgaatttcatcttaaaacaatggagagagcaagtcgatatgcggacacctgttcggaagtatcttgtgcagatactatccggagtcgaaataagccactgaaatcgacacaacgaaagccaccgcaacttcatacagcaaatagagctaggccaccaagtgtgaaaagttctcaggaacttgaactggaggagctggagaaggcccccaagttcagggccaagccactaaacaaaaagattcttgagagtaagggagacattggagtgtttgtccatcctaagtctcaggtcacagctcccaaagaattccgtttttgtaccgatgttcgcttgggtcctccatcagttgctgacttatttgacaagctctctcttcactctgaatgttcttcaaacagtaacaggcaaggtgtgcctagatgcaccataccaaaccctttcagtctacaaacagaggtgccgccgaagcctgaacctaagccctgtacgagaccagaaggctttcaactagagagtttggtgagacacgaattagagcagcaaaggctgatggaagaaaggcagagaatggagagagaagaagctcagaggagaatcgtcaaagctcaacctgtactgaaagaggaccctatcccacttccggagaaagagcggaaacctctcactgaagttcaacaatttgtgttgcatgttgatgagagggctgtgcatagatcagaatttgatagcatgataaaagagaaagaaaagacttacaaaaggttgagagaggagaacgaattcgcgcaaaagattgaggaggagaaggcgctgaagcagctgaggagaaccatggtgccacatgcccggcaggtccccaagtttgacaaaccattccgaccacagaagtga

SEQ ID NO: 35113 - DNA, 600 bp, Zea mays
  Peptide Sequence Number=SeqID_78488
atgaaggcggactatgttgtcaaagaaggctcgtgctaccgaggctactgtgtaaggatgtcccagggcaatgaatggacccgggggatatctgtcccccacaagcccccgatctttgggttgattttgaggtattcagcccaaagatcccaggtccagcttgcaggcaagaacaacaagcgcaagcgtgagccgactcctccatccgaggacttcggtgattcagagtactcagaggaggagttctcctctgagttcgaggggtccccggctcccattcctctgcgtgagtcgtctgatgattcagacgactcccaggggcttgcggcggaggtctggacttacatccgggccgtcgagcgctccgggctcgagggctcggatgagtcggagtactcctcggacgaggaggactcgtccgaggaggacggcggcggcgatggcgaggacgacgacgacgacgacgacgatgacgaaggcggtggcggcggtgacggtgacggcggcgctaggggcggcagcagcgggagcgacgacgacagcagcagaggcagcaacaggggcggcagcggcagaggcagcaacagggccagtggctag

SEQ ID NO: 35114 - DNA, 330 bp, Zea mays
  Peptide Sequence Number=SeqID_78489
atgaccagagaggccgactttgacatgctgagcatccgaagagagcactctcgcagtagaaaggtactgttgctgatgaaaaatctgtcaatcaacctaactagtccaaactttgaggagcatctagctgacccggttagcctggtagaaaatgcaatatgttgttcgttggattctgacccctactgggcgcccctttctactgcagaggaggttgctctcttcggatgcctcaagcatggatcaaaagtcgggctcttcccgggttcatctcccgttcatgtaattctaacccgttcccgatatttcgtcgatttgacccctccttaa

SEQ ID NO: 35115 - DNA, 309 bp, Zea mays
  Peptide Sequence Number=SeqID_78490
atgggccaggatgtggtcgcgcacgtctacgacgtcgccaccgccggctccgacaccaccgtgctccacatcaaccgcttctttaaggacgccatcggcctcggcggcatcttccacaccgccatccaggtctacggtgatgaagaatggtcctttggctactgtgaacgtggcactggggtttttagctgtcccccatgcaaaaatcccatgtacacttatcgcgagtccatagtgctggggaagaccaactgctgtatcctcaaggttgggtcaatcgctttgcaaatgcgggtgacgctgctctag

SEQ ID NO: 35116 - DNA, 330 bp, Zea mays
  Peptide Sequence Number=SeqID_78491
atgggcaaggacaaaaagggtcgagacgactcccaggggatagccaccgagctatggacgtacatccggtccatcgagcgtgtcgggctcgagggctcggatgagtcggaggtctcctcggatgaggagaacttttccaactcgtccgaggaagggagcgacagcgatgacgacgacgaaggcgacggtagtggcgacgatagcggtggaggtggcggcggcgacgacggcaacgacggcggcggtggaggcagtggcgatggcaggggcgacaacggcggcggcagcggcagcaaggccagtggcaagcaccactggcttaaacattag

SEQ ID NO: 35117 - DNA, 672 bp, Zea mays
  Peptide Sequence Number=SeqID_78492
atggtcaacagggagccatatcctctagacatcagaggagaactagatgacacaacagccttcaaaaacttcaagaagtggggaggtatagaatttcctctaccttttggaagagtactcagccctacagaaagtttcatccatgaactagatgagaaggtcctcttccatgaacaagttcaggctctggagaagtctggtgattgctctggcttaacaatgacctttgtgcctattgacaacgataccaatgatcggtttcacaaaattgattctatggtggcaacggaggacacagatattgcagttgaactttacaggctcagtgtttccaccctagatctattgaaactagcatccaaagaggaacagggtgcttatgtcggtgcatggtacaatatgcttctatcctgtgctcaagaattgaagcatggtgtggcactttggcaagagttttatcatgcaaatgtctgcgacagagtagtttctgaaggtggtcactacttgattgctcttggggaaatatatagagttgcacagattttatacttatccttgcagcgtttaaagacctgggttcttgcagatcctggaatgttgagtaaaatgttgtcttgtttggacagctgcacttatatacgtaaaccgaacaagtcatttagacaggaatag

SEQ ID NO: 35118 - DNA, 1068 bp, Zea mays
  Peptide Sequence Number=SeqID_78493
atggctgccccgcctcctcctccgtcggcggggaaggtgacgggacagacccggatgttgctcttccaccacgtggtgaagacgtcgtcgattccgccgccggcgggcgggctgacggccgccattgtcgttgtcgcgcggcggaggaaggagtatcacgtcgtagctgccgtcgagggacatgaactcaagactcccgaaacggagcatcgtcccgggttggagaggttgctggagactactcatctagagcttgacgggaagctgttcgtcaacacgcagcaggcccctacctggcgcgccaactgtcgacgtttcgaccccgggggggcggatgcgcttgcagtagggggttacaagcgttcgcgagggagagagagcctgtgcgtcagcccgtcctcccgcgcggccaccttctcgtacgagagccctggaccttccttttatagatgtaaggagagggcccaggcgatccttgcattgaatgctcctgcgatacagtcggttggcgtggcgatctggccaaggttgcttctccgcgaagcctgcccgagctgggcctcgggcgagtcgaaggtgtgcccgttgcttgaggggaccctcgggcgagatgtgaatcctcctgggtcggctgttcctgcccgaggctgggctcgggcgaggcgagatcctgagattaggagtcttgggggtacccctaattatggtccccgacaatatgctccatgtgacaaggatgggcagaccaaagaagcaaataatgaccaagaagaagaaggtagtagcttgatgagaacattggttgccaaaaggttgaagtcgaacaactgtagtgttagtgcttcaaaatcagagttggagaagtaccttgctaaagagaatgaagaacatactaccaagtttaatattatggagtggtggaaggattggatgaggcgtgcaagtcctatcactaatggagaagatatcgaggagttagccaaactagaagaagcacttcttgcggaaatgaatagtctgaatactgctaaagcttctagggacaaggagactgtcaactgtggttga

SEQ ID NO: 35119 - DNA, 732 bp, Zea mays
  Peptide Sequence Number=SeqID_78494
atgtcggggtacggctcttgcagcggggacaagtgcgatctagatctgaggggcgagtttgatgagaatctactgaggaaagtgtttgaactatactatgaaaatgagttattggatctatcatatgctccagatgttggtgactatttagtatgtgaggataccagttttgtaccaggcaacaaagatcaggctcctgagggcatgatggaaactgaagtagagaagagactaaatggacagaccattgcgtattatctggttttaaaacaatgtttgaatcagaatacacaatttaatgtagctggtactctcaaaaaggtgatgattggacaaatgatgattatgagaaattttgtctcgaatgcatggagtaagattaataacatcgtttgcatcgagtgtcgccctttcctagaatgcaatcaccctataacattgtttgcagcgactatatcggggcgtggcaacgtcccatcagagtcccgtcagcgccgaacccttcgcatcgacagtgcccacaccagagaagaagccatacccacctgccacggtcgcggaggaggtgatggcatgaggctgactggggcttggaccctgtcccccattccacccgtcgtcgccgacatacttgtccaagtacatggacaaatctcgaagagggaagcattcgattcgaccaaaggcttaggaaaaactgtgccactgtcatcagacggtcagagtgtgtga

SEQ ID NO: 35120 - DNA, 249 bp, Zea mays
  Peptide Sequence Number=SeqID_78495
atgggcgcaattcaggtcaaggctctgtccactcaagggacacgatctcgcctcgcccgagcccagcctcgggcaggaacagccgacccaggaggattcacatctcgcccgagggtcccctcaagcaacgggcacaccttcgactcgcccgaggcccagctcgggcaggcttcgcggagaagcaaccttggccagatcgccacgccaaccgactgtatcgcaggagcattcaatgcaaggatcgcctga

SEQ ID NO: 35121 - DNA, 1686 bp, Zea mays
  Peptide Sequence Number=SeqID_78496
atggcgctctcgtccagctcacctcgttcgacctccccaccgaggtatcagagcgttggtgtgaacgaagaggacaaggcggccccgtcggctgaagcggatcactcgcaggccctcgagtcgttccgttcgctctgcggcgatgccgattgcaacgcattgaggggtctcctggagaaggtgtcgggcgagggtggcggtgatgtctcgcctgtcattctatcgcctgatgccgacaaagcacaccgttcggaggtgcataacttctttaagaagaccttcaagttcctggtcacggacacggtggaacacagtgatggggtccagaagtgcatcagggtgcggttcgggtcagaagcaggtgtcggaaggggtgctggcggccgtgggagaggaaggaaacggaagaacatgggtagttctgattggagagatggtaggccatttgatagtagagggtcaagtaattggccagataatgttgggaagttcctgaggtttcacctgtacaaagagaacaaggacacccaagaagcattaggagtaataggaaaaatgctaggacttcaggtaactgtattcaaggtgcaagccagtaagttgcttgctcttaacaagcggctgtttgggattaaagttggaaatttctggggtgttactgcagaatctgaagacatgataaaaattgcagtagatggcctaggaaagaatggatttatcaactactatggtttgcagcggtttggaagtggttcaataccaacacatcttgttggggctgctttgcttagaggagagtggaaggttgctcgtgatgacatcaatgaggtgcgcaaacgttacaaagaacatggtgacattgatatggcactgagaaacttccctcgacacctcgtagctgagagggccatacttcaatgtctgaagaaatgccctggtaaccatctacaagcactcaagggcatctcacaggttgtagaaggtgacttagtgtataacaaagaatgcccttcagaagaatcaacttccgtagatattctggaaactgatgatgaccatacaaattcaattgaaatcgatctatgttctgaagcacaaccagaagaaagcatccagtctgcgaagatagttgattctggagattttactaaggggatatacacttttgatgatgttgtcctacctttgcctggttcacaagcattgtttcctgggaatgaaattgccgagatttaccatgaaatggctagaaaggatggcattagcttgacggagaatgctcatggtgtcaaggagttttcgattacaagcatgaaaggtggttaccgccgagtgttccagcggcctattggttttgagtgggaactcataacttacacagatgatacttcatctttagcagaaactgatttggatgttctgtccagaaccaagcctaaagaagcaaacgagcttatttctaagcaggaatcgcaggataagttggaaaaggctcctgatacctctgtgccaactaatgggaatagctcccaagaaaagcttattggcagcccagatatacgaccaaagaaattggccttaaaattagcatttactttaccaacatcatgctacgctacaatggctatccgggagcttctgaagacttccacctcagttgcatatcagaaaacactcagctgctag

SEQ ID NO: 35122 - DNA, 740 bp, Zea mays
  Peptide Sequence Number=SeqID_78497
atggcggtggcaggcgggcggaagcagcggtcaagtcgtcagccaagctcatggaccgggaaaggggataccccgaaagggatccttctccgcgaaggaaacgagccccgagcccccctactgatcagaggttcgaaggctggctccttggaggggttcaacagccgcctcagagcgctcgggctccgcgcccgctactggtcagaggttcgaaggtcggcccctcggaaaggttcaacggccgcctcaggccactcgggctccgcgcccactactgatcaggggttcgtaggctggccctcgaaggccccggaagacgacgaactccgcctcgcccgacccgagggctcgggctcagccccgaaagacgacgaactccgcctcgcccgaccccagggctcggactcgggctcagccccggaagacgatgaactccgcctcgcccgatcccagggctcggactcgggctcagccccggaagacgacgaactccgccttgcccgaccccagggctcggactcgggctcaaccgacggtctccgcctcgcccgacccaggggctcggactcgacctcggcctcggaagacagactcgacctcgacctcgacctcggaggagcctccgcctcgcccaacccagggctcggaccgaccacgtcacaggaggcgccatcattaccctaccccaagctaactcaggctacggggaacaagaccggcgtcccatctggctccccccg

SEQ ID NO: 35123 - DNA, 891 bp, Zea mays
  Peptide Sequence Number=SeqID_78498
atgggtcggcgcgagacggagcgcgaaggggggaaaaagccggagggaggcaggcgtaaaaggggaaacccacggccttcgtgtttgtcccgcgcccaggtcgggcgtaaggagagggtccagggtaatgatggcgcctcctgtgacgtggtcggtccgagccctgggttgggcgaggcggaggctcctccgaggtcgaggtcgaggtcgagtctgtcttccgaggccgaggtcgagtccgagcccctgggtcaggcgaggcggagatcgtcggttgagcccgagtccgagccctggggtcgggcgaggcggagttcgtcgtcttccggggctgagcccgagtccgagccctgggatcgggcgaggcggagttcgtcgtcttccggggctgagcccgagtccgagccctggggtcgggtgaggcggagttcgtcgtcttccggggctgagcccgagtccgagccctgggatcgggtgaggcggagttcgtcgtcttccggggctgagcccaagtccgagccctggggtcgggtgaggcggagcttcctatggcgcctgaggccggacttggccgctgtcagcctcactctgtcgagtggcacagcagtcggagcgacgcggacggcgctgtcttcttgtcagactggtcagtggagcggcgaagccacctttgcattaaatgctcctgcgatacggtcggtcgtcgtggcgatttggccaaggttgcttctaggcgaagaccgtgcctcgggcgagccgaagctttgtgctgatgagggttaccagctgagattaggagtcttgggggtacccctaattatggtccccgacaagccccgccaaggaacgaccggttcagccgtgaaaattcatgcgccaaaaagggagtga

SEQ ID NO: 35124 - DNA, 738 bp, Zea mays
  Peptide Sequence Number=SeqID_78499
atgcccttgaagaatggcaagacggcatcaggtccacttatcaagccgattcactttaagaacagtgcagcagaaaaggttatgtcaaatggcaaagtaaacctcacttcaaaaaacaatccagaggttaatggaactgctaaatcatcagaatcaaacagatgcaagactggacaatttgtgggacccagtaaaaataatgctgataatactatttcttgtggagagagaggccaacagtcagaaagaatacatgatgcaaatggaaatggccagtcaattcatcattcacagtattttggtgagatcagtaacggcaatgctatgcctacatctgctcaacaagagaccagtcatggcaatgccacgcccgcccgacaggagaccaataatagcaatggcacgcccgctcaacaggagaccagtaatggcaaggcctcacatgctgaacattattctgagcggtcatctcaccaagaagagcatgcaaacttctcaggaaacaaacgccgacttgaagaagataagtttcaggaaatcctctggtctggtaacaaatatgcacaagagctgcgccattccaataagtgggtaattaaatcaattgataaaattcgacgagggtttctttggaaagggagaaaggaggttaatggtgatagctgtcttgtaccttgggaaattgtcacgaggcctctaagctatggcagtatggcggacttggtgtccccaacttga

SEQ ID NO: 35125 - DNA, 549 bp, Zea mays
  Peptide Sequence Number=SeqID_78500
atgaaggagtcctgtgacacgggcgcagcgggcgacgtgcttgtggcagctgctgccctagaggtcacagggatggggctcgtcgctgggggaacagaaggtcacggtttactatttcatttgactgaagattctccagttttagcagttgatagaagcaatgttgctgcaatcaagacttggcagatcaatgatggcaaggatcgtcacacaggggatgtgattgggactggccgtcgccgtaaatcttcgcctcgcctctacatcttgaacaccttgcgtcttccttcctaccatacctctacacctcatgtgcttgctgcttcgggtcccacgacatcgtttgcccagtggcatcctcgtctagaatgtgtattccttggatacaatcctgaacacaaaggctatcgttgttatgatccttctactcgtcgtattcgaatttccagagatggataccgtcttcgtgaccgtggtaccattgaacctccagatcgctatggttttccacgggctgatgtggcaattgttgaacccactacatattag

SEQ ID NO: 35126 - DNA, 1203 bp, Zea mays
  Peptide Sequence Number=SeqID_78501
atgcaggcggcatgcaaccgcaccaagggggcgcaccctctcgacttcgacgtgtccagcatggaggcccaggcccacacgtcatgtaaccggcgcgccggttactacgtgcaagaaactgcaccatcactcgcgccagtaccacgccttctcgactgcggaaccggtgcctcgactcgaggcgaccctgcgcatgacccgacagtgccaaccgagcacatcgatcacggggaccgggaaaggggatactccgaaagggatccttctccgcgaaggaagcgggccccgagcccccctactgatcagaggttcgaaggctggcccctcggaagggttcaacagccgcctcagagcactcgggctccgcacccactactgatcagaggttcgaaggctggcccctcggaagggttcaaccaccgcctcagagcactcgggctccacgcccactactggtcagaggttcgaaggttggcccctcggaatggttcaacggccgcctcaggccactcgggctccgcgcccactactgatcaggggttcgtaggctggcccccgaagggttctgacagccgcctcagagcacgcagagcgagggatgaccctaggtacattcgatacataaccaaggctcgggctacgctcccgaggctcgggggctgctctcgcaaacccggctccggccaaaccgttgacagcatcaacataccagcccgagaacttgggactcgactatgcacccggcccacggccaggctcggacacaacctcggcctcggaagacggtctccgcctcgcccgaccctaaggctcgggctcaacctcgacgctggacgacggactctgcctcgcccgacccagggctcggacacagcctcggcctcggaagatggtctccgcctcgcccgacccagggctcggacacagcctcggccttggagacggtctccgcctcgcccgacccggggctcggacacagcctcggcctcagaagacggtctccgcctcgcccgacccagggctcggacacagcctcagtctcggaagacggtctccgcctcgcccgacccagggctcgaactcaaccttgacctcggaagatggactccgcctcgcccgaccccaggggtcggacttcgcctcgacctcggaagacggactcgacctcgacctcggaggagcctccgcttcgccccgacctag

SEQ ID NO: 35127 - DNA, 666 bp, Zea mays
  Peptide Sequence Number=SeqID_78502
atggatgaggaagccgagtacctggagacggctcgggccgaccgctccgtgtggctcatgaagtgccccccggtcgtttcccgcgcctggcaggccgcctccgcctcttcctccgatgctgccaacgccaaccccgtcgttgccaaggtcgtcctttcccttgacctgttgcgccaagaagaacgcccggaagagcctacgctccaggcaaggaaactttcatgtgaaggaaaagtcgagcataaatttgacatggaacctcacagcgataatttggcgaactatggaaagttatgccgtgaaagaacacaaaagtacatggtacttgacaatgaccatggaatgagcatgaggccaatgcctggcattgttggtctcatatcttctagttcaaaggaaaagaagaagcaagcaccagtgaaaccatctgatgccaaaagaactcgtagggatcgcacggagatggaaaacgttatattcaagctttttgaaaggcagcccaattgggccctaaaggcactcgtgcaagaaactgaccagccagagcaattcctgaaggagatattgaacgatctgtgtgtgtataataaacgaggtccaaaccagggaacgcatgagctcaagcctgagtacaagaaatccacaggggacactgatactgcttga

SEQ ID NO: 35128 - DNA, 822 bp, Zea mays
  Peptide Sequence Number=SeqID_78503
atggccccgaccgcggagccgtcttcgcggccgccccaatggcgcccccgcacgggcccacccccggggctgaagaacctcggcaacacatgctacctcaacagcgtcctacagtgcctcgcgtccacgccgcccctcgccacgttctgcctcgcctctcgccactccaaccagtgcaagaaggtgttcccgaatagggacaatgactgcgcgctatgcgtgcttgagcggcagattgctcggctgcttcgggcagatgctggggcgctcgattccccagcaaaggttatccgctgcatgcccctatttgccgagcacttcaggtgggggcgccaggaggatgcacacgagttcctccgctatgtcgtagatgcctgtcacactgctgacctccgcatgcgcaaggggttacgtgcagcagctgccagtggaaactgtggtgaggatgtccgggggcagggggtttgtctggttatgagggagacatttggcggggcattactgagtcaagtgaagtgccttgagtgcaagggagaatctaacaagactgatgagataatggatatcagtctcgatctacctgggagcagttctgttgctgatgccctttcccgcttctttcatccggagaccttggatggcgcaaacaaatattgctgtgaaaggtatgctgttctttatctaaaaaggaacaaatggttcctagacgaaggttctatgtactgcaagaattttcactgtttacttgctaaagatgcaaaagccgttttacgatgctttagggttgataataatattttcagtggaaacaaaatcatgtag

SEQ ID NO: 35129 - DNA, 411 bp, Zea mays
  Peptide Sequence Number=SeqID_78504
atggggcagagatttacccggtctacgttcaccggcgatcgggcgaagtccggcgactgtactggcttctccagcgaagcaaagtccgattccttgctcggggagcttcaccgaggcgtgcacagtctcttccaagggtcgggcgtggctgggaaatgctctgttggccagtctacggtggcaggggctcgggtggccgcaggcacgccgtgcacggggcaaacgccggtggtttcgggctccggtgaggtcgagcgtgcgcggaggaacctcagcgtagcatcacggcaacagcaagcaatgagatacgacgacggcggcggtgaacggcgaatagaggacgtcggcgaactggggaacaccggcttcacggtgagggtcgacgaactttgcaggggaattgtggagtag

SEQ ID NO: 35130 - DNA, 1005 bp, Zea mays
  Peptide Sequence Number=SeqID_78505
atgaggagcaggaacgttgacgacaggagcagcagggctcctctttcttgctccaacaggagtagggatgaaaacgggacggatacagccggatacagggtcatcccgtatcctaccctaatgtatttatctcggatacaggactggatacgggtagttaagattcgagacggatacaggacgggaccgggtaataatacgggcggacaagaaacggataacagatactattcggtccaaggaacacctgtgttcgtgctcgttggcgctgctcggctgctgtgctgtgcgcgctgcgcggtgcacctgtggcctgtgcgggtgtgcggcgacggccgggagcacgggacggtgggaagcaggaaggatgggttgttcgacccatcactcgcgacactgctcacgggtgtcacttccacgatgcgctcgacaccctgctacgtcgggcacttgaccggcgtacttggtccatcgagtatcgctgtgtggtctaccagcatagttgcgggggtctacctggaccgctgggaggcgacctgcttggtgcgccgtccggagaacagtctctggggtgctgaggtctgctcagagcactattccatctctgagcgggacacagctgaggcagccatgcaagatgccgcacggcgtgtgctttcgcactactgctcagttctcggcggggtagccgacagtctcaacatgaagtattaccctcgccgtccatctggcagcacaggaggcgtgattgtttcacctgtcggtgaggacaatcctaggttgagcagcacagtcaacctagccgtcgtgctaaacatggagctggaccatgcattagacgagctgagtagggctcgtgctgagatcgcccagttgcgggctgagcgcgcggagcgtcgtcacctggatgatggttcccccgctcccattgggactcagcacccgtacgctcacctcggcgtggacaccagtcttatggcaatcccgactgcaagacaaagataa

SEQ ID NO: 35131 - DNA, 228 bp, Zea mays
  Peptide Sequence Number=SeqID_78506
atggcgtggccatgcgcgcgttcccggcgcatcctcggtgagaacgatccggttgaggagcccgaagaactcgcaggagaagcccttgagcagcagtcggtggcaatgagattgatggttcttggtattggctcttgtaatggttgtcagcattgcaaccactgctcaggagaagatgaagccgtggaaggagacttccaggagttccaagactacgacgagttctag

SEQ ID NO: 35132 - DNA, 870 bp, Zea mays
  Peptide Sequence Number=SeqID_78507
atgacttctcacggatcctcggacgaagggaatgcacagtcccacactgacgggcttgcacgagagggttttccccgtattttgtgggaggtgcttcagggggccggttacacgacgcctcctcagtacgcggtgcagcagttcgagaagcaccgagtgccccgctgtagggtgaggatgaccctggagcctcatcccctgcagcgaggctggcgttcgctggactctgagtcctttggataccgggctgaggatacgatcgaggcgattgctcttcacggactgaccactttctgcggattccaccccttggagttgtccactgaccccattggcttgttccccgctgagagggaggacgacccaatgtggaaggaccgagtggagcatgccaaggacatctgggctatctacccaggtctgactgctcacttgacggtgcgttgcatgaatgccctgtatcgtctgctagtgatgcgtggtgaggcaatgtcccatctgatggcgttgttggaggcaactaagatcaccttggataacagagaggagtttgtggttgacttgtccactgagatggtggaaaaggacttacaggtggagcaactgtcaaatgagatccaagagcttgaggaactagtgggaacgagggagaacaccatcgaggttctcgaggatcagcttatcaacactcagcagcagcttgcggaggctaacgagcacctggatatgcatcaccaggagatccaggacatggaggccaacgaggatgtcgacatcgagggaggcgaggagcctgcctccagcttggacactactggctcagggagaccaccttcccccgagtcgagtgttgcctcgtttgctcactag

SEQ ID NO: 35133 - DNA, 306 bp, Zea mays
  Peptide Sequence Number=SeqID_78508
atgccggccggcgtcaccgaaatgcttgcgtggcgcgacggttggcgtagttcatcagtgcaagcaaagaggacggatatagaatctacaatacaaatatgtattcttgtttttaacatccagcttgtaaagattcataaaagttcagattaccgctttcatccgcaacactgtgtgcgtgacaatgctggtctggcccatttgttggctctaggcccaaactatgcagctacaaacgtgggcttcctttacctagtggctgtgatgcaccaagttagtcctagtcttcatctttatctttactaa

SEQ ID NO: 35134 - DNA, 357 bp, Zea mays
  Peptide Sequence Number=SeqID_78509
atgtcaacctgctttgctgattgtccctccccaggcccacgaaagaatgaccttacgatttattgggcccttggtcctttcgtgaggtcttttactcttccagtggacccgggggatatctgtcccccacacgcccccgatctttgggttgattttgaggtaatcaacccaaatatcccaggtccagcttgcaggtactacctcactgatgagaccggggtgcacttcgtttggcagcccaaccaagagtcatcagtattcgtcatgtcgcgcgcgttcgacgactactatatcgagaactgtggcgtcatcttggcgccggaggtgacacagaggaggatcgacaacagtgactag

SEQ ID NO: 35135 - DNA, 261 bp, Zea mays
  Peptide Sequence Number=SeqID_78510
atggtggtgcaaggggcatctctggctgaggtgcaggggaaggaggcctctcagactccacctcccgctgaggcgagggggaagagtcctgctgctcttggtcctgctcctactcctggcgtcggcgctcctgctcctcgtgcatgcgacgatgcagtctctcaaggtgactcgactgacctggcaccatgcgacgcaatggatgctccatcaggcgagaaggcaaaaaggggatcacagacttacgtgcagtgcacctaa

SEQ ID NO: 35136 - DNA, 237 bp, Zea mays
  Peptide Sequence Number=SeqID_78511
atggaggggacggcggagctggctgctgctgagttgctttctttgggcaatgattcgcccaatggccttgttccccacagtggaaacacgcacgacttcctccttgcgctggcgctgcttggttgctctgacgctggtattgatttcctccttgctggttcttctgacggtactgttgctgctgctgaggaaactgcctatagtactgctgatgctggtgctggtgaccttgcttga

SEQ ID NO: 35137 - DNA, 627 bp, Zea mays
  Peptide Sequence Number=SeqID_78512
atggctatggacacaaaaggccgctacattattctcaatgcgattgctaaccagcttcgctatccaaatagccatacccactacatcattctgtacctgtttgccgaggcaacccaggaaattggccaagagcagataacaagggttcttctggaaaagttaattgtcaaccggcctcatcctcggggaactgataaaggtgagtgcctgtgcgttgcaacggaagtaacaatagaactgaaaacggatggagagtgcaaacatcactataatatacaaaatccggacaagtacatagcttctgttcatagcaagagccatataaaactgatgaacaagattagctcaaagaaatatgataccagcaggaacaagattgctaggaaactcgattacatttacttcaacaaaggttcctcagaatactctgttcttgcagctggttctgtcataaaggtcattttacatcttacagctatacgtgggttgtacggaggaatgagaatgagaatggactttgcgggaactatcgacataaagagtgtgtttgatttaaattttgaaatcttcttccttgaaaaagcagaagctaaaccaaagaaacttaacttttctacagctatttaa

SEQ ID NO: 35138 - DNA, 234 bp, Zea mays
  Peptide Sequence Number=SeqID_78513
atgtcatgtttaattcccagcagcagttggccatgtgctcctagccgcacactgccgctgctctctgcttggcgctctcctctcccgaccacagctacaccacacgactcggaaaaactcagggagaagctgaggcaggagtgcctgcggaaggggacggaactggcgcatggggtggctgacgccctcttcgctgtaccacacaccgaggataaaggcattgaagagcactaa

SEQ ID NO: 35139 - DNA, 1113 bp, Zea mays
  Peptide Sequence Number=SeqID_78514
atggcgtcggagtgggaaatggccatgggggtggagctcggcatgggaatgggcggcacgtaccaccacaacgcctccagcatcaccaccgcgccgatgatgatgagcagccatccccacagccacagcggcggcgccgccagctactccacgccgcaccaccaccattactacggcgggatgccgcccatgggcgacgccatgcgcgtcgacgacctcctcgacctctccacccccggcgccggcgcccatgagttcttccccaccgcggcgccggccactgacaaggggcaccactcgtcgggggccatgggtgagccctcacccaccgccaactcgtcggatcaccggacgtcggccctctccttcgccgatgagttctacatacccaccgaggaagctgcggagctggagtggctatccaagttcgtggacgactcctattcggacatgccgaattactcgtccgccacgcatgcggcgatggcggcggcggctgctgctgctgctaacgcggcaggcaacggaggaggcaccacctcggccggtcaagacagcggcgtcgccgcggcgcctggccgcggcgcgcgcagcaggcggtcccgcgcgaccgccgcggctgccgcggtgtggcactccctcgtgccgcgcccgccgtctcagtcgtccccttcatcgtcgtcctgctcgtcctcggacttcccgtcgtcgaacaagccggcgcgcccgaacggcggcagccgcggcaagaaggtcccgggtccccccggcggcgggcccgctggcggggaggcgggcctggagggcggcggcgtgcggcggtgcacgcactgcgcgtcggagaagacgccgcagtggaggacggggccgctgggccccaagaccctctgcaacgcgtgcggcgtgcggttcaagtccgggcggctgatgcccgagtaccggccggcggccagccccaccttcgtgctcacgcagcactccaactcgcaccgcaaggtcatggagctgcgccgccagaaggagctcatcctcatccgcggaagccaccgcgacgccgccgcaggatccgccgccggcgggccgaggccggagctcatgttccgtgactacggc

SEQ ID NO: 35140 - DNA, 459 bp, Zea mays
  Peptide Sequence Number=SeqID_78515
atggacgtcctcaacaggacgggcatggccgacgcactccgtgagtacatccaaagggaccgccccttcctaggcatctgcctcggtctccagctgctcttcgattccagcgaggagaacggcccggtgagcggcctcggtgtgataccacatattggctggaacgctctccaaatcaccaaggacacaccactgttgcagggagctgatggccagcatgtgtactttgttcactcctaccgcgtactgccttcagatgctaatagagactggatttcctcgatatgcaactatggtgacaactttatatcctccatctcaatgggcaacattcaggcagttcaatttcacccagaaaagagtggagctaccggactttctattctaaaagaatttctcagacctaactctcttgggaccaaggcgcgtgaactcttctactacctcaagggtgagtag

SEQ ID NO: 35141 - DNA, 177 bp, Zea mays
  Peptide Sequence Number=SeqID_78516
atggacgaacggatctcgacgtgtcagaccaccgaagggaaaggcggcatcatcggtcatgagcagggcgtggagtacgacgacatcgggacgtcgccgctctacaccttctcgtccttcgccctgccgaaccctggtgccgctgacatcctcggtatcctcagcctcatcctctag

SEQ ID NO: 35142 - DNA, 363 bp, Zea mays
  Peptide Sequence Number=SeqID_78517
atggggacaacctggggtggggtggtgtgtaaagaaaggcctaggttgtacagacccgatcttcactaccaaggtgaatggccaaggatacactacgtagcctttacaaagactcccctggtgcatagctgcttgttaggtttcgccaatcgtacaaacgcagtacacctccccaagagcgagcactacgccccggcccccattgacggccctccagcaaagacaactactcccccaggttcatctaattattcagctaagggtgtcccactcatggttgcactgttatcccggggtggtcactccacgaacagggccttacggagaggtactcaagaaaaagggcctcagccccctaaataa

SEQ ID NO: 35143 - DNA, 649 bp, Zea mays
  Peptide Sequence Number=SeqID_78518
atgtccaaaccggacaaaactttccccctccttatcctcctggtgctccccagccttcttaaccctggggttggaccgcacgagttcggattgagtgactgcccacacagtctcgagtggttgtactataaaggagtacaggtagtgaaaatgacaagtcggtccttatatgaggggacaatccttctgctcacgcctaaaccagggaaggatggacttgccttcgtcgaagctttcctggcacaaaagatctacttccgggagatcaggctccggcccttcttccggggttacgggatccggatccgcgcccagctgcggcccacgtgcgagggggacggcgcgggcgcggggagcgacggcgtcactgcgggcccacctgtcagcgagagcggaggggggggaacggcgctacggtctgacggcgcgggcgaaccggccgagcgggggagaaaggccggccgccggtgggctcgacggcggtttgccgctggtggcccggttcttggtccacgaggaggtggcttagcacgggcagaggctggcgattctaggggtaggcttaatttggctagagggggttgggagggggctgtccgcggggagggggcagagctccgcggcggggatcgccgccggtgggctctgg

SEQ ID NO: 35144 - DNA, 2559 bp, Zea mays
  Peptide Sequence Number=SeqID_78519
atggaccatgacgatactgattttcagagccaaaattttcaactagctggtgtaggaagtagcaaattcccatcaggtttgcgaccatttgcactgccaaaacttgatatcgaggaccaactacaaggccatcttcgatttgataatttgatagattcagaagcatttttcagcgtacaagggcacgagaatagctggattgaggttctgtccactggaagcagtgttgttgattttagctctagcgcagctgaatcttgctcgatatctaaaactaataatgtctggtcagaggcaacgtccacagaatctgtcgaaatgctattgaaatcagtgggaggaaatgagacaactggtaacatggacagtaatgctcaccttcagttaattggtatggacagtcaaactgatcaatcgagtgttcatcctaaatctagtacctccccgacagatagtactgtagtgccaactgagaaagatcagtcttggagcactcattctagaatgactgctgacctttcaaacactgagtctcagcttgaacattttgtgcctttcttactggacaagaaagctgcgcaggcagcagattctgttgctgagaagtgccttacaggtgagaagttgtcctcttcaaacaacacaccaggaagctgcccaactgttggcaactattttggggcaggccatgatgataattctttggacaaatttaatgtaccctcagctgaagtagattcaaagaaattgaataatgaatctttcccagagttggctcccctgcagaacatatatactgattcatatcacttcaagaaagatattaaagaatctgaggctgttgttactcctcaagattcgaagttttgccatatcaatgaaaataaagttgaaggtggactacaagaactgcaaaatttgtcatgtgctggtcagtccttgggcgctgtaaacttgtccagtccaccaagcaatgaaactctattgtcaaaaagttctgatggattactagaagccatcacaaatccagttaagatgctgcacaggagcgatgatacttgccataaagtgaacatcactcttcaaccatcttttttagcagtgcaacatggaactgaaggcctgaaaagttcagttcacaggagcaatgagcttgttgttaaggagtttagtattggttcaaattctcttatctctcaccaatctgaggcagacccaagaaattctaatccacatcctgtcagttctgtgtctcccaaaagtaaaattaccgatgccacttgtgttcctgaagaaacaaacaacactgaaacgaatagtacaaacacctgctatacatatgatgaatcaaaacatgtagtgctggagtacaatcaaggttctgttgacaagctaaaaagtggtgacatgggagaaaaggcaactggggaggaaataccagcagtttcagggagcattgagcaaatgatagaaaattatcatgaagaaaatgctactggtacatccaacaataaggttggcctttccgacagtattgcacctgaaaactgtgcagctgacactttgaatgcttcagaggaaccaaacagtccttcgttaaatcatgagaggtcatttgaggaacacgaattgcctgctttaggagaggagcctaaaagcacaaatttactcctttctacttctgggtttcaagagaaaatttcagcatcagtgatcagttctagcagtggtgtcatgcctaccattgttactgacaacgttgctacttctgaggataataatggttgttcaataggtgtttcttctgttgattcttctgttttactagacgaaaaggatttgagaacgtccacagtgaataatgaggagccattcaaggaaggcactaaatctgctttaggagatcaagaaaacgatggtatttctcctggctctgaacaaggaggggaaatgccagctgtgcccatggattcaaacattgccgtttatagtgatactgtttctgctacagaaaaggagaaatacaaggaccatcctaattctttgggtagtttgaccacaggaggaacccaggataaatcaggtaaccatccagatgctctttcactgaaatgccagactggtagatcttcaatacatacagatcttatagatccaaccacggcacctatgttaggtatcccaactggaaaggtggctgaaaagatagtaaaaactccactgaatgcaagtgatgatttgaatgcacatatgcaagcctgccaggtgcacaataggtcatgtgccaggcttatcttagttattatggtgccacctatgttgtattatcacctttttgacctgtctaatgtgcatgttgggcttcaggagcggaaaaagttgatgttcgtctactctaacatggtatcaaagccagaggtctcgagttcgaatcctgacaaaggctttatttgtgcctccacctatttattttcacgtttgcgcctttctctctggctgcacgtcagtgggggtgttgaagtgtataagtggaaaaactaccttcttccaccagcttaa

SEQ ID NO: 35145 - DNA, 225 bp, Zea mays
  Peptide Sequence Number=SeqID_78520
atgtggctaaaaatcaccggactgtccggtgagccaacgacgcccacggccaacggtcagctgcgcaatctacgggcgacgcgtgtcttgctccaacggtcggttgggtacaccggactgtccggtgtgctccggacagtgtccgccgaagagaacatcagaatggtccgcgagaatttgaaggcagcgcagtcccgacagcgaagctatgtgaaagtcgcctag

SEQ ID NO: 35146 - DNA, 333 bp, Zea mays
  Peptide Sequence Number=SeqID_78521
gatttcggaggcggcagtggtcgtgcggtttcggatggcttggtgggggccacggggcaccgagcgcaggcttttatagggtcaacttccccaaacggccgagcgaacttcgtggaggtcgttgcggcaaggaccgtcgactccgcgcgactttcacggggaagaagacgacaccgcacaggagagtctgacgagtgggcccaagtaatcggtgagagaagggaggggaaaagagggctgcaccgagcggtccctggcgtcagcggcatggccaaggcacgcgcagtgtgcgatggggcggctgacgcgctggccccaccagcaagagactag

SEQ ID NO: 35147 - DNA, 144 bp, Zea mays
  Peptide Sequence Number=SeqID_78522
atggaggttaacttgaggaaaccacgtgcccaccacaaggggttaatggggacgcccttgacggaactaattaggaaaaagtgtaaaactggtatactagccgagctcacggtcatgagcagctcaggactctctgatgattaa

SEQ ID NO: 35148 - DNA, 1199 bp, Zea mays
  Peptide Sequence Number=SeqID_78523
aggaccgggccccgccgcggacctggacccgagcactacgcgttgccctcgggatgcgcccccacgccaccaccttggccccaagccgcccccggcaagcgccccactcccaggcgggtccacgccctctccccccggcgagcccctccccggcggcctgcgcccctttcccggcgagcccacccttgggcgcatcccacgccgcctcccggccccgtgtcgcgcccccccgacgagtcccgccccggccgagcccctccccgcatcgcgccctcccggccgagcccctccccggccgcgccccgcgcccacgctccggccgtgcccccagccgcgcgcccccggccgtgccccctgcccgcaccctcgcgcgcccctgcccgctcccgtgcctcggcgactcgcgtcccgcacgcctgcacgagaacgatcttgttgaagagcctgaagaactcacaggagaagcccctgagcagcacctggagctggagcagcagggctcttctttctcgctccagcaggatatagagtctgtgaggagttgctcccctgtgctcccactggaggcgccccctacaccaccactgagcgccccagcccctggagtagctgctagaggagacccagacgacggaggtggtgacaacagctcgagccacgacaccgacttttctgctgaccaggagccggaaggatgggttgctcgacccatcactcgtgatgctgctcgcgggtgtcacttccacgatgcgctcgacaccctgctacgtcgggaacttgaccgacttacttggtccatcgagtatcgctgtgtggtcttccagcacagtcgcagggtctacccagaccgctgggaggcgacctgcttggtgcgccgtccggagaacagtctctggggtgctgaggtctgctcagagcactattccatctctgagcgggactcagctgaggcggccatgcaagatgccgcatggcgtgcgctttcgcactactgctcgttgctcggtggggtagctgatggtttcaacctgaagtattacccccgccgtccatctggcagcacaggaggcgtgattgtctcacctgttggtgaggacaatcctaggttgagcagcacagtcaacctagccgccgtgctaaacacggagctggaccatgcgctagacgagctgagtagggctcgtgatgagatcgcctag

SEQ ID NO: 35149 - DNA, 840 bp, Zea mays
  Peptide Sequence Number=SeqID_78524
atggtgcccgccggtgggtctggttcccagcagcgtacacccgccgaggacgttgccggcgatctatcagcggctaccgcatcttcaacatcagcatcggtgcgaaatcctccattggcagtggccgaagaggttcccattatacttgcctccaccgcgctgggtggcgctggtgctggggtggcgccgtcggccccccaggatctgcctgtcaccgtcgtggcggcaccttcgggtccccgagttctagctgagggtccagaggtaacgctgttgccaacagccgccgagggcctagcggcgaggataccgtcggatgcaccatcggcggagcacactaaggcggtgtcctgctattttgcctcagaacgggccgagtttgagcaggagcgtgaggacttcaaggaggacatccgaaaggtgtttgaccgagaggacgaggtgatccagaaggagaaaagcctggctaggaaggaggtacgcttagaccaaagggaggagaccgtcacagcgctccaagctaagctaaaagcttataatacggtgctagagaaacagcgggtcaagcaggctgcgactgaggtgaagctgcagaagctgcagcaggagctcgctgacagggccagcaacactgctcgtgccgagggaagcctcaaggcgggggaagcttcccttgcgaaacgggcagctggtcttacccggcaggaggaggacctcgccttcagggaggagatgtgggcaaggtggaacaagctgctggatgagcttgagctcgaggccgaggagaggaggaagcgtttggaggagaaagtgcaggctctggaggagcaggtctgctag

SEQ ID NO: 35150 - DNA, 585 bp, Zea mays
  Peptide Sequence Number=SeqID_78525
atggtgcagagacttactcggtctacgttcaccggcgatcgggtgaagtccggtgaccgtggactggcttctccggtgaggcaaagtccgattccttgctcggggagcttcaccgaggcatgcacggtctactccgagggtcgggcgcggttgggaaaggctctgctggccggtctacggtggcgggggatcgggtggtcgctggcacgccgtgcgcggggcaatgccagtgatctggtgctccgggtgttccagaggtattttggcgccactttgtcaattgggccaagtggttttaagtttgggatcaagggtattaagtgcactacatcttgtataattggcccaagacatgatcaagtggttttcataactttttggtcatacttacctatagtactccaattgtccacatggggtgcattagggttttgggcaatttctccccctttaatgtacatgagggtgtgcgcggagggcataagatttataccggttcgaacagaatgtccctacttccagtcatcagtggcttgcactactggcaccattgaggatcaaacttatagtagtggttacaggtag

SEQ ID NO: 35151 - DNA, 294 bp, Zea mays
  Peptide Sequence Number=SeqID_78526
atgtcggctctaagaaacaatgaggatcccctgctcgaggaagtgttgaccacgacatgtggggtaccccctgttacaaggaaaaggcgctgtgccaagtccctggttggcacagtaaacggcccaccgtcgcgcaacatcaatcgccttgggggtcgaggtgctctggatgtacgcagcaggcctggacctactgcatggaaggcactggaccctgtgcctagcgagcggacctccgggacagatcccggacccttccaaatgtggttcggacggttcaccaccgggtcctag

SEQ ID NO: 35152 - DNA, 81 bp, Zea mays
  Peptide Sequence Number=SeqID_78527
atgccctcgctcggctaccccaactggcacccggtggaagactctgagcaggagctcacagaaggcaagttgtgcccttga

SEQ ID NO: 35153 - DNA, 273 bp, Zea mays
  Peptide Sequence Number=SeqID_78528
atgccaaatcaccgtgcaccatgcgagcacgcacgcgctgctttgcgtgccatgagcgacatcggggccatgccgaggccgaccgcgtggggccgcgcgttgccgagcttaaggccgcgcgccttaggcccaccctgccgatttcttggtcgcgccgggttggcacttctcgaccgcaccggtttcctcttggagtacgccattccgcctgccgttattcttatctctgcgcttatcatggaatgtttcgggaaccaccagaagggggattga

SEQ ID NO: 35154 - DNA, 123 bp, Zea mays
  Peptide Sequence Number=SeqID_78529
atggccttgctctccacagtggaaacatgctctgtttctgacctgagctggtgctgcttgattgttctgctggatactgcctttggaactgctgctgctgaggtggacgctggttctgcctga

SEQ ID NO: 35155 - DNA, 1704 bp, Zea mays
  Peptide Sequence Number=SeqID_78530
atggcgtgtgggtcgcgaagtcgtcgaaccagcgagacggtcgacgagtacgagaagctggttctcagaatgaaccctccaaggttgtttttcttccccccaaccccattccttttgctgtgtcgtcgccctcttctaaccgtgcctgcttcttggccgtttggcaccccgcagggtcaccgtggacaacgactccgacatgactgccaccttggtgaaggcaagcgccgccgcagctctgcagagctcttcttattgtttcttctcctctctcttagcgggtgttcgttcgatctctgcctgctgcaggtggacagcgccaacaagtacgggaccttgctggaggtggtgcaggtgctgaccgacctcaagctgaccatcaaccgggcctacatttcctccgacggcgagtggttcatggacgtgttccatgtcgtggatcaggatgggaataaactttacgacggccaagtcatcgacagaattgagcagtctctgggagcggggtcgctcagcttccggggcccgccggagcggctggtggccgtggaggcggaggcggaggaggcgcagaccaccatcgagctggtgggcagggaccggccgggcctgctgtcggaggtgttcgcggtgctggccgacctcaggtgcaacgtggtggcgtcggaggtttggacgcacgacggccgcgtggcggcgctggtgcacgtgacggacgccgacaccctcggcgccatcgacgacccggcgcgtctggacacggtcaagcgcttgctccgccacgtcctgcgcgggagcagccgcgacaagaaggccgcccgcgccgccgtatcgtcggcgcgcgtggagcacgcgccgcgccgcctgcaccagatgatgcaggctgaccggagcgcccgccgcgagggcgggggcgacggcgacggcgaggaggagcgcgagcgcggcgaggcgtcgggcaacggcaacggcgtgccggtggtcgcggtggaggactgcgccgagcgcgggtacacgctcgtcaacgtgcggtgccgcgaccggcccaagctgctgttcgacacggtgtgcacgctcaccgacatgcagtacgtggtcttccacggcaccgttatcgccgagggctccgaggcgtaccaggagtactacatccggcacctcgacgacagctccggcgaggaccgcgaccgcctctgccgcggcctcgaagccgccatccaacgccgatgcaccgaggtccacgtccatgccgcacccgtgcacactcttgcatttctttcactcactccaggctccagccaactctgtctgaacgcgcgcggtcctctcctcgtccaggggcttcggctggagctgtgctgcgaggaccgcgtggggctgctgtccgacgtgacgcgcatcttccgggagcacgggctgtcggtgacgcacgcggaggtggagacgcgcggggcgcgagcggccaacgtgttctacgtggtggacgcgtcgggggagcccgtgcaggcgcaggcggccgtggacgccgtgcgcgccgagattggcgagcaggtgctcctcctcgtcagggagcagcagcaggacgccgccggcgggccgaagtcgccggcgggtgccggcggcaggcgctcgctcggcaacatgatccggtcccgctccgagaagttcctctacaacctagggctcatcaggtcctgctcgtag

SEQ ID NO: 35156 - DNA, 444 bp, Zea mays
  Peptide Sequence Number=SeqID_78531
atgacgcactcagcaagaggcagcgcaatgaacaacccacacccgaaggcagtctccgcacctgcagcttcggaggacaaccgcaaccccccaggcttcgctccaccggagggcgcggacgccactgaggatggcgaagtcatcggcgtttcagcagaagaacagctacagctgcgggccttacgcatcaagaaccgcaacctccagaagcagaagaagatcctcgaggccaagcgccaacgtgtctctgcgcaggccaaggtgcgccagatgatacgcgacgaggagcagaaggctcaagagcttgagcaagagattgcgctcatgcagagcgaaggccaacttggtctgcaacaaggcccacctctccaacagcgcgcgccattcgaagacctgttcattcctcagcgcggacccgtcatcccgcacgccgcagcattctaa

SEQ ID NO: 35157 - DNA, 870 bp, Zea mays
  Peptide Sequence Number=SeqID_78532
atgaatgtgttgtctcgcgagggctgcagacactatgaggtcttcgaccaatcagacgagagctttgaacgcgagatcttcaaggctgaagaccctgttgtgaagcagtcagtggggccactttttgataggatgtggggggcgcatggtcgggaggctgtcagggagcgatccgaccgggcgagagagcagatggagcgtgccgaggacgtcaaggaccttggaggtctggtcggtgcgctgcccgaggctgcggagggcaatccggtgctgccctcggatgccggtgaaggcctctcggccgtgcccgtgcctgctatggccggcgaagaccctgcgtcggcccctgagccgacggtcgaaggtgccccagaggtggtggcggagccggttcagaggtttttgggcctgcgcacgcaaccgctactaacaatgctaattttgtggcggcttcgacccgtggttgctaaaaatgattcggatgattccgtgtctaagttttttgagtctgatgtttctgggagttcggttgtgtggacggaagagtcttcggatgaggacttggattattttgtggccttggatgtggctgcggcggaggcttctccgcgtgtgatggatgctgaagttcttcctggtccgagtgctgggcgtaggcggcgaagggcggtggcgaagcggagagtgagtgaggtggagggtggtcgtcttcgtgtggacggggctagcaagcgggaattgttgtcctcgccggttggggcgagtgtaggtgagggggagttgcgaaatctttttgagggtaaggagttgaggataatgctgttcaactacagggagatgggtatcatcccgaaggtcgagccaatgtaa

SEQ ID NO: 35158 - DNA, 612 bp, Zea mays
  Peptide Sequence Number=SeqID_78533
atggccggttctaaagatcacaccaagatctccaccaccaacatcatcaagccggccatggaggcgctcccggctgatgaccaaaggccctttgaagacctcgtaatgcgcgatgagaaggaggtgatgcggcaatggaacgaacaacgcgacaaggaagaggcggaactgctgcataaactctccgaacggcgcaaggaggcggcggacaagtacttgtcacacttcacggtagatcgccaccagaagatcatccatcaaggggagatcgatatggaatctctcctacctccacttcagggtcccgctagccgagaactgcgcaatatgcacagtttccacattcatcgcagcaacattatggtgccccaccagcaacacattataatcataccataccacctcatggacatagggctgaaaactgttcggccacaagagagcctgagaggtatagggcaggagctggtgacattaataggacacctaacacacacctcaaacatccctgggaggaaagccgacagagtgatgtcaggcaacctgagatttccacccacaaactcaatggatggtcgcgagacatggcagagaggatcagagacgaagtag

SEQ ID NO: 35159 - DNA, 276 bp, Zea mays
  Peptide Sequence Number=SeqID_78534
atggttaaagattttggcagcaaaacagtgcaaatagcagtaaatgttgtgtgccgcagggggagtgaatcgtttctcgacaacgagctcagggaaggtgtttttgagaccttcggcgctccgaagcttaagaaacttttttcatggatcaagctcgttacgaaaaacgatctagcaccgcgaaaggggctactgttgggtctatgcttcgtcgccgaaggtcttcaagggagaagctcaaaagatacaaaggttgacacagcgccgaagctgtga

SEQ ID NO: 35160 - DNA, 402 bp, Zea mays
  Peptide Sequence Number=SeqID_78535
atggaagggtcgctactgccgttgccctctcccttgcagtccatgtccgtcgatggaagggtcgctacagcccctgccctcgcctccgcaatccatggacgcccccgccccgagacgtgcccacctagagagccgctcgctcaccttgctacccggcccacacccgtctcgttctcctcctcatcccggcgctcctactactcccctccatggcgcgcaggcaaaagctctgtggggtccctttgctacgtgggggacgaatcagcgagggcgcttagcgtcggcgaggagctcatggccaagagaccatgccgttgggtgtacaggatcgacggactgccctatctgtgtggctgccatataagcccattgtttcctttggctttttccatacgtgattag

SEQ ID NO: 35161 - DNA, 1185 bp, Zea mays
  Peptide Sequence Number=SeqID_78536
atgtcgtggttcgggcaccaccaccacaaccagccggctcccccggcgtcgggccccaaccaggtgttcaagatcttctgccgcgccaacgagaactactgcctggccgtccgcgacggcgccgtcgtgctggccccggtcaaccccaaggacgaccaccagcactggtacaaggacatgcgcttcagcacccgggtcaaggacgaggaaggcatgccggcgttcgcgctcgtcaacaaggccacggggctcgcaatcaagcactccctcggccagtcccacccggtcaagctcgcgcctttcagcccggaccaggaggacgcgtcggtgctgtggacggagagcaaggacgtgggcaagggcttccgctgcatccgcatggtcaacaacacccgcctcaacttcgacgccttccacggcgacaaggaccacggcggcgtgcacgacggcaccgccgtcgtgctctgggagtggtgcaagggcgagaaccagagctggaagatcctgccgtggggtcccgaggccaactcctccgcggcccacgcgggaggcccgcacgccgtgcgcgtcttctgcaaggccggcggcgaggactacagcctcacggtgcgcaacggcacggcgtgcctggcgcccaccaacccgcgggacgagtaccagcactgggtcaaggacatgcgccacagcacccgggtgcgggacgaggagggctacccggccttcgcgctcgtcaacaaggtcaccggcgaggcgctcaagcactccacggggcagggccaccccgtcaagctcgtgccctacaacccggactaccaggacgagtccgtgctctggaccgagagccgcgacgtcggcaacggcttccgctgcgtccgcatggtcaacaacatctacctcaacttcgacgccttccacggcgacaaggcccacggcggcgtccatgacggtaccgagatcgtgctctggaagtggtgcgagggcgacaaccagcgctggaagatcctcccttggtgtaagtcaactactcactgtgcctttgcggaacgaacgaaagaaactactagctggtaccctaataataattctgctggctgcggcgatcccaaaataaaagaggccgggtgcgatgcatctcggacttctcgagtggtgtttgcgtcagacagccagccactgtggggctag

SEQ ID NO: 35162 - DNA, 480 bp, Zea mays
  Peptide Sequence Number=SeqID_78537
atgaagcagtggcgtgacgacgtcgaccggttactcggtatggcgcattctacctcgaccagatctaggccccggtcatcccggcgccaacgcgaagccacggcgtctgtgcgctcgacttccgtaaggggtgcacagactgatgacctccgggcagagctcaaccgcaggcgtacgggagaggacgcccggatctccctggaaagggcgcgcgagcaccgccaaaacatcgagagccgcaacctcgatcaagactttgctgcggcaactatgccctttttgagttcttttttgcacaactatgtcctttgcagtttcattttaaaaaatggacccgaacctcggcgtcatcatcattggcgccgaggtaacgcacaacgacgccagtaccattggcgccaacttttcctacgtgacagacgatgtggcaagtctcagggggtcgacgtcatagatcttggcgccgaccccctcgcataa

SEQ ID NO: 35163 - DNA, 1551 bp, Zea mays
  Peptide Sequence Number=SeqID_78538
atgtaccgagaggcgttgtggcagaagagaggtcgtcctcgggagttatatccggacgtatctagtaaggatgctcctgttcctcctgaactccccgtgcctaactgtgactgtggcagactggcttgggtacatcaatcacaacatccagacacggctgctcgctgctactacctttgtggcactttggacggacatcagaagtgtttctttttccagtggatcgatggtcctgataaatttgaccctcgatatcttcttttcgttaattggttgagtggaaagacaagtcatgagcgttttaagcgttgggtacctcctcccccgaatcctccaccaatgacggatgaggagaaggaggtagcaacagaaagacggatggactcaccgcctcgatgcgattgtggagaccgtgctgtcatcgacgaagactatgacaagcagttctgttgtccgaacattgattatccatacgggtggcgtaagtgtcgtttcagagagtggttgtatggtcctttgtcccattggccagagccagaggtaaaggaaaagagatacatggggtgggcggcagaagaggtcaaatttgatccagtactctgcaaatgtggtattgaagctaagtatggattagttccttcggagcttggcgttggatatttttgtggacatatggtcgattacgatgaggagacgaggaaatgcagttgggagagttacgacgacaaaggagaggtgatgcgcacaatagagtccaagagaataatgggacagaagatgcgttgtggatctcgactcgttgattcgtacattaacgatcgcatacgcgacatgcgtagggaagcaaaatctgccttttatgatagcccgaagcgtgcagagtataggaggttgaaggcggcagatgagaagagagcacaggatgcaagggaatgggaagcggctcaagccgagaaacagatgttggataatcttgctgatcgcctcaagggaaagattggaagcggcgtaaactatttggccgatgaggcgcatgcgagatatgttcaggataaaatggcaacggttgagctgatggaggaggaggacgacgacacatctagattgagtgagcttatcgccctcgcagaggcaggattacatgaagaagaggaggacgacatgtcaaggttgagtgagctcatagcactagctgaggctggattacgtgctcaagaggaagaggatgagtttatgtcacaggccgccgcagaggtagaggcagcttattacaagaagaagtctgatgaggctgagactgaggatgagctattctcccaagctgcagatgaagcagaagccaattattctatagcattctatcgaggtctaaatggccttttcatctttaagtcggttcccctttctgcgaacatgccgaagctttcctgcttcacagcttcggcactgtgtcaaccttcgtatcttttgagcttctccctttctgattcaagtccgaagatacctgttcacacattatactccagaaacattgttaaatcatgtttttga

SEQ ID NO: 35164 - DNA, 1014 bp, Zea mays
  Peptide Sequence Number=SeqID_78539
atgcaggcggcatgcaaccgcgccaagtggacgcgcttctccgactcccaacgcgcccagcctggaggcccaggcccacgcgtcacgcaaccggcgcgccggatgctgcatgcaagcaactgcaccaccacttgcgccatcatcgcgcctcttcggttgcggaaccaataccgcgactcgaggcgacccagcgcacgacccagcggcgccagcctggagcgacggtcaatgcggccgaaagggcagcaagagaaccccctctcacggcgtgaagacgacgcgcccgtgatccgttcctcgaacggctcgcgcacgcgcgacgaccgccccgccaaccactcgcctcgtcgcattaactccgcggcgggacaggcgacgcttctggcaggagaagcgggcgacgcttcgccttcgccgaaccgggctccgagcccccctactgatcagaggttcgaaggctggccccccgaggggttcaacagccgcctcagatcgcgtgggccctacacccactactggtcagaggttcgaaggccggccccccgaagggctccacggccgcctcaggctactcgggctccgcgcccattactgatcagaggttcgaaggctggcccccgaagggttcacagtcgcctcagacgccaagcgagggatgaccaggggtacattcgatacataaccaaggctcgggctgcgctcccgagggctcggactcgggctaagtcccggaagacggcgaactccgctccgcccgacccagggctcggactcgggctaagccccggaagacggcgaactccgctccgcccgacccagggctcggactcgggctcagccccagaagacgacgaactccgcttcgcccgaccccagggctcggactccgccctggcctctgccgaacaacctccgcctcgcccgacccaggggctcggactcggcctcggccatggaagacagactcgacctcggcttcggaggagcctccacgtcgcccgacctaaggcgtag

SEQ ID NO: 35165 - DNA, 195 bp, Zea mays
  Peptide Sequence Number=SeqID_78540
atgggcgaaggtgatggaggggaccaaggggggtctatcgcgataggacatggggccgggaaggcaggggcaacatgtgggggcaggcgcaggaaggggccggagtggagggagacgaggatggtgggcgtttggcggcgacgcgaaagaggcgaggagcgcgggttgtgcagcggatgcgccctgtgcctataa

SEQ ID NO: 35166 - DNA, 1837 bp, Zea mays
  Peptide Sequence Number=SeqID_78541
atgtcgtgacgatgatcgtaaagaaaaggtccgagggtgcgaactggacaatagatgggttgtcccttataacccatacctccttcgtctcttcaactgtcacatcaatgtcgaggcatgtgggagcatcaaggctgttaaatacctgttcaagtacatatacaaaggccatgatcgtgcgtctgttgttatgagagatgcgagcaaagcagatgatgatgttgatgagatcaagcagtatagagatgcaaggtgggtgactcctccggaagccttgtggaggatatacggctttgagcttagtcagatatctccacctgttatgcagctgcaactccatcttccaaacatgcacatggtggcgtttcacgagcggcaaatggtcgagcgagtcgtcaaccgtccaggtgctgataggttgatgctcacagcatattttgaggcgaataggctacacgaggaggctcgtggcatcctatatcgtgacttccctgagtggagtcagaacaaaactcatgttgagcagatggtattgattgacattaggaacatgctgcagtcaatgggaaaggacataaagacattccctctacctcctatcatcgacgcggccgcctatgataagattatgtctgtcgttgacaccgatcagggcggattattctttgtggatggacctggtggcaccgggaagacttatctatacagagtgctgctcgcgatgctacgcaaccagggcaagattgcagtggcaacagctacatctggcgttgcagcttccataatgcctagaggaagaactgcccattcacgcttcaagataccactcactattgacgatggcgctgtatgtagcttcacgaagcagagtggaacagcagagttgctacggaaagcgtctctcattatctgggatgaggcttctatgactaagagacaagtcgtggaggcactggacaatagcatgcgcgatataatgggtcgacccgcactgccatttggtggcggtggaactaaggaaacaaatattgacagcgacattcgtcttcctgatgatgtgtgtgtgccttacagtgggagtgacaacgatcttgacaacctaatagacttcgctttcccaaatctcaacgaaaatatgtctgattccacctacatcacttcaagggcgatactgtcaacatggaacgactgggttgatatgataaatgttaagatgattgatcgttttcaaggggagcatatggtgtaccatagtttcgatagcgccatggatgatccccataactactacccacccgagttcctaaacacattgacgcctaatgggctcccacctcatgttttgaagctcaagattggatgtcctgttatattgctccggaatatagaccctgcaaatggactttgcaatggcaccagactggtcgttcgtggcttccaaagaaatagcattgacgcagagattgtactaggtcaacacgttgaaaaacggattttcctaccgcgtataccgctgtgtccctctgatgaagagatgtttcctttccagttcaaaagaaagcagtttcctgtacggcttagctttgcaatgacggttaacaaagcacagggtcagactattcccaatgttggtgtatacttgcctgaaccagtgttctctcatggccaactatatgttgctctatctagagcgacagcccgatcgaacataaagattcttgtcatcccagctgtcgatgggaggaaaaagtcaaggaagggtgtaaagaaactccccaccgtagattgtgggacatataccaagaacatcgtctacaaagaggtcctaacaaattag

SEQ ID NO: 35167 - DNA, 729 bp, Zea mays
  Peptide Sequence Number=SeqID_78542
atggttgctcaactttattctggtttggtgaaggtaccacatgatgtcactggttgcatgataacagctagaaaaagaatgccggtaacagccggagatatgcacagccgatacattcctcagcaagattacttctcagagggactctacacgttcgatattgggcagaatgaccttgctggtgagttctattcaagaacagaggaccaggtcatcgtttccattccaactattttgttggaatttgagaatggtctcaaggctgttatctctagcagacggctgagtaattatttatctactctagagcatcactcatccgagttaaatgcctctgctgaccttttaaaccaccactttaagagatataccaaagtatttgcaagaatctcatcacttgcacagaagccagatgctcttcagaaagggattagcccaagtgatgctgcattcacactgggaattgctccagctttagcaaaggagcatcttctaaatgcagaaaacaaaggcaaaaaccccatgggatgtacaacgcgtggatctccgttgcgatggcatctcactgaaaagttcgactggggtatattgagacactggttgatcaagctggacaacgatgcaattatagtgtcggggaccataattaggggtaccctcaaggctcctaattctcagctggtaacccccatcagcataaagctgcaaaggcctgatgggtgcgattaa

SEQ ID NO: 35168 - DNA, 1170 bp, Zea mays
  Peptide Sequence Number=SeqID_78543
atggctgtagtccttgctgttttgttaggggagctctcccaaatcagaacagtgccttatccctacagcaatgactacagccaatttggttggacaattcttccaccaccttgttctccgacagaaagaagtattatttttcatgtagctttaaaaacaactagccagggtgtggaggaaggaagggataaggcgtttggtttacccggaccggacaacaggacaccgtcgggggttcgctgcaacgcatcgacggcttccgcatcttctcaggccaagctagccagggtgtggaggaaggaagggataaggcgtttggtttaccctgaccggacaacaggacaccgtcgggggttcgctgcaacacatcgacggcttccgcatcttctcaggccaaggttgttcgacgactaccatgatgaagatttttatgggctaccgcggaaatatagtattgtcgctcgggtagaagttaaattcccgattgaaccatgttttcgtgatagacaacattttattttatctgacatcaatggagccaagatcgaggccataacatatatgtatgagacagtcaaacatttcgacaatttgctccatgaaaagcatgtttacaagatgcataatgtaaagttcagtcttcatccgggtgaatttaattttcgtcatctaaatggtcacatggaattgtgtcttgaccaacaaactatcgtggagccatacactgttccgattcaaatggtgccattcccaaaacaaatactcttgaaccttgatgatattgccgagttgccaaacaggactttagtcgacataatggctattgtagtccacttggatacaattcatcgcacaatgtggtgccctttcagaaagattgttataatggatgctagggggtatttacatatcattaaagtttggggtgacctactaaacaaaaatgcactccgctgggcgttggctaaggaggattatggcataataattgggactatgtttagacggttcagaagacaagagtgcctcgaatcttcggatcataccgcaatacacttcaatccgctccatcacaacacccatcattttggaccaattcaaaaggctttggtggcgcggaacaaccgtcagtttgctgttacatttcttgaagaacaaaggcgtagatag

SEQ ID NO: 35169 - DNA, 588 bp, Zea mays
  Peptide Sequence Number=SeqID_78544
atgctctatgctcacctccaccttcgccgcccctgctccccgttcgcctactgcccctacagcaagctatccgtttccatcccaaccctcaaccctctgccacgcgggccgctttctcgccgcgcctgcgcctgcgcccaccggtacctacgacacgtcgcgtcaccggcggatgaggaagaggctgggtacggggagggcagcgtggagggtgatgatctgggacccgcgtcagcggcggcagtggcagcgaccatccgccgggcctccagcgcgtcgcccgtgcggttcaggtgcgtgcttggagaggcagtggaggaaccgcgcggcgaggagggcttggccgacccaagccccgactttcgccggctctgtgcggagcagcttgagattttccgagtgctcatctcccgtgacgccgtactctctcagctaagtctattgcatttaaaaccctttaaggagaagaaaaagggccccaaaaataaaacaggacacacatccaaaacacgcacgcttagacaaggcacacccgggacactaacaaccgccgacctaaaaccccctcactcaaccgagatcaaatag

SEQ ID NO: 35170 - DNA, 408 bp, Zea mays
  Peptide Sequence Number=SeqID_78545
atggccggctcggcccgccccgcccggccgctccctggccggctcggccagcccccggccgtgccccccgccggcgcgccccctggccgcccagccgtccgcccgcccggccccttggccgcctggccgccctggccggcgcgccccctggccgccttggctgcgcgctcgtctggccgtttggccggctcggccgcctggccagcccgacccccccgcgcgctcgcctggccgccggttcaaccgggccggctcagccgccccgccgcccagccggccggtggttatgagattgatggttctggttatgactatggtgctggttgtcagcattgcaaccactgctcaggcgaagatgaagctgtggaaggagacttccaggagttccaagactacaacgagttctag

SEQ ID NO: 35171 - DNA, 954 bp, Zea mays
  Peptide Sequence Number=SeqID_78546
atgaggaaaaaacacggctccgcgccaaaaatacatacatgttcaggccccgacagccccaatgaacaaaagaccggcattcaaagtgccattacaaacggaactccggttccgtccccgcgggacggatgcggccaccggaaggctctcgttcgcgtccccgctcaagggacgcgaaccagacatcaaagccaaagagccggaggccggcccgtaggcggcactgacggcctcgacggtggggaagcttcccccggctgccaccacgtcagcaccgacaacggcgtccgcctctccaccaacgtcgcaccggcgaacgcgggccgctccaaagcgcaccggcaggacgcctcctccgcagagctgggggatggtttccgccaccagaagctggaagaggaggtggccagccgacccgtgcgggaggtagagccccggctcgcctcgctctccgccccagcaaggatgcagggctgcatgatgaaaatccttgaagccgaacgatggctgaaaggtaccaacttccacgaagttgcgttcctccaacgacaaggcggaaggattgcgggtgtccccatctgggggctcggaaggtggaaagacaagccgtcgtgggctgagtcttctccaacacgctccaaggtcctccccctacggcacgggggctgggccccacgcgtcatgcagactggcccagggcagaagaagccaaaccgccgcgcgcggtgcatgggaagcaagcgacgcttcgccttcgccataatgaccgcgtcaaaaaaggccccgagcctccctactgatcagaggttcaaaggctggcccctcggaggggttcaacagccgcctcagagcgcttgggttccacgcccactactggtcagaggttcgaaggccggcccctcggaagggttcaacggccgcctcaggccactcgggctccgcgcccactactga

SEQ ID NO: 35172 - DNA, 1335 bp, Zea mays
  Peptide Sequence Number=SeqID_78547
atgtggaggctcctccgaggtcgaggtcgagtctgtcttccgaggccgaggtcgagtccgagcccctgggtcgggcgaggcggagaccgtcggctgaggccagggctgagtccgagccctggggtcaggcgaagcggagttcgtcgtcttccggggctgagcccgagtccgagccctggggtcgggcgaagcggagttcgtcgtcttccggggctgagcccgagtccgagccctggggtcgggcgaagcggagttcgtcgtcttctggggctgagcccgagtccaagccctggggtcgggcgaagcggagttcgtcgtcttctgggggctgagcccgagtccgagccctggggtcgggcgaagcggagttcgtcgtcttctggggctgagcccgagtccgagccctggggtcgggcgaagcggagttcgtcgtcttccggggctgagcccgagtccgagccctggggtcgggcgaagcggagttcgtcgtcttccggggctgagcccgagtccgagccctggggtcgggcgaagcagagttcgtcgtcttctggggctgagcccgagtccgagccctggggtcgggcgaagcggagttcgtcgtcttccggggctgagcccgagtccgagccctggggtcgggcgaagcggagtttcctatggcgcctgaggccgggcctggctgctgtcagcctcactctgtcgagtggctcagcagtcggtgtggcgcaggcggcgctgtcctcttgtcagaccgatcattggagcggcgaagccacctttgcattaaatgcccctgcgatttggtcggttggcgtggcgatttggccaaggttgcttcttggtgaagactgggcctcgggcgagccgaagctttgtgctgatgggggttaccagctgagatttaggagccttgaggctggtctggttgttccctcatgcgagctggccgtagcccgggtgcacggtcgggtcccaagttctcgggctggtatgttgacgctgtcaacggtttggccggagccgggtttgcgagagcagcccccgagcctctacacagggcgagaggacggtcaaggacagactcgacttttgtacatacgcccctgcgtcgcctttccgcaaggaggaggggggaaagcgccatgttgccctcggagggtgccgaacatggtgtctccggtgagctgctggcgggtaatccgagtggacgcccgtgccccatttgttaggggtcggctagaggcccggaggcgcgctcaaaagtacctgcgggtgatctgccagacccggtcccctttcgacggggtccgagggctcgatgcctccctctga

SEQ ID NO: 35173 - DNA, 864 bp, Zea mays
  Peptide Sequence Number=SeqID_78548
atgcatcctctgaggagaacgtggacccagcccgagaaggatcgcgcgctgggcgaccggaaccacctctcaccgggggggacacattgggatgggtgggggccttaccacgtgcggcggacggaggtcgccgaggcctgccaatgggcacgacgacggggtgacaaggaccggcggcgagggttagggtttgagagcagtcaagtgcggaaggacggacgggcggtggggggagctaggtctgaaccgaatagggccatgagacggcggaggatctcctctgcaaacacgcacagtgggatgggcaggaacttacctcgcgcggcggcggacggtgatttgggcttgggagtcgctcatctcgcccgacagccgcctcccctctccttcctttctccttcctcccacgcaaccggtgctgtggggcggggcgcggtgatttgggcttgggggcggagggagagccggagagggagggagcaccgcccaggccagaggatgatggtgttggacgagttgccatggatagaggagcgtgtggggatgaggacggctctcatcgcagacaagctcgccggctgcatcaccggccgcacgggggcatcggtggcggtattctcgttcggcgagttacgggcgggcgatgcgaggagggtgaggcgatgcgaggaggacgacatcgtgggtggccaaggaggactgaggcggtgtcggttgcagctgcgagggaggcggggaggggagggcggtcgagcaaacgaacggtgcagcgggcgcgagggtgatgctcgacgaacggacggcttagattggctgaaggcagaacgcaaggggcagcctaccccttgcagccttaataggtag

SEQ ID NO: 35174 - DNA, 903 bp, Zea mays
  Peptide Sequence Number=SeqID_78549
atgtcagctgaatctgcttactcgggttggcttgtatcaaggaacctacctgatgtgtttgctgtacaggacaagcctcagccgccacctgagggccgtcttcctgatgccaccaagggttctaaccacctgaggcaagtctttggcaagcagatgggtttgagtgatcaggacatcgttgccctctctggtggccacaccttgggaaggtgccacaaagagcggtctggttttgagggggcctggactacgaaccctttggtctttgacaactcttacttcaaggaacttctgagtggtgacaaggagggccttcttcagctcccaagtgacaaagccctgctgagcgaccctgtcttccgccctcttgtggagaaatatgctgcagatgagaaggcattctttgatgactacaaagaggcccacctcaagctctccgaactgggcattctcactgggcttctgtccttcatgatggacgatgcactgacaactggaagcatcaagacatcagatgcagaaaagaggcgtttagcaaaagcttcccttgcctacaattgtgagagcaaaaactgtccgcacttcaggaaacttttcccagagtatgttgagaagtacaatcaacagctacaattggagaacactactgcagagccggtgcctcaggagaatcctgcacctgctccatcccctgctgcccagcaagccccgaccgtggccaatagggcacaaccactggcggaggcgcgccgtgacaagaaccagaagaaggcggtgcccttctggatggtgctgtgttggcgtgctgcttcttttctgaaatacactgagttgaatcgtcgagaatcacttgcccttgcttcagatggattgaattatgaatgcaatgaggctccatcatag

SEQ ID NO: 35175 - DNA, 1068 bp, Zea mays
  Peptide Sequence Number=SeqID_78550
atgttcctttgcaatcattcttatcaacgtaccatctgttctgaactggatcacaggacgctgcgcaagctgttcaaggtggatgctggtgactatatgttatcgctatgtggaaatgaggctctcagagagctttcatctcctggtaagagtggaagctttttctacctgacaaacgatgatcggtacatgataaagacgatgaagaaatctgaagtgaagatgcttctgaagatgctcccagcttattacaatcatgtccgggcatttgagaatactctagtaaccaagttttttggtctacactgtgtcaagttagctggagcaaatcagaagaaggttcgttttgtcataatgggaaatctattctgctcggaatatccaattcataggcgttttgatctcaaaggttcatcacttgggcgcacaactgataagccacatacagagatcgatcagtatacaactttgaaggatcttgacctgaacttcatctttagattgaagaagcaatggttccatgagttccaaaggcaagtggacagggattgtgagttccttgagcaggagaaaatcatggattacagtcttcttgttggcgtacatttcagagataacacagagaagcttctgactgaaggttccattgactttgatatcatcaacaacgtaccgacacctcgcctttcaaaaggaaatacagatcggtttcttgctggtccaaacaggtctcctaaaatcaaacttggggccaacatgccttcgagagcagaactcactgcccgtaagagcgactgcgaaccgcggatgatcggagagcccaccggagagtgctacgacgtcatactgtattttgggatcatagacatacttcaggattacgatatcagcaagaggcttgagcacgcgtacaagtctttccagcacgacccaacctctatgtccgcggtggacccgaggcagtattccaggcggtttaaagaattcgtgtacagagtgtttcaagaagacgggtgcgcagctgcagacgcgttgagactttggagatgccgcagcctccatgtgtag

SEQ ID NO: 35176 - DNA, 1554 bp, Zea mays
  Peptide Sequence Number=SeqID_78551
atgagccaggtctactacctcctggctcctgctcctgcgaatcccgtacatgccacgtgggtagcgccgcgccaagacaagcctcctctcttggtccccggcgagccgtgctcagccgcggatgctgcaggcagcctggccagcagcagtcccgggcttagcaactgtgctgctgttgcactgcacccggcgcacgcagagatgcgccgtgtcgggacgggtgtgaggatgctttgcggcgcggcgctgtcggtgcttctgcttctcgcgggcggcgcggcggcgtcgcactcgcgctcgtcgtgccccgccacgcctccggacgcggggaacacgctgcaggtgtcgcacgcgttcgggccgtgctcgccgctgggccccgggacggcggcgccgtcgtgggcggggttcctggcggaccaggcgtcgcgtgacgcgtcgcggctgctgtacctggactcgctggcggtgcgtggccgcgcccgcgcgtacgcgcccatcgcgtcggggcggcagctgctgcagacgccgacgtacgtggtgcgggccagcctcggcacgccgccgcagcagctgctcctggccgtcgacaccagcaacgacgcctcgtggatcccttgcgccggctgcgcgggctgccccacgtcgtccgcggcgcccttcgacccggcctcgtccgcctcgtaccgcacggtgccctgcgggtcgccgctctgcgcgcaggcacccaacgcggcgtgcccgcccggcggcaaggcctgcggcttcagcctcacctacgccgactcctcgctgcaggccgcgctgtcgcaggactctctcgccgtcgccggcaacgccgtgaaggcctacaccttcgggtgcctgcagagggccactggcacggctgcgccgccgcaggggctgctggggctcggccgcggcccgctgtcgttcctttcgcagaccaaggacatgtacgaggccaccttctcgtactgtctccccagcttcaagtcgctcaacttctctggaacgctccggctcgggcgcaacggccagccgcagcgcatcaagacgacgccgctgctggccaacccgcaccggtcgtcgctctactacgtgaacatgaccggcatccgcgtgggcaggaaggtggtgcctatcccggcgttcgacccggcgacgggggcgggcaccgtgctggactctggcaccatgttcacccggctggtggcgccggcgtacgtggccgtgcgggacgaggtccggcgccgcgtcggcgcgcccgtgtcctcgctgggagggttcgacacgtgcttcaacaccaccgccgtcgcgtggccgcccgtgacgctgctgttcgacggcatgcaggtgacgctgccggaggagaacgtggtcatccacagcacgtacgggaccatcagctgcctggccatggccgcggcgcccgacggcgtcaacaccgtgctcaacgtcatcgccagcatgcagcagcagaaccaccgtgtgctcttcgacgtgcccaacggacgcgtaggcttcgcgcgcgagcgctgcaccgccgcttga

SEQ ID NO: 35177 - DNA, 2331 bp, Zea mays
  Peptide Sequence Number=SeqID_78552
atggccacgctcccgcgcgccgcgccgcccacgcccgccgcgctgctcccgctgccccgcgccgcgccgccgctgctgctcgccgggagggccgccgccgcgcgccgctctcggctgcgcgcgcggggcccgtccgcggcggcgcgccggagctgggtcgtcgcctccgccgcttcctcctcctcacgggccgtggtcggcggcgtcgcccgccgggaggcccctcccgcgccgcagaagcccacgcagcaggctgcggacttgaaccatatcttgtctgaacgtggagcttgtggtgttggatttgtcgcaaacttgaaaaatatgtcttcatttgacattgttcgtgatgctcttatggctcttgggtgcatggagcaccgtggtggttgtggagcggacagtgactcaggtgatggtgcaggactgatgagtgccgttccatgggacttgtttgatgactgggccagcaagcaagggcttgctctctttgacagaagaaatacaggtgtaggcatggtcttccttccacaagatgagaagtcaatggaagaagccaaagctgcaactgaaaaggtttttgtggatgaaggccttgaggttcttggttggagacccgttccttttaatgtatcagttgtaggtcggaatgcaaaagaaaccatgcctaatatacaacaaatatttgtgaaagttgcaaaagaagataatgctgatgacatagagagagaattatacatcagccgaaagctgatagagcgggctgcaaaatcttttagttgggcagatgaactttatttctgctctttatcaagcagaacgattgtctacaagggaatgctacgatctgaggttcttgggcaattctatttagaccttcagaatgaactgtataaatcaccttttgccatatatcatcgaagattcagtacaaatacaagtcctcgatggcctcttgctcaacctatgaggttacttggacacaacggagaaattaacacaatacaggggaacttgaactggatgcgatcaagggaaaccacactaaagtctcctgtatggcgaggtcgtgaacatgaaatttgcccgtttggtgaccctaaagcatctgattcagcgaatcttgacagtacagctgaattgctgctaagaagtggtaggagtcctgcagaagctcttatgattctcgtccctgaggcatataagaaccatccaacattatctataaaataccccgaggtaactgacttctatgactactacaaaggacaaatggaagcttgggatggacctgctttacttctatttagtgatgggaggactgtaggagcaactcttgataggaatggtctccgtccagcacgctattggagaacgtcagatgacttcgtttatgtcgcatctgaagtaggtttaagctgttactttcttctgtatgaaattgttggtgttataccaatggatgagtcaaaagtagtaatgaaaggacgattaggtcctggaatgatgataactgttgatctacagactggacaggtgcttgaaaacacagaagtaaagaaaactgtggcttcagcgagcccctatgggacttggttgcaagaatgcacacgtttgataaagcctgtcaactttctctcttcaactatcatggacaatgagactgttttgagacatcaacaggcatttggctattcaagtgaagatgtgcaaatggtgattgaatcaatggcttcacaaggaaaggaaccaacattttgtatgggcgatgacattccattagctgtgttatcacaaagaccacacttgttatatgattatttcaagcagcggtttgcgcaggttacaaatcctgcaattgatccccttagagaaggtttagttatgtctcttgaggttaatattgggaaaagaggcaacatcttggaggttggccctgaaaatgctgatcaggttgcactatcaagccctgtgctgaatgaaggtgaactggaaactctattgaatgactcaaaacttaagcccaaagtactgtcaacatacttcgatattcgtaaaggtctagatggttcacttgataagacaattcaggctctttgtgaagaagctgatgctgctgtgcggagcggctctcaacttcttgttctttctgatcgttctgaagcacctgaacctactcgtcctgccataccaatacttctagctgttggcgccatccaccagcatttgattcagaatggtctccgtatgtctgcttctattgttgctgatactgctcagtgttttagcacacatcattttgcctgtctgatcggatatggtgccaggtag

SEQ ID NO: 35178 - DNA, 174 bp, Zea mays
  Peptide Sequence Number=SeqID_78553
atggcggcaagcagagaggacgaggggagagaagtattcgtgcaagaccggtcgaaatcgaggtcaggtggggtgggggaaccgtgcgggtggtgcggtaatggcgtcgccgtctgtgcgggcgccgccgtgcccaggtacgcgggggagaaggagatgacgccggggcgttga

SEQ ID NO: 35179 - DNA, 2412 bp, Zea mays
  Peptide Sequence Number=SeqID_78554
atgcccacagtgaccatcgagcaggcacaaaggaactttatcaaagcagtaaaatcaggtctgctcaaaattctttcaaaaatgggtatctcactgctctcaagctattgtggagctcagatctttgaaatttatggtcttggtcaagaagttgttgatcttgccttctgtggaagtgtatcgaaaattggaggtctcacacttgatgagctgggtagggagaccttatcattctgggtgaaggcgttctctgaagatactgcaaagaggctagaaaactttggatttatccaatccagacctggaggtgaataccatgcaaataatcctgagatgtccaagctgttgcacaaagcaattcgtgagaaacgtgataatgcgtacactgtctaccaacaacatcttgcaagccgtcctgtcaatgttcttcgagatcttcttgaattgaaaagtgatcgtgcacctattcctattggcaaagtggagtctgcaacctccattgttgaacgtttttgtactggtggaatgtccctaggagccatttcaagggaaacgcatgaagctattgcaattgcaatgaatagaataggtgggaaatctaattcaggagaaggtggtgaggatccaatccgttggaatcccctcactgatgttgtagatggttattctccaacacttcctcatctcaagggtcttcagaatggtgacacagccacaagtgccattaagcaggttgcatctggacgttttggagttacaccaacattcttagtaaatgctgaccaaattgagataaagattgcgcaaggtgcaaagcctggtgaaggaggtcaacttcctgggaaaaaagtcagtgcatacattgctcgtctgaggaactccaaacctggagttcctctaatctccccgcctccacaccatgacatttattctatcgaggatcttgcacagttgatttatgacctccatcagataaatcctaaagctaaagtatctgtaaagcttgtgtctgaagctggaattggaactgtagcttctggagtttcaaaggcgaatgcagacataattcagatatcaggtcatgatggtggtactggagctagcccaatcagctccatcaaacatgctggggttaacttcctccagacacttatacaaaatggattgagagagagggtagtacttagggtggacggtggattcaggagtggtcaagatgttcttattgctgctgctatgggagctgatgaatatggctttggttctgtagccatgatagctactggatgtgtcatggcacggatttgtcacacgaataattgtccagttggagtggctagtcagagagaagagcttcgtgcaaggtttcctggtgttcctggtgatcttgttaactacttcctctttgttgccgaggaggttcgagctgcattagcccagttgggttatgagaagttggatgacatcattgggcgaacagatttgcttaaaccaaagcacatctcattggtgaaaacgcagcacattgatcttggatacctcctatcaatagctgatgctattgagaatgagaaggaagtttccaaggcatttcaaatctataatgttgacagagctgtctgtggtcgggtagcaggtgtgattgccaagaagtatggagacacaggttttgctggccagctcaacatcacgttcaatggaagtgcagggcagtcctttggttgtttcctgactcctggaatgaacattcggctagttggggaggccaatgattatgttggaaagggtatggctggtggagaactggtggtagttcctgtagacaaaacaggatttgttcctgaggatgctactatagttggaaacacttgtctgtatggagctacaggtggtcaggtatttgtgagaggcaaggcaggagaaagatttgctgttagaaactctctatgtcaggcagtggttgagggcaccggagatcattgctgtgagtacatgactggtggctgcgtagtcgtacttggcaaagctgggaggaatgttgcagctggaatgactggtggtcttgcctacattctagatgaggatgatacacttgtcccaaaggtcaacaaggaaatcgtcaaaatgcagagagtgaatgctccagctgggcagatgcagctaaagggcttgattgaggcctatgttttgtgtattgaatatcgtgcattcccttacttctgctacttttatgtgtttcaaaaggataaaacgggcagcgagaaaggtattgcgattttgagggaatgggaggcctatttgccgctcttctggcaactggtaccgcccagtgaagaagactcgcctgaggcttgtgcagagtttgagagagtacttgccaagcaagcaaccacccaattgtctgcgaagtga

SEQ ID NO: 35180 - DNA, 2580 bp, Zea mays
  Peptide Sequence Number=SeqID_78555
atgacccacccacccacagccacacaggccgagctgaagggagggggactgcctgcgggctgcggcttccggcgcaagatgccatgtggactccggatgactcgaaagtccatccatctcctctctatctctctatctatctatttcacgcctccacggctccacggctgctgccagcctgactattccgggctgcggcgccgggccacagttgatgcggacgatccgaggaggacgggacgggatggcggcttcggcggcgcctgggtcggctgggaggcaggcgcgcggagtcgcggcagcggcgaccggaaacgcgtgagtgatggggtctggcgagcaccgagcagtgtgcgcccggtcgcgcgctaccctcaaattcgtttaggagtttgcggtattggcctcggtgatgtgaggtatttaagagtggccctctcttcatatcatcgaaagagtacgttaccacagagaagtgaagtgaaccttacattgggaggaattgaccttaataattctgggagtgtagtagtcagggaagacaaaaggctactgactgtcctttttccagatggccgtgatggccgtgccttcaccttgaaggcagaaagttctgaagatttgtttgagtggaaaacagcgctggaagaagctcttgcacaagctccaaatgcagctcttgtgatggggcataatggaatatttcgcaatgacacaacagatgtatatgaaggggctattccgaattggggaaagaagagacctatcaaatcaatagttgttggcaggccaatactgcttgcactggaagatatagatggcagtccttcttttctggaaaaagctttgtgtttccttgagaaacatggaatgaaggtggaaggaattttgcgtcaagctgcagatgtggaggaggttgacaggagattgcaagaatatgagcaaggaaggacagaatttgcaccagaagaggatgctcatgttgttggtgactgtgtaaagcatgttctccgtgagcttccatcttctcctgttccagcttcgtgctgtacagcattattggaagctttccgtctggaaaccaaggaatctcagatcaaatccatgcgtgcagcaatatctgaaacatttcctgagcctaataggcggctgctacagagacttttgaaaatgatgcataccattgcttctcatactgccgagaatagaatgactccatcagcagttgctgcatgtatggccccgctcttgttgcgtccccttcttgctggtgaatgcgagatggaagatgacttagacatgaatggtgacagtgctgctcagcttattgccgctgcaaatgctgctaacagtgctcaaggcattgtaactactctattagaggaatacaagagtatattcaatgatgagcactttaggtgctccttatcacctgattctcaaacaggagatagtggaagtgaagaatcaactgatgacgaaactgtggataccaagggtaatggatttcatgatgcggaaaatgatgtagatcaagaattagatgatgccgagcgaatgctgagtggaaaattcactgaaaccagtgcaagtgcttgtgctgacctctatgaccacaaggaagttaatggcaatagttcagacactgagctctttgttgaggatcacacatttgaatcaaatgtagatttaaatgatgctcccctaagtcgtttaacagaaaatggaaagggtccatcaaatctgatgtccgctcatgaaactccattatcagtgggagagattcttctgtctttggatgctggaattccattaccttgtcgtgcagctgaatattctagcaaacccaatggaactcagcagcatgtgaagcgtactaacttatggggatggagcaatgtgagaaagggccaacgatcggagttagttgatccatcaggtgaagaagagcttgctattcaacgacttgaggtaatgaagaatgacttgcagatcaggattgcaaaggaggctagaggcaatgcaatcctacaggcaagtttggaaagaagaaaacaagcactacacgagcgtcgtgtggctctggaacaggatgtgtcaaggttgcaagagcagctacaggctgaaagggatcttagagctgcactggaggttgggctaagcatgtcttcttcacaattttctagctcactctccatggactcgaagacaaagtcagagcttgaggaaattgctctcgcagaagctgatgttgcaagattaaaacagaaggttgcagagctgcatttccaactcaatcaacagcgccagcaccagtatggctcttccgtagatgcaaatgatcatcctcaacaccttctaaatcatctctcgcaaatgcttgtaagcttgttcgtatctattagagggaaaaccctaaccctaattgctagtcggtcggggcatggagagcgccggagggaggccgccacagggaaggaggagctgactgcggatggcactgctggcgcgtggagggaggctgccgcagggaaggaggagctggcctgggtgcggtcgggtgatgcagttggtgtgtag

SEQ ID NO: 35181 - DNA, 651 bp, Zea mays
  Peptide Sequence Number=SeqID_78556
atgggcctgtttgtttcggcttctgacagcttctggccaccaaaagctattgcggactgccaaacgctcagcttttcaccatattctctctacagccagattttcaaaaaagctggtcagaaaaaggtgaaccaaacagacctcatgtacccctggcgaacgagtatgggaaggaacggcggaggcgaagacagagaggaccccgacaacggcgccgttgaagaggagcaggagcacggtgtccgcgtcgagcggggttgtgagtcatcggagcacggcggctacaatggcgcctccgttgacaagatgactacgaagagtaaaaactttatttttaatttatatcggttcaaggagctcgaacaagctaacaaggaaggaatggtgatccttaacgtgagatctatgataattatggtgaatgtgcctttaaggaaggaatgggtggtggtggatctcatgttgatcaatttgacatcttctcatagttctttggaccctcttttggaggactcgaagtctggcgcctcattgaggtgccctggttgccagggctcaggcatgaaagtcaccattcgccagttgaggccttcatacagggattgcatatcaagtcaagatgtagtcgattttgtacacaaacagctatag

SEQ ID NO: 35182 - DNA, 606 bp, Zea mays
  Peptide Sequence Number=SeqID_78557
atggcgcctcctgttgacgtggctggcctgcgccctaggttgggcgatgtggaggctcctccgaagccgaggtcgagtctgtcttccatggcagaggccgagcccctgggtcgggcgaggcggaggtcgtcggcagaggccagagcggagtccgagccctggggtcgggcgaagcggagttcgtcgtcttctagggctgagcccgagtccgagccctgggtcgggcggagcggacccgagtccgagccctgggtcgggcggagcggagttcgtcgtcttctggggctgagcccgagtccgagccctgggtcgggcggagcggagttcgccgtcttccgggacttagcccgagtccgagccctgggtcgggcggagcggagttcgccgtcttccgggactgagcccgagtccgagccctgggtcgggcggagcggagttcgccgtcttccgagacttagcccgagtccgagccctgggtcgggcggagcggagttcgccgtcttccgggacttagcccgagtccgagccctgggtcgggcggagcggagcttcctatggtgcctttggcagggcctgactgcctgtcagtctcactctgtcaagtga

SEQ ID NO: 35183 - DNA, 576 bp, Zea mays
  Peptide Sequence Number=SeqID_78558
atgtcgctgtcaccggcggacggcgcagcgtactggctgcggtggcaggtcctcgtctgcggcgcgctcatcgcgctgcccacggtggccgcggcggcgctgctgccgcggctgcggagctcagcgccgcccctgcgcgcggccgacctctgggttccttgctgggcgcgcctccacccgggctggctccttgcctaccgcgccgtcgcgctcgccgccgctgtagcgcttctcgcgcgcctcgtcgtcgcgcgcggcatcaccgtcttctacttctacacccagaaaagtttgaggaaagccgacgaatcccgtggacttcttaatgctgatgtcgaaaatcgtgatgtttccaattctgtttctggagagaggaaaacagatgagacaaatatgatgatgagctattatgaacaaatagtgaatgagagaagagctgggttctggggccggtgcatggaaatcatataccagactagcgcaggtgcaacaatgttgactgatgtcacatattggggccttcttgtgccatttttctaccgtgacaagtttgggttagctttgttacctagttag

SEQ ID NO: 35184 - DNA, 528 bp, Zea mays
  Peptide Sequence Number=SeqID_78559
atgggcgtgcttccaatgtgcacttcaagttcaagcgaaggaaaggaacacacagaggcacagagcacaagaccgtgttcccaggtgacagtgaacctctgcgattcattgatcaacatgccggtcctggcgtgttctcaggtctcatacccatctcaaaggggctgtaaattcacgagactatacaggtgtacacttaagcccggcagcatgtgggaacatccgttggaaataagtgtgcttcgccttgacgatcaaccaatacaggaagaagcaggggacatgagcgatggccatgccgaggttttgcttcatctttctcgcagtgtacacaatttactaacacaaatgtcattcgtgcctatgtctcacgttgggacttcgactttccaaatattcaggtggtcatggttaggccataacagagatcagacagaactagatttgcctccaaagggcttcagctggaagatgggcagcatgaaattcagaaataacagcacgactgctatagcatatgtcagatag

SEQ ID NO: 35185 - DNA, 543 bp, Zea mays
  Peptide Sequence Number=SeqID_78560
atggggaaatggttaataaatctagaccagacgctgagcagacagagtcgcccgtctgtgtcgattaaggaccgtaccgttgactggcctgttgtggttgagactttgcaactagccacataccctggtatgggacagggtaagcttgaacccggctattccatacgtgaagagacaatcgcgcactgggagtggagagatggcgggagtagcatgtaccctcctggcatagtagcacgcctggtaggcaagttcctaaagctattgggagtaaaaaatagcttggtattagacccaaataaagaccaagtctctgctaagcaaacccggcgaggcggagtggacgaccaagtccctgccgaggaactctgcgagacagagcggacaactaagtccctggtgagaacaccatgcgatggagcggacgagcaagtccctgccgagcaaaccctacgaggcggagcgaatgaccaagtccctaccaaacaacctcgtgaggagaagcggacgaccaaatccatgtcgagcaacctcgtgagatga

SEQ ID NO: 35186 - DNA, 1572 bp, Zea mays
  Peptide Sequence Number=SeqID_78561
atggcggtcacgcgcgtcgccgtggccgccgccctctcggcggccccgctctcctcccgccgccaccgggttgccctcccctccgcctgccgccttctccccgcctcggccacctgctgcaacagccgcgcgccgatgtctctgcaggccgccgccgccgcacctgccgccggcgcggtcgacgaggagactcctgcctcctcccctccgtcagatgctagcaagggggtggagaacctggtgatcatcggctctggaccagccggttacaccgctgccatctacgccgcccgggcgaacctgaagcctgtcgtgtttgaagggtgccagatggggggtgtccccggcgggcagctgatgaccaccaccgaggtggagaatttccctggcttcccggacggtataaccgggcctgatctcatggacagaatgcgcaagcaagcggaacgctggggcgcagagctttaccaagaggatgttgagtttgtgaatgtaaagagcagcccgtttgttattcgtagcagcgaccgtgaggtgaaatgtcatagtctaattattgcaactggagctacggctaagcgcctccgtctgcctcgtgaagatgaattttggagtagaggcatcagcgcatgtgcaatatgtgatggagcttcaccacttttcaagggccaggttcttgcagttgttgggggtggtgatgtagctacagaggaagcagtatatttgacaaaatatgctcgacatgttcatttactagttagaaaggatcagctacgggcttccaaagctatgcaggacagagtactcaacaaccccaacataacagtacatttcaatacagaagccatggatgttgttagcaatgacaaagggcagatgtctggcgttcatctgaagagaagagatacaggagaagaatcagttcttactgtgaaaggtttattttatggcataggacatactccaaacagtcagctgttgcagggccaaatcgaacttgatagtgctggctatattttagttaaagagggctcagccaaaacttcagttgatggtgtattcgctgctggtgatgttcaggatcatgaatggagacaagctattactgcagctggatctggatgcatagctgctttgtcagttgaaagatacttagttgccaatgatcttcttgtcgaatttcaccagcctgttcaagaagaaacaaagaaggatattacagataaagatgttcaaatgggctttgacatttctcacagaaaacacaagggacagtatgcactccgcaaactgtaccatgagagtccacgactcatttgtgttctatacacttctcccacatgtggtccttgcagaaccttaaaaccaattttgagcaaggtcatagacgagtacggcgagtttgttcatcttgttgaaattgacatcgaggaggatcctgaaatagcagaagctgcaggcatcatgggaacaccttgtgttcaattttttaagaacaaagaaatgctcaggactgtatcgggtgtgaaaaggaagaaggaatatcgggagtttatcgaggcgaacaaatga

SEQ ID NO: 35187 - DNA, 642 bp, Zea mays
  Peptide Sequence Number=SeqID_78562
atgaaaagtacatcaggaagatgctcaccattcttcttcttcaactccaccaaggagaggttgcaactgcaagaaatcaagttgcctgaagaaatactgcgattgctaccaggtttcatccttttctcagacggcataattgctgatgacagtaagcgctatctgtacactggtgctgatttggatcacagcgagggcgaacatgacttcgttgtggagcgctcgcctcgtctgcagtcacccatgtcgaaggagtcttctttccaccagaccccaccccatctcagggcctcgagcagagacgcgcacgtgttcccgcaggcggtatcccagtggcaggcgctgccccgctcgtggcactgttccaacaagaggaacggcaacgacagggcgatggacgactcctccgccaacggcaactacaagagctcgagccatgactggcagatgtccaagctcgaggacggctacagcatatcgagatgcgtccagatcctgaacggcatggtggagctgtcgcaggtggagaagtcagttgcccccgacgtcttcctgctgccgggcaaccgggaaattttcgtctccctcggcggcgatgtgcgcgccatgtggctgaagcgcaagattcagcacctggcttag

SEQ ID NO: 35188 - DNA, 1659 bp, Zea mays
  Peptide Sequence Number=SeqID_78563
gaggtgcataacttctttaagaagaccttcaagttcctggtcacggacacggtggaacacagtgatggggtccagaagtgcatcagggtgcggttcgggtcagaagcaggtgtcggaaggggtgctggcggccgtgggagaggaaggaaacggaagaacatgggtagttctgattggagagatggtaggccatttgatagtagagggtcaagtaattggccagataatgttgggaagttcctgaggtttcacctgtacaaagagaacaaggacacccaagaagcattaggagtaataggaaaaatgctaggacttcagccacggtcatttgggtttgcaggtacaaaggataagcgtgctgttactacacagcaggcatgtattcctcaagtttataacagcagagtaactgtattcaaggtgcaagccagtaagttgcttgctcttaacaagcggctgtttgggattaaagttggaaatttctgttacgtgaaggagggacttgttcttggtcagctcacaggaaatcgatttacaattactctgaggggtgttactgcagaatctgaagacatgataaaaattgcagtagatggcctaggaaagaatggatttatcaactactatggtttgcaggagtttgtattcagtcttgccagcttttgtttaaacataactaagtccgtacagcgtgatgacatcaatgaggtgcgcaaacgttacaaagaacatggtgacattgatatggcactgagaaacttccctcgacacctcgtagctgagagggccatacttcaatgtctgaagaaatgccctggtaaccatctacaagcactcaagggtataccaagaacactgagaatgatttattcagtcacagcatacacatgtactagtgtgcttgtctcacatcatatagcaatgcttgctttgttatatgctaaggttgtagaaggtgacttagtgtataacaaagaatgcccttcagaagaatcaacttccgtagatattctggaaactgatgatgaccatacaaattcaattgaaatcgatctatgttctgaagcacaaccagaagaaagcatccagtctgcgaagatagttgattctggagattttactaaggggatatacacttttgatgatgttgtcctacctttgcctggttcacaagcattgtttcctgggaatgaaattgccgagatttaccatgaaatggctagaaaggatggcattagcttgacggagaatgctcatggtgtcaaggagttttcgattacaagcatgaaaggtggttaccgccgagtgttccagcggcctattggttttgagtgggaactcataacttacacagatgatacttcatctttagcagaaactgatttggatgttctgtccagaaccaagcctaaagaagcaaacgagcttatttctaagcaggaatcgcaggataagttggaaaaggctcctgatacctctgtgccaactaatgggaatagctcccaagaaaagcttattggcagcccagatatacgaccaaagaaattggccttaaaattagcatttactttaccaacatcatgctacgctacaatggctatccgggagcttctgaagacttccacctcagttgcatatcagaaaacactcagctgctag

SEQ ID NO: 35189 - DNA, 294 bp, Zea mays
  Peptide Sequence Number=SeqID_78564
atggggggagaggatccgcagtggttacagctgagcgcggaattcatgcggcggcacatacggagttatgcgtgttctgtttctggggtaggagacgattctatggcgcggggcccacgcaccagaggcagcggacgacacgcccaggtgattgcgcggaacaggaagggaggaaggctggagctggggcggtgggcaatcttgtccggattccacgcgcgcgctgcacgggttctgttgcgctacacccgcgtctggtttcaggaagaggacgcccctgataccatagcttag

SEQ ID NO: 35190 - DNA, 1605 bp, Zea mays
  Peptide Sequence Number=SeqID_78565
atggcggtggcaggcgggcaggagcagcggccatgtcgtcagccaagctcacgccccgtccgggggcagcgagagaaccctctctcacggcgtgaagacaacgcgcccgagaagcggacgacgcttcgccttcgccataatgacgcgtcaaaaaagggaccgggaaagggggataccccgaaaaggatccttccccgtgaaggaaccaggctccgagtctccctactgatcagaggttcgaaggctagccccccagaagggttcgacagccgcctcagatcgcgtgggctctacacccactactggtcagaggttcgaaggccggcccctcggaagggttcaacggccgcctcaggctactcgggctccgcgcccactactgatcaggggttcgaaggctggcccccgaagggttcacaaccgcctcagatgccgaggatcagtccatacgagggactcgatcacgcctcgcccgagcctagcctcggacaagggcagccgaccccggaggttctccgtctcgcccgaggcccccctccagcggcgaacgtgttcccggctcgcccgaggccctatcttcgccaagaagcaaccctgaccaaatcgccgcaccgaccgaccaagtcgcaggagcatttaatgcaaaggtggtctgacacctttatcctgacgcgcgccccccagagccgaagtgaccgccatcacttcgccgcttccctgaccggcctggcagaaagacagcgccgcctgcgccgctccgactgcggcaccataggaaaactccgctccgcccgacccagggctcggactcaggctaagccccggaagacagcgaactccactccgcccgacccagggctcggactcgggctaagccccggaagacagcgaactccgctccgcccgacccaggggctcggactcgggctaagccccggaagacggcgaactccgctccgcccgacccagggctcggacttgggctcggccccagaagacgacgaactccgcttcgcccgaccccagggctcggactccgccccggcctcagccgacggtctccgcctcgcccgacccaggggctcggactcgacctcggccacggaagacagactcgacctcggcttcggaggagcttccacatcgcccaacctagggcgccgaccagccacgtcaacaggaggcgccatcatcaccctaccccgaactgactcggcactctgctacaccccccattgtacacctggatcctctccttacgcctataaaaggaaggaccagggccctcttagagagggttggccgcgcggggacgaggacgagacacgcgctcgcttgaagccgctcgctccctctcccgcgtggacgcttgtaaccccctactgcaagcgcacccgacctgggcgcgggacgaacacgaaggccgcgggattcccacctctctcacgctggtctccggccacctcgcttccccccttcgcgctcggcctcgcgctcgacccatctgggctggggcacgcagcgacattcactcgtcggcctggggaccccccggtctcgaaacgccgacaatatctttcaagactagttttgatcaaaagctag

SEQ ID NO: 35191 - DNA, 495 bp, Zea mays
  Peptide Sequence Number=SeqID_78566
atggagcacaaaaaccgtagctctcaagctcactcaaagattcctctccaaagatttgaaatgggagaggcaagagatgtgtgtgagggagagggaggtgtttcttgggttagaaatggagttcaaatcgtgctcactgctttggggagagaggcctggcagcctgtctgccagtctgactggcagactgacgcgcagactgaccgtagactggtcaaagttgaccaacaccggttgaaccgcccagggggggcggttgaaccgcccctgacagctcctggcgacctgtttgccagtctgactggcagactgcagatcagaggtcagaggggtcagagaccagctgaactgcccctcaggaccagttcaaccggtcttgaccactcaaaagctcagctgcagctgaagaagctcaactcagctgaagtcaagttcagctggaaagctcagctgcagttgaagaagttcagctgcttttcagcaagaacactctag

SEQ ID NO: 35192 - DNA, 447 bp, Zea mays
  Peptide Sequence Number=SeqID_78567
atggccggttcaaaggatagctctgaagtttccaccagcaatatcatcaagccgacatgggaaaccttgccggctgaagaacagctcctgtccgaggagcgccaggagcagctgatccaggaagcaaaggcgaaattcctggctgacttcaaggtggacaggaacaacaaagtcgttcggcaacgggcgacagatctggcttcgctccgatctactacaaatacccccaatatgactgttgcacctccagggccagttggcgcaccggacagtccggtgcccctgccgaccgttggtgcgggccacgcgtcgcccgcggattgcgcggccgaccgttgcgctggcgaccgttggctcaccggacagtccggtgcaccaccggacagtccgcctggcgcaccggacagtgtccggtgcaccactggacagtctggtgtgccagactga

SEQ ID NO: 35193 - DNA, 198 bp, Zea mays
  Peptide Sequence Number=SeqID_78568
atggagcaaatggaaacactgttggctgtcttgtgcgccaactgtgtgccaccgccgcccaccgaggtggtcatgaacaccatggttctagcgattgtcgaggaggcaatctcggatcgcggggtttttgacctttgtgggctcgggatggaccgaggcctccctctctttgcgagagggtcttactcgttgttctga

SEQ ID NO: 35194 - DNA, 177 bp, Zea mays
  Peptide Sequence Number=SeqID_78569
atggcgggcggaaatgagctcgccggagctaaggaacggtggctggccggtgagggattagaaataagtaataacaagattggagtgcggaagagagttcttcttgctatgagttgctcaattaatgcggatgattttgggagcaaactcaaaaagattataagcaagagaacttag

SEQ ID NO: 35195 - DNA, 1257 bp, Zea mays
  Peptide Sequence Number=SeqID_78570
atgactaccagccttgtggtggggagaagcaagccgggctgcggcctccctcccgccctcagcttcaatgatgttcatcatccatgctggggaggaggctgccgcgtgattggctccccggcctgggcggctctggtgccgcctccggcgctgcctcctaccgctggggcagagcgtggctgcccgttccaccgcacgagcgacggtcgcgccgtgcgcggggttggccacatccataggcttctcccgcggaaccagtcacacttggaaggtcgtatattatttcgtatcgccgtgcgggtgggggcctcgttcttggatggtcttgtcctcactcccaccgtgaggacgagagcgaagacctcttcgtgcgcgctggtgcagctgctgcccatcggtgcagaggtggtcgccgccgttggtggggctgtccggagccagcttccagcgcgactcccgttggtgcaatgtagtccattcctgcagaaatggagctggggtcccacttgctcacggtacgggaccaggctgagcgactacatggcatccgggccccccaggagacaagattttgggtacggaaccaggctaaccggccacacaggctccggatcaccctatggaacagacatccgttctttagaaccagcccccaggccttcccctatttttgtaaagcttgatgtgttgaggttggataccagtgtttctgaaaaggttgtcaacaatcctcgggaggcaacctcgtcgggggcggtggagcgtgcaggcccacggtacgggaccggactgagcggttgcatgggctccggaccactccaggagaccaatgtccgttctctagctccggtcccgaggatctggctgagcggctacacgggctccggaccaccctatggaacagggtcccgttctctagagtcggcccccaggctatcggacctccctaatttcgtgtcaggggccctaaactgcgagcctagctgttcaattcggatgtcgccatgtcagacagatggaaaccgtacgggtgggttagctgaaaggctaatagtctgggttcatgggggtagaccctaccgggttgtcggtccttcccagctgggggagagttgcggagcccctcttggtatggcacttgccgcggggctaagccccgacccagggttcccctcggacccgtgggggatccagaaggggcctccgaaggaagacgtgcttcatctccttaggccggggaacacggggtccctctga

SEQ ID NO: 35196 - DNA, 1458 bp, Zea mays
  Peptide Sequence Number=SeqID_78571
atggaagggggcgctgttgcaaggctggagcagcgacatcgtggcaagcggtggccaggcgccgtcgccctaagctacgccaggttcccgggtcttggtcggtcccttcaccggcgaagagcacccaccagacgcgccggtgcctggatccggaggaagtgctgcgggtttcggcggttcgtctctctcgttgtttccggcggggttatgaaggcggtgggatacaacctctacgatagcagcgggactgatgacgatctccctccagcacaaaatagaggattgagaggacgggttttcagtgggaatggccgagcatctgctggggcatttccttacatgagggcaaataatgatttggagagtgaaatacatcgagttgagcaagatgcatatactggtgttcttagggcatttaaagtgcaatctgatgcaatatcctgggaaaaagagagcttgattactgaactcaggaaagaactgagggtttctgatgaggagcatagggagctattaaataaagtcaatgaagatgggagcatccgtcaaatgagggagttaagacaggcaggtggaatcccaagtggcctccagtcccctatgatgccctcccactcagtttcatctgcaaaatggggtcctttgtcagcaagaggcaagaaggcgaagatgggtgagcatgaactcgtctatgacatgggcacacaagccgagacttgggaatgggttaggctttgtgatatggcacctgaagatataagatgggaatttgatggacatctttcaaatcatgatggctggggcccttctggccctatgctgaagaggcacatgaccaacaacggtgctatggcaggttcaatcaggggaagaggaaggttatcgataaatgagcctataaaagactatgctccacctcaaaatgacatcaataggaattttgattatattgacataccaaatactgaaagtgttgttactgaggtggagagggtgttggccaatccaaatatgcctgaaatcgagaaggcaaggaaactgctgaaagagcagtcattacttgatgcaattgccagacttgatgaagcatctgatagcgatagtggtaactgggttctcaactgcagcaagctcactaagacggtgtccatgcatggtgcccagaatgagttgctagggctggcacatttttgccgaaaatggatcacagaaccgaagtctacgacccataactcccttcagcacacacctccaaagtcccagacctggatccattacctctgcctgcacaaccacatgctccgcttcatcccttaccattgctctgacatcaatggcagcggggatgggacagtagaatcctgctcatgccgcggtgccgcctatggcagggagcagcaagaagccaagaacgtggagttcatgggttgtgcaaaacagctagggcctgtttggtga

SEQ ID NO: 35197 - DNA, 219 bp, Zea mays
  Peptide Sequence Number=SeqID_78572
atggccgacagtatggccttcgtacaggctattgactcaaaccaggaggaggacgtctggtccctgtatttgcctcttgaccgagcctatctgatggagagactcggtctctctattgagaaagaaagaaggaaactcaagtttgatctttgtgatcacttgagtgaggaaagagttgaaagagatcaggtccttaaggactcctcaatagaggcgtag

SEQ ID NO: 35198 - DNA, 558 bp, Zea mays
  Peptide Sequence Number=SeqID_78573
atgtcgttccctcagaacgggacacgcgcggtttgcgtcctttcagcgaatggcatcgtatccaatgtgacgcttcggcagtctgctacttcaggtggaacggtgacacacgagggtcgtttcgagatactgtctctgtccgggtcgtttcttctgtcagaggatggtggccatcgcagtcgaaccggtgggctcagcgtttcgctagcaggccccgacggccgtgtcctgggtggcagtgtcgccggacttctgacagctgcttcaccggtgcagatcgtagtggggaccttcgacgccgatggagagaagaagccgaagcagcagcagcagcagcttgctccgtcaccgccagacccgtcaccggcgccactaaagctcgcgccgacgggcgtggcggcagggccgagcagcccgccgtccagaggcacattgagcctgagcgagtcatccggcggcgccccgagcccgccgcacgcaggggccagtggcggcggcggcggcggctatgggcagcagcagcagccagtgggcttccccggcctgtcctggaaatga

SEQ ID NO: 35199 - DNA, 447 bp, Zea mays
  Peptide Sequence Number=SeqID_78574
atgtcggtgcggatcaaggcggttgtagaccggttcgtgaaggagctgcaggaggcgctggacgcggacatccaagaccgcgtcatgaaggagcgcgagatgcagagctacatcgaggagcgcgagcgcgaggtcgccgagcgggaggccgcctggaaggccgagctatcccgtcgcgaggccgagatcgcacggcaagaagccaggctgaagatggaaaaggagaatttagagaaggaaaaaagcgtcctcatgggaacagcatcgagccaagacaaccaagatggagcccttgagatcactatcagctcaatgctggctctaaaatatgagttcagagttggtataaatggacaggtgctctgcaatggcctggatggtctatcagattttgccgtcgttcgagctgattggattgagctgtcaacaacctttaaacatccctga

SEQ ID NO: 35200 - DNA, 3243 bp, Zea mays
  Peptide Sequence Number=SeqID_78575
atgaaggattcctctggtgctctgaataatggtctagggaggagcacttcatctcaagtaaccgaactgacacatcttcatagatcccacccgcctgctgactacaatccattctccttgcattcccatgattcaccatctgtatctggtaacagtgagcattctgttccgacagctttgacacttggtaataatatctatttcagtagtgcagagagtgagggacagcctgaggaaaaccataacctattggatgtaaacttaggatttgatgtgacaacgacagaatttggtaatgttgtcaaaagaaaaggtgaatctggcaatgacttaatgaatgcaggcagtcagaattggttgactttaccacttactgtcagctgcttggataatgcttctgctgttagtaatgggaggataggtttagagcagattgtggatgaaggtgtccctgttatctgtcaggatcatgatattatgctggatattgaccagcggggcagtattgatgttttgtctggccaggatcacaacctcaaactatgtggtatcagtattcctcaagcagtccttttggcaacagaagagagaaataaggatgttgatgatgagatcgttcgcccaggttcttctattaattctgtaaatgttttagataaatatagttattgcacagtgggtaaacctatagataatcttagtagacccattctcttatcttcacaatctgctgatgtaccaggtcgagacttagcttctcagatatctgttgattctgatcacacttaccatggaagtactgaggatcctgtgggcatgtcaagtacaacacctgattcggtatcctcctggattgaagccattgtaccagaagctaacaaggaacaccaatcatgcaaatcttctctacttcctatctgttcttcagaaaaggtatcagcaccaaaggaggatagcaagaaggcgttgtcagattcagtagtcaactctgtagtaaaatctcctcctcgaattaatattgcaagctccacagtattgaaggtacctactaaacaggtagctttgcctggttcattgctagagccccctcgcttaaaccagaatgcaaggaacaggacatggcgtcgtgacaatgcatcatcttctaattcgtcattgcatgtttcacagacttcaggattaccccctaaactgccattaaaaaagaacagcaaaagtcaaaactcttatatccgcaagggtaatgccctaattagaaatccagccaatggaaatcatcttcattcttcttctagtctagattctcaaaataagttgagtaagcctgttatgaggagaagcatgaactttgtcaggaatgtcgattcaaaagacgcagcacattctcatatttcagttgaaagacccaagaccccacctttgccacttcataccaaatccatcagttgtgctgtgaatgttttggagccattgtctcaaaatttgcagcaacaggtccttgaaactgaaaaggaagattccagtgggcaggttaactcaggtgctgacaatctaagcattattagtttgcacaagtctgaagcccttgatgctggtaaagcaatttatgttaggccaaagttaaatcaactagttgcacaggggcggcatcttggtgagtcgagtaacatttccttggataaagtgacgttgctgcagccttccgcaacatctgatctctatttcaagaaaaggaaaaatcagattattttgggtccctctacttctgatgccccgagttcaaaagatacatttcaggctgaaaatataaagtcaggtgagagtaaagttctaatgtcttcatcttccaacaacaatatcactgtggcaaaggacaggctgcacaaagctcttcagacaacaaatactgtcagaagtttctctcatgtatggacacttaatggacaaaatcctcgaaagaaatcttatgtgggagctagtcatatgaaggtcttacctcgtatacttccatggaaaagaaaaatattctgccagaactttagaggcagttattcttcgttgttgaatacaagctctataggaataatgagaaaattattgcaaacaaggaagagaagtactatttacactgtctctactgatggattctctcttcggaaatctggagtgttaagtataggcgggtcaagtttgaaatggtcaaggtccctcgagaaacattctcgaaaggttaatgaggaagctacacaggcagttgctgaagttgaaagaaagaaaagagaaaagagaaaacggcagtctctccgtagcaagggaaggaatgatcggtactctgcatcagttgctgccaatcaattaacaaacagaagcagagcatcttcagattcaagggtgtcatcaacttgcaatgaatatgtgcgtgttaacaaaggtaaccaactggtcagaaatccgaagaaagtaatccgcatgctagcaagtgagaaagttcgatggagtttgcacactgttagaacacgattggcaaagaagaggcaatattgtcaattcttcacccgcttcggcgagtgtaaaaaatctggtggcaagtgtccctacattcatgaccgagctaaagtggttatttgtactaaatttcttaaaggcttgtgttctagtactagctgcaaactaactcacaaggtcctgccagaaagaatgccagattgttcttactttctgcaagggctatgtaccaacacagcctgtccctataggcatgtgaaagtgaactcgaatgctcctgtctgtgaagattttttaaagggatattgtgctgatggtgatgagtgtcgtaaaaagcacagctatgtatgcctcgtctttgaggcaacaggagagtgcccacaaggatcaagatgcaagcttcatcacccgaagaagaaaagcaaatccaagagaagcaaagtagacaccgtccaaaacaacagttggggtcggtattttgagacaaacgttggccatggcagtggagcaagaatagtttatttggaggaagatgagagacagaaaccagagcaagtctctggtgaggagtttgctgacttcattgaacttggtgccggtattgaagtccctgaagatgcagacacttcggatgacatacagctgatggaactggacttagggaatctcgaggtgcaggctgacaataatgacgcgataatcaagccacttcggatcatgagaacggcaagagtttga

SEQ ID NO: 35201 - DNA, 378 bp, Zea mays
  Peptide Sequence Number=SeqID_78576
atggctgctgcagttctgggcctgcaggcaactgtaggtgctttggtaggcaaggcactgactacctcattagtgccctactaccaggggataccacctggacagagtcccgttcttgctttagatatcttccttgttcagtcccgatactttattactgatacaagaacgctcatcgttttcttgccattttattcctatcatctacaggcttcagccaacacgatcctttcgcatttccttgggctatccagctcactggagctactacggtctgtaacattgtctcagacagaagctgccccagtgccaaaaccgccattgcggtctgtaacattgtctcaaacagaagctgccccagtgccaaaaacggcatga

SEQ ID NO: 35202 - DNA, 156 bp, Zea mays
  Peptide Sequence Number=SeqID_78577
atggcgcgtcacactcgccactatgacacaccaaaggagtgcaccatagtgaacggaacggagcgtgactgtgagaacgggattggaacggagcggctccgtccggttgattttttggagcagaatggttccggatctgatgagaatattccctaa

SEQ ID NO: 35203 - DNA, 1188 bp, Zea mays
  Peptide Sequence Number=SeqID_78578
atgacgttgcctctgtcagttgatcaggagcttctgttggaatcatcctggggcgaaaatgctgctggagatgcatcgtctggaccagcaattgcaggctacgacagcagcctagctaccaagtccagcgcgcacagagagccacagactaacggcgtcgtcgtcgtcatactctgccggtctaagcgccgcctgctgtgtgtctccgcgccatggcagcagcttcgtcaagccgcagcgctctggacggccggcggcggcggcgacggcgaccctgcccgcgtcaggcggcgaccagccgaacctatcgttagactactgctgagtaagagtagggctggaagaggcgagcgaatcagggcttcagatgatgctgcgaccatcatggacgcgggcggctgggcagcacggcttgaagccccgccgccggtagccgtcgtcactggagcgtctagagggattggcagagccatagctgtagcacttggcggagcagggtgcaaggtggttgtgaactatgccaagtcaggcgtggaggccgaagagatcgaggcgtccggtggaacggcggtgagcttcgctgccgacgtctcctgcgaagccgacgtcgagtccatgatgagggccgccattgatgcctggggaactctggatgtgctggtgaacaatgcagggattacacgtgacgcgctgctgatgcggatgaagaggacccagtggcaagaggtggtggatgtcaacctcaccggcgtttacctctgctcgcaggctgcagcgacgctgatgatgaagaggaagaagggaaggatcatcaacatcgcatccgtctccgggatcatcggcaacgtcgggcaggccaactactgcgccgccaaggctggggtgaacgccgtggcgccgggctgggtggcgtccgacatgaccgccggactaggggacggcgtggaacggaaggcgctggagaccataccattgggacggtttgggagaccagaagaggtcgccggcctggtggggttcctggctgttcatcctgctgctagctacgtcaccggacaggcgagtagaacgaagcggccgggtttccccgaacgcgacgacgtacgtgatggtgttgtttcttctcgttttcatcctgttcattcatctctgcaggtgctcactattgatggtggcctgtccatttga

SEQ ID NO: 35204 - DNA, 375 bp, Zea mays
  Peptide Sequence Number=SeqID_78579
atgacagtattttttattctagagtccatcttttggcatttatgcaaaaaaggtagaaagacttttgtatatgaagtaagtatatttgagacgcagttctcaatatttttagcactagtaaaatggccatgctctacagtgcagcacacaagtgcgtcgttgactattaatgagaactacgactctgatgtccaggttgacactgaaacatttcttagtcgcattgttccagagggtccatctgctccatggaggcacaccatagaaggacctgatgacatgccagcacatatcaaatcatcaatgtttggttgttccctgatggtatttggctctgtgaacatcgagattatgctactcctcgacagattgtga

SEQ ID NO: 35205 - DNA, 378 bp, Zea mays
  Peptide Sequence Number=SeqID_78580
atggagccgggatacttgtctgtcaccatcgatgtcatcatgacttctatccgccaaggccctgcaaattcgttaggaggaaatctcatgatcccaatacctaacatgttttcattttggctccaaaccgaactaccaactgcaccatcggatttatcgaatgctgaagttcctgacagtgacactggaaattcaacaagtgtggctatgacagatttatcgaatgctaaagttcctaatggtggcggagcaggaggggatgttggcttcgagcagcatgagatcttggaggcgctgatcgataagaacatcgtggagctcatcgactctaggactgtgtacaagatcgtgctagcagcaccgagctggtggcggtga

SEQ ID NO: 35206 - DNA, 84 bp, Zea mays
  Peptide Sequence Number=SeqID_78581
atggttgaatacgaggcgctcattatgaggttgcaagacaccaacatgctcaagtcacccaaactacctgaacaacccatctaa

SEQ ID NO: 35207 - DNA, 519 bp, Zea mays
  Peptide Sequence Number=SeqID_78582
atgctggccgagcacgagctcaaggcggaggagaaagagaagaagctagaggagcgaatccggcagttccaggcggtgctgggcccccaggcgatggaggcgaacaggaaagcacttgaagatctccaggcggagcaccgcgccggggtccagcgtattgccgcgtgggccggcaaggcaagcacggcgctggtgccgctagggatgagccctattccagtgttggagctgccagcgttgatcttcgacgcgctcccggtgctggactccgccgccgatcgcctccgacgcctggaccagattcttggagcccgcctggaggcagagggcggtaggctctgccgggcggtgatcgaatatatcttgacgtgcttccggagtcacgacccggccatatccttggagccggtgatcgctggtccggtggccgctactgaagatgccgctcgggagggcgtacaagacgccgtggagctggtggccgagcgcttccagcgtgaccctgctgatgacctgtag

SEQ ID NO: 35208 - DNA, 500 bp, Zea mays
  Peptide Sequence Number=SeqID_78583
ccgaggaggtatcttgtaatctcggccgcacgatcgcaaatggacgctgcagattagatctgagccttggtgaaccggcggcggacgacagaatcctgagcgccgccgcggcgccattgccggcccttgatgatccgatgctatcgtggggtggacgcgcatggtcgacagataggcacctgcgcgaatctcagctggcgccgttgccgctacacgcggagtttgttgagatggacgcgcccacgacagaggggatgaaggcactgacatcgcaggaccacgcgccagcgtctatcgcgcccagagaaggaaggtggctgacggcgcggacccactcacaagcctcaaaggcgcacccctccacgcacggtgagcggctgacccgtgggccccagccgtcagggttacatggctcgcccaagcgaagtctggatgggccagtgcagtggcttgttctactgggccgaaatgagcggaggccggaccacgcgcaggtataa

SEQ ID NO: 35209 - DNA, 285 bp, Zea mays
  Peptide Sequence Number=SeqID_78584
atgggcgcaattcaggaaaacagcgccgcctgccctgctccgactgttgtgccacccgccagggtgaggctgacagcagccgagtccagcctcaggcgccataggaagctccgcctcggccgaccccgtgggctcagcccccgcctcggcctcagaagacggtctccgcctcgctcgaccccagggctcggcctcaacctcgacctcggaggagtcaccgcctcgctcgaccttgggctcggaccgaccacgccacagggggatacatcattaccctacccctag

SEQ ID NO: 35210 - DNA, 819 bp, Zea mays
  Peptide Sequence Number=SeqID_78585
atggcagcgctggattgggagcattgtggctctccagctctggtgaccaagaaaggctggggttcttacggtgccacggagttggcaactgcaaggagtgatattgtggcaactaatgagaacctcccgccaaatgtcatcaagcaattggctaaagaactgaagaaccttgatgagtcacctccagaagggattaatgtgattgtcaatgatgatgacttcactactatttttgctgacattgaaggccctgctggaactccatatgagaacggagtattcaggatgaagctattattgtcacgcgatttccctcaatctcccccaaaagggttcttcttgactaaaattttccatcctaacatagctactagtggtgagatatgtgtaaacacactgaagaaggattggaatcctggccttggattaagacatgttcttctggttgtgagatgccttctgattgaaccatttcctgaatctgcacttaatgaacaagctgggaagatgttacttgaaaattatgaggaatatgcacgacatgcaaggttatacactggcatccatgcccttaaacctaagaatacgtccaagaccggagctatatctgagtcaaccacagctctgaatgtcgacaagtcaagtactgcctctagcaagaacacaccatcgatgccaccggcggatcagaaccccactgtttctgatcctgctgtaggagctgcggcggcacgaaagaaggatggcccaatggcttccaaagttcctgtggataagaaaaggctggatgcgcggaagaagagcttgaagagattatag

SEQ ID NO: 35211 - DNA, 210 bp, Zea mays
  Peptide Sequence Number=SeqID_78586
atgaagatcaaaacctctccccatgtattctgtgaaatctggacctccaaaatcgcctcaatggaagttggctgcgagcatacagttcactgtcgggggaagaagaggggtggtgacaaggatgatggttatgactatggtaatggtaaagaagaaggcgtcaaggcgaatctccaggagttccaggacttcgacgagttcgaggattag

SEQ ID NO: 35212 - DNA, 544 bp, Zea mays
  Peptide Sequence Number=SeqID_78587
tagccacggcggagaaaagggcggaggggcttaccggcggcgagattgctccggtgaagtggtcgaggacgaaggggaggtctcggggatcacaacgggaggtccacgggatgccagagaagctatgagcgaaaggaattgggcggagacttactggatagctcggtccacgcgcggcggcggaagaccgaagtccggtgaggtggatctcgggcctccggtgaaatccggccgggtccgagggcttggcaagcttcacgggctactggcggagctagccgaagcactggctgggcttgagggtggctggagtgggatggccacggtgaccgaagctctggcggcaatggcgggcggaattaagctcgccggagctaaggaaaggtggctggccggagagggtgggtgcggggcgaagagagagatatggagccaggaaatctggtctgtctccctgcccaaacccgaggcaaatccaagaaatcccaatgagtccccacatgagaagcttgatttgggattttatttgagttattttggctaa

SEQ ID NO: 35213 - DNA, 513 bp, Zea mays
  Peptide Sequence Number=SeqID_78588
atgaagactctgacgactttctatggctaccatcccctggagatggtgatgcaccccttgggactcttccctgctgagaagaaggatgatcccatgtggtgtaaccgcgcccttcagagcgatgctatgacacttcttgctaacaccgctcaggctgccaagctcactctcgacagtcgggaagattttgtggtcgacctatccacagagttggtggagaaggatctgcaggtggaaaggctgagccagcgtattaccaccctggagcagcaagtggagatccgagacaacactattgatgtcttggagaaccagcttcacgatgtgcagagggaactcgaggaagcaaatgaccacttggacatgcaccacctggagatggaggccaatgaagcaggaagcgagggagaagaggctcccgaggagctaggaccagcccctggtgccaatgggactacatccgcgatgcctccttcacccgtatccagtgtcgcttccaccgctcagggttaa

SEQ ID NO: 35214 - DNA, 624 bp, Zea mays
  Peptide Sequence Number=SeqID_78589
atggcgggcggaattaagctcgccggagctaaggaaaggtggctggccggagagggtgggtgcggggcgaagagagggagctccgccaccgcccgccgacgcccactgcctgttccgtggccgctgtcgcacccgtgccccatccagtgccatggtgagctctacctgactgtcagctgcccgggacacccttcggtgtgccctctccctctttgtttcgcccggtccgtgctcaccggagcaatctttgcgcagccgaagacctgccgctgtcgacccgaggctccatcgcacccccgccgttctccaagtgttccggagttcgcactcgaggtgagaatccttcccatgccgttatttcgccaagtatcatccctgcgcccgcgcaattgctcaccggagttagctgcgctgccgcagaaactttcccactgcggtctgcattctctggtgcctccgtgccagttctacgcccacggttgggttcaccgtgttgcgttgaacgtgtctgaccctttccctaagccacaagagccccaccgtggccagccttctcgtctccggcgaactctcgccgcggggccgagcggcgccatcgcgcccaagccagcccctagccattag

SEQ ID NO: 35215 - DNA, 141 bp, Zea mays
  Peptide Sequence Number=SeqID_78590
atggggaggctagaaccccgggcagaaagggaatcacggcttgtgggtaaagtgtgcaacctctacagagtgttagaaactggaggtgaagctggcaacatggaggactttgaggagttccaggactacgacgagttctag

SEQ ID NO: 35216 - DNA, 642 bp, Zea mays
  Peptide Sequence Number=SeqID_78591
atgccccctacaccaccacagagcatcatggctgctggaggagaccctgacggagacgacgacgacgctggtggcagttcgagccacgacccggagcgctcgaaggagcaggagccagaggggtggatcgctagacccattactcgtgacgctgctcgtaggtgtcacttccacgacgctctcgataccctgttgcgtcgggccttcgaccgacacacctggcctatcaagtgccgttgtgtagtctaccagcattgtcacgggctatacccggaccaatgggaggctacttgcttggtgcgtcgtccagacgatgatcttcggggcatagaggccttcttagagcactattctatcactgagagggacactgccaaggcagccatgcaagatgcagcacgacgggcactttgtcaatattgctcgttgttcagcggggtagctgatggccttgacctgaagtactaccctcgccgttcgaccggcagcgctggaggtgtgattgtatcacctgttggtgagggcaatcctaggctgagcagcatggtcaacctagccgccgtgctcaacacagagttggaccacgcccttgacgagttgggcaaaattcgggcgaaggttgcagaattgcgtgctgaatga

SEQ ID NO: 35217 - DNA, 102 bp, Zea mays
  Peptide Sequence Number=SeqID_78592
atgccgaagctcccctgcgcacagcttcggctctacgccaacctttgtattctttatacttcttcagattgtggttctaatccgagtccgaagattttctaa

SEQ ID NO: 35218 - DNA, 195 bp, Zea mays
  Peptide Sequence Number=SeqID_78593
atgccgaagctcccctacgcacagcttcggctctacgccaaccttcgtattctttgtacttcttcagattgtggttctgatctgagtctgaaggtcatgaacaaggcatatgagatgatgaaggtcatgatcacaagcacgcaagggttcatctattggagagtgaaaagcaagcaacaaggcaaaggtgcatag

SEQ ID NO: 35219 - DNA, 1194 bp, Zea mays
  Peptide Sequence Number=SeqID_78594
atggtgatgatgatgcggtcgtgcctcggcggtggcctgctgccggtggcggtcatgctctgcctcaacgtggtggcggcggtcatggtatcgctcgtcaaggtggccatggacggcggcatgaaaccgctcgtgatcgtcaccctgcagcagctcaccgccgccgtcttcctcgcgccaatcgcattcttcaaggagaggaagtcgaggccaaagctgacgctggagatcttcgcctacatcttcgtcagtgcggcgctcgggtatcttccattcattccactccacgccatggctgaatctgacacgaagctagcttaccacattgacgtaccagcctgcgccatatattgcagggcagctcttcgtcagtacatgatcttcgtggccctgcgctacaccacggccaccttcgtgaccgccttctccaacatcgcccccgtgctcaccttcctcctggccgtcgccacgcggtccgaagcgctggacctcaagagcaggacggggttggcgaagctgctgggcacgctggtgtcgctggccggcgccatggtgctcaccctctacaagggcgtggcgctcacccacgcggcggcagcctcgcaggaccagcagcagcactcccacggccggttgccgccgagcgccgccgacagccgcggcaagtggacgctgggcaccgtggccatcctgggcaactgcgtctgcctctcctgctggttcctgctccacggccgcctcgccaagaagtacccgcacgtctactcctgcaacgcgctcatgtccttgctcagcttcctccaggtcgccgtcgtcggcctctgcacccagcgcagcatctccccctggatcgtcaccagcaagttcaacatcctcaccgtcctatacgccggcatcgtcggctgcggcgtctcgttcgtgctggtgacatggtgcatcgagaagagaggagccgtgttcgtggccgccttcataccggtggtgcagatcatcgtctccgtcatcgacttctccatcctgcacgagcagctctacctcggaagcgtgctgggatcagtgctagtgataggtggcctttaccttctgctgtggggcaagaggcaggaggccctgcactgtcctcctcctcctcctccaaaggttgccgaagaagaccctgctgacaaagagcagcagcaagtgcagcacaactga

SEQ ID NO: 35220 - DNA, 753 bp, Zea mays
  Peptide Sequence Number=SeqID_78595
atggtcctctggttcctaaaggaccgcaagttctccgtcgatgaagccgtctccaagctcaccaaggcgatcgtatcctctaattcactcgtaccagtgaagctcacacctaatagcttctttactcgctcaataatttcctggtatttttttgacgaaggggcgaagccccctatttcattaagaaatagattacccacaatccttcttctgaaagactttggtgttgcagagttatcagaggaatcagtgaaaatcctgtaccaaactggcaaggcatatgtacatgattccttggacatttatggccgaccagtgctaattgtagtggcagccaaacattttccttcgacacaggatccagttgaaaaccagaagctatgtgcctatttggttgagaaggcagtcaatagacttccgccaggagcagagaatatacttgggatctttgatctgcgaggctttcgggttgaaaatggtgatctccagttcctaaagtttttggttgttaaacctctgttgaaatcatatgcctccctggtacacatcaatcagctgcattttggaagactaaactgcaacacaactacatctgcaatcacagagaaatcaggtcaacaacggagagggtcaagcgatccccacgtacagatgccagcatggtcttttacatggttccaagaggaggtgatatatgctgtatttctagtcactagttgtcggcgtttcgagaccggggggtccctaagctga

SEQ ID NO: 35221 - DNA, 432 bp, Zea mays
  Peptide Sequence Number=SeqID_78596
atgcttgaagtctctacagtttcgcaaggtgtggctcatatccctgtgatacgggcaccgggcaccgaggatgtcgtccagtgtgcactcacctcctcggggtgcgcctcgggcatgagaggcgagtggtccggcggcatggacctcttcacggggcctcttctcccaacgcttgtcgggttgctggttcgcgtcgcgttgtggtgctggtggcgcaggtttcgctcccccgatgaggtcctgagcccgttcgtcagcagtgatgtagaggtccacttctcgaaacaactatttggaggtggttggtgctttctgcagtatggctcggacgaaggccgagtcattagatccctagtagaagtcctcaatcactgctgccccagtgacctcggggatgtgatttctcatggtctgaaaccttttgaggtatga

SEQ ID NO: 35222 - DNA, 720 bp, Zea mays
  Peptide Sequence Number=SeqID_78597
atgcaagccggctcagagcagaagaagccaaaccgccgtgcgcggtgcgtacaaccgcccagcggttacaagcggccctccactttggcccagaccagcaggcgaaagggcgggcagccatgcaggcagcatgcaaccgcgccaagtgggcgcacttctccgactcccaacacgcccggcatggaggcccaggcccacgcgtcatgcaactggcgcgccgaatgcttcgtgcatgcagccgcaccgccacctgcgccaccaccgcgcctcctcgactacggaaccaataccgcgactcgaggcgacccagtgcacgacctagcagcgccagcctggcgcgacggtcaatacggccaaaaatgggccggcagtaatgacggtggcggcgcctctggcaggagaagcgggcgacgcttcgccttcgccataatgaccgcgtcagaaaagggaccgggaaagggggataccccgaaaaggatccttccccgtgaaggaaccaggctccgagcctccctactgatcaggggttcgaaggctggcctctcggaagggttcaatagccgcctcagagcacgtgggctccacacccactactggtcagaggttcgaaggccgtcccctcggaagggttcaacggccgcctcaggctactcgggctccgcgcccactactgatcaggggttcgaaggctggcccccgaagggttctgagagcacctag

SEQ ID NO: 35223 - DNA, 912 bp, Zea mays
  Peptide Sequence Number=SeqID_78598
atggtgacctccagttcgacggcgggggaaagcaaactgggccgcggcctctgcccctccctcagcctcaaggattttcatcaccagagctggggaggggactgccgcgtgcctagctctcggacgcgagtggcttcggagccgctctcggcgccggctcctgccacggcagctggaagaggttcttccgccgacgagatagccagggccgcccacggaccgacctccaactctacggccttctgcccgtccttgcctcacgagtttgggcatgggcgggggcctcctggcagcagcatccgccctaaggtcatcgctgccgctgtttggccccccggagcagaagtcgtcgtcgtcgccgctgccggagcgggcgacggcgtgccgttcgttggtcttctgttgctccgcaggccccccccatcgagtggggttgagtccctcggctcggtcagccttattgtccgaggcttcccttgcttagttagaggaacccctcggccgctcttcaatgagccgaggccaggggtagcggtgtcagcgcgaacaaaggcagagttggctcgaaaagaagatctggtcggccggagcctggccgggtcgtctgttggcgggatcgacgccggaaatgaactgccaaggcctcggggcgggctgatgtcctcggaggacagctggccgaggccccggggtgatcgaccgagccgcctgctcgggccggattctcggagaagaccctggcgacggtggcccaggcttggtgatgacgtcgtccttcagagtggagatcttcggactgcgtcgccgtccgaggctaggtcggacctcgccgaaggtgttgtcgatgccgagggtgctgctgctcccttcaagcgtcaggatccgagcctgcaggatcagattgtcttgtag

SEQ ID NO: 35224 - DNA, 708 bp, Zea mays
  Peptide Sequence Number=SeqID_78599
atggcgcctcctgtagatgtggccggtccgcgccctgggtcgggcgatgtggaggctcctccgaggtcgaggtcaagtccgtcttccgtggccgaggctgagtccgagcccccgggtcgggcgaggcggagttcgtcgtcttctggggctgagcccgagtccgagccctgggtcgggcggggcggagtacgtcgtcttctggggctgagcccgagtccgagccctgggtcgggcggagcggagttcgccgtcttccggggcttagcccgagtccgagccctgggtcgggcggagcggaagttcgccgtcttccggggcttagcccgagtccgagccctgggtcgggcggagctttctatgggcctcgggcgagccgggaacgcattcgccgctggaggggggcctcaggcgaggcggagatccttcgggctttatgctgatggggattaccagctgagaattaagagccttgagggggagcgagaggaggagggcagccgagcaggagcatcgcagtggtggttaagcagcagcaacgacgacgacgacgacgctgagaggtttccccgttcccgacggcacgtccaccgaggcggcgccatcgcgatgggtcctctggcgccgctgaggtgtaacccgccgccgccgttctccaagtcgccggggtccctgctgctgctgtccaagtcgctcaccctctactgctga

SEQ ID NO: 35225 - DNA, 1278 bp, Zea mays
  Peptide Sequence Number=SeqID_78600
atgcctctggcgatcgaggctccgacgagatggctccaccagatccagaagacagaagtagagaagagaagcgaaccaaagcaagcaagcttcaagaacaaggtactggatcaacaactcctagctgattcgattcttgagtttgttctgatccgatcttcccttcctactcagcgctgccctattcgattccatttcgtgttcctctgtgctgctgtaggggagggggaggaggaggaggccatgcggctgccgtccgacgtgccgcgcgaccacttcgcggtgtacgtgggcgagtggtggcgccggttcgtggtgcccatcgcgttactggaccgccccgagttccggtccctgctgcggtgcgccgaggaggagttcgggttcgcgggcgccggcggcgccctcgtcctcccctacgaggaggtcgccttccactccctcaccttcgcgctcgcctgtgcccggagaggagatgttctccaccgggtcataggaatcctgacgagatggacggcaatacgaggttcgcagcagagagtcagaagaagcccatcgtgtaaggattctgtttctccattcacccccacccacaaaagaagtctcctttcatgtccattggttgattgcgcgtgctccctccaatgtcgcccgcaccgcagcccagatgacgacctcgtggagctattgtggcacaatgggagcgtcgtagcgcagccccaggcgcaccacaggccggcgcagccctctgaccgcgaccgcccgggcaccagcggcctcactgccgaggagaccgccgcgtggttcctgaacaccctcgacgacccgctggagaaggacctgtacacgcaactttggtacaacacgatcgccgatgccgccctgcaacacgagggcacgttcccgggccctacctcgcatccttcgtcgccaccgccacccgttgggagcagcggcgtcgagtctagctgggtcggcgacttctgctcgaccttctgcgacagcaaccaggtgcccaggacgccgacggggatcagggggaaggacgcggcattgcagtcggaggtgccgagcgatgctggcgcgcacgacggcacatcgtcatccggtgggtccggaagcaactatgggggatccgggctgcccagtgacagcgtccatggccacaagaggaagggaatgtgtagagacgagtcagatagtcgaagtgagagaagaagggaccggatcaaagaaaagatgcgtgcgttgcaagagctgatcccacactgcaacaag

SEQ ID NO: 35226 - DNA, 735 bp, Zea mays
  Peptide Sequence Number=SeqID_78601
atgcctatatttagtataggtgcaagactcgaacgccgcgctctacagccggcagaagtctgcgcaggtgaagctgtacgagacttgaatgatgtccaccatgtgttcgttcaaaatcccctcaagagccgccatcccagatcggatgaggaggaagggctcaaagccagatgccactaccggagcgctaaggtggacaacgttgtctactgtcttgaggatgacgtctatgtcaagctgcgtcagatgggcggcgccttccgcgacggggcggcgccggacttgtgcgccaggaagagcttcttgagcagcctgagcatcatgaggaggcccatcctccgccggcggacgacggcgtgcttgcgcgtctccaaggcgccgtcgagccagggctccctcacggcagacaattataagcactccagcttattgggcgtcataaaatctgacaatgcggtccttgggcttccttatgcgttggccaaccaatcattctgcaaatcattcaacttggatctgcttgaagcctcagctacacttactctcgctgagttgtggctggctcttggatcaagccatgcaaagaaggcactgagtcttgtctaccagagccttcccatgattcttggtcatggtgggcttgagctgcgtgctcgagctcacgttgttttagcaaagtgccatttatccgatctgaaattctcaagtactttgcaacacttcgtgttacattaa

SEQ ID NO: 35227 - DNA, 594 bp, Zea mays
  Peptide Sequence Number=SeqID_78602
atgggagagtaccggacccctggatatacagtccagacctccaaggttggtccaggacctccacggtgggtgcattccgccacctggccggaggacgtggggctcctcattgccgccgcaagagacaacagcctagtctatgacacaaggaagacagaaggtaatattttaaaccattgcagcgacaacgaggtgccccgcgcgtggcctgatgaaaccaccaggcgtgggggccgtgggtcagttagccacggggacagatatggcagtcagcgtgaccgaaggcttgcatcctcccctgagatgggcccgggggccactgtcggtaccctgaaactagggtaccccctgctactgtataaagatgcagtacccacacggctatctcttagtcgcatggacctccacgtgtgtaagccggacccctggaatgggatccggaccccccgtatggggtctgggccacccacaatggggtcccaaggtcccaggacagaacatactcaggccttgaacaggacccaggcgggggcggagaccttatgctgccacgtggcatactgcgcgcggcttaagccaacgggcggaacctag

SEQ ID NO: 35228 - DNA, 1395 bp, Zea mays
  Peptide Sequence Number=SeqID_78603
atgggtaatttcctcgcctgcctccgcctgtgcctgcaagtcgtcaactgcctccgcctgcgcgcggcgggcggcatgggagcagagagtatcccaccttcgccaacagatgagttctactgctgctctggctcctcgtcctcctactcggccgcgtcgaccaggtcgtgcgtctccgaatcggcgcagcacggccgccccgtcgaccctctctgcgtgctctccgttcatccgttgtcgctcccctccacctcatcgaacctaaggtgtgcaagtgctctgctcgccgaggccacaagcgcgttgttccataccaaggcagagaaaagacggaagggcggctcccccaccccacccccgcacgccatgacctccacaaccccacccccgcgcgccatctcgccagggctcccccacccccgcgcgccgtctctcctgcaccagctctccctgcaatccctccagctctccctgtcgtgtcgcctccacagcgcccaccgaggtcccgctagtgtggcccccgacctcgtcgctcagtgctggcgcgagatcgaggccatcggccccaccacacctcgattcgccaacaccgccgacccgggcgcctcgccctctgccttcgactccaacaccggctcgtcgctcggccacatcgggtgcctatgctcgatgtatcgcgctgcctctctgtcctcattcgttgcgtccgtcctcggcttcctcttccgccttccccgcgatgcctccccgcgtcatcgcccaccagcatcatcgcgcaggcctcgcttgagacagacatggcagtggattggacagtatgacagtggattgggtgtttggcttctctttgcagtagcaattggaggcgaacaggaagacactgtagaggcactctcgcgcgctgttcaacgtagtggcagcagaggtggcatcaaggggcaccgatggcggcaacatgctatcgcagcgtgtggcggagagacagaggtcagacctggcaaacaggacagggaaggggacgtgatctccatgcaagagaacatgtctgccaggacactcacgctctctagctccacgcagcagacaattgtgcggttcgttaagctaccattggttgacaagatcaccgcttggatcttcctggaaaatgcgacgacggccagggccaaggtgctgaaggaggtgaggaacatcgcagtaacgatctccatggagaagggtaaaaaggaaaacttgatgctgccaggatcgtccatcaagaagaagctggcacgtctcatggaggtgaaacatgatttcatggacttcttgcaggggctgagcaaggaagagatggagttgttggatcaactgaacatggaagcgactgaggaggatgttgcaacattcatctag

SEQ ID NO: 35229 - DNA, 774 bp, Zea mays
  Peptide Sequence Number=SeqID_78604
atgagctatatgagggtggcgatcagatttgcttatggttgttggcctactaggatggttgtatggccagtcactgactggaaagctgcaacggactcaagcttctcccagagaacttattctgccattaagctcctgttcttacagctaagctccatggctagggacatgtgcacattggtgagaatggaagcattcactgcacttggtaaaattcaacgagtttctgagggtgttctgctacaatcgctagaaaagaaggtgagaagaactgcctgcaaatcattaggagcgctggcaaagttttctactcagtacacagagaaggccttggacttgttgatggacatgatgaatgatgatacagaagcaatatggctgcaggctctagaagcactatttcgtatggcaacatatggatgtttgagtgtgcaggagaagcacatgcatatggtattaactacgaacatactccgttcacaaatgcatgactggtccttccaaatagataactatcatggatctggaatggttccattggctgacctgttcctgatgatgttctattctacagatgtgttagaagacgaccgtatcctgtgtgactggcaagatttaccatttaaaaactatgcccccctggaaaatgatgttaatgtccacccagtaactttttgttttgtttcctgtcatctcaagatcaaagatcctaagaaacagttcctggtttatgggtctagcagagccagaagtgagcacctacaacccttttaa

SEQ ID NO: 35230 - DNA, 456 bp, Zea mays
  Peptide Sequence Number=SeqID_78605
atgggcaagagcaagaaaggcggaagttcgtcgcaccactccggcgacaagcagaagcgcgagccgagtccccccttcaaggtcttcggtgactccgagtactcggaggaggagttctcctccgagtctgaggggtcgctagcctacgcctctcctccggtgtcgtccgatgactcggacgattcccatgggatcatcgccgaggtgtggacgtatatctgggccgtcgagcgctccgggctcgagggctcggatgaatcggagatctcctcggacgaggaggactcctcctactcgtccgaggaggggagcggtgatgacggcaacgacgagggcgacgacggcgacaaggacgacggcgatggcggcaagggtgacgacgacagcggcaagggcgacgacggcagcggcaagggcgacgacggcagggacagcggcaaagcgccactggcttaa

SEQ ID NO: 35231 - DNA, 555 bp, Zea mays
  Peptide Sequence Number=SeqID_78606
atggctacaaaatggttggtggctataaataccaccccaactggccacttcaaggagaggagcccaagcaacattccaagtcatatagttgacatatccaagcccttccaaccacttccattcattgatctatctcatacacaagatttaggccaccacaagcaacacaagtgccacaaaagagagatcaagcaaaagagagctactcgtttgatggatgttgtgaccgcatatctatatgggtcattagattcagatatatacatgaaggttccagatggaataaatgtgaaaaacttggatgccattgaatgtggggtggttggggtatttatagccccagccaccaaaatatggtcgttggaaggctgctgtagcatggcgcaccagacagtccggtgcgccaatcctcttgctggccgttgggttctgaccattggagctctgactggtggggcctctaggctgtccggtggtgcactgtacaggtcctgtagactgtccggtgcgccaactgcgcgagctctgtcctctgcacgcgcagacgcgcattaa

SEQ ID NO: 35232 - DNA, 810 bp, Zea mays
  Peptide Sequence Number=SeqID_78607
atgacccatcctggccatcggatggacgatccacgatctgcgttcaatggacgaaaggaggacacgaagagcacgaggacagatgacttacaggtctttggcatggagattagccctgcccgcggtatacggcggcaccgtggcgatgctggtactccggcgagcgattcactggactccgaaggccaccgcggccaagcacatgcccgatcacaatccacgcgctccggcgattctcccagaccccaccatggataccgagtggaggcggagatgacggaccatggtggcggcattaccaacaatttcgcgatgccgactccagccagggatttggatgtcgtagttgaggaattgtatgccagaaaccccgtgcacggtgccaaccaggaagaacttctgccgccggtgacctccattgccattggtgttccggccgcaacagtgcgacctgggagctccatggccggtggcttctgctgcgtcaccacgggtcaaacagcgagggaaaacacagagtgtggagggagatggagccggatgccactgccgcgtcccacaaggagagacccagagaaagatggagcttcggtgccgctggtgtcgcgggccgcgctgtgcgcggtgctttgggcgaccatggggagaaggagacgagctccgggtctgcgtctcgctgcggatccgcctcaccatgatgtcaagccaacctgccgcatagctcatggtgagactcatctccacgacttcacctgtttgttcttcacgtttagcatgggtctaatcggggatttgggcattggggcctaa

SEQ ID NO: 35233 - DNA, 1023 bp, Zea mays
  Peptide Sequence Number=SeqID_78608
atggcgcaggcgacgagcggcgggcgtgggctggaggctagacaaagatggccggggcaagggcgctggctgtgggggcgcgacgagcgtgggctgaaggctagagcgaggctgtcaggtgagggcgctgactgtctggccagctgcggttggccgctatgcgagggcgccggctatgggggcgttgctactcggcagcgctcgctagatgggggcggtgaggacgatggatggggcgttgtgtcggcgtttcgaaacccgggggtccctggaccgatgagtaaattgtcgccgcgtgccccagcccagatgggtcagcgcgagacgcagcgcgaaggggggaggcagccggagggagacgggcgtgagaggtggaatcccgcggccttcgtgcgcaaggagaggatccagcctgagtcagcttggggtagggtaatgatggcgccttcttttaacgtggttggtccgtgccctgggttgggcgatgtggaggctcctccgaggtcgaggtcgagtctgtcttccgaggccgaggtcgagtccgagcccccgggtcgggcgaggcggagaccgtcggctgaggccagggctgagtccgagccctggggtcgggcgaagcggagttcgtcgtttttcggggctgagcccgagtccgagccctggggtcgggtggagcggagttcgtcgtcttccggggctgagctcgagtccgagccctggggtcgggcgaagcggagttcgtcgtcttccgaggctgagcccgagtccgagccctggggtcgggcggagtggacttcgccgtcttccggggctgagcccgagtccgagccctggggtcgggcgaagcagagtttcccatggcgcctagggccgggcttggccgctgtcagcctcactctgtcgagtggcacagtagtcagagcggcgcaggcggcgctgtccttttgtcagaccggtcagtggagcgacgaagtgactgcggtcacttcggctctatcgactggagggcgtgcaccaggataa

SEQ ID NO: 35234 - DNA, 549 bp, Zea mays
  Peptide Sequence Number=SeqID_78609
atgaccctggagcctcatcccctacagccaggctggcgttcgttggactctgagtcttttggataccgggctgaggacacgatagaggcgattgctctgcacgggctgaccactttctgcgggttccatcccttggagctgtctacccaccccattggcttgttccccgcgaaaagggaggacgacccaatgtggaaggattgggtggagcatgccaaggacatctgggctatctacccaggtcagactgcgcacttgaccgtacggtgcatgaatgctctataccgtctgcaagtgatgcgcggtgaggcgatgtcccatctgatggcactattggaggcgacaaagaccactttggacaacagagaggagcttgtggttgatttgtccactgagatggtggaaaaggatttgcaggagatccaggacatggaggccaacgaggacgtcgacattgagggaggagaggagcctgcctccagcgtggacactgctggctccgggagaccaccttcccccgagtcgagtgttgcctcgttcgctcactag

SEQ ID NO: 35235 - DNA, 222 bp, Zea mays
  Peptide Sequence Number=SeqID_78610
atggccactgacaggatcaagtatcacaatctcactcgatgtacaatggatcaagcagtctcattagctgcgagaagcagacgattcgaatcgagtttttatccttgcaagtacaatggatcaagcagtctcattagctgcgagaagcagacgattcgaatcgagtttttatccttgcaaggatttaataatattatgctaagagaagaaaaactaagttaa

SEQ ID NO: 35236 - DNA, 258 bp, Zea mays
  Peptide Sequence Number=SeqID_78611
atggagttgaagacaaaggatggtgtcgtcctcgctattgagaaacttgtgacctcaccactactgttttcggacggctgtgcaatacttgcccatagagtcattcgagcaatcccattctttatttatctaattatgaccatcagtgaatctccgtataccatcaacctcttaatgcccagtgatatggcaatgttcaatccatggatcaaagcttcatattctactgcattattggatgctgagaataacaactga

SEQ ID NO: 35237 - DNA, 837 bp, Zea mays
  Peptide Sequence Number=SeqID_78612
atggcggtcgtaacagattgccgtgcgatacgcggatatcgcgccgccagaatcggtctcggggtcaaccaccgaccatggcgcatgccgctgaatcgtatcctacgccattgggagaacagagaggttgagggagtgagtagaaagaatttgagctcggcgccgccgcactcggagagagagggagaggaagtcgcgaactaccgcgtgtgctccggtccctgctgttgtccgctggtggaaccgccgcgggattgggagcttcaactccggtgggatctctgggctcgggttagtcacggtcagggagaatcgatggtgcctattccgctcgccatagtggtcttcccagatgagaatagtcactgggcgctcaacaacccacgccgaccaccgccctccaagccgcgagacctcctatggcgctcggccccatgctccttgccgcgtagagagagagagagagttgtcgctgtcggtcagaggcgacgaagggactcagtcatgggcgtggaggggctcgctatgccctgccggaccttgctggtgaggttcgccaggcatcgaccatgcgtggagcagcgcgggctcgccgatgttgctgggaacgcgggtgtcgtgaacccagggcgccgcctgcgtcatctgtggccatctccaccgttcagtactctcgtgaggatcccgaggaaccgtcgtgctgtgagggacctaggggtatctctctcgcaagggaatttggccagactcagaacgaattgctcaccggagcaggagggccgccgcgtaatcacactgctccgtggacaggggtctcgacgagtcaaaccgaggtga

SEQ ID NO: 35238 - DNA, 132 bp, Zea mays
  Peptide Sequence Number=SeqID_78613
atgtcatcagcatatagagggaaagaaacaaaggaaaaggggaaggagatggatgtcgtgggagaaggaaaatgggcgcagggagtgggctgggccggtttcggcccacaacacagagaaatagtattttga

SEQ ID NO: 35239 - DNA, 693 bp, Zea mays
  Peptide Sequence Number=SeqID_78614
atgtctgcacaaaccatcgagctacagtcggtaacaccgtcctactgcaaaaagcacctcgaggggcaaccccagatccatgttctactttgggaccatctcatctgtggcaaacgaagaagggactctacaccgcatagcagatctgccaaagagaaaaccttcctcgataatcttcgggaaagccggaacgaaacaggaaatagcgcaacctccagcgctccgtgcgaagaccacctcctgcaagccgggagcagaaaattcattcacccgaagaaccccgttgtccacctcatccacataagagtggacacagattacgaggaaaaaagaaacaaagacccgtcaggctgcccttctggtgcctccgccctcaaaggagaacagaaagagtggaatcgtcccccatctccaacgacgaaccaactgtgcctggggaagaaccacctcaacgggaagcttgtcgacgaaggaaccgacgccgtaatgtccggcggcatcatgaagccggagaacgggacccggcacagcctatatcaccagatgagatctcggaggtgggagaaactccagacgaacgagtcttcaaggagagaagaaattcccgctgacgtgatcatcgacaagctcaagagcaagccgagcaggaggcgagacaacgtcgagagaatcccctcctcaaatgaaacctga

SEQ ID NO: 35240 - DNA, 657 bp, Zea mays
  Peptide Sequence Number=SeqID_78615
atggcgacgacgcaggacagcggcaggacagctagtgccaccgcgctgacaacgtcccgcgggcgccgcttcgttggcgtccggcagcggccgtcggggcggtgggtcgcggagatcaaggattcggcgcagcgcgtccgcctgtggctgggcacgttcgacacggcggacgaggcggcgcgcgcctacgacgaggcggcccgcgcgctgcgcggggagaacacgcgcacgaacttcgcggaccgcgcgcggcacggcggccccgccggcgccggctccggcgcggccagggccaggttgagcaagaacctgcagcacgtgatggcgcgggcggccgccgccggcagggccacggcgtgcgcgggggtgggcgaccagttcgctctcgccgcggtgttccggcacccggtggcggcgcagcagcaggtcaagcacgcggtgcagccgagcttcgtggtgccgaggcggaccgaggcgccgccactgtcatcggtgcctgcaggaggtggggaggtgtggcgcgtggacgacgtcgacaccgcggatgagtcgctgtgcgccgccgaggagagatcgttcaaggtgtcctcgtctgtgatcgtgccgccctccttcagcgcctcgtcatccgagtctttcggcctcgacgatctctag

SEQ ID NO: 35241 - DNA, 355 bp, Zea mays
  Peptide Sequence Number=SeqID_78616
atggcgccagggaagctgtccacggtgagctgcgggcggcggtggaagcgcagcgacggcgaggaatccccgagctcaccacagccatgggagcggcggcttggcagcagcaccgcaccccagcgaggtatccaccacgcccagccgccagtcgagtccgcagtggcgccaaggcgagggagggacaagacggggaggtcgacggcgagctacaagcaggctagacaaaagcaggggtggagcccgactttagggggcgaagcagtcagcgaggagcgagatgcgtgtggctcctgctgcgaacgaccggcggagaaggaggagatcgctacgaacggggcgattctgttccgag

SEQ ID NO: 35242 - DNA, 735 bp, Zea mays
  Peptide Sequence Number=SeqID_78617
atggccggaatcatccggtccacgtgcgcaggcgggtgctctcgtcggcggcgggtgtgccagccaaaccacagcgacatagtccaatccaatggcacggtccttggttcaagctcgtgcaaggttcacggcctctcagggaagctatccgagggcttggatcgagcggaggagggcgggaaaggggctggcttctgccatggttcaacgggggatttgagcaccttagcggcgtgcatggcgacttccgagctcctattaaaggatggataccgctcctttctcccgccaccatcaatacacgcaaacgccgtcgctgggtccctggtgactagcgtgagcgcgtcaccatcgccgtggggccttctcttgcggctctgtggcgtctctgtcaccccaggggtggaaattgcaccggtgttggcgccgctggatcgatttgattatggaattagtgaccaagaactgaaattgggtgccaaccttctctcttcactgcaactcccgcccgatgtcgtggaccggcctcaccctcgctaccgggctatgggtggtgtcacgcgagctcagggaggaagaaagctggagaccgttgatcagcgagtgaacgacttagatcatattaggggcttgggcgttcctcaaccgtggatgccggatctggcgtccagggtgattattaccccgagacccctatactttccagtaaatgaggcccagtccaggatagtataa

SEQ ID NO: 35243 - DNA, 435 bp, Zea mays
  Peptide Sequence Number=SeqID_78618
atgagcagtccgatcgtgatccgacggtcgcgggcgaaacattacctagatctaatcctagcccttcaactggttaatcaacggtcaggattcaatcggtcgaatagctctctcaggcaatctgatcacagccgcaagaaagggatccaacggtcggtgcctttctccctccctgcgcacgcaacagggcaagtgcgagcgattcgcacggcggcgctcccggtgagctcaccgtggataccgccctggctcacacatgccattcttctccctagagagtgctatacggagggaagtccaaggcgaattgatccacaaatccctaccaaggttatcggcacaaggaatcgcgcccacaggaatatgcggcatgacggcgaaggcgcatccccgattagcgatcagggcagcatcagtgcgccaaacgaagcctga

SEQ ID NO: 35244 - DNA, 444 bp, Zea mays
  Peptide Sequence Number=SeqID_78619
atggctgggaaaacggggcccggggtaaaagtctgcagacacagactacagcggccatggactgcgggttatttacgaaaaagtacatgggttctttacaaagattgccacggcgaaggggtacacgcgtccttaactgttagattagaaatctacggcctcgatcagatttcagagcgcgatggtaggcgatcagcgaggaccaccgatgtcgcaatggacggctctgatataaaaagactagatctatccacgcccgttggatctagatcaacggcgctggctaatccacccaaccggtacccctttgatctaatcgcaaccgtcgcgctatggatcaacggtcacaacccccctggtctatcccgcgctcaaaatagtggtcgacgccggcggtgcacaaccaaggatggcggcacgactgttgaacctcgccagagctga

SEQ ID NO: 35245 - DNA, 111 bp, Zea mays
  Peptide Sequence Number=SeqID_78620
atgaccgaggcgcgagcaggggcgatgttctacggcgacggcggcggcttcctcacattccgcttcaattccgacgatgctggagctagcggttttcatttctacttttag

SEQ ID NO: 35246 - DNA, 297 bp, Zea mays
  Peptide Sequence Number=SeqID_78621
atggtcgaggcggagggtcggttcgcggtgcttgatgactccgcgatgacggagcgcgtggatggggaattccccggcctcccgctcctcggcgaggcacgaacggcttttccgcgctccggtactcctggttggcggcgagacggcatgagacagtggcgcggtggggagtttgccgaggcgaatcaccgcgacaatggcgtacaacagcggcgcactctttcacctctcggtttagcggtagagctagggcatacagggctcgggacgacgcgacaggctccagacattaaatag

SEQ ID NO: 35247 - DNA, 297 bp, Zea mays
  Peptide Sequence Number=SeqID_78622
atggtcgaggcggagggtcggttcgcgatgcttgatgactccgcgatgacggagcgcgtggatggggaattccccggcctcccgctcctcggcgaggcacgaacggcttttccgcgctccagtactcctggttggcggcgagacggcacgagacagtggcgcagtggggagtttgctgaggcgaatcaccacgacaatggcatacagtggcggcgcactctttcacctctcggtttagcggtagagctagggcgtacagggctcgggacggcgcgacaggctccaggcattaaatag

SEQ ID NO: 35248 - DNA, 111 bp, Zea mays
  Peptide Sequence Number=SeqID_78623
atgaccgaggcgcgagcaggggcgatgttctacggcgacggcggcggcttcctcacattccacttcaattccgacgatgctggagctagcggttttcatttctacttttag

SEQ ID NO: 35249 - DNA, 435 bp, Zea mays
  Peptide Sequence Number=SeqID_78624
atgagcagtccgatcgtgatccgacggtcgcgggcgaaacattacctagatctaatcctagcccttcaactggttaatcaacggtcaggattcaatcggtcgaatagctctctcaggcaatctgatcacagccgcaagaaagggatccaacggtcggtgcctttctccctccctgcgcacgcaacagggcaagtgcgagcgattcgcacggcggcgctcccggcgagctcaccgtggataccgccctggctcacacatgccattcttctccctagagagtgctatacggagggaagtccaaggcgaattgatccacaaatccctaccaaggttatcggcacaaggaatcgcgcccacaggaatatgcggcatgacggcgaaggcgcatccccgattagcgatcagggcagcatcagtgcgccaaacgaagcctga

SEQ ID NO: 35250 - DNA, 246 bp, Zea mays
  Peptide Sequence Number=SeqID_78625
atggcgccttacacatcacatgaactctcacctttggtgagttcatgcccactggtttccccacaacttgttgaggtacatagcgctgacgttgtcgcagtagacaagggtgctccgcatcagcggactgtgcaactcctagagaagctgacgaagccacgctgcctcgccctgctgtcggccacagcatggtacttggccttggcgctggagtgggagacgaccagctgccgcttcgaggactag

SEQ ID NO: 35251 - DNA, 429 bp, Zea mays
  Peptide Sequence Number=SeqID_78626
atggtgcagagggttacccgatccacgtgctccggcgggttcacgaactccggcgagcgcgattacactattccggtggggctggttctcggctcaagctcgggcaagcttcacggcctcctggggaagctatccgagggctcggatcgagtggaggtgggcgggaaagggtttggccatgatggttgccctcgggcggctctggcgggtcgcggggaggtcgtcggagttgtgggcgagcttgggagggttaggcgcggtgcgggggaggcaatagggaagatggtcgtgcacgagggtgggctttatacccgttcgcaggcacgattcaaagggcaggtgggggtggggttttggattacataccgactcctttgggcagaaagtcggggaagcgagaacgtagaaaatcctcagtctcccacgtag

SEQ ID NO: 35252 - DNA, 417 bp, Zea mays
  Peptide Sequence Number=SeqID_78627
atggagctcgagtttctcccatggctgccgacctcctctacccccttgctgtcccaccccttctccctcaagccagcgccttccccgaccatatctccatggccgagcagcagctctgctcgcccccccctccttctttttccccttgtgcagcagcaagaagcccctgctcgcggccttggcgtccaacttcgctgcgcagcggtgccgatccaaaacagcggcccccggatcccctccgcactgcgtgcttcaccggatctgcgcagcccccaacatcgacgtcgttcacctcggagagaacctcgtgttttgcgtggagaaggcaagccgctcgacgctcgtcgatgtcgtagcgatgcacaaatcggaatcgccatcgtccttacaaacaccaattgggtttgtttatggtga

SEQ ID NO: 35253 - DNA, 579 bp, Zea mays
  Peptide Sequence Number=SeqID_78628
atggtttggctagagcaggagccgctgacgacctccgctgcctgcgctcgtggccagggcagctccgaccacctccgacgccgacccgcacaccgacatgaccgccgtgacctccccgacgtcattgatcaccccgccggagctctactgccgccagtaagcctcaccgccgtgatctttgccacggttactgtttcagccagccagggatcgcaggttagatttaggttaagtccagggggttttgtgcaagtttttggatcttcggccttatctttaccagtctttgactcagcttgctcggctgaggatgccttcggcatggtagctggttcttcagccttctgcgtaggagaatgggctcctttgggtcagcagctgaagaagctcatcgggggcggccgaagcaacaagtttggccgaagcagcagccttcctcttctttccccgtcctcgcagcgggtagcagtagtcgggttgaaccagctcaccttcgccagacttggtgacagtctccttcggcatttcccagttctctacaagcggccacactctgaaagctatatgctcctgcattaa

SEQ ID NO: 35254 - DNA, 459 bp, Zea mays
  Peptide Sequence Number=SeqID_78629
atgggtgtgggcgagggacggcttggcaagagtaacaaacgcaagcgcgagccgactcctccgtcggaggacttcggcgactcggaatactcggaggaggagttctcctccgagtccgaggggtctccggctcccgtctctcccccggcgttgtctgatgattcagacgactcccaggggattgccgcggaagtctggacgtacatccgggccgtcgagcgctccgggctcgagggctcagatgagtcggagttctcctcggatgaggaggactcggacggcggcgaggacgaggatgacgacgacgacgatggcgacgacgacgacggtggcgacggcgacggtgacggcagcggcagcggcgggggcagcgggagcaagggcagcaccagaggcggcagcagcaagggcagcaccaagggcggcggtggtggcagcagcagcaaggccagtggctaa

SEQ ID NO: 35255 - DNA, 87 bp, Zea mays
  Peptide Sequence Number=SeqID_78630
atgggcgcctactcaaacgaagacaacttcatacggggcaaccctgagggcgtcatcgagtggatcagtgttatttgcgatgcatga

SEQ ID NO: 35256 - DNA, 762 bp, Zea mays
  Peptide Sequence Number=SeqID_78631
atggagcatcgtcccgggctggagaggttgttggagactacccatctggagcctgacgggaagctgttcgtcaacacgcagcaggcccctacctggcgcgccaactgttggtgtttcgaccccgagggtccctggaccgacgaggcggatgcgcttgaagtagggggttacaagtgttcgcgagggagagagagagagagcctgttcgtcagcccgtcctcccgtgcggccaccttctcgtacgagggccctggaccttccttttatagacgtaaggagagggcccagagaccatcgtccgaggtcgaggttgagtccgagccctggggccgggcgaggcagagcttcctatggcgcctgagggccggacttggtggctgtcagcctcaccctggcgggtggcacagtagtcggagcagcgcaggcggcgctgttttcctgtcaggcgatccttgcattgaatgctcctgcgatgcggtcggttggtgcggcgatctggccaaggttgcttcactgcgaagcctgcccgagctgggcctcgggcgagtcgaagtcagcggaggaacagatggcgcatccccgcttgtatcatgcgcaacggccccgcccgagtttcccggcatcaccgcgaacgatggcgagaagaacggcggaggggctgtccacgagggtccacgggtcggcggcgcacaggagaggtaccagacaaggggtcccgcctgcaggtaccccagaccggtcagcgtgtgggcgtgtagttag

SEQ ID NO: 35257 - DNA, 192 bp, Zea mays
  Peptide Sequence Number=SeqID_78632
atggcggcgagaaggcaagcaatgtgcagcagagtgggctggcgcggtggaaaagtggtattgggccaaggcgcgctcgaggaatccagagggatgggccaaattttaggactggggcccaatacagatcctccacaatgtgaaccggtccttgctacccgggagcacagtactccttcgtccaacctctag

SEQ ID NO: 35258 - DNA, 342 bp, Zea mays
  Peptide Sequence Number=SeqID_78633
atggcaaacggcggtgccctcaccggccgatggccagtcgccaaggccgagcacaatactcttaattccccaacattacgcaaagaagaaccatttgctagctatgactcagcgaggccagaggatagagggcagaccggcagaggcggcgcgacagcagatgcagaagctcccgtggtgccggggtttatagaagaggggatcccgcagcccacgcccaacaacccgagcactgcgcgggagatacggaaacccgttaggattggggcgcggtggatggagctcgagccaggaacccacgtgttctgttcaacggggtctagcttgcttgcggtgtggtag

SEQ ID NO: 35259 - DNA, 633 bp, Zea mays
  Peptide Sequence Number=SeqID_78634
atggagtggggttgttcgtacctgcggagggggaaccggagttccgtttgtaatggcacttcgaatgccacctcgcctgttgattatctgaaccgcttcaccaagcgtgagtcgccccgtgtcaaggtgacgaggacccctcggccgctcttcgatgagccgaggccaggggtagcgatatcagtacgaacagaggcggagttggctcgaaaatgggaacctggttggccggagcctagccgggttgcccatcagcagggcttgacgtcggagtcgacgacccgaggcctcgggtcgggctggcgcccttggaagatgcttggccgaggccccaggggtaaccggccgaggcgcctgctcgggccggattcccagagaagtccccggaccgcgtcgccgtccgaggctgggtcaggacttgctgaaggcgtcgtcgatgtcgagggtgcatctggaccttccgtcggtaacagggatgtttgtgtgggcgagagttgcttcttgcggaaggtgatgagtgagaaggtgatgagtgaggtatccgtatcccggaggcgtaggagtccctcggctcggtcggccttggctgcttacgtgtactccgtcgtttccaggatccgcttttcgaagtag

SEQ ID NO: 35260 - DNA, 336 bp, Zea mays
  Peptide Sequence Number=SeqID_78635
atggctgaggctatcgctgccttagtcaatgctaatgctgacaacacacgtttcttgcgtgaattggcggggaatcaatatcagcaacatggaggcacaggaaccttcgaactcgggatgaagctgtacacaatacgaaaagcagggtcggaacgaaggttgaaccagcgtcgaagctgcacacaaggaagcttcgactcagtaccagaaaaaggaaccgacttaaggaggaaaaggctatctagtcctcgacagattgttcttaagtcaatagtgaatatgaagggcatgaatgtaattttacacatgctgcattctgtgcctataaatagatga

SEQ ID NO: 35261 - DNA, 843 bp, Zea mays
  Peptide Sequence Number=SeqID_78636
atggccgggaagaacgtcttctttgatcttcctgacaagttgactggtgagatatggaccttgaaattccattgcattggagcacaacctggaaaagaaattgtcacagtaaatattgataaagcttatgttgccttttacaacgtggtgtacataaaatcgaaacttggatattctgggagggacttcttgttttacaagaaacgatgtggcattgatcgatccaggctattggcacttgattacatccaccaagaagaggccatgctgtctgataacatggatgagagaaaaataagttttgtgctcacaaaagatccacccagtgatctagaggtaagcataactcccatcaagcgtccaagacagcgaacaaatgttgatgaagaaactatagaagtgtcgattgatgcatataaggagtggcttgcaatactacaacatgataatccagaaacggatttaatggatgacttcagggaggatacgatcaaaacatataaagaatggttaaggcatcaaggcgatcttccagatatcttattgtatgaacgacaaagcaatgatgacctaatattatcagatgaagaaattcatggcagcagcaaacctactactaattggccatctcatgctagacgtcataggaaaagagatcctgataacgatggagtctttaaaaaggaggggcgtggtacccttaagggtatagcagcagccaccaagcggatcaagaacggaccacttggctattcgaccaatggcttccttgttgtgaaggatgtcccctatcagaaaaccagtgactactatgactttgtggtcgtcaaagtagtgacgtag

SEQ ID NO: 35262 - DNA, 204 bp, Zea mays
  Peptide Sequence Number=SeqID_78637
atgtcgcgcgcgttcgacgactactatatcaaggattgtggcatcgtcttagcgtcggaggtgacacagaggaggatctacaacagtgaccagttcgtcatcctcgccaccgtcaggcatgtgtggaacgtgctctccaatgatgagaccatacaaatcgtggcatatatcgaagtctgcatgatactgatggttgcaatatag

SEQ ID NO: 35263 - DNA, 540 bp, Zea mays
  Peptide Sequence Number=SeqID_78638
atgtccatcgtcccagcgcacaagaattcatgtccgaacaacccgagagtcgtcgatgttggcgacaaccatgaggcccccctgcttaacgatggacagcgcggtgcagctgctctagaccgcgtccaagtggtggcttcgcgggagattgtcatacacagcggcgcatgcgaccacgtaggactgcttctagaggtcgaactgacagtcgccaagcttcttctcgtcatcgatgagcgacgccaacatgagtgcctcctgctcatggtgtttgtttggggtttcaaacgtgggctgtacgggggaatgggaatgggaatgtgctttgcgggaggagggaatgagaaagacagaataaagaatgggaatgacagacatgagaatgggaacggtggcagaatgggaatggcagaacaggaatggtggcagaacacgggaatggccgagtactcttgcagccttaatagtagtagagatttagacattcgtaggatcatcatcatcatatcacagaagtacagacagtcgcttcggctctaa

SEQ ID NO: 35264 - DNA, 657 bp, Zea mays
  Peptide Sequence Number=SeqID_78639
atgtccggtgtgcaccggactgtccggtgtatcggctcagcaacggctacttcggcgccaacggtcacctgcagcggcattaaatgcgcgctagagcgcgcagaagtcaagcacgcgcgagacggcgcaccggacactctacagtccatgtccggctctctacgatacgggaagtcgggaaccttccggatgggctccttcctcagccattgtagcttgcctcgcggcactggcggtggctccgcccgaccagcgcaaccgcagtcccattcttctagacaaagcgaacgtgcccctgttggtcgaagccacgctgacgacgtcccctgccgccgcccaactgagcggtacaagtacaccgtacaccaatccattcgatctctgggtctaataccttggaacaagcaaaggggccagacccctaaggcgccagtgctccactccatcaagcaatgcacggcgtcaatggaagacttcgccggccaggacgtttgcgtcgttctcggcattggggacaacatcaagggcctcttggccacgctgtcgcgcatcgacgccatcatctcctatgattcatcccctcgctcaacttgcatcctatcattccctatcccgtgccgagtccctgattcacggttgttgtgtggtagtcggtaa

SEQ ID NO: 35265 - DNA, 438 bp, Zea mays
  Peptide Sequence Number=SeqID_78640
aaaaaggagatcggaagtcagatggaggttcgctgccaaaccaacttttgccagaatgaagatggtttcccaaagttgctgagagcatgcacagtccgcctcggaatcaggaaccagccagagtatgatgaagatgcagagaagctcaaccgtaagctccatgtggatctcaccacagctcaagcccgtgtagctgccttggaaagtcgtgaagtcattgctgtggaagccctgaagcaagccaaggatgagcacgtccagaagttgatggaggcctacttggtcaccataaccaacgtagagccctgcggatccaagagcctgctccatccaaccctgttcaacccatcaaagctgaagacccccagattcttgaaggtcacccggtctctatcagaggagaaaagaaggcttgggaactcccggaaggatccatag

SEQ ID NO: 35266 - DNA, 933 bp, Zea mays
  Peptide Sequence Number=SeqID_78641
atgtcttctttctcccttaagcgtcgtgtcttcccatcttccaagcccccggatggggggtatccgccgcctttccgcctcctcgttggaggaacgcaactccatgggagttggtacctctcagccatcgttcggcttcaaggattttcatcatgctgcccggctgctcccctccgccggcggtcacctgagatggcgacctccggcttgatggtgggggaaaagcgagccgggctgcggcctataccccttcctcagcctcaaggattttcatcaccaaggctggggaggggagagtgccgagttggggtcggcccctgcgtgggcggtggcccgctccttcactcagtgatgggggaagaagcgggcattgcccgtggcgtccggcagctgcagcgtgcctggtcttcagccgcgagtggcttcggggccacttgcggcaccggcgtcagccacggcagctggaagaggttcttccgctggcgcggcggccgggaccggccacgggctgacctccaacttctacggccttctgcccgtccttacctcacgagttttggcatgggcgggggcctcctggcagcggcatctaccctgaggtcagtgttgccgctgttcggcccccccggagcagaagtcgtcgtcgtcgccgctgctggagcaggtgatggcgcgccgttcgtcggccttccgtcgctccgcaggccttccccctcggagtggggttgttcgtacctgcggagggggaaccggagttccgtttgtaatggcacttcgaatgccagtgttcttcgttcattgtggctgtcgaggcctgaacgtgaatccctcggcccgtttggccttgttgtctggggctcctctagcttagttgaagagacccctcggccgcccttcggtggaccgaggccaggggtagcgatatcagtatga

SEQ ID NO: 35267 - DNA, 84 bp, Zea mays
  Peptide Sequence Number=SeqID_78642
atggtgctcctctccctgttttctgaagaagctcctctccctgctcggccctgtctccttcccttccaaggcgcagagatataa

SEQ ID NO: 35268 - DNA, 612 bp, Zea mays
  Peptide Sequence Number=SeqID_78643
atggaggcgctcccggctgatgaccaaaggccctttgaagacctcgtaatgcacgatgagaaggaggtgatgcggcaatggaacgaacaacgcgacaaggaagaggcggaactgctgcataaactctccgaacggcgcaaggaggcggcggacaagtacttgtcacacttcacggtggatcgccaccagaagatcgtccgtcaaggggagatcgatatggaatctctcctacctccactgcagggtcccgctgtaagtactccagatctatctcttacgactttcatggatcaacgaggagatcagttaaagcgatatgtagatgaatctattaaaatgcatttacgtgcatacgagaaatcatggtgcaaacggaagaagcaaaaggaagaacgaccttgcttaataagcgggcagtggtccgaggtcatggtgcaaacggattgtaggtccgccgaggggaagagatcatgccacttagttgtcgcaagaaatctgtcaatcctagtcattgtaggatcatctccagtgatgttacaattgaacaatggaaaagtcctaaacatcggacaaccaacagggcagcatgctcaatttcccaccgcagcctag

SEQ ID NO: 35269 - DNA, 86 bp, Zea mays
  Peptide Sequence Number=SeqID_78644
gaggatcattggaaatgaaggtaatggagaaagttggatgccagaagtactcggctacacagtggggcgcccgaaggggcgcctaa

SEQ ID NO: 35270 - DNA, 1113 bp, Zea mays
  Peptide Sequence Number=SeqID_78645
atggaggtttgcagccctagcgatgacgtcatggaggctcagcggcggcagcgcgagccgacccaagccgggggctgctccgacgaccccagggcggtgctgacgtgcctcaccttcctggagcagaagatcgcccacctccgcggcatcatcagcgcagcgccgcggccgccgcggcagatggtgtcggccgagctcagctgcatcgccgtccagctcgtctccctctccaagagcctcgccgctgccggcggcgccgcggatctggacgacggcgccgcccggtcgccggctccgaacgacggcggcgacagcgactcgtccgaccacgaccccttccacgccgacgccgacgccgacgacgacggccgcctcccgccggccggctcctacgaggtgatcgagctcggcgaggaggagatcctggcgccgcacgtgcactcgtgcaaggtctgcggcaagggcttcaagcgcgacgccaacctgcgcatgcacatgcgcggccacggcgaggagtacaagacggcggccgcgctcgccaagcccgccgccgcggccgcggccacggcgcagtcgtcctcctcctcctccgcccggtgcttctactcctgccccttcaaccactaccggcgcagccactgcgacaagagctacacctgccgccgctgcaacgtcaagcgcttctccgtgctcgccgacctgcgcacgcacgagaagcactgcggacgcgaccgctgggtctgctcctgcggcacctccttctcgcggaaggacaagctcttcgcccacgtcgccgccttcgacggccacgcgcccgcgctgccgcccgaggacgacgcggctgcccacaatgttgccaatggcggactcggcaccgactcttatcgccgcctgacgacgatggacaccgaggcagcgagcttggagttcttctcggacaccatgctcgatgctctcagctgttctgacatcgagggcttcgcgctcatggatggacaaggacagtgtctggacgacgacggacgagggtcgctctcaccctggccagtggggctcgattcctgtgactttgatggatttgatctcttcggggcaccaccaatcgatttctga

SEQ ID NO: 35271 - DNA, 372 bp, Zea mays
  Peptide Sequence Number=SeqID_78646
atggaagttttagaggcgcctacaggagagtgcatcatccgcgtttggaattatggacctcctgtacaggcttgcaagtgtcccatttgtcgccgccttataaatctactggtgcctgctgcattatcagggcaggaggatggtccacaagctcaacaggttgcaagacctacccttcttcatccgaagactgttcagagaactaatggacccccagcggaccctcccactcgtgttcagggcgcggatgctgatgatggcatgctgggcctctttggattcgtcgatgacctgctcatcctgctgatcgtgttcctccacctcgccgcggtgtaccggtcgttgctcctgtaccgccacgggggccagtag

SEQ ID NO: 35272 - DNA, 1068 bp, Zea mays
  Peptide Sequence Number=SeqID_78647
atgcaggcggcatgcaactgcaccacggggatgcaccatttcaacttcgacgcatccagcatggaggcccaggcccacacgtcatgtcagtcagccgcgggagaaggcgcgacagtcgatatggccaaaagtggaccaacagtaatggcggcggcaggcgggcggaagcagcagtcaaatcgtctgcagactcacgtcccctcctggagcagcaggggagccctctcccatggcgtgaagacgacgcgcccgtgttccgtccctcgaacggctcgcgcaacggctgccccgcgaaccatccgccccgtcgcattaactccgcggcagggcaggcgacacctttggcaggcgaagcggacgacgcttcacctccgtcattctaaccgcgtcaaaaaagggaccgggaaaggggatactccgaaagggatccttctccgcgaaggaagcaggccccgagccctcctactgatcagggccgcctcagagcactcgggctccgcgcccactactgatcaggggttcgaaggctggccccccgaagggttcgacagccgccccagaacacgcagagcgagggatgactctggcgtgcctctgggccaccagccaacccttatcgaacggggcacgggcgtccactcggatcacccattagcaactcactggagacaccatgttcgacgccctccgagggcaacatggcgcttttccccctcctccttgcggaaaggcgacgaaggggaaaacagtgccgcctgccctgctccgactgctgtgccacccgccgaggtgaggctgacagcagccgagtccagcctcaggcgccataggaagctccgcctcgcccgatcccggggctcggcccccgcctcgacctcggaagacgggctcggactcaacctcgaccttggaagacggtctccgcctcgcccgaccccagggctcggcctcagcctcgacctcggaggagtcaccgcctcacccgaccttgggctcggaccgaccacgttacagggggggctcaagcgctcctccaacggccacgacatcacatgcacagggcactaa

SEQ ID NO: 35273 - DNA, 471 bp, Zea mays
  Peptide Sequence Number=SeqID_78648
atggtcacccaggacggtgaccaccagttcgatggtggggagaagcaagccgggctgcggcctctgccccgccctcagcttcaaggatcttcatcatccttgctggggcgggggcgagctgagccggagctctacctcccgtacgggccggcgggccacctcttccttcagcattcaggggagaaggcgctcaccggcctagcggagggggcggacttcgacaacgcggggccgatcagccgcaggcgtcgtcagctccagcatgcctgcttctggtgccacctcccaccgctgggcggagtgtggctatctgcccgccgaatgggcggctgttgcgtcgcgcgcaccgggggaccgcccaagacgtcgcacgctgctagggcggcgttcctgttcttgggctgtcctgccctcgctccggtacgacgcctccgcacggaggtcggtgctcgcctgtccgagaggacttga

SEQ ID NO: 35274 - DNA, 678 bp, Zea mays
  Peptide Sequence Number=SeqID_78649
atgcaagtcggctcagagcagaagaagccaaaccgccgtgcgcggtgcgtacaaccgcccagcggttacaagcgactctccacctttgcccagaccaacgggcgaaagggcgggcagccgtgcaggcggcatgcaaccgcgccaagtgggcgcacttctccgactcccaacacgcccaacgtggaggcccaggcccacgcgtcatgcaaccggcgcgccaaatgctttgtgcatgcaactgcaccgccacttgcgccactaccgcgcctcctcgactgcggaaccaacaccgcgactcgaggcgacccagcgcgcagcagcgccagcctggcgcgacggagaagcgggcgatgcttcgccttcgccataatgaccgcgtcaaaaaagggaccgagaaagggggataccccgaaaaggatccttccccaagaaggaaccaggctccgagcccccctactgatcagaggttcgaaggctggcccctcggaagggttcgacagccgcctcagatcgcgtgggccctacacccactactggtcagaggttcgaaggccggcccctcggaagggttccacggccgcctcaggctactcgggctccgcgcccactaccgatcaggggttcgaaggctggcccccgaagggttcacagccgcctcagacgccgaacgagggatga

SEQ ID NO: 35275 - DNA, 135 bp, Zea mays
  Peptide Sequence Number=SeqID_78650
atgggggtgctctacctgctgctgaccccaatgggtgtgctccttctgctgctgaccccaatgggggtgctccacctgctgctgaccccaatgggaagagaaacgtatccttgctgcttctcgcaacaatcttga

SEQ ID NO: 35276 - DNA, 1221 bp, Zea mays
  Peptide Sequence Number=SeqID_78651
atggcgctccacaagctctatgacaacggcggcccccggctctcttacggaagcaggacaacgacatttttcggggtgatccatgcccctcttaagcaacctatcagctgtccaaagccttcattgagccaccatccacatgaaaaacttggtcttcggaggagcccaagttctccatattctatggttggatttcttcagtatgtccagcagtggaagaagaaagttgtatttattctaaataaattggacctctatcggaacagcaatgagcttgaagaagctactgcatttgtcaaggaaaatgcaatgaaattgcttaccgcagaggatgtcacactgtttcctgtatcttcacgctctgctctggaagccaaactttcatattccaaaaacagtgatggaaagcattcaaccgaagctatgtataatgatcctagatggagaagcagcaaattttttgaacttgaggattacttactgagtttcttagatagttcaacggaaaatggaaaagaaagggtccggctgaaacttgaaacaccaataggcattgcagatcgattgttaacttcgtgtcaaaggctggtgaaactagaatatgaaaaggctgttgaagacttagcatccatcaaggatcttgtttatggtgcaaacaattatgccatcaaacttaagtctgatagcagttcctggcagaaccagatttcgtctctcactgcacagttcatagagtggggtttgaatatggggatgaggatgagtaagattgagagagcaaaaggtcgagcagttacactcatggaatctacacttcagctgtcaaatattgaccttatttttgcatacacgatcaaaggaaaaacaggcagttccatgagagccacatcatttgttcagaatgatattctgagtccaacccttgatgatgctgtgaatttactaggtgactactcgacatggttgagttctagcaatacccgcgaagcaaatgtatatttggagtgtttctgtgaaagatgggatgcactggttgctccggaagaaagggctctgttagatccaaatgggcttgttaatgaaggggagaaactcaccataaaggcactggaaggcttcaatgccagtgctgccgccaaagattttgaagaggaaattcgagaattggtggtcaagcttcctgctgatagctttctagatgatgaactacttgtgccttga

SEQ ID NO: 35277 - DNA, 597 bp, Zea mays
  Peptide Sequence Number=SeqID_78652
atgatgaccgcgtcagaaaagaagggttcgacggtcgccccagagcacacgagcttcaagctcattactgatcaggggttcgaaggctggcccctcgaaagggttcgacagccgccccagagcactcgggctccgcgcccactactgatcaagggttcgaaggctggcctctcggaagggttcgacagccgcctcaaagcacatagagcaagggatgactctgggtacgtctgttacatggccgaggctcgggctacgctcccgagcctcaggcgcaacaggaagctccgcctcgcccgaccttgggcctcggcctcaggaggaggtctccgcctcgcccgaccccagggctcggcccccacctcggcctcggaaggtggtctccgcctcgcccgaccccagggctcggcctcaacctcggcctcggaaggtggtctccgcctcgcccgaccccaaggctcggcctcaacctcgacctcgggaggaatcacgtcctcgcccgacctcggcctcggcctcaggaggagtctccgcctcgcccgaccttgggctcgaaccgaccgcgccacggaggatgcatcattaccctacccctag

SEQ ID NO: 35278 - DNA, 99 bp, Zea mays
  Peptide Sequence Number=SeqID_78653
atggcccactttgcccccctgcatccgcctctgtgggctgtggcagggggtccttaccaaagcttgatggcgccggaccacggcacgggatcgggttaa

SEQ ID NO: 35279 - DNA, 867 bp, Zea mays
  Peptide Sequence Number=SeqID_78654
atggctgaaaggtacccactcccacagagttgtgtcctccaacgacgaggcggaaagacggcggatatcccccatctgggggcttggaaaggtgaaaagacacgatgcataagggagcgcgaagacatggtcgcctcccaagggggtcaccctccttttaaaggcgactctccctacttgcgttccaagccgtcacgggctgagtcttctccaacacactccaaggacctcccctgcggcgcgggggctgggtcccacacgtcatgcaagccggctcagagcagaagaagccaaaccgccgtgcacggtgcgtacaaccgcccagcggttacgagcgaccctccacttttgcccagaccagcgggcgaaagggcgggcagccatgcaaccgcgccaagtgggcacatttctccgactcccaacacgcccggcatgggggcccagacccacgcgtcatgcaaccggcgcgccgaatgcttcgtgcatgcaactgcaccgccgcttgcgccactgctgcgcctcctcgactgtggaaccaataccgcgactcgaggcgacccaacgcgcgacccagcagcgccagcctggcgcgacggtcaatgcggccaaaatgggctggcagtaatggcggtggcaggcgggcaggagcagcggccccgtcgtcagccaaactcacatcccatccaggggcagcaagagaaccctctctcacggcgtgaagacaacgcgcccgtgctccgtccctcgaacggctcgcgcacgcgcaacggtcgcccctccaaccactcggcccgtcgcattaactccgcggcgggacaggcggcgtctttggcaggagaagcgggcgatgcttcgccttcgccataa

SEQ ID NO: 35280 - DNA, 177 bp, Zea mays
  Peptide Sequence Number=SeqID_78655
atggtgttcttccatggagtgagccttctcgtcaccgaaaatccgccgcggcagagagaagacaggaaaatagatggcgcgaggcggcatcagcagagtgtcagacgtggaagcatcaaaattagcagaggggtcaaggcagaagatcacgagcagtcgcggaagacacttccctaa

SEQ ID NO: 35281 - DNA, 336 bp, Zea mays
  Peptide Sequence Number=SeqID_78656
atgcccaagagggagggtgaattggacttttctaaaaatcaacaacaattaaaccctaagcaaaatcccaacttcacccaactactagcactaatagaatactactataaagacaacaatactaagacattacttcaactacttgctaaactattaaacaagcaatgtatggtcatcaatgtgggcagcaagacattcaatatgatgggtggagggggtattgaaagtgcattcatcccttttgtgagttttggtgatttggataacaacacatttaaaggtctaacgagtttgctaagtgttgaacaggaaattcagtacgatgaacatacttga

SEQ ID NO: 35282 - DNA, 471 bp, Zea mays
  Peptide Sequence Number=SeqID_78657
atgaaacccagacggagtgcctcccaagcaggagtgcaaggccaagctaaccgaggcctccgtgagcctaaaggtatatctgcggaaaacagcaagcagatggaagcccccgaccggggaggaggacagatgatgcacagagcgcctaaactttttgacgatgttgtcttggaagtcgattccatgaccgaaccagctcggcgaggggctgatcctcttccagctctagcagatggcccgggtcggcgaagcgcggccaggcctggacgtctttcataccgccccgccttatattaccagttcataattcatattgccttccttgatggctcaacaggccttcccgagagagctagggatgaaaacgagacgtatacagccggatacagggtcatcccgtatcctaccctaatgtatttctctcggatacggaaccggatacatgtagttaagattttgggacggatatag

SEQ ID NO: 35283 - DNA, 48 bp, Zea mays
  Peptide Sequence Number=SeqID_78658
atggcgcggttaggacacgcggtggccaacggcgatggcacgacgacg

SEQ ID NO: 35284 - DNA, 1464 bp, Zea mays
  Peptide Sequence Number=SeqID_78659
atgccgtcgtcggggatcaccgcggtggacgcggccgccaaggggatgaagctggagcggtacgccagcgggggcgcgctgctgctgcgccgggcgaccagcgccaagctcgtgtccgcgtcgtcgcacctgctcttccgcgccaccgtgctggccacgctcgcgctcgtcttcctcttcacgctgcactacccgtccctcctctcgcgctccttccacctctccgccggcggcggcggcggcgccgacgacggcgcgcgctcctccgcctcgcaccgcagcctgctcatgtcctcggcgtcgtacgggggcgccgcgtgggagaaggaggtgcggcggagcgccaggccgagccgggacgggggcatctccgtgctggtcaccggcgccgcgggcttcgtgggcacgcactgctcgctcgcgctgagggcccgcggcgacggcgtcctgggcctcgacaacttcaactcctactacgacccgtcgctgaagcgcgcgcgccaggcgctgctggccagccgcggcgtcctggtgctcgacgccgacatcaacgacgccccgctgctggagaggctcttcgacgtggcggcgttcacgcacgtgctgcacctggccgcgcaggccggggtgcggtacgccatggaggcgccgcagacgtacgtggcgtccaacgtggccgggctcgtcagcgtcttggaggtggcggccaagcacgccgacccgcagccggcggtcgtctgggcctcgtcctcgtccgtgtacgggctcaacaccgacgcgcccttctccgaggaccaccgcaccgaccgcccggcgtcgctgtacgcggccaccaagaaggccggcgaggccatcgcgcacgcctacaaccacatctacgggctctccatcaccggcctccgcttcttcaccgtgtacgggccgtggggccgccccgacatggcctacttcttcttcgcccgcagcatcgtggccggcgagcccgtcacgctgttccgcgccgccgacggctccgacgcgcgccgcgacttcacctacatcgacgacgtcgtcaagggctgcctcggcgcgctcgacaccgccggcaagagcaccggctccaggtccggcagaaaaagcgggccagcgccgctccgcgtctacaacctcggcaacacctcccccgtgcccgtcacccggatggtggccatcctcgagaagctgctgggcaggaaggccaacaagcgcgtcgtcaccatgcccagcaacggcgacgtgcctttcacccacgccaacgtcagccacgccgcgcacgacttcggctaccgccctaccacctccctcgaggccggcctccgccacttcgtcgactggttcgtcagctactataagctcgacgccaagatcgccaagcccgccgccgccgacgacgacaagcccgcgaagaagaagaagaagaacaaagccatgtcggcgtcgtcgtga

SEQ ID NO: 35285 - DNA, 210 bp, Zea mays
  Peptide Sequence Number=SeqID_78660
atgaagcctgttggctacgatactttcagctctactccttttagcatctttaatgggcgcatcggtacaagcctgtcgtttgctggccgcagacgcagagccagtccagtccactccagtccgctgcttccagacttgagtggcgaggcttgtagctcagctatagtgatccatggtgggtcggtggtctgggatttagttcttagctaa

SEQ ID NO: 35286 - DNA, 888 bp, Zea mays
  Peptide Sequence Number=SeqID_78661
atgggacatggaccagctagcgacgacgacgacgatggagatgatggatcgtcaagcaaagcaagccacacacagctgatgaggactcaaggtgggagacttcaaaagcatgtactgctgaagcgtgacaatggagatgtcgatctattgaaacaagtggatgctcagccggtgaatgtgaaggatgtggatagaatgcgtagggagatgcaggctattgaagatgacattgccaacaccgagaaggggaaagcagcactggaggataagttctgggaagttgaagctaagctggttaccaagcttgaggagcttgagaggcatgctcatcagttcaaccaggccctcaaacagttgaaacctactgttgcttttcagtacatgatagattcaaaaggatcttctcctgctgagatgctaggtactggttccaaaacagtactaaaacctgcacttctggctcatgctgaggagaacaaaaggatctgtctctcaaatcttgaaaacttaaatgatctacagaagcagctgcaaggaaacgcgaagctatgttgtgcagtagtgggaacttttttaggttctggaaggtcaggggatggacttccacgaactgatcgagatctcacacggcgaccgacggcgacacactcaacatttgaggaaatgatttttagcatttctttggctggaacttgcatcatggagttcagaaaatatactaaaggcacttggcgtgttccaagtgtggtcaatggagttgatgaagatagcagccaagagctagaatgcataaggaaagccatttttacctcctcggtcaatgttattaatgtcaggtttatgcaaatcagggtgaatgttagacctttagaattaaggttagcatga

SEQ ID NO: 35287 - DNA, 453 bp, Zea mays
  Peptide Sequence Number=SeqID_78662
atgagggtgtccaaaagaccttacattggtgtcgagtttcattttataattcacacgcggttgtctgaattaaggaatttgtccgaggttgcagcatatgtcaaagaaacaaatccgagcacttacatccagctgggttgttgcagcctcttccagtgccttctgaggttttcagttaagtgcagaaactacacttattttttcgatcaaacaagcatttgtaagctaccagctcctggcttcagcttcaaccatgcacaaatctctgtccacaaaattcgactacttggttgggccaacaattactggagataccacggagccgtcaccgccgtgaaggaccagtggcagtgcggcagctgctgggccttctcggcagtgggcgcggtatcatttccttgcttgttttacaagatccattttgatggcggccgtgtagtcttagctgagtga

SEQ ID NO: 35288 - DNA, 1341 bp, Zea mays
  Peptide Sequence Number=SeqID_78663
atgaacaaaaacactggcattcgaagtgccactacaaacggaactctggttccgtccccgcgggacgtctccgccgcagggctggagggcgattgccaccaccagaagctgggagaagaggtggcccgccgacccgcgcaggaggtagagccccggctcgcctcgctccccgccccagcaaggatgacgaacaccctcgacgctgagggcgggatcgagatcacagcccggcttgcctctccccatccaggagctggagaccaacgggtgaaaggagcggacagccatgcgggcggcatgcaaccgcgctacgtgggcacgcttctccgactcccgacacgcccagcatggaggcccaggcccacgcgtcacgcaaccggcgcgccggatgcttcatgcaagaaactgcaccgccacttgcgccaccgccacgcctcctcgattgcggaaccaataccgcgactcgaggcgacccagcgcacgacccagcagcgccagcctggcgcggcggtcaatgcggtcaaaaatgggccggcagtaatgacgctggcaggcgggcgggagcagcggtcacgtcgtcagccaagctcacgtcccatccgggggcagcaagagaaccccctctcacggcgtgaagacaacacgcccgtgacccgttcctcgaacggctcgcgcacgcgcaacggctgccctgccaaccactcgccccgacgcattaactccgcggctccgagcctccttactgatcagaggttcgaaggctggccccccgaagggttcaacagccgcctcagatcgcgtgggccctacacccactactggtcagagaggctcgggggctgctctcgcaaacccggctccggccgaaccgttgacagcgtcaacataccagcgagagaacttgggacccgaccgtacacccgggctacggccagctcgcatgagggaacgaccagactagccgaagcattacgcgaggcattaagacctcgaaggagtgaaaccactcctccgaggcctcgggggctacacccggcgggtgcgctcgcgcgcacccaccggaacaaaatgcaaccgagaaaggctggtcccattgcaaaaaagtgcgatgaaagcctccaagcgagtgctaacactcccttcgaggctcgggggctactgtcggggaccataattaggggtaccctcaagactcctaattctcagctgaaggacagcgccgcctgcgccgcgccgactgcagtgccacttgatagagtgaggctgacaggcagtcaggtcctgcagaaggcaccacaggaaactccgctccgcccgacccagggctcggactcgggctaa

SEQ ID NO: 35289 - DNA, 777 bp, Zea mays
  Peptide Sequence Number=SeqID_78664
atggaggctcgggcccacatgtcatgtaaccggcgcaccggttactacgtgcaaagaaaccacaccaccacttgcgccaatgctgtgtcttctcgggactacagaaccagtgcaacgactcgaggcagccccgcgcatgacccaacagtgccaattaagtgcgacggtcacaggtcgatctgccgcagggatagacgtgacagttggggtttgaaggttgcgccatgcggggttcggcaaccgccccagagcactcgggctccgagccctctactgatcaggggatcaaaggctggcccctcggaagggttcgacagccgccccagagcatgcagagtcagggatgaccctgagtacgtccgttacatggccgaggctcgggctacgctcccgaggtaccctaggacatttccgagaccagcgggaacgatttgtaatggaatcccaccggagggaggcaccgagccctcggaccctatcaaatgggtccgggaaaacagcactattcaccccgttccgactactgtgccaaccaccagggtaaaactaacgacagaagctccgtctcgcctgacctcaggcctcggcctcagcctcggcctcgggagaaggtctccgcctcgcccgaccttaggcctcggcctcgggagaaggtctccgcctcgctcgacctcgggcctcggcctcatcctcggcctcaagagaaatctccgcctcgcccgaccttgccctcggaccgactgcgccacaggggatacatcattaccctacccctag

SEQ ID NO: 35290 - DNA, 312 bp, Zea mays
  Peptide Sequence Number=SeqID_78665
atggaggcgacagcgattctacgagaagaacaaatagtcaagaacatactgggccaaattaacgaacagggggtggggaggcgactaggagagggctcctcacctaagcgcgatggcggcagcggcgtgacgctacaggccgatggaaccaatccctatgccaactttttcaaggaccgacgcggccccacgggtgccagcaaaagcgcagaagtcccccctatcactgagaatctcctcaaaagctccggctttgccgttaatccacgagataaccccgtcaggatcaccgcggataaagttatgctttga

SEQ ID NO: 35291 - DNA, 279 bp, Zea mays
  Peptide Sequence Number=SeqID_78666
atgtggtcgactctcgggttgccacgcggccagaaaagacgatgtactccagggtatcaacagtgggtccggacccccatgaggaagtgccggacccctggatgtgccgccttggcatttaatgtgcccttgtccactccacaggcagtacgccgtgctgcggagtgcactgtgctcatcatcactcgtacgttgccaaggaagcttccgctgcacgccaatgctacgcagaccgccgatatcagggcacaaggagattgcactggcgaccagcattag

SEQ ID NO: 35292 - DNA, 1497 bp, Zea mays
  Peptide Sequence Number=SeqID_78667
atgatggtccccgcctcagttgtcgccacctcgttcgccatcctgcttcttttctctctcccctcatgcctccacctccgcgccatcccattctcggcagaaggcatgggagccggcacctcctccccgtattcgtccgacactagccctgacaccgatccgcgcagtggccattgcacgcccacgaggaagtttcacagcatgcgagcaccatcatttttgtcgtcgtcagacgtctcgttcgtcttcccggccttcaccctattcttcctccccaacctactgcccatgcctatgactcgttcgatggctcagtatcgcctgtctacatggtctttcccttaccacggtgttgactcggatgtaggttatctcttcatggtctattcgggtttcaccgaggcggaccatgcctctccttccccccggctcgtcgccgccatttccaccccccgcccagttcctcccatatctgcaaccccaaggccagctgccactgctcgaggttcaggacagctccctgtcgttgctcctgctgtagatctggtgcaatcggggaggtctgcccctttcgaggctcgttcttacgttcaggtagtgaagaattctcctctgcccatggctgccttccaggggacccccatgcctgacttgatgggaatagccatgactctgaaccaaagcatgtggtggaagctctggcatagaggctgggaatcagagaccgtaggattcaggctcaggttggagggtatcctagtgcatgtttggaatgaggaggtaccaactctgatcatcggctctcactgtgctacccactttatggaggaggagtctagctttcacaggagaactaggacctttgatttgtgggcgtggtgctccgacccttgctttgtgccacgcgaggcttggctggccatcattgatccagatagtaaggtagttgtccatcctgtgaggccagttggcatcaagcatggcatgctctacaaggtgcttatccacatggagggagacgacgatgacgacgagcaggacggtcatggaggtcgtcgtcaccgtagtcgctctatgtgggatcgagtgtcctattgttgtggttcgatcaacgactgctactcctcctctcattgccagggggagtggtctcacactcctgcacaatatcgtcaccagcatgatgttcatcatcttgcctggggccgaggtgctttcatgcccaactccaagctggtgtggcgccccaagcgtctctctaacaagaaggtctcctttgctgagcctttagtgtactttattgaggagaaggttgcagcacacccttatgatattagcaagcaaggttctgtttctgatttttgtatgcattttcttggggatgctattttttatgtttcagactgggctgactcaatgattgatggagtctcttgtggtttggatgctgcagattctcaggcagctagggtggccaagctcgtgcaggtactgtag

SEQ ID NO: 35293 - DNA, 315 bp, Zea mays
  Peptide Sequence Number=SeqID_78668
atgacggggaaaaggccttgggcggaccggaggaactccgatgaggcattccggccacagggagggggcttgagtcgtgctaaggcttgggaaagcttcagcagaggcaggggcgacacaggaacctacaccggggaattagaccgggctaaattggccagccaccgcgcgagcacggcggactgcaacggtcgagcaccggggatgccaaaattgcccgagcatagagtgaaactaggaaaattaagcacgggcaaaggtgtctcacctcggggcggagctcggggaggcttggcgcggtctccggcgagctag

SEQ ID NO: 35294 - DNA, 606 bp, Zea mays
  Peptide Sequence Number=SeqID_78669
atggccatggttttaaatagcacggatagcaaggcgtccgttcgatcacaatccaacggaccagatccaaccacgaaacaaacgctcctcaagatagcgcgctgtcctcaagcccaatcctggattccggacgacgtcgaggtggaagttctgtgtcggcggcgaagtgctccacccggcgaacgttccacagtactccgaacagactgcgccctcgatctccctgttctgctcggcttccatatcgacgtaataggtctcagtcatggcatagcttgcctcgagcccctccgcagcatgagcaatcctgcacgcatggatcttctccaacgcggcattcgcgtccgcgcgtatgcagtggagaggaaacgaggcgggagaaggcattggatttcctggacggcttcggaaaggagcggcgtgggaggtcgccgtgtggacgaacaggcggttgggctacgtgggggtggcacggaggcggaccagtggtcgacgacagcgaactcgttggcgagggaggttggaccgagacgcgctagccgattccctacgcacggcccggcagcaagaagtggcaaggggaggatgcggcgcgcgacgaagtga

SEQ ID NO: 35295 - DNA, 159 bp, Zea mays
  Peptide Sequence Number=SeqID_78670
atgttggacgaagtcgtgggatgggacaacctcgtcataggccttcgtccagcgacgcgtgggacgaaggcgaggctggcgaaggcatcgagcgaagggtggcgtcttcgccttcgccccaacaacgagcaagccattgaggactccagtgttcaatag

SEQ ID NO: 35296 - DNA, 375 bp, Zea mays
  Peptide Sequence Number=SeqID_78671
atgacgtcgaccggaaaccgtcatcgtgcttccgactatcgcgtcgaattagtcagggttataagtgtttcatcctttttagcgtatattatctatcttgtactatttatactcgtgctcatacatgtgcatcgtgcatcccatgaggtatcttcggactcggataagaaccacagtgtgagaagtacgaacaatacgaaggttgacgcagcgccgaagctatgtgcaagggagcttcggcatgatagcaggaaagggaaccaacttaaaggggaaaaggctatttatacctcgatggattaccttagagtcattagcaaatataaagggcatggatgtaatttcacatgggctgtgtcccgtgcctataaatag

SEQ ID NO: 35297 - DNA, 126 bp, Zea mays
  Peptide Sequence Number=SeqID_78672
gaaactgaagaagctgaactcaaaatgctgagaaagagtttaaatttcaaggcaacaccaatgcccagcttttataaggaaccacctccccccaaggttgagttgaagaagatattctatatataa

SEQ ID NO: 35298 - DNA, 930 bp, Zea mays
  Peptide Sequence Number=SeqID_78673
atgtcacgcacgaagaatgtgtcggcgctagggggaggagatgacgaggaccctcctcgccccttcaggcaagtcaaggggaagacggtctacttagagcatcaggaaggccgcaagaagcggcgtttggatagagcagcccgagcagctctagcagcagcagcagccgctgagcaggcagagagaggtgatcagctgcggatttcttcagatcagattgcttaccgagttcgtcgtctcgcctctcgacctcgctcctccgcacctaccactcccaccactactaccactccacctcccacttcgcctactcccgtcactcctgcgccatccaccacctcagccatacctaccacctccactactccagcttccactgctccttccgctcccctttccgctccacctatcccacctgcccgcttccgggagcgaaatgagactgaggtgcgaccactagctacggatcctaggttgtttgatcttcagcgtgctacagcggcacagctgattcggccaccacagttccagggcactcttgaggcctctcgcctcctctttggctcctatcgtctagcccctgacaaccccgtgccggcacctgctccagtgattgacactcaggccgaggatactgcttttcatcagttcgagactcagggcgcagcagtccatgatgatgatgaggatgaggatgactttggggttccgcctccgcgctctcatgatcatgaggctggtagttccagtgctgttcctgccacccctcctgcagttgaccctgctctggctgcgattcttcaggctcttatacagcagcagactcttatggcatccgagcaggctcgtcaggcagctgagcaggctcgtcaggcagtggtccaacagcagatgtccgagaggatgctctctctctttcagactatttag

SEQ ID NO: 35299 - DNA, 639 bp, Zea mays
  Peptide Sequence Number=SeqID_78674
atgtcagcaccacgcccgagccatcgccgccagggtctcctccaggaacccggcccgagcagacggctcggccgaccgccccgaagcctcagccagctgtcccccgaggacaccagcccggctcgtggcctcggcaactcgactccggtgttggtcctgccagtggacgacccggtacgaacaaccccccacattggagggcctgcggggcgacaaaacccctggtggctcgccgacgcccgctccggcagcagcgacaacgacctccgctccgagtgtccaaacagcagcagcaatgacctcagggcggacgctgctgcgacgagctcctcacccacgtccccactcgaggggcgaggacaagctatcaaagccaaagagccggaggcccggagcgtggatggtggcggcgatctcatcggcaacgaggacttcttcagccgccaccacctcaacgtcgacgacggcagccatctgcccaccggcagatccccactcggatcctcccggacaggcgagcaccgacctccgcgcaagaggtgtcgtaccggagcaaaggcaggacagcccaagaacacgaacgccgccctagcagcgcgcgacgtcttgggcggtcctccggtgcgcgcggcgcggtga

SEQ ID NO: 35300 - DNA, 222 bp, Zea mays
  Peptide Sequence Number=SeqID_78675
atggtgagagtgaggttagctgatggtaagaagaacttggtaagggaagactccatccaaggtgatgtaattgtggatattactccacaacacatcatactcaatcaaagatccaaatcagacaagtatcataagaacaaacactcaagcataccaatatctacgaaaatagttttgcttttgtccctaagattaggtctcctattcctaaagtcactttag

SEQ ID NO: 35301 - DNA, 319 bp, Zea mays
  Peptide Sequence Number=SeqID_78676
atggcgctcgtgccaggggacgaaggtgaatccagggaccgccgccgcgacaccactcgactccggcgcatcggttacccgattggcggctgcagtaacccaggggggggggacctggggagcacgcgcgtggatctgccggcagcagggtcggctggcaactcaccgcggggcgaggcacaccatcgccccggagttgcttatagatcaatagcgaatgaggatcgggggcacttgaacgctagggcgccggtgcgaactcgtgcctggcgtttccgtgctgctccatggcgcgccgcccccattgctcaaaatcccg

SEQ ID NO: 35302 - DNA, 333 bp, Zea mays
  Peptide Sequence Number=SeqID_78677
atggccgcggaggcgggcagtcggcgcggggcggcggcgcggaggaaggcgaaggaggcggcggtgggcgccgccgcgagggttctcttctacccgacactgctgtacaacgtggtgcggagcaaggtccaggccgagttccggtggtgggacgaggtcgatccgtcacgtgggatcgatcaccttgttattcctacaagagattatatgtttgctccttcacttgtggatattaatcaagctactgatttcattcatagcggatgtgggagggcagatgatggacaaaaaccattagtggagcaaacgaagcagaagatgacgcgggactga

SEQ ID NO: 35303 - DNA, 510 bp, Zea mays
  Peptide Sequence Number=SeqID_78678
atgcgcctaggggtcccttttatagccccaaggcagctaggagccgttgagaacaaatctggaaggccatccttgccttctgtcgtcgggggcaccggacagtccgggaccgggaaaggggatactccgaaagggatccttctccgcgaaggaagcgggccccgagcccccctactgatcagaggttcgaaggctggcccctcagaagggttcaacagccgcctcagagcactcgggctccgcgcccactactggtcagaggttcgaaggctggcccctcggaagggttcaacggccgcctcaggccactcgggctccgcgcccactactgatcaggggttcgtaggctggcccccgaagggttcgacagctgcctcagagcacacagagcgagggatgaccctggaatcccaccagagggaggcatcgagccctcggaccccatcaaaaggggaccgggtccggcgaatcacccgcaagtacttttggagcgcgcctccgggccactag

SEQ ID NO: 35304 - DNA, 303 bp, Zea mays
  Peptide Sequence Number=SeqID_78679
atggcccgcgtgtatgttggcaacttggattcacgggtgacttctggggaactcgaagatgagtttcgtatggaggtcgctaactgttgttctcaatgcactgtttgggttgcacgtaaaccacctggctgtgcatttattgattttgacgacaggagggatgcggaggatgctattagcgatctagatgtggtcgtggtggtcgtgatcggtatggtggatctgagtcgaagtgctatgaatgtggtgagactggacactttgcacgtgaatgtcatctgcgcattgcctctggaggtctag

SEQ ID NO: 35305 - DNA, 1471 bp, Zea mays
  Peptide Sequence Number=SeqID_78680
ggattgccccccagaattcagggaagctgtctcaaacctgatatttgctgttgctcggtatcctgatttacctgaactttgtgacctaaggcacatattcacagagagatatggaaattttgttgagcattttgttagccaggagaaacttgacagtacagagttcactaatgaggaaaggttccaagtcatgcaaagtgttgctgaagaattatccgtcagttttgatgccaaatacgcgtcgagaatgcttcatgtggacactaacaggacccaaaaagatgttcagaagcttaacagaataactgtccgccatttggaaaaggagctgatggaggcagtggaactttatctcaacggcctaccaaaaaatggatttggcgcagtcagatttcccgaagcagaaggcaacaaaacagttcaactaaatgtcaagccaaatgaggccgtgagagatttccatattgaaaaggagaatgatgaagtccttcattgttcatgtttgcctggtggttctgaacacaatgggggacatgcagattcagggctaagagctcagcgcctagagaatcaaggacgtccagtgagtcctcttagtggtaacactagcaaaaaggctccttacactaggctgaatgttgtaaacataaagaattctactgagaaacaagcaaacaatggtttcttgcatgataaaccacaacatttagctgatctgggatacccggtgcagaaaggacaaggagacccagagagggcacttactatgctgcctccttatgttgaaccaaagtctaacatacaacctatgaatgatgatcctgaaaagcaaactccaagtggttacagaaagcccaacatccctggacaaactgatcacttggagaacaaaaatgtgcttcgacctgtttctgtcagaaggagaactgcaaagctgccagcgtctgttgatgcttatgttgaggtgcctaacaatgcgaaggtcacaacccaaacacccaaaagtcacagaagccactcaagcaggaggaatggtgctaaagatgaccagaaccggaaatgtaatgggactgatgatcgtatgcaacctgaagcagctgagactgctattgattgtggtaatctctttcctcgaaatgcaaatggacagatgcgacacaacagcgggcgcggcggagacatggatgaggaggaaaggatgatggacaagcttttgatgcactatagcaagaaaggttcggatctgaccaacaatgaaacacatacagatgctgcgcagaaggtttccttgcatcccacgggtagagctatgtcgctaccacctgaatctgttggcccgagcaaagatgcgaaggttcctgctcgatgcacaacacttcagccagaaagtcctaggagtgcgcatgttcacccaaaaatgccagatttcgatgaattggctgctcgggtcaaggctctgaggaaggcttga

SEQ ID NO: 35306 - DNA, 528 bp, Zea mays
  Peptide Sequence Number=SeqID_78681
atgtgcattagtatgaagcctgattgccagggagttggcgcacacttgaagactaatcctaattcccatgcatgtctatccagaaccgagttggtctcaggcagcattctagcggaagaccaagcaagactaaaggtccatgtaatgtatataggcatgtctttgggtagaaaccaagatgaaatggacgctaatggtagcatccttttcttatgggatgtcgactccgagaaccatcttgtgttctttgacgatgttgggatgctgaagatagttgcaaaaacttgtacgtgtcattccccaaaggtatcgaagagtcggcactctccactagtcctcgctggagcacccgctcaagggtatcgctcccccttggtcctcgcaagaaccaagtgcttactacgagatgatcctttgccactccgacgcggtggatccctcacgaccgcttacaaacttgagtcgggtcaccaacaagatctccatggtgatcacaaagctcccaacgccaccaagccgtctaggtga

SEQ ID NO: 35307 - DNA, 249 bp, Zea mays
  Peptide Sequence Number=SeqID_78682
atgtcggggacgccggggctgatggaaggggcaggcgaggaggaggaccagggtcaggaatacaacgccacctgccctgctccgactgtcgtgccactcgccagagtgaggtcgacagcggctaagtccagcctcgggcgacataggaagctccgcctcgcccgaccccagggttcggcccccgtctcggcctcggaagatggacttcgcctcgcccgaccccagggctcggactcaaccatgacttag

SEQ ID NO: 35308 - DNA, 198 bp, Zea mays
  Peptide Sequence Number=SeqID_78683
atggcgctcgtgccaggggacgaaggtgaatccagggaccgccgccgcgacaccactcgactccggcgcatcggttacccgattggcggctgcagtaacccaagggggggggacctggggagcacgcgcgtggatctgccggcagcagggtcggctggcaactcaccggtgaggttgttactttgctccactacttaa

SEQ ID NO: 35309 - DNA, 1125 bp, Zea mays
  Peptide Sequence Number=SeqID_78684
atgaggcgaaaagacggtgggttccccccatccgggggcttggaaggtggaaaggcgcgtcgcataagggagcgagaagacacggtcgcctttcgaaaggggcccacgcgtcgcgcaaccggcgcgccggatgctgcatgcaagcaactgcaccgcctgcgccaccaccgcgcctcctcgattgcggaaccaataccgcgactcgaggcgacccagcagcgccagcccgacgcggcggccaacgcggccaaaagtgggccggcagtaatgacggtggcaggcgcgcgggagcagcggtcacgtcgtcagccaagcccacgtcccatccgggggcagcaaaagaaccccctctcacggcgtgaagacaacgcgcccgtggtccgttcctcgaatggctcgtgcacgcgcaacggctgccccgccaactactcgccccgtcgcattaactccgcggctggacaggcggcgcttctggcaggagcagcgggcgacgcttcgccttcgccgaaacaacggcgccaaaaaaggtacgccgcgtcgttcggtttcgctccgagcctccttactgatgaggggttcgaaggctgcccccccgaagggttcaacagccgcctcagatcgcgtgggccctacacccactactggtcagaggttcgaaggccggccccccgaagggttccacggccgcctcaggctactcgggctccgtgcccattactgatcaggggttcgaaggctggcccccgaagggttcacagccgcctcagacgccgagcgagggatgaccaggggtacgttcgatacataaccaaggctcgggctgcgctcccgagctcaccggagacaccatgttcggtgcccatcgagggtaacatggcgctctcccccctcctccttgcggaaaggcgacgtaggggcgtatgtaaaaaagccgagtctgtccctgatcgccctctcgccctgtgcggaggctcgggggctgctctcacaaacccggctccggccgaaccgttgacagcgtcaacataccagcccgagaacttgggccccgaccgtgcacccgggctacggccagttcgcatgagggaaccaccagaccagccgaagcattacgcaaggcattaa

SEQ ID NO: 35310 - DNA, 1038 bp, Zea mays
  Peptide Sequence Number=SeqID_78685
atgccccctaccggcgacgacccgtcggccgccgccggcatctcattccccgacgcgggtggtggtggcgattctgaagacggcgacttcgccggctcccacctcctcgaccccaccgatccgggcctccccaaccccaccacctcctccgctaccggcctgccccacgcgatccctgcggccggtagcggcggcggcccggtcacctccggcaacggcggggagcggcggcccctgttccagcgcctctggaccgaggaggacgagatcgtgatcctccgcggcttcgcggagttcaccgccgcgcgcggcacggcgttcgcgtcgcaccagtacgacaccgaccccttctacgaggacatgcgccgccgcctccagctcgacttctccaagagccagctcgtggagaagctccgccgcctcaagcgcaagtaccgcaactgcgtctcccgccttcgcgagtccggcgccaccttcaccttccgctccccgcacgagcaggccatctttgagattgcgcgcaacatctggcgccccgcaaacaaacacggccgcgatccctcggctgactccgacgatgaagacgccgccgccgccgcccgcgacacagatacctgccaacaccagccccaacggagaagtcagccccctcagccagtgccactgtctgtgtcagtgcctgtcaagacggatgactccctcccagcacagccccagaccccaatgccgaccatggatggctcagagcctgtcaggttgccagtcgtgtcgcctcaatcaggagtttctgatgccgagaagacttgcctgactcctctatttagggagataatacatgcagcgatgaatgtcggagcaaacccatttggtgcaaagctgcctgagccgccgcttgggttgcccttgcccatggaaggggagaagtggcggaggcagcggattttggagctggaggtctacttgaagaggatcgagctgctgcaggatcaggcgaaggcaacgcttgaggagctcaagtcctccactcctgggacttaa

SEQ ID NO: 35311 - DNA, 1692 bp, Zea mays
  Peptide Sequence Number=SeqID_78686
atgcgctcgcggggaggcggcgcggcggcgtggccggagcacctggccgcgcacgcgcgcctcctcaagtcggcgtgcccggacgcgttcctcctcaccaccgcgatgcggggctacctccgcgcgtgcctcccgctgcaagccctgctcttgcttcgctcggtcctgccgcgggcgccccgcctcctcgacaactccttctcgctctccctagcgatgcaggcatccgccgcgctctcggcctccgttccggctatgcgtgacctcggcctcggcgctgcgtccctccacgcgcgcgcgctcaagtccggcttcgccgcagccgacctcttcgtgcgcaccgcgctcgtcgaggcttacgccaaggcggggcgcgcggacctcgcgcgcgccgctttcgacgaggcgccgcgcagggacgtgttcctctgcaacgtcatgctcgcggcatacgttacgcgtggcgaggttgcggaggcgaggagagtgttcgatggaatgcgcgagagggacatggtctcttggaacacgatgatccatgggtatgcggtgaatggggaggtcgacctggcgagagaggtgttcaacggcatggacgacagggatgccttctcgtggagctccatgatgtcggcgtacaccaaggggcggaggtccaaggatgcgctggagctgtggcgggagatgcgcgcggcctgtgtcaacccggactgcaccaccatggtgagcgtgctctcggcgtgcagtgatatgggggcgcttgctgttggtgctgaagtgcatcagtttgtggagagcaatggggttgaattggatgtcaagcttgggaccgctctgatcgacatgatgctatcagaaggactgcaaccaaatgaggttaccttcattggagttcttatatcatgtactcatcttggtcttgtgagcgatggcaagaaatatttcagctcaatgagtgtagtgcatggtgtaacccctaaggttcagcactatggatgcatggttgatcttttggggcgatcaggtcatattgaggaggcaaagcagcttatcagggacatgccattcgagccagatgcagtcatctggagggcacttctaggggcttgtcgcatctacaagaatgtagaagttgcagaggaagctatggcgaaactgcgagtattggatcctcatgccgatgggcactatgtcttactgtcaaacatatatgcacaggcgaattcctgggaaggtgttgcagagatgaggaggacgcttaggagggagagaatccagagaattcctggaagaagctcgattgaatggcagaatacaattcacgagtttatttctggtgatagatcgcatccaaggtccaaggagatctacaaaatgttgggagagatgatggatcgcttaaggcaagctggatataagccaatgacaggtttagtgttgcaagacattgatgagcaatctaaggaacgtgcactggctgaacatagtgagaagctggcagttgcttttgggctgctaaccactcctgcagggtcaactctccgaataacaaaaaatctcagagcttgtgaagactgccattcagctattaagcttattgccctgttatacgagcgcaagttgattattagagaccgtaaccgtttccaccatttcagtgaaggacggtgctcatgcaaggactactggtga

SEQ ID NO: 35312 - DNA, 324 bp, Zea mays
  Peptide Sequence Number=SeqID_78687
atggtggaaggtgggtatggtaatcgtgatgccgtcaggaaggcctgcatggtcgccataaatcttgccagctcctggactgcatcagctatggattcaattgtgagggccggtgtggacgaggatggtggtggcagcgccgtggtggtggttgacactgggacgatggaggctggtggccgggatgggagaaggttgggcgcgacgactgttggcgcaagggcgccgtcgttgcaagctgaagggcgagggcgcaaggacacacaggtgaagggagcgcccgacttcctgttgaggaagcgagctaatacttttcttgcttaa

SEQ ID NO: 35313 - DNA, 1163 bp, Zea mays
  Peptide Sequence Number=SeqID_78688
actcatttcaaactaccccgccgctccgcctcgaccctcccctcctccccaatcccgcgcccttccaccctcccgccgaaagcccagcccggatggcgtctctagaaggcgaccggtggtcggagatcgtggccagcggccgtgcccggccgccccgcgttggcgtcgtgtacggtcgtcgcctggtcgaggaatcgtccggcagggccaacatggaaacgagagccagcttcagtggcctgcggcgcccgagcttcgtgccgcgcaagcgaaccagctggaaccggtcgctttccatcaggtttacagataaacaaagaacgacaccagacccagtacaacagcatcttcagaagaaacgtctgggtggccctcctgatttgagcaaggagaaggcatattttgaagagatcgatgcttttgatcttatggaagaaagtccttctcctaagaactttgcctcgtggaccaaaggaatggggcagaatctcataattcatgatctgcctgcaatattggagagatggaaaatttctacccttgcaagacgtgtgtcatctgagcccttgtttgacattgtggagacgccaatcttaccatcagtcctcagtaacagcagtacatctaacaacgggtcagagacatacaccgctggaagggcaatctctgtaagctacactgatatcagtttaaagagcattgcagaagacagtctgattacatcattcggtaaagtgaagattaaggaagagcctgttgaagccagcattccatggaatggtgaagctctgactgcttttgatcagctcctcatggtttgcaggcagtctgcaccagttacactggcagaagggccatatgacccttttctgattagtgcttgggaagactatgatgcgaaacgtggatctgaaaatgaccatccaaaggagtttacaagggaacagtgctacattgtctttgttctagctgatggtggcactgatcttgaaagttttgctctagttgagtataatgaggttcacagtttactggttcaggttactgcttccttagcagtagctgaaagtgcttgtgaatttgaacatcgagatctgcactggtatgtcctctcaacacagctttggttgattcatgtctttaatttgaagcctcagagttaa

SEQ ID NO: 35314 - DNA, 381 bp, Zea mays
  Peptide Sequence Number=SeqID_78689
atggtgggtccgcggcgaggcgaggcaacccgagcgaaccccggatccgaatatgcagggacgacaggggtgggggaaggggcaccgaggacctgcgcggaggagggcaaggatgacgaggtgtgcgggcgagcgtggggcgaggatggcgtggatggtagaggagtgggggcatggtgttgccttatggatggtgggagcgaggatggcggagagcaagcggggcgaggatggtgggatctgccgtggaggcaatccctggattgcgtccttccatcaatagagagcggggttgacggaggctggggcgagtaccacgggatcaacggagcacgggcgagagggtgtcggggtgtagacgcctacactgcagacttatag

SEQ ID NO: 35315 - DNA, 471 bp, Zea mays
  Peptide Sequence Number=SeqID_78690
atgggccgtctcgaggtgctcacggcgacggaccgcctgctgccgcgctcggcgtgccggtaccagaggctgctcggcggcggcacgtcgccaccgccgccgcagccgatgagcgggagcgtcgtcagggcgaggcggccgctgcggctgcggaggagggcgtgcaaggcggcggggaggtggtggggcgccagcgccaccaccacgacgacggccagcggcaagcgcctgcgccccctgcgcctggtgcggctgctgctcctgctccccgcgcgccgggtggccgcgctggtcgcggagctcgtgcggcggctggcggcggcggaggccgccgcggactgccccgccatcgtcttctcctctcagtgggggctccccgtgctgtcgcactccgccagctgccggagctccaggctgcgggccctgtacctcgacaggaacctctccgccggcaccggctccccgtgctga

SEQ ID NO: 35316 - DNA, 693 bp, Zea mays
  Peptide Sequence Number=SeqID_78691
atggctgaaaggtaccaactcccacagagttgcgttcccccaacgacaaggcggaaggattgcgggtgtcccccatccgggggctcggaaggtggaaagacacgatgcataagggagcgcgaagacatggtcgcctttcaagggggtcaccatccttttaaaggcgactctccctacttgcgtccccagccgtcgtgggctgagtcttctccaacaccctccaaggtccccccaatacggcgtgggggctgggtcccacgcgtcatgcaagctggcccagagcagaagaagccaaaccgccgcgcgtggtgcatgcaaccgcccagcggttacgagcattcctccgctttcgcccagaccagcgggcgaaagggcgggcagccatgcaggcggcatgcaaccgcgccaagtgggcgcgcccctccgacttccaacgcacccagcatgggggcccacgcccacgcgtcatcgacactcgcaccactgccacgcctcctcgactacggaaccagtaccgcgactcgaggcaaccctgcgtacgacccagcagtgtcagccaggcacgacggtcaatacggccaaaaatgggccggcagtaatggcggtggcaggcgggcgggagcagcggtcacgtcgtcagccaagcctacgtcccatcctggggcagtgagagaaccctctctcgcggcgtga

SEQ ID NO: 35317 - DNA, 108 bp, Zea mays
  Peptide Sequence Number=SeqID_78692
atgacgttaatggggctcggtgtatgcggctcgctctgccaaggtaaagaagaaggtgtcgaggcggatctccaggagttccaggacatcgacgagttcgaggattag

SEQ ID NO: 35318 - DNA, 954 bp, Zea mays
  Peptide Sequence Number=SeqID_78693
atggaggaagaggatttctccttgtgcttgtggccggactccctcgagtgggttttccccgagcttgcggacttgtcgccgccggtcccaatctccctcttggcggatgctcccgatatcacttcgagtgagactgatgggcacgattcaggtcaaggcttcgtctacccaaggggcgcgatctcgcctcgcccgagcccagcctcgggcgggaactgtagtcccggacgaagttacgtcttgcccgagggcctcctcaggcagtgggctcaccctcggcacgcccgaggcccaactcgagcaggcttcgtcgagaagcaaccttggccaaatcgcctctccaaccgaccgtatcgcaggcgcattcaatgcgaggatcgcctaacaccttatcctgacacacgtgcctcaatcggcaaggtcaaagcgcaacaggaagctccgcctcacccgaccttaggcctcggcctcggaaggaggtctccgcctcgcccgaccctagggctcggcctcaacctcggcctcggaagttggtctccgcctcgcccgaccctagggctcggcctcaacctcgaccttgggaggaatcgcgtcctcacccgaccccggcctcggcctcaagagaagtctccgcctcgcccgaccttgggctcggaccgaccgcgccacgggggatacatcattaccctacccctagctagctcaggctacgggggaacaagaccggcgtcccatctggctcgccccgggctcaagcacttctccgacggccacgttatcgcttacgcagggctcaagcacttctccgacagccacgttggcatgtacacagggctcaggcacttccctgccagacacggaccccccggggtcgaaacgccaacaccgggtctagagttagaaataaaactgagtccaaaagagagggcgaaaacaaatcaaccaaagaaatag

SEQ ID NO: 35319 - DNA, 354 bp, Zea mays
  Peptide Sequence Number=SeqID_78694
atggggggtttgggcgccaggggcgcgcaggccggggcgggccgggccggctgggctgggctaggggcggaccgtccggaccaggggcgcgaaccattcgctgttggcagaattggagcaatgactaggaagtggttggtggctataaatacaacccaaccacctccattcaactcacccaagcattctaatctttcacattcaatacaagagctagcaatccattccaagacacaatcaaagcttccaatctctccaagttccacaactgagataagtgattgttgggggccttcgtctttcgaaggtccacaaaaacatgatttaacaatgcttctggagtataatacatga

SEQ ID NO: 35320 - DNA, 615 bp, Zea mays
  Peptide Sequence Number=SeqID_78695
atggagctacctgttttctgtcgtcctgcactgcaagcgaaactgcttgctgctgcgctgatcaacaactccctgaccaaatccgggcagcttgggactgcattatttggtgccatttcaaaatacagaaacgtttcaagattcatttctcccatctctcaaacatctacgaagaacataggtccatgttgtagcttcagctcgtcttttgatgttgaggtgagaagtggatcagaaggatatgtgataaagatgcgagatggaaataacttgcgttgtgtccatagtaactttcaagggagaaatattccagagagtgcaccacaacctgctattgttttgaggattgaagatggaagcagaactttactcccgatcattgttttggagatgccaagcgttattctgatggcagctattcataatgtccacattgtaaaacttgttagggtaaacaaaagaattcaagaagcatactgtgctgaactttatttaacaaaggtcaatgatcctacagacaacatcaccttcgatcttcagccttcagatgccataaacattgttgttcgttgcaaggtttgccttatggataaggattatattgttatgacatga

SEQ ID NO: 35321 - DNA, 531 bp, Zea mays
  Peptide Sequence Number=SeqID_78696
atggaggatgacgttctcaagctgttcgggatgatgtcgaagcgaaactcgggccacggtcgagcaccgagcctgcgatgcgaggtcgcccgtttgcgaggcacgcgaggtggaggggggcaatctcggggagggggcaatctccgggatatggtagtggagtggcggcgcgcggtcgagaaggtgtacgtgggagccagtggagggatgacgcaacgggcagtagagaaacgtcagggtacagccacaacggctcgggaattccatggctctattggattggatggaaaaattaccctgacgtttctctaccgcccgttgcgccatccctccactggctcccacgtacaccttctcgaccgcgcgccgccacttcactaccatatcccggagattgccccctccacctcgcgtgcctcgcagacgggcgacctcgcatcgcgggctcggtgctcgaccgtggcccgagtttcgcttcgacatcatcccgaacagcttgagaacgtcatcctacatctcatcacagtataa

SEQ ID NO: 35322 - DNA, 267 bp, Zea mays
  Peptide Sequence Number=SeqID_78697
atggttggtttacagatgatgacgaggatggttatgatcatgcttatggtaatggttgcctttggtgcaatctatgctcagttgggcgatgtggaggctcctccgaggtcgaggtcgagtctgtcttccgaggccgaggtcgagtccgagcccctgggtcgggcgaggcggagaccgttggcggaggccagggctgagtccgagccctggggtcgggcgaagcggagttcgtcgtcttcaggggctgagctcgagtccgagccctag

SEQ ID NO: 35323 - DNA, 1539 bp, Zea mays
  Peptide Sequence Number=SeqID_78698
atggggggggggcctgcggagcaacagaagaccgacgaacggcgcgccgtcgcccgctccagcaacggcgatgacgacgacttctgctccggggggccgaacagcggcagcactgacctcagggcggatgctgctgccaagaggcccccgcccatgcccaaactcgtgaggcaaggacgggcagaaggccgtagagttggaggtcggtccgtgggcggccctggctatctcgtcggcggaagaacctcttccagctgccgtggtagacgtcggcgccgggagcggctccgaagccactcatgtccgagagccaggcacgctgcagctgccggcgccacggacgacgacctcctttccctccgatcactgagggaaggagcgggccactgcccacgcagggacctaccccaactcggcacactcccctccccagccctggtgatgaaaatccttgaggctgagggaggggcagaggtcgcagcccggctcgctttcccccaccatcaaactggaggcaggagcagcagtcacgtcgtcagccaagctcacgtcccatccgggggcagtgagagaaccctctctcacggcgtgaagacaacgcgcccgtgttctgttcctcgaacggctcgcgcacgcgcaacggccgccccgcgaaccactcgccccgtcgcattaactccacggcgggacaagcggcgcctctggcaggagaagcaggcgacgcttcgcctttgccataatgaccgcgtcaaaaaagggaccgggaaggggataccccgaaaaggatcctttccccatgaaggaaccaggctccgagcctccctactgatcagaggtttgaaagctggccccccggaagggttcgacagccgcctcagatcgcgtgggccctacacccactactggggttcgaaggctggcccccgaagggttcacaaccgcctcagacgccgagcgagggatgaccatgggtacgttcgatacataaccaaggctcgggctgcgctcccgagacccggctccggccgaaccgttgacagcgtcaacataccagcccgagaacttgggacccgaccgtacacccgggctacggccagctcgcatgagggaacaaccagaccaaccgaagcattacgcaaggcattaagacctcgaaggagtgaaaccactcctccgaggcctcgggggctacacccggcgggtgcgctcgcgcgcacccaccggaacaaaacgcaaccgagaaaggctggtccccttgcaaaaaagtgcgacgaaagcctccaagcgagtgctaacactcccttcgaggctcgggggctactgtcggggaccataattaggggtaccctcaaggctcctaattctcagctgggctcggactcgggctcagccccggaagacggcgaactccgctccgcccgacccagggctcggactcgggctaagtcccggaagacggcgaactccgctccgcccgacccagggctcggacttgggctcagccccggaagacggcgaactccgctccgcccgacctag

SEQ ID NO: 35324 - DNA, 444 bp, Zea mays
  Peptide Sequence Number=SeqID_78699
atggtggagactcgccggagctccgccgccgccaccgggaagcgcacgtctccatcgtcatcctcttcgtccgtaccttcccgaagcgccccaagacgcgctctgattccttgctccacactctctcctgctcttgcgctctacatggaaggcgaggccaacgcccaaatcgacggaatccctgctcccgcgctctacatggaaggcgaggccagcgcccaaatcgacgggatcactgctcggacgggattgcagcctcgatccgtgctctccaggttcgcccagatcgacggcgtccgcggcgcgcttgcccagatcgatggaatatgcggtctccatatgcaagtccggggctcgctatccgtggaaggcgaggagagacgacgcatcggctctcgatccgcgctctacatggaaggtgaggcagattgggggagtgtgtag

SEQ ID NO: 35325 - DNA, 81 bp, Zea mays
  Peptide Sequence Number=SeqID_78700
atggttggtttacagatgatgacgaggatggttatgatcatgcttatggtaatggttgcctttggtgcaatctatgctcag

SEQ ID NO: 35326 - DNA, 510 bp, Zea mays
  Peptide Sequence Number=SeqID_78701
atggaggtttctcaccggggaagaagaccctcgccggagccgaggagaaatccgtcgattgccggagattcggggatccaatcgacgaaccgaacgcgctgcgacaaagccctcgacgagacgaacgcagcggtaccctcggatttggcagacgatgcacggattgggacggctaacccccttaacaagagcattgatacacacttgatgaagatgttgccgactctgatcttgactggtttggaggagttggaggttgccaaaaggacagatgcaagaggaaagaataacgagaaaggacaagacttgcaaggcgtcaaagaagggggaacagtcaatggcgaaataggtaagacattatcctcgaacaaggatggaaaagagaaggcttttaaagggaggttcaaacataatccatggacagagtcaaggcaagactcaccaaatggcaaggtggagaaaacaatcaaggataagataagtgaggttccggcagaagagttgaggtaa

SEQ ID NO: 35327 - DNA, 441 bp, Zea mays
  Peptide Sequence Number=SeqID_78702
atggaggttaagaataccgagaatcgggcgtccagacgggttattctcgtgttggggcggctcggcggtgttgaagacactccgacgagcaattgtcggagtcgtggtgccctcctgcccctccgcgccgctcgcccctctccgactgttgtgccacccgccagggtgaggctgacaacagctaagatcagcctcaggcgcaacaggaagctccgcctcgcccgaccttgggcctcggcctcaggaggaggtctccgcctcgcccgaccccagggctcggcctcgacctcgacctcgggcaaaatcgcgtcctcgcccgaccctggcctcggcctcaggaggagtctccgcctcgcccgaccttgggctcggaccgaccacgccacaggggggctcaaacgctcctccgatggccacgacaccgcgtacaccgggctctag

SEQ ID NO: 35328 - DNA, 897 bp, Zea mays
  Peptide Sequence Number=SeqID_78703
atgaggcggttgttgcttgcatccccatcaccaggagccgtgaatctcaacaccaaacttcttctcgtcgagatttccaagctcttcgatgcacaagaggcaaagtgggatgaattgttttctcgtcgggatgcacggtggaaggcatccagtggagccccatacagcttctacattgacattcatcatgacgcagagattggccacgacgccagccctgttgttgcggaggagtcggccctccacgtcgtttctggcgccaactacaaggaggcacccaccacctgttcaactccgagcctcaccgagcatgcgatggccgagtccgcgcaacgccgaccgctctacctcacgagtgctcgctacgtcgctggccgggggcaaggcggtgactaccacagagccacggcccaagctgtatttgatagggtggcatcccgcgatgttgtctcatggacagcaatgatcatggcttatgtgcagcacggccttggtgacggagctcctcagatgtttccaacaaagatagttgtctgcaaattgaaatttactggccaaatcaatccagaatcagaagacagtagcatcttggtagaagatgtcgatggaacttcagtgtatcaggtgtcactaggccagcacagtattcgaaatactgacaaaaacacagagttccctctagcagaatcttggataactgaaggagattacatctcgtggtcaaaatcttctaatgggtctaaacttgtgaatctaaaaatcaaccggggtggtgatttcactaaccaaattagcagaacagatatccacctttgctactggcttcttgaaagggaaatgtgcccttgggccatttctaagtattttggtgatttagtgtccaacacaagtgcctaa

SEQ ID NO: 35329 - DNA, 387 bp, Zea mays
  Peptide Sequence Number=SeqID_78704
atgggccgccatcgatgccccgtgctctgggcgctaatcgtgttccaggggatagatagagagggagtgtcaggtggccgccgtcggccacatcacgcgatgtcgcgggatagtccttggagtgctgttcggcgtgttcaccggagcactccgcacgtcctcagcacttacacgggcgacgccggtggccggagttgggttgattcctcgccgaagtcatgggtcgccgcaacttcgccctgtccgtgggggattccgccgcctcaagccccagttcaagctcttcttcgccgcccgcatctccggactgcctccgatggagctcgtcgccggggtatctgcaaccggtggttgacttgctcatcagggattcctcatctgcaatag

SEQ ID NO: 35330 - DNA, 1275 bp, Zea mays
  Peptide Sequence Number=SeqID_78705
atggacgtcaccggagatgccggcggaggtcgccgccccaacttccctttgcagctgctggaaaagaaagaggaacagccctgctctacgtccccagcggttgctgtgggtgctggggctaatgggtcgggagagatgcagatgaagaaggtggcggcgccgaagcgcacatcctccaaggacaggcacacgaaggtggacgggcgcgggaggcgcatccggatgcctgcaatttgcgcggctcgggtgttccagctgacaagggagctggggcacaagacggacggcgagacgatcgagtggctgctgcagcaggcggagcccgcggtggtggcggccacgggcacgggcaccatcccggccaacttcacctcgctcaacatctctctccgctcctcgggctcttccttctccatcccagcgcacctccgtgcggccggcccacgcttcggcggcgcgcggggggacccgtgggagcgcgtcgtgggagtgggactcgggttcggcgccgccgccgaggaccctccgtccgctacgtcctcggcgtcgtctcctctgctgctgagtttccactccggcagcgtcggtcttgacgtgtcgccgtcgccgtcgtctgccgccgccggctccgacctgtcgaagaaacggaggtgggagcaggaaatgcagcagcagcatcagcagcaataccaccagcagcagcagatggccgggtacacgacgcagagccaaatgccaggcgccgtgtggatggtgccgagcgcgagcagcaacgctcaagccgccgcagcggctggcggtggcggcagcaacgccaacgagtcgatatggacgttcccgcagccagcaagcggcggcggcggcggcgcggcgaccgtgtaccgcggcgtgccgagtgggctacatttcatgaacttccccgcggcgcccatggcgctggtccccggtggtgggcagcagctcgggctcggcggccccgtgcccgtgggcggcgccggcaacgacagtagtggcagtgccagcggcggcggcggcggcgagggccacatggggatcctcgccgcgctgaacgcgtaccgggcacatagtgccgtcccggacgctgcgccagcgcagaacggagcggaaggcggctctcgtcagcgccagcagcacggcggcggcgtttttgttaattggttgcactgttgtggcctcctctggctccttcacattcttgcaaggatcatacagagtttacgtttcatggcatctgggactgggatagacggatag

SEQ ID NO: 35331 - DNA, 1236 bp, Zea mays
  Peptide Sequence Number=SeqID_78706
atgaagaagtcatcgggctcgggctcggtgtcgttggcgcggagcatcccggagctgtacgaggagaggggagccagcaacctccgggagttcgggttccaagagctccgggccgccaccagcgacttcagccgcctgctcaaggtcggcgaggtggcttcgggagcgtttacaagggcgtcgtccgccttcctggcgggcccgccggcggcacgaagttcaaggttatctcattctggcatatctcatttgcctgctgatgaagtgaagcctttggttaaatatgataatgatgaagatgcacactcacctggtggccgtggaaggggtcgtggtggtcgaggccgtgggcggggcaggggcagaggtggacgtggaaatgggttcaatgagtatgctgatgctggttgggaagacgatcacgcccctgcatatatgggcaatggatatgcccgcggaagaggtcgcagtttcaggggccgtggtaggagaggcgacgacgataaccagcccgaataccaacatgtcggaggtttcaaaggcatgagagtgatgagggtcaaaaatctgaacctctacgcttttggtttatatatgcaaccaacttctatccgtgagaagttgggtcctaagtatgcttcatttccaactgacaagctgatggagaaccctgatttctatagaaatgggttcaatgagtatgatgatgctggttgggaagacgatcactcccctgcatatatgggcaatggatatgcccgtggaagaggtcgcagtttcaggggccgtggtaggagaggcggcgacaataaccagcctgaataccaacaggtcggaggttattacgagtgttcatgctccagctttagattttcaccatttgtaatggaactgaaaccagcctctcatcgaagtggaaacctttttttagtcgtaaacatttacatggtttatccagtggtcctgtgtacgtcaaattttgtccacattgaaccagtacgaatgacatcttccttgaaagttatagaaatgcttcaaagttcaaatggcattcagcatattccatgtgctgctatttcagcactcatttctcgtgctggcaatgcaaactggaataggaagggtttgctcctcatccaatcgaattgggcaccgatggtcagtcagacagtcacctactctacgtactctttctttagggatgatagccttcggttttttcaaagcaacagataa

SEQ ID NO: 35332 - DNA, 291 bp, Zea mays
  Peptide Sequence Number=SeqID_78707
atgagcgcgccgccgcacgtttcttacaccgcgctcccgccaccacctcctgctcccactgccacctccttctcgcagctcccgcctctgcccgacgtcgtcggtggatgccgcgtcaaggctggcgctaaaccacctgggcccggcgcaaatccaccagatccattcgcagctctttttgaccctaagaaacagtccatgagccccctagcgttttgcagtcctgtcctcctctacgcaccatgcctagtatcgctgctgccattcagcttttgtgagacgcctatataa

SEQ ID NO: 35333 - DNA, 306 bp, Zea mays
  Peptide Sequence Number=SeqID_78708
atggctgcagaaatggtgaaggcggcgatgagtggtaagctcaaggagatggattgggagaagaagatcaaaatctgcgagcttgtggagcaagatcctgggcaccgcatccgacaacggcgtcgtcacaccgtccagctcatcatccacctgaagctcaacctcccaccccagccaagagcatcggtactcgccatgtcgtgcgcgttcgacgactactatatcaaggactatggcgtcatcttggcactagaggtgacgcagaggaggaccgacaacaatgaccactcgccatcgtcgaggtag

SEQ ID NO: 35334 - DNA, 357 bp, Zea mays
  Peptide Sequence Number=SeqID_78709
atgacggtggagaagggccacgggtcgcgcggcggaatgacggacgtcttgtcagccattgccgagcggaagcggtggaagcggaggggacgaggcgagcgggcgccgtttcgcctccgtcatgatgaccgtctcaaaaagggatcgggaaaggagatatttcgaaagagtccttctcagcaaaggaaacgggccccgagccctcctactgatcaggggttcgaaggttgcgccctgtggggttcggcaaccgccccagagcactcgggctccgagccctctactgatcaggggtttgaatgctggcccctcggaagggttcgacagccgccccagagcatgcagagtcagggatga

SEQ ID NO: 35335 - DNA, 549 bp, Zea mays
  Peptide Sequence Number=SeqID_78710
atgcccactccacccgtgctcctccgcctcgtcgctgtcctgctcgccgccatctccctccgatccaccgccaccgccgcccgccacgagaataccacccagctgcacttcttcctccacgacactctgagcgggaaggacccgagcgcggtgctggtgggccgcggcgccggccgtgagccgaggcccgacgacccggtgcccttcagctccctgtacgccacggacgacgtgctcaccgagggcccccagcggcagtccaaggtggtgggcaacgcgcaggggttgtacgtctcgtccggcaggggcaagctgtcgctcgtcctcggcatggacttcgagctcaccgacgggcccttcaacggcagcgccttcgtcgtgtactcgcgcaacacggtgacgcgccccgtcggcagggagctcgccgtcgtcggcggccgcggcgcgttccggatggcccgtgggtacgccctgctccgcacgcatttcttggacaacggcaatggcgacgccatcatagagtacaacgtcaccctcttccaccattga

SEQ ID NO: 35336 - DNA, 303 bp, Zea mays
  Peptide Sequence Number=SeqID_78711
atggcggaagtggatgacaagctcaaggactacgagatcaggaaggagggagaggcagagatcctcttgcacaagaggaacgccgtcttttacaatcccgtgcaggctttggctgcaactgggttgcgatctctccggtatgcccgtgaagttgagggcttaggaaagatagttgctctggacaatgataaagcttccgtcgaagattgcaagcgaaacataaagtttaatggtgcttccactactaggtgtgggactggggggggggggtaccatttatatgattatgtctctggctactga

SEQ ID NO: 35337 - DNA, 660 bp, Zea mays
  Peptide Sequence Number=SeqID_78712
atggcgcttcctgttgacgtggcgggcctgtgccctaggcagggcgacgtgggggctcctccgaagccgaggtcgagtatgtcttccgttgccgaggccgagcccgagcccccgggtcgggcgaggcggagatcgtttggccgaggccagggcggagtccgagccctggggtcgggcgaggcggagtttcgtcgtcttccgggtcttagcccgagtccgagccctgggggtcgggcggagcggacccgagtccgagccctggggtcgggcggagcggagttcgtcgtcttccgggtcttagcccgagtccgagccctggggtcgggcggagcggagttcgccgtcttccgggtctcagcccgagtccgagccctggggtcgggcgaagcggagttcgccgtcttccgggtcttagcccgagtccgggccctggggtcgggcggagcggagttcgctatggcgcctttggcaaggcctgactgcctgtcagactcactctgtcgagtggcactgcagtcggagtggcgcaggcggtgctgtccttctgtcagactgctttatgctgatgggggttaccagctgagaattaggcgtcttgagggtacccctaattatggtccccgacacaagctgattctggcacgcgccaactatcagtaa

SEQ ID NO: 35338 - DNA, 363 bp, Zea mays
  Peptide Sequence Number=SeqID_78713
atgccgcattcgcctcatcggaccccccatgtgccaccacctctcgtcgtagctcgcgtccattacccgcgacagggtcgccgctcaccggaggaggcggagcgccgcgtcaccaacaccgccgcgtccaggaagcactcccgctcggcgctcgacgttgccttccatgcgctcgaggcggaggccagggacgccaagatggaggcgcgtatccgcctcgtgagggaacggagagtcgctccaccgccgacactgtcctcgaggagcagagttaagaagggcacacgcaagcgtgagtccgtcaccatcagggccatccccaaagcaaaggtgatgttcagctctcacactgctctactctga

SEQ ID NO: 35339 - DNA, 747 bp, Zea mays
  Peptide Sequence Number=SeqID_78714
atggcggtgtgctgggctgttaagatgggcccagtgtcagactcgtcttctcatgtggggtgcgaccgaatccaacagaagagccgaagaggaaaggggcggttgctttatattccttctcggctgcaatctgcgtccatctatccagccgtctcggggcgtcgtgtgcgcgtggatctctccgtagaagggatgaagatcacggcgctccttgtgctgaagccgtcgacctccggagccggtagctcctcgtccggcggccagtcgggcccggaggcggtcgtgctcgcgaacgcgacggacgtcagccacttcggctacttccagcgcagcgccgcccgcgagttcatcgtcttcgttgcccgcaccgtcgctcagcgcacccagccaggccagcggcagtccgtccagcacgaagatgttgatatgatggatttcatgaaggttcttgatgagtaccagaaggcttttggggactcctggaaatctgctactgcagatggaactcaacagtgggctttcctgacagacgccttggcaagatttcaggaccctgcggaagctgacaaactaatgaaaattcagagggacttggatgaaacaaaaattattcttcataaaactattgatagtgtcctggccagaggagagagattggatagcttggttgagaaaagttctgatctaagtgctgcttctcagtctcagtactcagtagtactccatccaattttgatgaacttataa

SEQ ID NO: 35340 - DNA, 396 bp, Zea mays
  Peptide Sequence Number=SeqID_78715
atgggcaagaacaacaaacgcaagcgcgaaccgactcctccatcagaggactttggcaactcggaatacccagaggaggagttctcctctgagtctgaggggggattgccacggaggtatggacttacatccgggtcgtcgagcgctccggggcttgagggctcggatgagtcggagtactcctcggacgaggaggactcgcccgaggaggacggtgaaggtgacgacgacgacgatgacggaggcgacggcagcaacgacggtgacggcagcagcaggggcggcaacggcggcagcaggagcggcgacggcggcagcaggggcggcgacggcggcagcagcaggggcagcggcggcggcggcagcagcaagggcaacaacaaggccagtggctaa

SEQ ID NO: 35341 - DNA, 342 bp, Zea mays
  Peptide Sequence Number=SeqID_78716
atggctgaaaggagaagcggccgacgcttcgccttcgccgtaataaccgcgccaaaaaagggaccgggaaaggggggataccccgaaaagggtccttccccgcgaaggaaccaggctccgagcctccctactgatcagaggttcgaaggctggccccccgaagggttcaatagctgcctcagatcgcgtgagccctacacccactactggtcagagcctagcctcgggcaagggcagccgaccccgaggggtttccgtctcgcccgagaccccccttttaacggcgggcacatctccggctcgcccgaggccttgccttcgctaagaagcaaccctgactaa

SEQ ID NO: 35342 - DNA, 2149 bp, Zea mays
  Peptide Sequence Number=SeqID_78717
atggctgaagaggatgtccagccccttgtgtgcgacaatggcactggaatggttaaggcaggtttcgctggtgacgacgcgccgagggcagtctttcccagcatcgtaggcaggccacgccacactggcgtgatggtgggcatgggccaaaaggatgcatacgtgggcgacgaagcccagtccaagagaggcattctgacgctcaagtacccaatcgagcacggcattgtgggcaactgggatgacatggagaagatctggcaccacaccttctacaacgagctccgtgtggcgcctgaggagcaccctatactgctgaccgaggctcctctgaaccccaaggccaacagggagaagatgacccagatcatgtttgagacgttcagctgcccggcaatgtatgtgtccatccaggccgttctttccctgtacgccagtggacgaacgactggtattgtgctcgactctggtgacggcgtgagccacactgtccccatctacgaagggtacacgcttcctcatgctattattcgattggaccttgccggtcgtgacctcaccgacaacctgatgaagatcctcaccgagaggggttactccttcaccacgacagccgagcgagagattgtcagggacatcaaggaaaaacttgcctacgttgcacttgattacgagcaggagctggagacggccaggaccagctccaccgtcgagaagagctacgagctgcccgatggccaggtcatcacaatcggcgcagaaaggtttaggtgccctgaggtgctattccagccatccttcattggcatggaatctcctggcatccatgaagccacgtacaactccatcatgaagtgcgacgtcgatatcagaaaggacctgtacggtaatgttgtcctcagtggtggctccactatgttccctggcatcggtgaccgcatgagcaaggagatcactgcgcttgcccccagcagcatgaaggtgaaggtggttgctccgccggagaggaagtacagcgtttggattggtggctccattctggcctctctcagtaccttccagcaggttatgtggatctccaaggaagagtatgatgaatctggtccaggcatcgtccacatgaaagtgggcccactgcaaaaaaatccccactcgacagcaggctcttcttcctcccaatcccgaactccatctcaaccgcaaccgcccgtcgcttcgtggccgcccactcaccacgcccgcctcgcccgccgcgggagggaacaagcgctcaggctgctttgtgggggcgccccgccgggagggcgaatcccggtggaggtgaaccctgtttgccagcagatctcgccgttgggaggccagagctgggcggcagaaagaaacgttgtgctcgagttcgaggtcctcgcggagatagccaaggcgagagggaagaccgtggcgcaggtttttaatctgacaacaacacagctgcctttgtatgccagacgcccaggtgctgatgatgtctttggtttgatgcctagagccgccaggagggaggaagacgtcgccgggacctactgctccgtgcctccagttggtacgcgtcccacgctccgtgcctctagccataggctacttcgtgggggcgccccgccgggagggaggaagccgccactgggagggactcgttgctccgtgcctccggttggtccgtgcctcgtgctctcgatgccttcagcgggggcacaatttaaagagactgataaagaggaggaggaagaaaacatagctatgggggtggatgagcaaggagagggtggtgatgtaccaagaaatgattatgacagagataatccatccttaaaagaaggcaacacatttgcatcgatgaccgaatttaggaatgcacttgatacctattgcatcaaaggcgagtatgattatgtaattgacaagagtgagccaactagaatgactgttcattgcgcatttgagagctgtcagtggaggatatatgcttccatattagaatgggcgacatataactcatgcattggtacaactgaaccggtaaagaagatcaaagagaagtacaacattttggtgccttacatgatagtgtattatggcaaggaaatggctcttgacaagatttatggcccat

SEQ ID NO: 35343 - DNA, 960 bp, Zea mays
  Peptide Sequence Number=SeqID_78718
atggtctacacaccaccaaaacagcagcgcgagctgtcagaagcgtctatcagaagcaagtgctctgtcagaagctaccctcacacacccgcacagtttcaagcattccataataacagaattaactacaagatgcagatttgtgtttctgatgatgttgttgctgttcaaagaagccctgcgatccaaagaagcccttactgctttctcacttgttcttcatcttgcacagtcgagctcccgcatcatggctcagccttgaaggaacagatttcttcaaccaagattcctgcccgtctcaagagtggcagcggactatgctcggcctgtgaaaacttcacgagcgaagccgtcacttatctcggcaaggaacaaacacaggacaggatcatggagttccttcatgatgcttgctcccaatcattctcctttgaacagaagtgtgtcgagctgatggactcttatgcgactctcctgtttgccaagatcacggagatcagaccggaagcgttctgcaaacggtatggcctgtgcagggacacgactcttctctctggtgtgggaagtgacagcacgtctgcacgttttgagataattcagattcttgtcaaggagtgcaataagatcgaaggtcacgtccagcaggttgagcagatagtggttgaaaggtctgaaggttggcattgtggatatttttgctatcttgcatggattcccagacaatgtgaggacggaccagaagggcgagttctgggtggcgatccactgtcggagaagtatgtatcctcggctaatgagctgccatgtcaagctgaggaagtttttgctcagcttcccaatccctgccaagatttgaagcatgagaagcgttgtgggagagaagctttagtgcaacattgttgttctatagggatcaacgtcctcaaggtcacttggaaaactttcacgaaaaactcgtaa

SEQ ID NO: 35344 - DNA, 513 bp, Zea mays
  Peptide Sequence Number=SeqID_78719
atggtgatcactgcgctgtcgctgctcctgtgcgggctggtggtcgtgctcgcggtgcacgcggtcgtccggtgcgcgttccgcgtcacgcgccgcgtgtgctacgggcaggacgaggagtcccccggcggcggcggcggcggcggcgccgatgcatcggcggccgcggcctccttctcctgccaggccggtcccaggaggaagcgtgggccgcgaaccgggctgcccccgtggatactctactcccgcgaggtcgagctcacggggtgcggcgcggcggaatgcgccatctgcctcacggagttcgtgcggggtgaccgcttacgtcttggaactgggggctcggaagtgaggtccaacgttctgtgcttcaagccttcaagcctgcgaagaactgcccgcaaacatgaagcggcccactgcaaacattcagctcatgaactactgctaacaaacaccaccaccattagaaatgacatgtcgatgaacagaccaaaatccacctttagctaa

SEQ ID NO: 35345 - DNA, 363 bp, Zea mays
  Peptide Sequence Number=SeqID_78720
atggacttttttccagcttctcaaagtggcaataattcgcacgtcgatcctgacgcgattccgtcggtttcctttccttcctctgacaccggaacagcggcgtgcatcagtgcaccggctgcagctgcaactccgtcgagcaacacgggctgctgcacacgcgtcgctgtggtgattccggtagtggaaggtccgagctgcgtgcgagcggtggcgatcctgggggccaacggaggtgccgctccgaggcgggtgaccgacggcagcgctccaccaggaacgagcgacgacgacgctcccgaggcgggcgggcaagcggtgacggcgctcccgaagcagacgggcggcagcggcgcaccctag

SEQ ID NO: 35346 - DNA, 462 bp, Zea mays
  Peptide Sequence Number=SeqID_78721
atggagcctggccatcctatggggccaggcaccgaggagcctccaccttcactaactaaccatgaaaagaagaacactggagaagctaagggagaaataggtgcaccgatggtggacaccacaacaatgaccaatacggccatttcacttggacacgaatggatgctcgttgcacttcttcctacaccgccatacgtcgccagcactgatactggtactgaagcgcttctctgttttatattgaaatatgtgggtgagaggaggaagagatggtggaccgaagaaacaaatcaggaccaggacagaaaggcacgggccctaagggcttcgggttggatcctgctcctgatgatgtggggaggcggaggtagacccttctcctcctccgagcttgcggtggatgaaggcctcacgccgcctctcggcggccttggttcgctgtggctcgatgttggcgtatga

SEQ ID NO: 35347 - DNA, 129 bp, Zea mays
  Peptide Sequence Number=SeqID_78722
atgacgaagctcatttctattttattatcatggaaaaatagaaatgatatcaagttacaaatgtaccttcggcttgagagaaggcaaaagtacaagtgtgacgcaaaagcaaatgtcaagtcagcgtga

SEQ ID NO: 35348 - DNA, 693 bp, Zea mays
  Peptide Sequence Number=SeqID_78723
atgggcgtgcctgacttctgcgcgcttctggcgcgcattgaatgcgcctgcagttctccgcgcgctggcaaccgctccttggtcccgctcgactcgctcctgctccacctcaccgcgctcgcccccgcgccgcggcggtcgcaccagacgccgccgccgccgctgcactccttcctctcccccgccgcgcaggcactggtgctcgccatctcctcgcacctgctccccacgctcgtggccttcctggcctcccgccgcgacgagctcctccgcgccatgggcgagtccaacctcgagatctcccccaatctctccctcaactgcctgggcgaagatctagggcgcgacatcggccatggagagctccagactcacctaccccgaccacttctacaccgtcgcggcctacgccccgcacaaggacgaggccatcgtcgctcgccatctccctcccttctatgggatgagcccttcccgtcctctgtgacggcgacggccgcggctgcgggcggcatgggccagctcctcctgatgtgcagcttcggaggccggatcatcccatgttcaaccggtctgcgaggtagtaccatcgacgaggcttctccatcccctccggcgagctccccttccaaaaaagtggtgaggtatcatcgtcattcacatgcttttgatggatcaaaagcgaccgcatag

SEQ ID NO: 35349 - DNA, 264 bp, Zea mays
  Peptide Sequence Number=SeqID_78724
atgcaggaatcccttgcaggaccgccatcgcagcaaaatcctcccgagggcctccctacactgaccactcccctactgcccttgcccctttcagataataaaagtataatcgtgaacaatgtatcttcatacccaaaaccacataaagcactagcaagtactacccaaaagttcagtggtaaacaagaacatgagtgggtaaaagaagtgatcaagggcacaacttgcctgagacttgagattccaggaactggaatgaagtaa

SEQ ID NO: 35350 - DNA, 213 bp, Zea mays
  Peptide Sequence Number=SeqID_78725
atggagcgactgggagccgggtctgccattgctatggtcgtcgggcgtgggctgcgggatggccatgcctcgagcccctgctctttgccacaattaacccgccatcctgatgcgtgtaaaggaattataaaacaggcccggaagtttgcacagagcaccctagtcttagttaaaatagtgtccacagtccagaggtcatggggaattgaataa

SEQ ID NO: 35351 - DNA, 990 bp, Zea mays
  Peptide Sequence Number=SeqID_78726
atgtcttctcgctcccttatgcatcgtgtctttccaccttccaagcccccggatgggggatacccgccgtcttttcgcctcatcgttggaggaacgcaactccgcgggagttggtacctttcggccatcgttcggcttcaaggattttcatcagccagcccggctgtacccccccgccggtggtcacccaagacggtgaccaccagttcctgggtggggagaagcaagccgggctgcgatcttggtcccaccctcagcttcaaggatgttcatcatcctcgctggggtgggggccgggctgagccggcgctctacctcccgtgcgggttcgtgggtcaccctctcccgcggcgttcgagggagagggcgctcactggccctgcgggcggcccggacttcgacaacgcggggctggtcgacggcaggcgtcgtcacctccagcgtgtcgggctcgccggcttggctcccggcggccccttctgccgaagggcggctgccgtgccgtactcgcctgttgattatctgaaccgcttcaccaagcatgagtcgccccgtgtcaaggtgacgagtgagcatgaacagaggcggagttggctcgaaaatgaaaacctggtcggccggagcctagccgggttgtccgttagcgggaccgacgccggagttgaccagccgaggcctcgggtcgggctggcgcccttgggagatggttggccgaggccccagggcgttgccgtagacctcgccttgactgttggccagcttgtacgttctgggcttcagaactttggcgatgacaagcggcctttcccgggggtgcgtgcagcccccgggtacccccagcaagggctcggggtgctgcgcgatggtcggggtcttctcctggttggcttcgatgccccgtttggagataatgaactccaagaccgtgccctagggcgccccgaggacccacctttcagggttgagcttgacgcttttcgcttcctttag

SEQ ID NO: 35352 - DNA, 384 bp, Zea mays
  Peptide Sequence Number=SeqID_78727
atggagacctcaatcccacgccgccagtggatttggagcgctggccctcaccatcgcggagcggtggcacaaggcgatggacacgcgggagcgcgtgctgtcgtggatttgcaaccgctcccccaatcctcgcccgcatttagcgcccctccctcgctcatccacgcgcacgtagccactgcatcgtcgaccccgaccgccgtcgcacgtccggtcgcgtcggtgctcatggaccttgagcctggcaccatggacgccttccgcattggcccctacggtcagatcttccgcacagacaactttgtctttggccagtccggcaccggcaacaacttggccaaggtgctctacaccgaatgtcgtagtccaaggtccacgacctag

SEQ ID NO: 35353 - DNA, 423 bp, Zea mays
  Peptide Sequence Number=SeqID_78728
atgtcactcggacagaaccaatgcaaaaatccaagtctgcactatggactgtccggaggaaaagcaaagaccgtccgggcccttgcgcggaccgtccggttgctggcgcggaccgtccgcacattgctactgctaggatttgtgggactaaatggctctacaactcaaacatcatcaaggcccaagatgtcatatgtttcatcaccttgctctgttgaagttatagaattttcagcaaggatatggagtacaccccctacacaacaagctcctatgtatctcacatctcgctgctcgaggaagttcttggctggaggttttgactttacggagacttcatgttcatctattttgtcaactgcacctgaggatcaaccaacacttagcgactgccttgaatggtcccatgttgtcagacattag

SEQ ID NO: 35354 - DNA, 1317 bp, Zea mays
  Peptide Sequence Number=SeqID_78729
atgtgcgtggactccaggagacctgcaatgaatctctggcaacaaaactacgatcccgccgggaatatctggctttccagtctgatagcatcgcttcccatcctgtttttcttctttgcgctgattaagctcaaactgaaaggatacgtcgccgcctcgtggacggtggcaatcgcccttgccgtggctttgctgttctataaaatgccggtcgctaacgcgctggcctcggtggtttatggtttcttctacgggttgtggcccatcgcgtggatcattattgcagcggtgttcgtctataagatctcggtaacaggtatcgacagctttgagattggtcagatggtggggcggcagctaccgtttatgaccattatcgtgctgttctggatcatggcgattatggacggctggcgcggtatcaaagagacgtggcctgcggtcgtggttgcgggcggctcgtttgccatcgctcagtaccttagctctaacttcattgggccggagctgccggacattatctcttcgctggtatcactgctctgcctgacgctgttcctcaaacgctggcagccagtgcgtgtattccgttttggtgatttgggggcgtcacaggttgatatgacgctggcccacaccggttacactgcgggtcaggtgttacgtgcctggacaccgttcctgttcctgacagctaccgtaacactgtggagtatcccgccgtttaaagccctgttcgcatcgggtggcgcgctgtatgagtgggtgatcaatattccggtgccgtacctcgataaactggttgcccgtatgccgccagtggtcagcgaggctacagcctatgccgccgtgtttaagtttgactggttctctgccaccggcaccgccattctgtttgctgcactgctctcgattgtctggctgaagatgaaaccgtctgacgctatcagcaccttcggcagcacgctgaaagaactggctctgcccatctactccatcggtatggtgctggcattcgcctttatttcgaactattccggactgtcatcaacactggcgctggcactggcgcacaccggtcatgcattcaccttcttctcgccgttcctcggctggctgggggtattcctgaccgggtcggatacctcatctaacgccctgttcgccgcgctgcaagccaccgcagcacaacaaattggcgtctctgatctgttgctggttgccgccaataccaccggtggcgtcaccggtaagatgatctccccgcaatctatcgctttcgcttgtgcggcggtaggcctggtgggcaaagagtga

SEQ ID NO: 35355 - DNA, 239 bp, Zea mays
  Peptide Sequence Number=SeqID_78730
agtatctggacttatttgtcggtaacagggatgaatgtgcgagcgagagttgcttctcgcggaaggtgatgaatgagccactttatccgaacgcgagttacttatcgcagaaggtgatgagtgagccgaagcaccaggtcgcccacctggaggtctcggggttggacccctcgggcgtggccctcgtcctcggggagccgtattccaggtcagtgggcaagacggcctcggccccgtag

SEQ ID NO: 35356 - DNA, 423 bp, Zea mays
  Peptide Sequence Number=SeqID_78731
atggtattcttccttatctccgccgccgtgaatcacaccctgccgtggccagccctccacaggtctgctcataccctttttgttcctgttctagcatctgtgcatgctgaaaacgaagaagagattgaagtgaccgaagagaagacaccaccaccctttgaatctcaggtttttactatgcttagtattgccttagcaaaaacaaaaggttttgttttacaaaagatgattggcaaagtgggtgggatgttttcgaaaataaaacttgatggtggatccatcagggccttgatgggttcaacatcggaaaagatgtacctctgccaggtgaggaagcagcaaatttttgttgcttttgtaccaaggtggttccaaatgaagaaaaacaagagtgaggctgcgggaggacatggtcctccataa

SEQ ID NO: 35357 - DNA, 339 bp, Zea mays
  Peptide Sequence Number=SeqID_78732
atggcttaccggagagctcggtccacgcgcgggggcgggcgaccgaagtccggcgagggtgatctcgggcttccggtgaagttctgccgggtccgaggacttggaaagcttcacgggccaatggcgaagctaactgaagcgctggcgcgacttggacgcgactggagagagctgaccatggcggccgaggctctgaaagcttggcgggtggtggcgcggcgtgctcggggcgatttccgggcgtgttcaagggaatttggcacaactttgatatttggatctcctggttttgagtttcgaaaaacagagaacacagttgatccttggaaggaggtctga

SEQ ID NO: 35358 - DNA, 1299 bp, Zea mays
  Peptide Sequence Number=SeqID_78733
atggagagggctccggctacccgcctcttctcaccctccaggattccccatatcttgctttgggaggcctccgtgggaacctcgggcgagaaagggcggaggtggatgcttgcacacctgatctgcgccgactccactgatgtgcctagagaaggccctattgagatggtgttgctggatctggtagtgatgaaggaggcctaccaagaaaggaagaccgcaggcgatgagggcatccaaattactacgctcaatcgaagagtgatcccagaacgccatggacagggaaggaagaatggcggtggtgagtggtcaggacgagaaaacaagagcgccgaaggactcggagcggcatcggaggtgcaaagaatagggcctggtgttagaggaccggtgagggggttgaatcgtgtggactccgacacacaaaacgattgccaccccaccacccaaggtgtgcatcccgagaacgacctggttgaagagcccgaggaactcacaggagaagcccctgagcagcagctggttggtggaggcaaagatgttcggattacaggtggcaatgagaatgatggttttggtattgattatggtaatggtaagtggtattctttccgtctggaaagggagcaggagcagcagggctcttctttctcgctccagcaggagatagagtctgtgaggagctgctcccccgtgcttccgctggaggcgccccctgcaccaccactgagcgccccaacccctggagtagctactggaggagacccagacgacggaggtggcaacagcagctcgagccacgacaccgacctttccgccgaccaggagttggaaggatgggttgctcgacccatcactcgcgacgccgctcgcggcaccgtcacggggtctactcggaccgctgggaggcgacctgcttggtgcaccgtccggagaacagtcttcggggtgcggagtggggtagctgatggtctcaacctgaagtattacccccgccatccatctggcagcacaggaggcgtgattgtctcacctattagtgaggacaatcctaggttgagcagcacattcaacctagccgccatgctaaacacggagctggaccatgcgctagacgagctgagtagggctcgtgctgagatcgcccagctgcgggctaagcgcgtggagcatcgtcatctggatgatggctcccccgctcccgtcgggactcagcacccgtaccgctcacctcagcgtggacaccagtcttatggcaaccccgactgtaagaccaagataaatttagaaccatag

SEQ ID NO: 35359 - DNA, 660 bp, Zea mays
  Peptide Sequence Number=SeqID_78734
atggaggacttgggtaacatgaccccaaccattgtgattggaaaaatcgcggcttttgagatgtcgcgaaaaatgtgtcggggagaggagccaacttcctcaaggccatatgctttttcatgtgatgaaaggatgggcaaaaagaaggctcccactccaagttcctcaagtgaagaagaggaagaggaagaaagtgatgatgatgaagataatcaaccatgcacatcatcctccgaggacaaagagacaatccgacgcgtcggaaaggtaatggggatgatccgcaaaattaatctaatgggtgtacctctgcaggtagaggatcttctctttaacattgacaggaaaaagcaaagaaagagaggatgcttcgcatgcggggagaagggccacttcagggattactcgcggcggccgctcctctcttctctctggttaatggtgcacggcggtggattcagtggtgggagcacggggaagaagtgggcgagccccgcctttatccacagagccatcggggttgagaacgtggcgagcgactccggagaaaggggaaagaagaccgcgctgcctgccatggtcgggattcagttggcggtgaagatgaacacgctgacgcgcgggcccgggtttccagtgagccgagctatcggcagctga

SEQ ID NO: 35360 - DNA, 336 bp, Zea mays
  Peptide Sequence Number=SeqID_78735
atggtgcacggcggtggattcagtggtgggagcacggggaagaagtgggtgagccccgcctttatccacagagccatcggggttgagaacgtggcgagcgactccggagaaaggggaaagaagaccgcgctgcccaccatggtcgggattcagttggcggtgaagatgaacacgctgacgcgcgggcccgggtttccacaaattacaaagtgggtgttacaacctggtagggttctatcttatatgcctaaacttgacacttcttcagtgactaagggtaatagggtatcacttccgggatggtacattggcttgtggacaaaaggttgccaatga

SEQ ID NO: 35361 - DNA, 483 bp, Zea mays
  Peptide Sequence Number=SeqID_78736
atggcgaggcagcatccatggctgcctgtgcgggttcccttcagcgtgaacaaggtcgaggcattgtacaggttgttcaagaagatcagcagcaccttcattggcgatgggctgattaacaagataaggctagatgaggtggctatatctcacatggataccgtgtctccgcccgccgtggttggacggtcgtgcctggcccctcccccacgagattgccacccctcccgcctcgctcgtcgcagtgctgcccccggcgaggctgccgaaattgtcaccatcctccaccccgctcgctatggcgagtctcatgaggcactgaaatgtgtagatgttttcaaggagttccatcaaacaagaacgaagcacatgaagctgacatggatgggaacctgcaacgtaagtgcgaagtttgatgctaaccctattgagctcgttgttatgacatatcagttcacaggatgcaagatctacttggactaa

SEQ ID NO: 35362 - DNA, 1287 bp, Zea mays
  Peptide Sequence Number=SeqID_78737
atggcgagctactcgtcgcggcgtccatgcaatacctgtagcacgaaggcgatggccgggagcgtggtcggcgagcccgtcgtgctggggcagagggtgacggtgctgacggtggacggcggcggcgtccggggtctcatcccgggaaccatcctcgccttcctggaggccaggctgcaggagctggacggaccggaggcgaggctggcggactacttcgactacatcgccggaaccagcaccggcggtctcatcaccgccatgctcaccgcgcccggcaaggacaagcggcctctctacgctgccaaggacatcaaccacttttacatgcagaactgcccgcgcatctttcctcagaagagcaggcttgcggccgccatgtccgcgctgaggaagccaaagtacaacggcaagtgcatgcgcagcctgattaggagcatcctcggcgagacgagggtaagcgagacgctgaccaacgtcatcatccctgccttcgacatcaggctgctgcagcctatcatcttctctacctacgacgccaagagcacgcctctgaagaacgctctgctctcggacgtgtgcattggcacgtccgccgcgccgacctacctcccggcgcactacttccagactgaagacgccaacggcaaggagcgcgaatacaacctcatcgacggcggtgtggcggccaacaacccgacgatggttgcgatgacgcagatcaccaaaaagatgcttgccagcaaggacaaggccgaagagctgtacccagtgaagccgtcgaactgccgcaggttcctggtgctgtccatcgggacggggtcgacgtccgagcagggcctctacacggcgcggcagtgctcccggtggggtatctgccggtggctccgcaacaacggcatggcccccatcatcgacatcttcatggcggccagctcggacctggtggacatccacgtcgccgcgatgttccagtcgctccacagcgacggcgactacctgcgcatccaggacaactcgctccgtggcgccgcggccaccgtggacgcggcgacgccggagaacatgcggacgctcgtcgggatcggggagcggatgctggcacagagggtgtccagggtcaacgtggagacagggaggtacgaaccggtgactggcgaaggaagcaatgccgatgccctcggtgggctcgctaggcagctctccgaggagaggagaacaaggctcgcgcgccgcgtctctgccatcaacccaagaggctctagatgtgcgtcgtacgatatctaa

SEQ ID NO: 35363 - DNA, 663 bp, Zea mays
  Peptide Sequence Number=SeqID_78738
atggcgcatgccgaagaggttaaggaccttagcgatctagacaacacgctgcccgacatctcgctgccggaggcctcagggatggagctggcgctaccgtctgatgcgggtaagggcccctcgtcgaaccccgcgacgactggagatggcaaagaccccgcgccagcccccgcgccgacgggcgaggacaccttgaagatggtggtcgaaccggctactgaagaccctgcagccgtggctgggccttcgcaggttccgacgtttgggcctgcgcacgcaaccgctactgacaatactatttttgtggcggcctcaactgtagtgcctgctgatgatgattcaggagcttcggatgaaggcttggattattttgcagcattagatgtggatgtagcagagccttcgccgcgcgtggaaggttctggtggtctcccgggtgtgaatactaggtataggcggcgaagggcggtggcgaaacagagagtgagtgaattgtcgcaaagtggtaggcgtcatcgtattgggatggagcgtggccgtcttcgcgtggaccagactggccttcgtttgagcttgatatttgttgagggcctgcagggcgaagacgcggtctccgtcgatgaggtctttggacgttggttcgtctacgtcggagatggttga

SEQ ID NO: 35364 - DNA, 756 bp, Zea mays
  Peptide Sequence Number=SeqID_78739
atgaagtggaagacggggcagtgcggattgtggggcgttatgtgccgagggctgaggctctgcggagttgggatatccgtggatccaacgaagtctttggcaggtgtgaaggctactgcttctggcgcgggcaagccacccttgggcgagctggcgaaggggcgaaggttgccctcgccgtcgcgtactgacgaggcggcggcacgtgttgccgacttcgacacagatatctgcgtgggggattatcttgttgggttggatgaggggcaactggctgttgtcccgactccagtggtggctactttgccgacggcggcggttggtgcgaagggtgcttcgcaggacccgtggtccgccttccgcgcgagcggcgcgattccatcggccaccatcgctaaggacgtggtgggctccatgtcccgacaactgaggcaagcgtcgcagcagttgtcacagcagctgaagcatgcggccgacttcgccgaccatgtcgcgtcgggtgctctgactgcggagtttgctgccgaagtcgagcgtctccgtgcgcagcatgcagatgctgttcgggagaagtcggctgcggaaagtaaaaaccacaggctgacgaagaggttggccgctatggaggctgagaaggcggatctccggtgccagctggtggaggagaggagggaggcgaacaaggtcgttgctgatacgcaggctgcgcaagccgatgctatgcttgcacgggcggagggcagtctcgcctgctaa

SEQ ID NO: 35365 - DNA, 111 bp, Zea mays
  Peptide Sequence Number=SeqID_78740
atggggagtcatgatccccgggcaaaacgggaatcacggctcatgggtaaagaagaaggcgtcgaggtggatctccgggagttccaggacttcggcgagttcgaggattag

SEQ ID NO: 35366 - DNA, 453 bp, Zea mays
  Peptide Sequence Number=SeqID_78741
atgggtcctatgggtgtgctactaacgctccctagccgaagctgtgttcaggtccaggtcccagtcaaggctgcctcctgggggccgttgccaactcttttaggtatgctggtatccagcctcgacacgtcaagcctatatcctaggggggccaggtaccagggaggagtcggcagcgccacacacaacaaggacaatagtatgacctactcgacatcagtagggtcgcgctggaagcgcgcggccaccatctccacggcgtacaacgtcttgtacgaccccccgggcggcgtcctcagtagccaggccagcggtcaacattggaggcggcaccgaatccatcaaagccaaagagatggagccgcagcacggctcgcttcccaccccaaggagttggggcgcgagggatggagccgcaactcagtccgctgtccaccttcacgaggctggtga

SEQ ID NO: 35367 - DNA, 1476 bp, Zea mays
  Peptide Sequence Number=SeqID_78742
atggcccaaaggcacatttccctttcatgcgcggccagaggccttacatctggctctgcccgctggcttacattacgggcactaggccacgtggaagcatcgggtctccgcgctgagcagggagtgggagcgctcgcggtatggtccggacacgtgtcagcaccggaccctcgcctgaccttgattaaagcctgggtattctttgccttggaatcccgggaccccattgtgagtaggggtccggatcccgtcccaggggtctggtttgtacctgcggaggtcttgaacctcgcccggaggtccgggctgtgcatccaggggtccggcactttcccgtgggggtttggacctaccgtcgccaccttggagtatatcgtctcctttgaccacgtggcggccccggagtcgcccacgtggaggggtcgggtgctgttcaccgcggtactgacagtggccctcgggcccgcctcaggggaggatatgagcctgcagatggggccaaagctggaaccgacgcccatggaggatgactcgtgggcccgggcccccgtgtcagagactgggctattggttttggcggaggtgaagaggcgcactaccgcagacggtggcgtgctcctcacgcgatggttcgccttctccgcacacggaggccgacgcctaaggagtatgactcgtgggcccgggccccgtgtcagaggctgggccgctgctttcggcggaggtgaagaggcgcactaccgcagacggtggcgtgctcctcacgtggcggtttgccttctccgcgcacggaggccaacgcccaaggagtatgactcatgggcccgggcccccgtgccagaggctggttcgctgctttcggcggaggtgaagaggcacactaccgcagacggtggcgtgctcctcacgcggcggttcgccttctctgcacatggaggccaacgcccaaggagtatgactcgtgggcccgggcccccgtgccagaggctggcccccgtgccagaggctgggccaccctggcacatgtcgggcgagatctttagcggcgtctcggggcgtcagtgggggaatccttctttaaaaagggactcccccgagcgtgccaccatggccttgctagatcctcccgagtgcctccagcccgaggtggcactcaacttggtgcgcaacctgctcggatggggtgtgtcggcgtttgccggaaagatctgtgtcggtgcctctcctcacggcgatctcgccgctggagagtttgtgttcttcgtctccaacctccctagtgggttggcgctgtcgatcccatctttcttcgtgctgctactagaggggcttggcctccaacctctacacattacgccctgcttcatccttcaggcggccatcatcgcctacctccataggatgtccgtgggggagacgctccttcccgcttcttcctccagcattcggggggaaggatgttcaccagcctcgtga

SEQ ID NO: 35368 - DNA, 354 bp, Zea mays
  Peptide Sequence Number=SeqID_78743
atggggatcagtcggaccccgaaggcggcagttacgcccacaacgctaggcacctcccactactaccccaagctcctctacatcaacggaggagtagataatgatcccatgtccgacgacgagccgactctactgggggaggagccccgcagcgtgaagctcgtcgccgcgggaatcgttaaggcaacatccaaagacaccatgccaccggaggacaggatccaactcaacctgtttctcgggacgagacgtccgaggatgacaaaactcccgtggagcggggattatgtatgcaaaggaacactcatcggcgtcagccccgagccaccgaagagcgtggtcacgagctggtag

SEQ ID NO: 35369 - DNA, 1011 bp, Zea mays
  Peptide Sequence Number=SeqID_78744
atgtacacctatagtcatgatgctaatacccatgaaatttatgttcaacatattgctcgttatgatcctattcttccttatgcttctttcgaagttgttagtcatgatgttgatgtttcacatcaaagagagaactcttttggttatgattgttgcaagcaatgtgatcttagagttactaattcaaaagaaacaaagcttttgattatgatcactgcaatcaatatggtcatggaattatcaactagtatggcattttcaagcgatggtgtcattgtgttccatacttctactaggaaaattaacccttacctcggcgccatcactattagcgctgaggttacacgtctcggcgccaatataaatgacatcgtggtttctaataggtacaagatgccccaaccacctcttgactgcacccaacaaacacgtgcatgtggtctgtcgcataaaaacagggtcgccactcgccgaactgccacctcgcctctgggattcgccaccgctcactggaggatgcacgaagcgcgccagattggaggatgtcacagggcctgtggtgtggatggcgaaccacgcccgcctttggggagcagtcgccgccgcacctatgggaagccatcgacgtcgtgcctccaggctccagatcagggagccgctgtcattgcacctccagatcgaggaattgtcgccaccgtgcaaccggatcggggggccgctgtcgttgtgccttcggatcgaggaatcgctgccatcgcaccatcggggacctaccgccgccgtgccaccagatcaaggagcaactgtcgttgcgccttcggatcgaagagccaccgctgttgcgcattcggatcggggagccgccgctaccgcgcctccggatttgggatcggccgtcggtcgcacgaccagaggccaccgccgcgcgcaccaaggtgggcgaccgtcgctcgtgtatcgtggtgggggcgtaaaaaactgaaccatagcggcctggggctctttttatag

SEQ ID NO: 35370 - DNA, 183 bp, Zea mays
  Peptide Sequence Number=SeqID_78745
atggtcgaatgcgctgactgcgggaacagtaaacaatgcagaagtcagaagtcagaactgaaaagtcagaacgcatcggactctccggtgtgccaccggactgtccggtgccgcaagaggacaaaggacttcaacggtcaacaactccaaaccccaacgggtcttagtgacacttgtgattaa

SEQ ID NO: 35371 - DNA, 336 bp, Zea mays
  Peptide Sequence Number=SeqID_78746
atgaagaaaaagaggagtgaacggctgaggcaatctatactggaaaaagttcaggcaaagcaatttgaggcactggcctcagttgaggacaagatactcagaaaaataagggacaaagaggcggaagtggagaccataaacaaaaggaactctgaactagaggaccagattaagcatttgggagtggaagttggtgcttggcagcatagggccaagtacaatgaaagcatgatcaatgcactcaagtacaacttggaacagataatgggaaaaaggttcccggcctacatcaaagatgacggccgtccaaaaaacagtagtactgccagaaaataa

SEQ ID NO: 35372 - DNA, 180 bp, Zea mays
  Peptide Sequence Number=SeqID_78747
atgcacttcaacccgttcaatgtcggtaacgcgtcacattttgatggtgctacaacagatgggttgtacttgatagaggttgatcgtatcctgcatcctagagagcagaaagccattgaggcagttgtcaggagcctcttctggaagaagatcaaggaggagggcgacattgctatctag

SEQ ID NO: 35373 - DNA, 441 bp, Zea mays
  Peptide Sequence Number=SeqID_78748
atgggcaagagcaagaaaggcggaagttcatcgcaccactccggcgacaagcggaagcgcgagctgagtcccccttccgaggacttcggtgactccgagtactcggaggaggagttctccttcgagtccgagggatcgccagcctacgcctctcccccggtgtcgtccgatgactcggacaattcccaggggatcgccgccgaggtgtggacgtacatctgggccgtcgagcgctccgggctcgagggcttggatgagttggagatctcctcggacgaggaggactcctccgactcatccgaggaggggagcggtgatgacggcgatgacgagggtgacaacggtgacaagggcgacagtgatgtcggcaagggcgacggcggcaacggcaaggacgatggcggcagcggcagggccactggcaaagcgccactagcttaa

SEQ ID NO: 35374 - DNA, 639 bp, Zea mays
  Peptide Sequence Number=SeqID_78749
atgggaaccatcgtccacggcgggcggagcggcatgatgaagcagctcaacgtggggggcaagctcttctcgctggaggcaagctccctttccctccccatgtctatcggttccccttcccctaccccaacattcgtggaccgcgacccagccctcctatccgccgtcctcgctgccatccgctccccgtccaccgcagcgcccgacttccccgcgcgcgtcctcctcgacgaggccaacttctacggcctgcacgcccagctcctcgctgcgctatctccgccgccgctccgcggcttctcagcctccctcgcctccaccctctgcccctcctccgagcccttctccaccgcccttgcgccgcaccacgacgggtcactatgcctcgcccatggcgccgggctggtcacctattactccccagcgctggatcaccgcgccaccattcggacccacctccaccgcgtcacctccctcctgcagctgccctccagtctcgccgtccttgggagattggccggcaaagtggtagtgcggctaagtcatcggcaccaggtcgagtggtgcacctgcaggcacttggtctggtgtttgcgtcattcgttagttccggggcatttggctactctggctatatga

SEQ ID NO: 35375 - DNA, 237 bp, Zea mays
  Peptide Sequence Number=SeqID_78750
atgggattcaaacctgtgacctctcaagcaaatgtgctcgtagctaccactacaccacatgaggcgctcgcgttggcgtcgctcatcgacgacgagaagaagcttggcgactgccagttcgacctctggaagcagtattacgtggccacatgcgtcgctgtgttcggcaagctccggcgcagccaccgcttggacgcggtccagagcggctgcatcgcgctgtccatcttcaaatag

SEQ ID NO: 35376 - DNA, 1101 bp, Zea mays
  Peptide Sequence Number=SeqID_78751
atggggagcgcctgcgttgccttcgtcttgctgctgttggaggagcgcgacctcgcgggggatgatgaccaccagttcggtggtggggagaagcaagccgggctgcagcctctgccccgccctcagcttcaaggatcttcatcatccttgctggggaggagggcggggcaagtcggggcctgcctccgcgtgggccggcgacccgcctcttcctccggcattcgggggagaaaggcatcctccagctctgcggaggaggcatcctccagccatgcgggggaaggcgaactgctgcttcctggacagggtgcaactgtccgtcctccacccgggcgacggccctgtcgcgcgcgggcctgctacgtccaggtcctccctgcgccgtcggctgcacaacacgtcgtacgctgtgagggcggtactcgtgttctaggacggtcccgttctcgttcttgtggcgagaacgggagtgaggacctgtcggtgcgctttggggcggccgtcgtccgctggtgcgttgttggtgggcaggtggctactgtcgttggtgccacctgcgctccgggcctccgactctttggctttaatggctggttctcgtcccccgtgaggggacatgaacgagggccttccagcggtagcgtttgccctggggccatcgctgctgctgtcttgccgtccgagacggaggtcgctgccgcgctgttggtgcagcggtcgccggtgagccacccggagtttgttgtcccgcaggccctctgttatagaaccttcggccgctctgcgatgagccggagccggaggcagcggcgtcggtgtggacagaaggcggagttggctcgaaaagaggcttcgtcggcctgggagcacatggtttccctggccgaggagctggctgatgctacggagcggccagccgaggcgtccgctttgggccggaacccttgcggagaacctgactgtgggggcccgagtgcggtgttggcgtcctcctccgaggtggagatccttctgcccgagtcgctgtccgaggctgggccaggatctgccaagggtggaaacgacgccgagggtgctactgctccctctgccgatgtctga

SEQ ID NO: 35377 - DNA, 978 bp, Zea mays
  Peptide Sequence Number=SeqID_78752
atgtccaccgcccgggggatcgccccctttttaaaggcggctctccccactcgcatcctcgagcgtcacgggcgaagtcttcaccaacatgcttcggggtcctccccctacgacacgggggctgggtcccacacgtcatgcaagctgacccgaaacagaaaagccaaaccgccgcacgcggagcgtgtaaccgccccacggttacaagcactcctccatcgccgaaaccagcggtcgaaagggcgtactgccatacaggtggtgtgcaaccgcaccgcagtgacgcaccccttcggctttgttgcatccggcatggaggcccaggcccacacgtcatggatcgggaaaggggatatttcagaagggatccttctccgcgaaggaagcgggccccgagccctcctactgatcaggggttcgaaggctggcccctcggaagggggttcaaaggctggcccctcggaagggttcgacagctgccctagagcacgcatagcgagtgatgactctgggtacgtccgttacatggacgaggctcgggctacgctcccgagtcggcaaggtcgaagtgaccacagtcacttcgccctttcactgaccgacctgacaggaaaacagcgccgctcgctccgctccgactgctgtgccacccaccaggatgaggctgacaatagccaagttcagcatcaggcgcaacaggaagctccgcctcgcccgaccccagggctcggcctcaacctcggcctcggaaggtggtctctgcctcacccgaccccagggctcggcctcaacctcggcctcggaaggtggtctctgcctcacccgaccccagggctcgacctcaacctcggcctcggaaggtggtctccgcctcgcccgacctcagggctcagccttgggagaagtctctgcctcgcccgaccttgggctcggaccgaccgcgccatggggatacatcattaccctacccctagctag

SEQ ID NO: 35378 - DNA, 606 bp, Zea mays
  Peptide Sequence Number=SeqID_78753
atggatctgtcgagtcgatgggcggaaccgctgaaggaagcagaaggcgaggtggatcaatggatggcgtattggtgtcgcatctcgcctgcgtgtttgctgcgggtcgcggtctgcgcggccgcgggtgctgccgcgttggcaggcagtgctgatgggaatcgggatggactgcatccgctaggcctctccatcgaccagcagacacatttagtgaagatttgttctcaggttgatctgtgcaattttgatggcactcatggtgtcaaattcagctctgatgatgctaaggaggtagtccattaccaaacaatctcaccaaagagcttagctaaatctgttctcgaggaaggtggctggtcaaacttcatgtgctcaagggaggatactcagaataatgttgatgttgccattgtttttattggctcaaagctgcaatcgtcagacatatctaaagataagcaagttgatccagctttagcagacacactgaagccttggagtctggagcaaaaaaagggggtggctgtattctcaaggaacatgagaccactgagctctggagtgaatgaaggacgtcgtctttggaagtcagacatcacctag

SEQ ID NO: 35379 - DNA, 264 bp, Zea mays
  Peptide Sequence Number=SeqID_78754
atggagcaccgtcccgggccggagaggttgctgaagactgcccatctggagcttgacgggaagctgttcgtcaacacgcagcaggcccctacctggcgcgccaactgtcggcgtttcgagaccggggggtccctgggccgacgagtgaaatgtcgccgcgtgccccagcccagatgggtcggcgtgaggccgagcgcgaaggggaagcgtaaggagaggatccaggtgtacaatggggggtgtagcaaagcgctacgtgtctag

SEQ ID NO: 35380 - DNA, 468 bp, Zea mays
  Peptide Sequence Number=SeqID_78755
atggatggcggcaaccactcccgcagcggtgagtcccccctcccgcaacactttcagggcctggagaaggggttcgaggttcttctgtctctcgtgcggggtcccatgacgctaggcgtcggtggcggcggtgactacccgctgggagaacggtgggagcagctcaccgtcattccggagggaccgggaaaggcggatcccccgaaagggatccttccccgtgaaggaaccaggctccgagcctccttactgatcaggggttcgaaggctggcccccgaagggttcaacagccgcctcagatcgcgtgggccctacacccactactggtcagaggttcgaaggtcggccccccgaagggttccacggccgcctcaggctactcgggctccgtgcccattactgatcaggggttcgaaggctggcccccgaagggttcacagtcgcctcagacgccgagcgagggatga

SEQ ID NO: 35381 - DNA, 738 bp, Zea mays
  Peptide Sequence Number=SeqID_78756
atgacggatgcggagaaggaggtagcaacagaaagacggatggactcaccgcctcgatgcgattgtggagaccgtgctgtcatcgatgaagactatgagaaccaattctgttgtccgaacattgattatccatacgggtggcgtaagtgtcgtttcagagagtggttgtatggtcctttgtcccattggccagagccagaggtaaaggaaaagagatacaatcagtggcccgaagaagaggtgaaatttgatccagtactctgcaaatgtggtattgaagctaagtatggattagttccttccgagcttggtgtagagtataagagggaagcaaaatctgccttttatgaaagcccgaagcgtgcagagtataggaggttgaaggcggcagatgagaagagagcacaagatgcaagagaatgggaagcgactcaagccgagaaacagatgttggataatcttgctgatcgcctcaagggaacggcagcggccgggtcgggggcgcgcggcggccggggcgggaactggcgcggcggccggtggccgggccgggccggggcggtggcgcggcggcaggcgcgcggcgagctcggcagccgctgcctggcgcgctcggtgggcggggcgggcggcgcggcgatggaacggcggcgcggtcgctcggctatggcgaagaagaacgaaaacgacgggagcgagtggaaggaagaagaaacacggctcgactcggacgcttaa

SEQ ID NO: 35382 - DNA, 573 bp, Zea mays
  Peptide Sequence Number=SeqID_78757
atggaggcccaggcccacgcgtcatacaaccggcgcgccggttgctacgtgcgagcaattgcaccgccactcgcaccactaccacgcctcctcgactgcggaaccagtaccgcgactcgaggcaaccctgcgtatgacccagcagtgtcagccaggcgcgacggtcaatacggccaaaaatgggccggcagtgatggcggcggcaggcgggcagaagcagcggtcacgtcgtcagccaggctcacgagaagcgagcgacgcttcgccttcgccataatgaccgcgtcaaaaaagggaccgggaaagggggataccccgaaaaggatccttctccgtgaaggaaacaggtcccgagcctccctactgatcagaggttcaaaggctggcccctcggaggggttcaacggccacctcagagcgcttgggttccgcgcccactactggtcagaggttcgaaggtcggcccctcggaagggctcaacggccgcctcaggccactcgggctccacgcccactactgatcaggggttcgtaggctggccctcgaagggttcacagccgcctcagacatag

SEQ ID NO: 35383 - DNA, 813 bp, Zea mays
  Peptide Sequence Number=SeqID_78758
atgtcttcgcgctcccttatgcatcgtgtctttccaccttccaagcccccggatgggggatatccgccgtctttccgcctcgtcgttggaggacgcaactccgtgggagtggccagcccggctgtacccccccgccggcggtcacccaagacggtgaccaccagcccctgggtggggagaagcaagccgggctgcgatcttggtcccaccctcagcttcaaggatgttcatcatcctcgctggggtggatgtcgggctgagccagagctctacctcccgcgcgggttcgtgggtcaccctctcctgcggcgttcaagggagagggcgctcgccggccctgcgggcgggtcggacttcgacaacgcggggccggtcgacggcaggcgtcgtctgcctcagcgcgtcgggctcgtcggcttggcccccagtgccccctcctgccggaaggcggctgccgcaccgtgtgcacgggaggaccgcccaagatgtcgcgcgctgctagggcagcgttcgtgttctggggcggtcctgcctttgcaccggtacggtgcctccgcggggaggtcggtgccctgctcgtctgggaggatccgagtggggatctgctggtgggctgacggcccctgttgtcggtgccgaggcggaggcggctcgagaagtccccgtcgccgacgggatcaccgccaccatccgcgcttcgggcctccgactctttgtacttgtcctcgcccctcgagcgtcggcgtgggtgagggcaaggttgcagcagcgttcgccctgaggccatcgccgctgcagtttggccacccgtag

SEQ ID NO: 35384 - DNA, 585 bp, Zea mays
  Peptide Sequence Number=SeqID_78759
atgcaagccggcttagagcagaagaagccaaaccgccgcgcgcggtgcgtacaaccgcccagcggttacaagcgactcttcgctttttcccagaccaacgggcgaaaggggcgggcagccatgcaggcagcatgcaaccgcgccaagtgggcgggcaggagcagcggccgcgtcgtcagccaagctcacgtcccgtccgggggcagcgagagaaccctctcgcacggcgtgaagacaacgcgctcgagaagcgagcgacgcttcgccttcgccataatgacagcgtcaaaaaagggaccgggaaagggggataccccgaaaaggatccttccccgtgaaggaactaggctccgagcctccctactgatcaaaggttcgaaggctggcccctcggaagggttcgacagccgcctcagatcgcgtgggccctacacccactactggtcagaggttcgaaggccggcccctcagaaaggttcaacggccgcctcaggctactcgggctccgcgcccattactgatcaggggttcgaaggctggcccccgaagggttcacagccgcctcagacgccgagcgagggatga

SEQ ID NO: 35385 - DNA, 168 bp, Zea mays
  Peptide Sequence Number=SeqID_78760
atggggtccaggcacagtgcttgctctgccgaggctgagtggcgaggtggtgacaaggatgatggttatgactatggtaatggttgtccacattgtaaccactgctcaggagaagatgaagccgtggaaggagacttccaggagttccaagactacgacgagttttag

SEQ ID NO: 35386 - DNA, 330 bp, Zea mays
  Peptide Sequence Number=SeqID_78761
atggagtctgctctccacttctcaagtgtttatacagaaccgaagtcgccgtggtccgccaccgtcgacttgggctaccgccgcgccttcgccgcaaccgaggagtccccggagttcgccttgagtcctttagcgccaccgccgagccgcttcgccgtgggccgcccccctccggtgcccctgtcccgacctagtccccaccggaaggttccccgagccctccccaatctccccggccatccaggtcgccccaaggacccgcagagcccccgcgcccctcatctccggcgagttctccgccgcgggaacaggcgctgccacctctgctag

SEQ ID NO: 35387 - DNA, 399 bp, Zea mays
  Peptide Sequence Number=SeqID_78762
atggacactcattgggggaattttcattcccagttccaaatcagaaaagcattcagccaacagaccgccgacacgcgcaggtttcctcggcaccaggaggtgctgcgctacatccaggcctttgcgcgccgattccaacttgacggcatcatccgcctctgcacggaggtgctcgccgtcagcaaggacaacgacgaggggagcagtggcggctggatggtgaggtggcgccggaacgtagtcggagacgagtccgagcaggagcaggagggggaggaggtgtttgatgccgtcgtggtctgcaacggccactacacggagccgcgaaccgccgccgacagcatccccggcctagacgcctggcccccgggcaagcagatgaggggtcagcgacggtag

SEQ ID NO: 35388 - DNA, 414 bp, Zea mays
  Peptide Sequence Number=SeqID_78763
atgcaggcagcatgcaaccgcgccaagtggacgcgcttctccgactcccgacacgccagcatggaggcccaggcccacgcgtcacgcaaccggacaggcggcgcttccggcgggagcagtgggcaacgcttcgccttcgccgtaataactgcgacaaaaaagggaccgggaaagggggataccccgaaaaggatccttccccgtgaaggaaccaggctccgagcctccttactgatcagaggttcgaaggctggccccccgaagggtttcaacagccgcctcagatcgcgtgggacctacacccactactggtcagaggttcgaaggccggcaccccgaagggttccacggccgcctcaggctactcgggctccgcgcccattactgatcaggggttcgaaggctggcccctga

SEQ ID NO: 35389 - DNA, 396 bp, Zea mays
  Peptide Sequence Number=SeqID_78764
atgagcgggaaaaagaccacggcttcctctgacgacggcactccaaagaaagccaaggtggtggtggaggatgaggaagaggcggggttggaggatgaggaagaggcgactgtgacactatccatggagaaggacgcgctggagtgcgacatccagtccgaagttttcatggcaagtcagattaccatgcatgtatatatacagtacatattgatcgtgcaagaacggacattctggatgtgcaaagtgctgcatccgcacggacggaacaactacatgcttcggtttgtcggtgcttttcttctcattgttagaaatgatctgttcagcatagaagacctgtgcagcatgattagcaaggatccatgggtcatctttgtaacctaccttacttag

SEQ ID NO: 35390 - DNA, 1152 bp, Zea mays
  Peptide Sequence Number=SeqID_78765
atgttgacaaaagaatcctacggacgagtaagggtacacgtaagcgacaaggccgaccgagccgagggactcctatgcctccgggatacggatacctcactcgtcaccttccgtgagaagctcagatgtcgatggagagggagcagcagcaccctcggcgtcaactccaccttcggtgaagtccgaccgagcctcggacggcaacacgggcgaaggatctccgaggcctcgggggctacaccgaaggatgacgtcagcaccatgcctgggccatcgccgctagggtctcctccaagaacccggcccgagcagacggctcggccagccgccccgaagcctcagccagctgtcccccgaggacaccagcctggctcatggcctcggcaacccgactccggcgctggtcccgccagtggacggcccagccaggctccggccgacgaagctccctttttcgagccaacttcgcctctgtccgtgctggcaccgctccctccggctccggctcatcgcagagcggccgagggcctcgacagccataatgaacaaacaccagcactcaaggtgccattacaaacggaactccggttccgcccccgcgggtataaacaacctccacatcggagagcctgcgggacgatagactccgggcgactcgccagcaacctccacagcagcagccatggtcccaggacggacgcggccaccggagggctctcattcgcgtccccgctcaagggatgcgaaccagatattaaagccaaagagccgaaggttggtccacgggtggcgctaacggtctcgtcggcagaaaggcctacctctctagctgccaccacctcagcaccgacggcggcatccacctgtccacccacaccgcaccggcgagcgccggccgccccaaagcgcaccggcaggtcctcactcccgtccttgccacgaaagcgaggacagaggacagaatgttgcatcctagctgggcagcaacaatctgccctccccggcatggctcgaggacgcctcctccgcagagctgggggacagtttccacccccagaagctggaagaagaggtggcccgccgacccgcacgggaggtagagctccggctcagcccgccctccgcctcagcctggatgacgaaaatccttga

SEQ ID NO: 35391 - DNA, 246 bp, Zea mays
  Peptide Sequence Number=SeqID_78766
atggaggggcacgctacgcagcattcctcccccgcagccgcttccttcgcccacacgcctgcgggttcggaatactccgaggacggtgttggagacgaacctagtgcgacggttccgccaccggagaagcttcatggactgccgacccggcagatccgtgcgaagacgccgccgccgttgctctctgtccgccggcacgtcgcctgtggggtctcgggcaaagggaggtcatcgattcggcgatag

SEQ ID NO: 35392 - DNA, 360 bp, Zea mays
  Peptide Sequence Number=SeqID_78767
atgacgtcagccagaagaacacataaggttacatgtgtgcaatttgcttcttctgatgacactgtactatctgagtctgttgggcgagcgatagatatgcgactttacccaaacagaatcagatgcaccatcttgggtaaaacacacaagaagaggtttaccaacaagtggttgcactttactgtcgggcgtagaagaccattcatcaaccaactccatagagggaggggggctgaaaaggtccagttcaccatcaagtgcttctcccgttacatgagaaggtccggcttccatcccaacagaattcgcaaggacgttcgggtgcagttgggaatacaacccatgaacttcttcatgtag

SEQ ID NO: 35393 - DNA, 1377 bp, Zea mays
  Peptide Sequence Number=SeqID_78768
atgggggagaagcaggctccggacgcgacggccgtggccgcggcgggcgcgggggaccaagacgacggcaccgcgccgccgccgccgccgccgctggacggaatccagtactgcagcgagcacccgtaccggcctgccaacgccggcgccgcggcggcggtcgccggcggcgggatatgcgccttctgcctgcaggagaagctcggccgcctggtgtcctcctccaagtccagccctttcttcccgctcggcggccacccgccgccgtcggggtccccgtcgtcgccgccgtccttccgccgcgccgctgagccgccaccgccgccgccgccgctccacccgtccggcgcctcgcgcaagttcatgtcgttccaccggaagaagacgctctcctcgtcgtcctcctcctccgccgccgcctccgcggggggaggcgggctgaagcggagcaagtcggtggcgccgaggcccgagctggagcagttcccctactcgtcgtcggcttcgtcgctggcggccgagagcccgcgcaagaagagcttctggtccttcctctccatctcgtcgtcctccgcctacgcgcagcaggccgccgccgccgccgccgcatccacgccgtacgccaccaacatgggcgccgccgcctcgagaaggaagtcggtgtccgtggcgtcggcggcgtgggcgtcaaggggcgccggcgcgcaggaccatgcggccgcgaggcggggccgggacagcggcggagtccgcgctggagcggtcgctggaggtcaggggcaagcccgagagccccagccggagccagttgtcgaccgctgcctccttcgggcgtttagccgcagcttctccggggacttcctggagcgcctctccttcggcttcggcgactgcacgctccggcgcgtcgagtcccaccgcgagcccaagccccacaggatgcgcggcggcggcggaggcggaggcggaggcctgggcaacctccacggagctggcgcagacgacgctgacgctgacgacgaggacgacgatgacgtgtacgagcaccagcaccggatcaagtgcgcgggcttcttcggcgccttgggccccgcgtcctcctcctactggctctccgcagcggaggcaggcgcgagcgtcaccaagaggtcgtccggccggagccaccaccggagctgggcgtgggcgctggcgagtcccatgagggcgctgcggccgacatcgtcctccacctccacgaagaccatcaccgccgtgccgccgcccagccacgtgaccgtccacggcaacggcgactcgtcggcgtcggcattgtccataccatccccgacgccgccgccatcgtcgtcgacggaggtaaccgcagcggagaactga

SEQ ID NO: 35394 - DNA, 522 bp, Zea mays
  Peptide Sequence Number=SeqID_78769
atgggggatatccgccgtctttccgcttcgtcgttggaggaacgcaactccgcgggagttggtacctttcagccgtcgttcggcttcaaggattttcatcagccagcccggccgttccccttcgccggcggtcacccgagacgcttcaaggatgttcatcatccccgctggggtggaggccgggctgagccggagctctacctcccgtgcgggttcgtgggtcggcctctccttcggcgttcgagggagagggcgctcactggccctgcgggcgggtcggacttcgacaacgcggggctggtcgacggcgggcatcgtcagcctcagcgcgtcgggctcgtcggcttagctcccggtgccccctcctgccggaaggcggctgccgcgccgtgtgcatgggaggaccgcccgagatatcgcgcgctgccagggcgacgttcgtgttctggggcggtcctgcctttgcaccggtacgacgcctccacgcggaggtcggtgccccactcgcccaggaggatctga

SEQ ID NO: 35395 - DNA, 489 bp, Zea mays
  Peptide Sequence Number=SeqID_78770
atggtggtggcaggcgggcaggagcagcggtcacgtcgacagccaagcttacgtcccatccgggggcagcgagagaaccctctcccacggcgtgaagacaacgtgcccgtgttccgttcctcgaacggctcgcgcacgcacaacggctgccccgcgaaccactcgccccgtcgcattaactccgcggcgggacaggcgggaccgggaaagggggataccccgaaaaggacccttccccgtgaaggaaccaggccccgagcctccctactgatcagaggttcgaaggctggcccctcggaagggttcaacagccgcctcagagcacgtgggccccacacccactactggtcagaggttcgagggccggcccctcggaagggttcaacggctgcctcaggctactcgggctccgcgcccactactgatcaggggttcgaaggctggcccccgaagggttcacagccgcctcagacacagagcgagggatga

SEQ ID NO: 35396 - DNA, 579 bp, Zea mays
  Peptide Sequence Number=SeqID_78771
atgcctcctcacgcgccgccggctgatcaaaaggcctggccgaggcagagacacgcggagaaggcggcgggggcgccggcaccgcgggagccgctcgtgcagcggcgggcgtcgttccacgcgcgctgcacgcctgagaaggagcagcagcgagaccacctgatgagacagaagccccggacgcatccggacctgctggccggcgtcagggagcggggcttccggcgagcgggcgtccacggcggcaacgctactgccgccgccgtcccgtggggcaggagggcggcgccgagcaaggcgctggtgaccgtcgccgtgcatcggagcatgtggccgctgcacgtgatggcgagggccgagtggcgcgtcgcggacctggtcgcggccgcggtggagctctacgtcaaggaaggacggcggccgccgctgccgtccgccgacccctcggcgttcgggctccattactcccagttcagcttggaaagcttggaccccggggagaagatcatggagcttgggagcaggagcttcttcctctaccgcagcagtagttgcggctcgctctacgcgtccagctag

SEQ ID NO: 35397 - DNA, 1020 bp, Zea mays
  Peptide Sequence Number=SeqID_78772
atgtcttctcgctcccttatgtgccgcgcctttccaccttccaagcccccggatggggggaaaccgccgtcttttcgcctcatcgttggaggaacgcaactccgtgggagttggtacctttcagccatcgttcgacttcaaggattttcatcagccagcccggctgcacccccccgccggtggtcacccaagatggtgaccaccagttcctgggtggggaggagcaagccgggctgcgatcttggtcccaccctcagcttcaaggatgctcatcatcctcgctggggtgggtgccgggctgagccggcgctctacctctcgcgcgggttcgtgggtcatcctctcccgcggcatttgagggagagggtgctcactggccctgcgggcggcccggacttcgacaatgcggggctggtcgacggcaggcgtcgtcaccttcagcgtgtcgggttcgtcggcttggctcccggcggccccttctgcaggagggcggctgccgcgccgtgtacacgggaggaccaccctagatgccgcgcgctgctagggcggcgttcgtgttctggggtggtcctgcctttgcaccgggacgacgccttcacgcggaggccggagtccctcggctcggtcggccttgctgtccaaggctcctctagcttagttaaagagacccctcggccgctcttcgacgagccgaggccagggccgggttgtccgttggcgggaccgacgtcagagttgatcagccgaggcctcaggtcgggctggcgccctcgggagatggtcggccgaggccccaggggcgaccggccgaaccgcctgctcgggccggattcccggagaagtccctgggagcgattgcctgggcgtggtgatgacgtcgtccttcggagcggagaacctcggaccgcgtcgccgtccgaggctaggtcgggcctcgccgaaggtgtcgtcgatgccgagggtgttgctgcccccttccagcgtcaagacccgagcctgcaggatcagattgtcttgtag

SEQ ID NO: 35398 - DNA, 201 bp, Zea mays
  Peptide Sequence Number=SeqID_78773
atggcggggcggaaaattcgctcgcccggagctaaggaacggtggctggccgatgaggcagatggacgtcagcaagggctcgaccgctccgacagctgtccttccgccaagctccgttgctcctccgacagccacgacatcatgccagcagggtgccaagatctctccggctgccacattggcatgtacttagagcgctag

SEQ ID NO: 35399 - DNA, 303 bp, Zea mays
  Peptide Sequence Number=SeqID_78774
atggcggcaccggccccgagccccagccttggcggcggcgtgacattaagccccggccccaccggcgggcgcgatccctgcgcaggcgcgcaggccttgcatggcccctgcgcggacgcgacccccggcctcagccccggtccccaccaccgaagaacgtggtggcattcgtggaacatggtcgaggaatgtggtggcattcgcggtcgccatggccgcctggatccgtcgttcccgatccccgccaccgatctgtcgtctcctttctcccctccctcctccccgtgcctccctctcgcctag

SEQ ID NO: 35400 - DNA, 1344 bp, Zea mays
  Peptide Sequence Number=SeqID_78775
atgatgaccaccagttcgatggtggggagaagcaagccgggctgcggcctctgccccaccctcagcttcaaggatcttcatcatccttgctgtggcagagggcgagctaagcctgggttctacctcccgcatgggccggcaggccgcctcttccttcagcattcaggggagagggcgctcaccggccttgcggagggggcgaacttcgacaacgcggggccggtcgaccgcaagtgttgtcagctccagcgtgcctggctcgccggctctgtcgcggcctccgacggtgcctcctgccgcttgataagggcgtggccgtccgcccaccgcacaagcggctgttgcgccgtgcacaccaggggaccgtccaagacgtcgcacgccgctagggcggtgttcgtgttcttagattgtcttgtcctcactccggcacgacgcctccgtgcggaggtggctgctgtcgtcggtgctgaggtggtggtcgccagaggaggtttctccgccgacgagaccattggcgccacccgcggacagacctctggctctttggctttgatggcttgtcctcgcccctcgagtggggacgtgggcgagggccttgtcacagcagcgtctgccctgaggtcatcgctgctgttgtttagccgcccaaagcggaggtcgttgtcgctgctggtgcagaggtcggcggcgagccacctggagtttgttgtcccgctggccctctggtgtggagattgttcatacccgcgggagtggaaccggagttccgtttgtaatggcaccctgagtaccgataacccttggctgctctgcgatgagctagagccggaggcagcggtgtcagcatggacagaggcggagtcggctcgaaaagaggcttcgttggcccaggagcaggtggcttcccaggccgaggaggtgcagcagcggcggctggagcttggccaggtcatccgcgagcgggaccaaccccggagtcacgctgccgaggctgtgagccgggctgatgtcctcaggggacagctggctgaggctacggagcggccagccgaggtgtctgctcgggtcgggaccctggaggagaccctggctgcgatggcccaagcacggtgctggcgtcctccttcgaggtggagatccttccgcccgtgtcgccgtccgaggccgggccagattccgccgaaggtggaaacgacgccgagggtgctgctgccccctctgtcgatgtctgaacctgcaggaacagtttgtctgtacagaatcgcttatccaagcgagagttacttttcgcggaaggtgatgagtgaggattctgttatcgatatagtcgagaaggcatga

SEQ ID NO: 35401 - DNA, 165 bp, Zea mays
  Peptide Sequence Number=SeqID_78776
atggcccaacagtgccaatcgagcacatcgatcacgggtcagtcagccgcgggaggaggcgtgacggttgatatggcaaaaagtggaccagcgggaccaggaaaggggatatttcgaaagggatccttctccgtgaaggaagtgggccccgagccctcctactga

SEQ ID NO: 35402 - DNA, 261 bp, Zea mays
  Peptide Sequence Number=SeqID_78777
atgccgttggaaatcgaccgttggagttctgacttctgggcccgccttgatgtccggtggcgcaccggacatgcactgttcattgtccggtgccccggcatgggcgtctctgccttctgcgcacgctgcgcgcgtattaaatgccctgcagacatgtccggtggcaccaccgggacagtcccggtgcgccagacccagaggagccttcgttgctcctttgcatttttgttgaacccaacacttggtctttttattggctaa

SEQ ID NO: 35403 - DNA, 258 bp, Zea mays
  Peptide Sequence Number=SeqID_78778
atgacgcaacccttgggtggagcaaagtcaggcctgagaagggagtcggggaacccgaaggaagaagcttacctcagctcatgtccaatggagcgcgacatcccgatgacccaagatccgaccaccaatctggtcgaaggcgcgctcaagggaaagaccaaagtgaagggcaaaccgagggtaaccagcaaacgaacaactgctcatggttttatatggggtggagaagcgtccgactccaccctgagaggtgactag

SEQ ID NO: 35404 - DNA, 690 bp, Zea mays
  Peptide Sequence Number=SeqID_78779
atggacgacacggagagagaaaaggagaaggagaaggagaagcacgactgcgggacggacgtcgaggacgaagaagaggacgaggaaggcaacaagcgcgtcgtcgtgcttggcccccaggtccccctcaaggaacagctcgagctcgacaaggacgatgagagcctgaggaggtggaaggagcagctccttgggcaggtcgacaccgagcagctaggagaaactgcggagccagaggtcacggtgctggacctgacgatcctgtcgccgggcagaccggacctggtccttcccatcccgttccaggcggacgacaagggctatgcgtttgctctcaaggacggcagcccctacagcttccgcttctccttcgtcgtctccaacaacatcgtgtccggcctcaagtacaccaacactgtctggaagactggcgtcaaagtggagacccagaagatgatgctgggaacgttcagcccccagctagagccctatatctacgagggcgaagaagagacgacacctgctggcatttttgctagaggctcctattccgctaaactaaagatgcttgaccaacaatcactatatataatgccgcgtcgttctcagtttgttgatgacgatggcaagtgcttcttggagatgagctactactttgagattaggaaggagtggccaggaggccaatga

SEQ ID NO: 35405 - DNA, 228 bp, Zea mays
  Peptide Sequence Number=SeqID_78780
atggggaaccagagaaaatgggaggaagcagttaaggagaagatgaacaggacgacgtgggagaatttgcatgcgagcggacccacatacggcagttttccaattgaaaaacaaacgcacggcgtggagatcggtgttacagctatcgatgatgaagctcatggtatcctctgcctcgttatgatcttcaagtctccgctcctcctcctcctcggtggccgaatctaa

SEQ ID NO: 35406 - DNA, 363 bp, Zea mays
  Peptide Sequence Number=SeqID_78781
atggaagtcgcaggtggcgccatgggaggctggggacgctgctgctcgattgcagggagcaagcgaaggcggagtcttggtcagcatccattgaagggggagtggagactcacgcccgtggagcagggaagtgaagaacgccatggctggggcgtgtggagcagggaggcgaggatctgggcgttccctggccgggcagggaagagcaggggaggcagacgccatgggaagggggcgagcagaactgcttggctgctgatggccggagaacaagaggacgacggttgggggaaaatggcatccagggggagctcgcatcggagtagaaatcatcaacagaagacatactcaacctcggcttag

SEQ ID NO: 35407 - DNA, 474 bp, Zea mays
  Peptide Sequence Number=SeqID_78782
atggcgccaccccctgcagccccgcgctgcgcatgccttgcgagtgctcgacaaaatgcctatgaaaggcttggtgttgtagacagctccgtccacgacgccgtcgaccctcgtttgtataagtatattttggtcgatgtggtgtacattggtgttggaattagtggtggcgtgagatgtttgtttgaggtgtgcgggtatatgccgcgatgtggttatactcgcaacgaggaaagatgtatgtattgtgacacgacgcttcgatcactattatatgatcgtgtgaaggatgctcatgatggttgtgtgattaagggtgatgtagtggcaggcgagaaaggtcttatacgagtgttatcgcagcccaagaattatgggaagcaagtagcattcataagtcggtcctggttaaaattgaagaacaatccgataacatatgcacctaagtgctttaggtccttcagtagcaattga

SEQ ID NO: 35408 - DNA, 573 bp, Zea mays
  Peptide Sequence Number=SeqID_78783
atggtggtcgtggtgcagccctgggctgatcggcagggaaagccaggtggtctagtctttgcattgttgttgctcatcggtcgacaagctttcaacaaccgacttcatgatattgtctgggtatatattggtgtgatctttagaatcgaccatttgagtctggtttttagtagatccagacacctgatccccagcggagtcaccaaaaagtgtgttggcgctgatttgggtgccaaacattggaagatgaaccatctcgcggtgctctctacagaggcgcggatggtccaggactctgggtcggacggtctgcgacctgggcgcaagaccgacttcttcttgtgcacattcgaacggtccgcacttggggctcggatggtccatgatgacgcaaagggtcgtattcttcgcagtagatctagatcttgcctcctgggagggaccccgtcggggaggagatatcatagagtgtgtcttagggtcggcagaccacccaatatgtctctagtcgacgtggagccagagagaggtgaagattcgaggttgaggaaggctaaactagggctaaactag

SEQ ID NO: 35409 - DNA, 399 bp, Zea mays
  Peptide Sequence Number=SeqID_78784
atggccgtccgccgcaggaccgcggcggccgctgccggggacccgcctccgcaggcgccaccggcagatgaggcggcggcggtggcaccagacgaaccggtcctccgggcgccgaacctgcgcgtggccgctgtggcagcggcgctcttcctcgcgcccttctcgtacctcgcgttcgtgcactactccctgaccgccgatctgcagcgatccatcctcaaatgcggcgccatgagcctcgttgggttctgcgtcgcgctcaagctcatccctatcgcggcccgctaccacctccgccgccgtatgttcggctacgacatcaacaagaaaggcttgcctacgggtcaaatcaaagtgaaaacatgttttgctgatttattgatgcagcagtattgttag

SEQ ID NO: 35410 - DNA, 117 bp, Zea mays
  Peptide Sequence Number=SeqID_78785
atgggcagcaggttggggaggaagaacaaggcaaaggtcgagaagatgaacgagacgtccgacgacgacgaaaatgatgatagtttcgcccagagtcttccaccacccttcaattag

SEQ ID NO: 35411 - DNA, 449 bp, Zea mays
  Peptide Sequence Number=SeqID_78786
atgaccggggataaacaaaggcaaaagctcaagcaaaagccatcaagcaaaatctccaacacctacatcaaaaaggtggacaaaaaggccgctacaccatatttgatcaagaagaaaaagaatggaaaggtgatagcaatcaaggccaacattcaagccaacaaaggaaagggggccaaacgcatctgggtgccaaaggaaataatttcaaccatgaaaagcaccaagaaggaagctaaaattgaaaagatgaaatatgagcatctgacgagggaggctgctttagcagagaaggagcttcttgaagaggagtacaagaaaaagtttgatgaggcaaagaaggaactatctctggagaatgatctagcaggcatgtgggttcttgttgctaagttgaaaagaggggctttagacatatctgatttgaatgttgatgatcgaactaaagt

SEQ ID NO: 35412 - DNA, 549 bp, Zea mays
  Peptide Sequence Number=SeqID_78787
atgaacaagacaccggcactcaaggtgccattacaaacggaactccggttccacctccgcaggtacgaacaaccccccacgagtggagggcctgcggagcaacagaaggccgacggacggctcgccgccgcccgctccagcagcaacgacaacgacttctactccgagcggccgaacagcagcagcgatgacctcagggcggatgcggctgccataaggccctcgcccacgtccccactcgaggggcgaggacgagcagaaggctgtagagttggaggttctccccctacgacacgggggctgggtctcacgcgtcatgcaagctggcccagggcagaagaagccaaaccgccacgcgcggtgcgcgcaactgcccagcggttacgagcattcctccactttcgcccagaccagcgggtgaaagggcggaccgccatgcaggcggcatgcaaccgcaccaagggggcgcaccctttcgacttcgacgcgtccagcatggaggcccaggcccacacgtcatgtaaccggcgcgccggttgctacgtgtaa

SEQ ID NO: 35413 - DNA, 477 bp, Zea mays
  Peptide Sequence Number=SeqID_78788
atggagggtgcggtggatgccctcatgaccgtcgttgtggactgctcctgcagcagcgtacaggcggccgtcgagggcgaccatgccgtctaccagcgcccatggagcggcgtgggtgccagcccggacctcatcgtggatggcgaccagggccggatcagtggcctgggcgtggcggaggcgcttaatgaagtcaaagcggggcgccgaaatagccatcacctcccctacgtcattgtcgcggtgggagagggcgacgacgacgacgttcatggcgcccgaccggtactccaccgagaaatcgaagcccaggagcttgccgacccagtcgtgctgagggatcgtggtgaggcgttgatcgaggaggtacttcaggctgtagtggtcggttttgatgatgaagcgcccccagagatacgggcgccaatgccgtaccatctggacgaggctgatgagctcacgcccgtaggcggctag

SEQ ID NO: 35414 - DNA, 741 bp, Zea mays
  Peptide Sequence Number=SeqID_78789
atgtggcgcgctacgccctccacctcgcacaccactgtgaccgccgacgagcgcaaccaccgcgagggtctcacccctgccaccagaagtttttcgctgtgctgttactactcgtggggctggccgtcagccagcgagggccagtggccgccgcaccccccgccggcaacccaacaaccaccagtggcattaatggagtgtttcctgaggctcgctgagttaaataccgcaaagaatttggaaacctgtggaattcttgctggtactctgaaaaagagaaccttttatgtgacaacattgataattcctaagcagaaatcaacatctgattcacgtggtgggaacgctgagaacccgaacgtcacttgcagcgatatgctcgcggacgaagtgcaggtcgatctccatgtgcttcgaatgctgatgctgcacgagattggtggagaggtagacggcgctgatgttgtcgcagtagacaagggtggcgcgttgaaggggactgtggagctcgtggaggagctggcgcatccaagaggcctccgccacactattggctacaacgcagtactcggccgctgtgctggagcggtagacgacgagctaccgcttggtggcctaggagacgaggttggcgcccaggaacacggcatagccggaagtggaccgacgcgtgtcggggcagccgacccagtcaacatcggtgtagaccatgagctccgatgttggggatggtcggagtag

SEQ ID NO: 35415 - DNA, 285 bp, Zea mays
  Peptide Sequence Number=SeqID_78790
atgactgaagacgagaacgccgagtcgctgcgcgatcatggcggcgcactgccgctcatgttcatccttgaggacgatgtggtggtcgcatccctgcgcggaggcgttcaacaccccgtcgacgagggcgtcatcctctgtggcggcaaggagaatcgacgcggatggagggcctacgccactccatcgaacgccgcgtccctcccattggaccgccatggtccgagcgttgaagtcccagacaattggccattgcgtgccgaggacgacgtcatactcggctag

SEQ ID NO: 35416 - DNA, 378 bp, Zea mays
  Peptide Sequence Number=SeqID_78791
atgtatcttgtcttctggttcttgcatctatctgaaagcctttgcaaaaatgatgtccgttgcactgtttgtgtcaaccagaacattatggaccaggaatcccttgatgacacaagatataaccatggcatcattgtgaggatagtctttaaggtgaagatcttcctgggagaagctggttctgagcttgaaccgcctgtgattgggagcaccagcttcgtaaccgaaggtgctacagcttggttgttgtacgaagccatcgtcataacagtggaacttcggtatatatcttcatatcatatctgcttccacatcgtcttgccgaagataagggatccgattaaaaagaaggcaaatggatcacgcacaattgtgtag

SEQ ID NO: 35417 - DNA, 531 bp, Zea mays
  Peptide Sequence Number=SeqID_78792
atgtcgcgctgcttggacaaggctgatgagctcttgctcatacgcggtgaggccacggtgctgtggcgccagtgcacagctgaagtaggccaccgatcccgcctcctggtgcaagacggctccgcaccctgcgcccgaggcatcgcattcaactgtgaacacctacccaaagtccgggagagtgaggaccagtgctgtctcaataaggtgtgtcgatttttgcatgcactcaccactcatcattggagtgatgtgaagaggattctaaggtatatcaagtttactcttgaagatggtgtaaaaattattggcccggtgatattgatgatagacgctctacaggaggttttgaagtatatcttggtaggaatgtggtgttctagtgtaatcgcaagcagcccacagcctcaaggtctagtgctgaagctgaatataaagctatatccagcggcactacaaattgatgtgggtgcattcacctttacaagagttgaagatttcttgtcctcctgctgcaaggatttggtgtga

SEQ ID NO: 35418 - DNA, 754 bp, Zea mays
  Peptide Sequence Number=SeqID_78793
gggcaccggaggggggcggtccacggcgaagcggctcggcggcggcgcaaaagggctccggcgagcaatcaaacgcgacaggaggcaatacaaaggtcgggagggggcgggagaggttccttacctcaaggcgggctccggggactcctcggtggcggcatggcgcgacggcggcccgggtcgacggtggcggacctccgcggctgcacggaggacggcgggtgagcgcgggcagagggaaatagggagggggaggggaaattggggcgcgtcctgggttgcgaacgtcgaggcgaagctcaccgtggcagagggcacggcggagctccaacggcgacggggaaacgggctcgggcggcgatggttaatggcggcggcgctctggcgtgcgcgcagcgtgggggaggtggaagaggggtctgctggggctcttttgaaagactgccagggccgaaggggtatggatggattctggtcgttggatttagaggctacggcccagattaacacattgtattcagtgaaacggtacgcgctattgaccgttgatcctgagatccacggatttaatcctatacggtcgttatgggatcagcggattggattactccgtgaaacgagcagcggcgccgctgccccatacgttggagcctcgccggtggttggcccatcgccaaatacgaatcctgcccgtggcggtacggcggcgaaggtcccggcgccagtgacgaattccggcgacatcgtggcataa

SEQ ID NO: 35419 - DNA, 309 bp, Zea mays
  Peptide Sequence Number=SeqID_78794
atggcgcttcctgttgacgtggcgggcctgtgccctaggctgggcgtcatggaggctcctccgaagccggggtcgaaggccagggcggagtccgagccctggggtccggcgaagtggagttcttcgtcttctggggctgagcccgagtccgagccctgggtcgggcggagcggagttcgccgtcttctggggctgagcccgagtccgagccctgggtcgggcggagcggaattcgccgtcttccggggcctagcccgagtccgagccctgggtcgggcggagcggagtttgccgtcttccggggcctag

SEQ ID NO: 35420 - DNA, 261 bp, Zea mays
  Peptide Sequence Number=SeqID_78795
atgaagctgtggaaagagacttccaggagttccaagactacgacgagttctaggcgtgggttagcggcaacccgcagtcggctgcctgtgaaggccgcgtttatctatgtttcttttccgcactttgatttattagggaagctgaaggagaagggtcgcatgttgcacgccaagagacgggcagctgaaggacaagggtctcgcatgcggcacgccaagagacgatctagatctaaaactcccgcagttagtgagtgctaa

SEQ ID NO: 35421 - DNA, 417 bp, Zea mays
  Peptide Sequence Number=SeqID_78796
atgagaaccaaccgtagccctccgatcacatttctacggaatagatttaaagagtcaaaaggttatcgtcgatctaatcataggcgtccattacggatccaacgactgcggacccatcttctctcctacttcactatcgcccagctaccctcaggcaatggcggcggcgattctcaatacgcggcggtggcatcactggtgttcaagcaatccggggacccgggctcgatacacgcaatttcttcgcaaaaggtggagaggaggtccaggcgaaccatatgggagggttccaccctggcgacgaatgcggtgacggtctgccatagcgcgtcacggcaccgcgatggtgagcaggagaaccggatgaacgagggggcggaatcgagcatggatgcgttctacacgtggagcgggtag

SEQ ID NO: 35422 - DNA, 900 bp, Zea mays
  Peptide Sequence Number=SeqID_78797
atgcctgtccatgccaccgcgtgcgcatcccccgtgccaccggcaaaccctggcgttgacaccgcgaagggtcgagaaggcgacgatcatcgggacggcccggagccccatgccggcgatgtgcgcgatggagaagaaggcattgagcgcgtgcacgacgccgctcgcctaggcggcgacgtcagcgacgcgccgctttgcctgtggctgcctcataccgccggccgtcgacaactccacgatctcagagcgtcgcggcggcggtcgcgcgccgtgctccgtggcgtcttcctcgtcgacgacgtggaacgaggcatccccgaggctgttcacccacgcgctgacccggtccagtggagatgcctcagcggagaacgcgacccattggttcgggacggggtcctcctccggctcctccacgacgacgacgcccttgttcttggcgtccgtggtggcagtgcccagcgtgtcggacgtgtacccgtggtgcacgtacggccgtctttccccgcagatggtagcgtgggcgtgggagtggtcgcgctcgcgcccggccggtgcagattgcgatggctccagaggaatgtctgccaccacagtttccagctcctggacgggagcacctgccgcgacgaccgtttcttcagcaggacacggtcggtggagcacgaggacctcaaggacgtcgtcgggctcaagccgctgcgggcggtcgtcggccttccggggggctggttcttcagtaggtcgttgtgggagcgtgacctcaccggcaggtcagagtcggacccaggcgaggggacagacctcgtcgtctccatgttggagcaggagcacgtcagcttcggcgattccattggtgatatgcggccaagtgatagtcgcctagagagggggtga

SEQ ID NO: 35423 - DNA, 588 bp, Zea mays
  Peptide Sequence Number=SeqID_78798
atggtgttggatctgcgtgttggatgcggtgcgagggcaggggaggatgaggcgagggcgaggacgaggatctactcgatctcaagacttggcgggcgcggcggggttggagatcgcacgacgggccgggggcaccgtgaggcaggggagcttggtgtggacgacgcacttggaggagagaggcacgggcgcgggcgatatccacgcgcgggtgaggaccaaccggagtcggcggtggcggcgaaacttgcgcttgcggtgcttgagcggtcggcaccatgggttaggggtggcgttgagggggcgaaggcatggctgggtgggggaggcactgctcctcatggcacgaacacaacagtgcccatggatggaagggcgtggtgggggaggccttcctcattgcacggattgcgacgaccgccatggatggaatggggcggtggggaggtgcagattgtgggggaaggtgcggtgggggaggtgattgagagcagcataggcgtggtgggagctcatctttgcgatgaggagcagcaggagaggattacacggcagaacttggcgcacgggtgtggacgcctacggtga

SEQ ID NO: 35424 - DNA, 378 bp, Zea mays
  Peptide Sequence Number=SeqID_78799
atgggcaaagaaaaaatgggtagcaacaagggcgcttacgccaagaaggcagctagtggtggcaacgattgccccaaggtgaagccgatagagttcgtggacatggcggccactgctatcgacgacttcgtcagcagacgcggaggcagtgttcatgggtccacatgcagcagtacctttgtcgttcacgcagccaccgagttgccacgccatgccactggtgagaacagcgatgaggccgcggttaagaatgactcatcctccaccggcgctggctcacccggttacagcagagacggaacgcgtaacggtgccaagagcaccgagccctccagccttggtgaaagggaattaggcttacacctagtccctaattaa

SEQ ID NO: 35425 - DNA, 1266 bp, Zea mays
  Peptide Sequence Number=SeqID_78800
atggcaaatttaagcataaccaacatcttggagaagatgacaaggaaagataaagactacagatatatggcaacatcagatctgcttagtgaattgaataaagaaagcttcaaagctgatcaagaccttgagccaaagttaacgattactgttcttcaacaacttgaggatgcttctcgggagatgtttctggagaatggtgtggcattattgggcgatgttcgcaacagttgggtcggggtttggatcttacaagctctttttgttaaggaacacaatgcagtgtgtgatgcaataaaggaagaacatcccaacctatcagacaaagaattatatcggtatgctagattggtcacttctgttgtcattgcgaaggttcacactcttgattggactgtcgagcttctcaagactaagaccatgagagctagaatgcgtgcaaattgcatcgatattggagagctggttggtctcaagggggaagaacaactatcaaaaatagggtttgaaaagaaaatattatcaatgggatatcaagcttgtggtgcacttgaactatggaactacccaagtttcttcacggacctcataccacaaaatttggatcgtaccaatcgatctgaaaggatcgaccttgctgccctagaagaatgtgttgtcgtggaccggctgcctggtgtggatatagatagatggaaattcgatgaaccaccatcgttatatatcttcatgaacagcagcatgcatcaccttgcttctatagagaagtatgtggaaaaagtttgccacatttgttccggtcctctattcaatcttgatctagatacattgcggtatgtctcatatatcccaaaccattgcctattgctttatgaggtagtgacttacgcaattcacaatgtagttttggccgggggcttatggggtttcccccaaaagacaatcccagttgatccatacatcgtgaattacactggagttgtattctgccaatattcagattatagcaatgggcatggaatagaagatcaaactaaagaattatgcaaagccatttggctggcgaaagaactattgagagttattggtttacaagaagagggaagctcccttgaatttctaagaagaggatacaaggatgcaacgattcttcaaaggaactttgtgattgatctattaagttatgaggacgattcatgccgctatgtcatctctgcaaatatacaacagagacttatcaatatctctacaaaaggaatagattag

SEQ ID NO: 35426 - DNA, 330 bp, Zea mays
  Peptide Sequence Number=SeqID_78801
atgtctggaaatgatgttggcatagcacgggctcttggagcaaccaaacgcttcgagaactcaggcaatgccctgagcaacgaagaaaagatgaacagggccccggaagcccagactcccctaacgagcgagtcgcttgacatcattgtaagccttcaccacctctactttgatcccttggaaggtgggagcatgcagccaggctcaccacaacccatttttaccaaggccttggaggtatcagggaccgtcatctggattccccttgttaggtatctcctcctgagcactgagtacagtggggacaacctggggtggggtggtttgtaa

SEQ ID NO: 35427 - DNA, 141 bp, Zea mays
  Peptide Sequence Number=SeqID_78802
atggagttcgtcgtggcgtcaaagccgcttgttaggagttccaagtatgcggatgttgtcttggcagactacggcacagtcgaccattgggtgaagatgactattgctcatggtctcacgggacagttcggtgcacactga

SEQ ID NO: 35428 - DNA, 438 bp, Zea mays
  Peptide Sequence Number=SeqID_78803
atggccccatgcgccatcattctggctacgtcgacccctagcttccatagcctagggctcggcgcagtctgtcatgtggtgccccgcaagaggtctccgcactcaggcctagtccgacatgccataagtgcgccgcagttcgagggccaacggtcggactttgagttagatgtcgcactccatcgatcacaagccgaggaggccgccgaggttgaagtcgagctgatacgggtgcaggttgttgaggctgatggttgcatcgtcgtggcgctgctcatggcggaggtctgcttgggctgcaaccttcaggatctcattggtcccccttcgtccctctcgaatgaagggttggaggacctgctggaaggctacgacgacttagctagtcatgtcgttcttagggtgttcgctaacgacaccgttcgcgcggcacgataa

SEQ ID NO: 35429 - DNA, 252 bp, Zea mays
  Peptide Sequence Number=SeqID_78804
atgaagcctgctcgagttgggcctcgggcgtgccgagggttcgcccactgcctgaggatgaaagggaaatgtgcccttgggccatttctaagtattttggtgattgagtgccaactcaagtgcttaaaatgtgaatttatgcaatggatgaacaaagtgcaaatcaagagcaaagccaaggggctgtttcggtctggggcaccggactgtccggtggggcaccgtaaagtgtacggtgccttcggctgctag

SEQ ID NO: 35430 - DNA, 357 bp, Zea mays
  Peptide Sequence Number=SeqID_78805
atgaggctgacaacagccaagttcagcctcaggcgcaacaggaagctccgcctcgcccgaccccagggctcgacctcaacctcggcttcggaaggtggtctctgccttgcccgacccagggctcggcctcggaaggtggtctccgcctcgcccgacccagggctcggcctcaacctcggcctcggaaggtggtcttcgcctcacccaaccccagggctcggcctcaacctcggcctcggaaggtggtctccgcctcgctcgacctcagggctcggcctcgggagaagtctccgcctcgcccgaccttgggctcggaccgaccgctccatgggggatacatcattaccctacccctag

SEQ ID NO: 35431 - DNA, 810 bp, Zea mays
  Peptide Sequence Number=SeqID_78806
atgctactcagtgtctcccgcgctacgggggctgcagcaggaagcgcagcgacggcgagacgagcgaagccgccgccgccgctggcattcccgtcgtactccagcctcggcagcggcaagaagcaggaggtggtggtggggtcgccgacgccgcctgtccctgtcgcgccgctggttcacatcaccatcgactgcgcgggccgccgctccgtcgacgcggcggacccgtccctcctcctctccctcgacgccgccggcaggagggcggaccggcggtggaagcaggggcggggctcctcgcgccggccgtcgtcgcgccgcctggccagcagctcgtcgtccgacgacgagtacgacgaggactcgaggaacctcttctcgtcgcggagcttgtcgtccgactcgtccgacttctacagctgcccgcgccggaacgccagcgccagcagggggcgcgcgtccgtctcgggcccgtgccgcgcgctggcgctggcgccggcgccggcgcccccgcgccgcggcgcgtcgcagagctgccggtacagcttcgagctcccgcgcggctcgtcggcgacggacggcgggttcgcggtggtcaagcggtcggccgacccgtacgaggacttccgcaagtccatgcaggagatgatcgcagagtggcccgctggcggggccggaggcggcggcgacgacgaaggcgagcacagcgcggagcggctgctggagacgtacctcgtgctcaactcgccgcggcactacccggcgatcctcgcggctttcgccgacgtgcgggagacgctctttccgtga

SEQ ID NO: 35432 - DNA, 348 bp, Zea mays
  Peptide Sequence Number=SeqID_78807
atggaggcagatgttcgcaatactgtcactcaagcggccaccaagatgaaaaggaagacccaatgtatcaatcatttcaaatcctgcccgtccatttcttggagaaatagagggggagagcagagcgttgctactgcaaatattactggaatggatctggcaacaaagtccaacacatggtctgtccaagaaactagtaagaatgaagctcgtaccaattgggatgaatttactagaaattactttctcagtcgggagaatttggtatctgtttttcttcttatagatgcaagtatacctgccaagaagattgatcttgactatgctagttggcttggccaaaacaag

SEQ ID NO: 35433 - DNA, 594 bp, Zea mays
  Peptide Sequence Number=SeqID_78808
atggcgcctcctgtcgacgtggtcggtccgcgccctaggttgggcgatgtggaggctcctccgaggtcgaggtcgagtctgtcttccgtggccgtggtcgagtccgagcccctgggtcgagcgaggcggagaccgtcggctgaggtcagggctgagtccgagccctggggtcgggcgaagcggtgttcgccgtcttccggggctgagctcaagtccgagccctgggtcgggcggagcggtgttcgtcgtcttctggggctgagcccaagtccgagccctgggtcgggtggagcgcccgagtccgagccctgggtcgggcggagcggagttcgccgtcttccggggctgagcccaagtccgagccctgggtcgggcggagcggagttcgccgtcttccggggcttagctcgagtccgagccctgggtcgggcgaagcggagtttcctatggtgcttgaggtcgggcctgactgcctgtcagcctcactctgtcgagcggcacagcagttggagcgacgcaggcggcgctgtctttctgtcaggccggtcagtggagcggcgaagtgacggcggtcacttcggctctgtcgactga

SEQ ID NO: 35434 - DNA, 252 bp, Zea mays
  Peptide Sequence Number=SeqID_78809
atgggagttgagggagctggtggggggtttatcaggtgcgatggaggggaaggggggcctggtgttgccggcgatgatggcggtggtgggtgcgctgcaaaggtggcgtgggcggcggtagtgcgctgcaaaggggagcgtggggcggtggtagtgcgcatggaggcgggcacgcgtgggggggcacggcttgttccaggcttcaagggtaagcttcccggtaacttcttgggtaaggcacttttctcttga

SEQ ID NO: 35435 - DNA, 312 bp, Zea mays
  Peptide Sequence Number=SeqID_78810
atggcggtgggatctaggtttagaggatcggaggaagaaggaggagacggcggcggcgcggggatagggatgcgcgcggcgacggcgggggtggggaggcgcgcgaaagaggacttacgcctgggtgcattcaatatagagaatgcacccaggatgaacaataccatcgtactggagacactggattgtaattgcattcacgtcattatccccaagcaagccgaagacttgttcttcatgaccttcattcaagatttattatacctgaaggaaaataatgcttcaaaggacaaaggaatgcgtgaacagtaa

SEQ ID NO: 35436 - DNA, 165 bp, Zea mays
  Peptide Sequence Number=SeqID_78811
atgacgaaggtggcctatccggccatggggaaaggggagagcggatgggggagggtggtcaggggtagggggggacctcactggggtggggagccacggcaaggggcgtgtcggctgcaggtgcggccgaaggcggcggtcgggcagggggcagccccccttaag

SEQ ID NO: 35437 - DNA, 813 bp, Zea mays
  Peptide Sequence Number=SeqID_78812
atgaacccgttatgctgcatcgcgccggtctcgctcgagcacgctgcggatcagctccacgagcacccgcagcgcatcctcgctggtgcaccgccggcgacgccggccccaaagcaggatgcggttgtgggggtgctgcacaagtgggtcaactatgggaaggggtggcggtcgcggtggttcgtgctcgaggatggggtgctatcctactacaagctccgcggagctggtgctgggggggtagccgtgtcgcccgctgctgctgcagccagagtgatcggggacgggagtgccgtgcagcaggcgcgggaggtggccgcgggggcaggaaagctgtggaagccgtttggcgtgatacacctcaaggtctcgtctattcgtgcaagcaagtctgatgataagaggctgtacatattcagtggaacaaagacactacatttgaggtgtgaaactgaggaggataggaatgcgtggatagatgcattgctggcagcgaaggatcagttcccacggtcacagactagcaatgatgttggttctatggcagatattatgttgtcctctgagaagcttagggcacggctgcttcaagagggtctgtgtgaagcagtggtcagggagtgtgaatctattatgatgagtgagctactggaactgcacaatcatataaagtctcagcagcagcagcattctattttgatagaccgccttcggcaactggagacggagaaagttgaactggagagaacagttgtccatgagactaaggagagggaaacacttggctatgccaacagcagacaaagtggttag

SEQ ID NO: 35438 - DNA, 960 bp, Zea mays
  Peptide Sequence Number=SeqID_78813
atgagggactttgccatagcattgtcatcccctccggatgaggccacttctagcgaagagtggacaactgttgtccgtgaaattgaaggcctagaatgtgtcgctctgtggggtctacctaacttcatcaaaactgctcattctcatgtttccatgcaaagggttggagttgcgcgtgcgaaggcttttgatcagcagctaatccttagtgttgatgccgaggtccaggctggcctatatgtcttcaccgtcgtttttcgagggcatcccgaatgggtggtgaggaccgaccgtgggggcgaagcccggtggggcgggaggcagggtaatgacggcgcctcctgtgacgtggtcggtccgagccttgggttgggcgaggtggaggctcctccgaggtcgaggtcgagtccgtcttccgaggccgaggtcgagtccgagcccctgggtcgggcgaggcggagaccatcggctgatgccagggctgagtccgagccctggggtcgggcgaagcggagttcgtcgtcttccggggctgagcccgagtccgagtccgagccctggggtcgggcgaagcggagttcgtcgtcttccagggctgagcccgagtccgagccctggggtcgggcgatgcggagtttgtcgtcttccggggctaagcccaaggctaagcccgagtccgagccctggggtcgggcgaagcggaatttcctatggcgcctgaagccggacttggctgctgtcagcctcactctatcgagtggcacggcagtcggagcggcgcaggcggccacctttgcattaaatgcccctgcgattcggtcggctggtgtggcgacttggccaaggttgcttcttggtgaagactgggcatcgggcgagccgaagctttgtgctgatgggggttaccagctgagatttaggagtcttgagggtacccctaattatggtccccgacagtag

SEQ ID NO: 35439 - DNA, 216 bp, Zea mays
  Peptide Sequence Number=SeqID_78814
atggatccactgcgctcggcgcaggagctcttcacgtgcgcacctcgcctttccttctcctgttgttggggacggttcggccgcacgcgtgatggttctccacggacccgtggatgtcaacgcacacctggacgatccctggaagcacagggggaatacggcgaggtctgcgaggtactaccatcgacgcagcaatcgctctacgtcttctgctaa

SEQ ID NO: 35440 - DNA, 507 bp, Zea mays
  Peptide Sequence Number=SeqID_78815
atgaacaagacgccggcattcaaggtgccatcacaaacggaactccggttccgtccccgcgggtatgaacaacctccacaccggggagcctgcggggcgacaagctccgggcgactcaccagcgacctctgcagcagcagctatgacggcgttgacggcctcgacggtggggaagcttcccccggctgccaccacgtcagcaccgacggcggcgtctgcctctccaccaacgccgcaccggtgaacgcaggccgctccaaagcgcactggcaggtcctcgctcccgtccttgccacgaaagcgaggaggaggacggaatgttgcatcctagctgggcagcaacagttcgccttccccggcatggctggaggatgcctcctccgcagagctggagggtggtttccaccaccagaagctggaagaggaggtggccagccgacccgcgcgggaggtagagccccgactcacctcgctctccgccccagcaaggatgatgaacatccttga

SEQ ID NO: 35441 - DNA, 678 bp, Zea mays
  Peptide Sequence Number=SeqID_78816
atgcagtcggcatgcgatagcgccaagtgggcacacccctttgactccaacgcacctagcatggaggcccagacccacacgtcatgcagccggcgcgccagttgctatgtgcgagcagccgcaccgccccttgcgccactaccgcgcctcctcgactgcggaaccagtaccgcgactcgaggcaaccctgcgtatgacccaacagtgccagccaggcgcatcatcacgggccagtcagccgcgggagaaggcgcgacggtcgatgcggccaaaaatgggccggcagtaatggcggtggcaagcgggcagaagcagcggacaggcggcgcttttggcaggagaagcgagcgacgcttcgccttcgccataatgaccgcttcaaaaaagggaccgggaaagggggataccccgaaagggatccttctccgcgaaggaaacgggccccgagcccccctactgatcagaggttcgaaggctggcccctcggaggggttcaacaaccgcctcagagcgctcgggctccgcgcccgctactggtcagaggttcgagggccggcccctcggaagggttcaacagccgcctcaggccactcgggctccgcgcccactactgatcaggggttcgtaggctggccctcgaagggttcacagccgcctcagacacagagcgagggatga

SEQ ID NO: 35442 - DNA, 345 bp, Zea mays
  Peptide Sequence Number=SeqID_78817
atggagggtggtgcagttttagaggatggtggagaggcagatgaggacctagatgttgaggcagttcctcctctagtgtccttaggtgatgatctgcctggtggtagttatgtttcagagatgtcgatgtgcacgcatggatcggatggggctggttcgtctcagggtgagaagtttactcccaatccaccaccaccaattcctcccacattagcagatgcaattgccgctcttgtcaacgcaactgcagaaaatgtgagggcactgcgtgaggtgataaataatcaaagcaatcagcatggggcttgtgcatgtggcagaactgcccagattattccagtttaa

SEQ ID NO: 35443 - DNA, 297 bp, Zea mays
  Peptide Sequence Number=SeqID_78818
atggttggtttacaggtggtgacgaggatgatggttatgattatgcttatggtaatgttcgcatttggtttgccttctaaaatcgggtgtgacaatgttgctgctgatcttgatactggccctgaggctgctgattgtaagatgaagttgggactgaacaggcagaacaatcttcttggttgggagttgtatcttccttcgaagcttcatcctcctctacctcttagggctgatggtctgaaggaactctggtgcacccctgttgattgggagttactttgctgcacttggttatga

SEQ ID NO: 35444 - DNA, 147 bp, Zea mays
  Peptide Sequence Number=SeqID_78819
atgccgaagcttccttgcgcacagcttcggctctgttctatccttcgttctccttgtgtttcttcatacaacgattttgacatgtccgaagggtccatgtccgaaggtgcctgttcaggttgtggatcatggggattgaaggattag

SEQ ID NO: 35445 - DNA, 849 bp, Zea mays
  Peptide Sequence Number=SeqID_78820
atgtcggcgcccactctgggtccgacggccaccctcctcaatgcgaagacgtctcagctagagatggcaatgggtacacgtgacccgatacccgatgggtccatcaatgtatgtgacgcatatggggcctcacaacggtctggtgatggtggttttggtgacgcctctggtgatgtggctggtcggcctcgtcgatgtcaggcgcgtaagcgacgacgttcaactcgaaggcatggaagctcagcgtcggacatccccaatgatggcagactgtcgatcgcttcagttaatagctcacagactccacatggcattctcccaccatgcattatgggttggagtaacatgctggcagcgaccgaagatgacttaaggactgatgttgtgttaaccatcattagcgacagtgagattgctcttgcagagattgttgctcttcttgctccacgcttggatgttcccaagacatctcttgttatccgcaggatgtcatcttccagcctcttgttgatcctccctgatattgcattgatagagcttctcatcactcgttggtcagttatcagagcaacttctttctctgtattttgcaaacgttggtcgagacttttgggcgcttcgggagtctccttgccataccttgttgaatttgagactgctgggacccctgttcatgcttgggaaactagtactatggagcatctgcttaacccatttgcttctattcatcaagtgcaccaggatacttcggcgttgcaagatatgtcatgcttcaagtgttctacgtggtgttctggtccatctgccattcctaatatgcgagacctgtggattattcagcctatttag

SEQ ID NO: 35446 - DNA, 362 bp, Zea mays
  Peptide Sequence Number=SeqID_78821
ggcgaaaggcagtgctcttagtgccggtggcgagattccggcactcgctgccgttagggacgaggcgggtgctgtgtccccgccggctgaaggagctgaaggaggcattaagtcaggcggctgacttcgcagatcgcgcggcgtcgggggcccttacgacagttgtgtctgccgaagtcgagagacttcggacgcaacatgctgacgccgtccgggaaaagtcggccgccgacagcaagtgccgcaagctggcggataaggtggccgcgctggagggggagagggctggggtccgggttttttctttacacgggaaatccaagccaaaccccgctataactttggaaaagatcaaggtttag

SEQ ID NO: 35447 - DNA, 555 bp, Zea mays
  Peptide Sequence Number=SeqID_78822
atgaagctgtggaaggagacttccaggagttccaagactacgacgagttctaggtgtgggttagcggcaacccccagtcggctgcctgtgaaggccgcggttatctacgtttcttttccgcactttgatttattagaagttgttcttgaggagaagccagagccggaatcatttttagaggagccggagacatgccaaacgaggcctcaaataatacacgaagagccattttgtcaaacgatatgcaaaaacacgggctcctgtggaggaacgactctgggcctggttgggagggcccccaaaccggctctagctcttggaggtgccctcccaaacggtctcaaaaaaagagctccgaacaaagagcaccaagaagccggagccatttttataaagaggagccggagcccaaaacaattggctcctagcggctacccctcttactccccttctctcgcgttaagagaagccgtgttgccaaacgatttgttaaaaacactagctcttataaaggagttgttcttgaagagaagccagagccggagtcatttttag

SEQ ID NO: 35448 - DNA, 781 bp, Zea mays
  Peptide Sequence Number=SeqID_78823
cgcgttggtagtgctggagggtgggcaatacctcacaactggcaagttggaggtgctttcgcagcaggagttcgtcgactgcgaccatgaggtgaagaatgttgaacatgtcctccatgctaccgtcaacacagacggcagcgaggccaagcagcaggatctgcgccagcatgctgccccacaactgatggtattctcaagaagacaagtacagaaggcaaggttggtggaagacaaggaaagagaggaggaatcgacccatcaggttattgagacattagtggaagaggtaggggatacagtggagaggactgtaatgagcgcaagacaaatcctggttaaactggcaaactgcgttgatgttggaagaccagctccgctgtctgctggaattgccctgtcacctgaacagcagcagttcctcaaccagcttaccaagcagatttattgcatcctcccagccccggttgatctgatcctgaagaataatagcaccaaaacacttgctgccactccccggtgcagccgtcatattgcagggatgggggctgaatttgatatccacgacttgcgcttaagattcacacaaaaaatcatgaaggccttgaaattgatcaaagatggagaaggcatcagtcaacaagccagaaatgattatgaaaaggtgttttctgaaacactttccctggctcatatagaagctctagcagctcttatcaggtggagtatgccggtggacaagatggttgggacaagcagtcctgatatagctgcttgctag

SEQ ID NO: 35449 - DNA, 153 bp, Zea mays
  Peptide Sequence Number=SeqID_78824
atggttggtttacagatgatgatgaggatggttatgatcatgcttatggtaatggttgcctttggtgcaatctatgctcaggtaaagaagaaggagaatggtgtcgaggcggatctccgggagttccaggacttcgacgagttcgaggattag

SEQ ID NO: 35450 - DNA, 1365 bp, Zea mays
  Peptide Sequence Number=SeqID_78825
atggcactaggagttttcgagttgaaccgtctgccttatggtggttatcccggccaagacgatgtggatcgtcgtgggaagaagccggtggtagagactggagacgaccccgcgccggcggccgccccatcctctaagaaaaggaaactaggtattgctatgggaggactgggggtttctgatggttttgctagggaattgatgaggacatgcgcggcccccgggggaaggatgtcttcgcccgagctccgggagtcttcggcgcggatgctgagtgttaccgggggttggtggcctaagaatgttcctatcccccgcgcggccggcgaagactttttaacatctcgcatggttcgtgattggaaagtgtttccttacgggtggaatattgctgctgttgtgtcggcagtgatggacaaggatcgtcagggagctgcgcagaagcgccaggcggtcgtcaggcttcatgaggccaggccgaagaggccgcgggggactacgaaggctgctgccccccggcggaagccagccgccactggcggcgaagtcggctgtccctgcatccggcagggcgccggaggctgcgaaggcggcggccgccgggggccggacgctgcaaaggcggcccgagagttgccgccgccgggcaagcgcgtcgccgacttcgccaccgacattagtgtggaagattatcttgttgggtcggacgaaggccaacttgttgttgttccacctgccgtggcgaccgcggcagctgccgtggtgcccagggcgaagggcagtgctcttagtgccggtggcgagattccggcactcgctgccgttagggacgaggcgggtgctgtgtcccgccggctgaaggagctgaaggaggcattaagtcaggcggctgacttcgcagatcgcgcggcgtcgggggcccttacgacagttgtgtctgccgaagtcgagagacttcggacgcaacatgctgacgccgtccgggaaaagtcggccgccgacagcaagtgccgcaagctggcggataaggtggccgcgctggagggggagaggactgacctccggtgccaacttgcggaggaaaggaaggaggctaatgaggccctcgccaaggcgcagtctgcgcaggcggaggccaatttggcgcgggtggagggcagtcttgccaggcagcgcgccgaggagctggaggggcggctcaacgctctgcagacccatgtggagagggccgaggcttcgacgcgctcggaggccgagcggacacgcaaacagcttatggattcataccatgagctgggcgcgcggaccgctgacttcgaagtgccggaccgagagcccggacttcgctgtctcgagtgggtatag

SEQ ID NO: 35451 - DNA, 1908 bp, Zea mays
  Peptide Sequence Number=SeqID_78826
atgacgactcaaggaggtttgcagccgacaagcaatgaagctaatatgtgcaccaacgacaatggtagccaacttggtacacggattgtggacgagattatggccgggaagaacgtcttctttgatcttcctgacaagttgactggtgagatatggaccttgaaattccattgcattggagcacaacctggaaaagaaattgtcacagtaaatattgataaagcttatgttgccttttacaacgtggtgtacataaaatcgaaacttggatattctgggagggacttcttgttttacaagaaacgatgtggcattgatcgatccaggctattggcacttgattacatccaccaagaagaggccatgctgtctgataacatggatgagagaaaaataagttttgtgctcacaaaagatccacccagtgatctagaggtaagcataactcccatcaagcgtccaaggcagcgaacaaatgttgatgaagaaactatagaagtgtcgattgatgcatataaggagtggcttgcaatactacaacatgataatccagaaacggtattgtatgaacgacaaagcaatgatgacctaatattatcagatgaagaaattcatggcagcagcaaacctactgctaattggccatctcatgctagacgtcataggaaaagagatcgtgatgttattggtatatatgtagataacgatggagtcttcaaaaaggaggggcgtggtacccttaagggtatagcagcagccaccaagcgaatcaagaacggtgatcacaaacttaagattgaattttcatctaagcttggaggtcctgtaggaccaaacgctcgcacttttgtggatgaaatcgtattgtttacaaagaaaaaggcaccactcattggagtgaagaagtggaaagatatagagctcaatgttagatcttctatagcctctgacgtactgacaattaaccttctctttatatcaaaactgaaacaacgaaggtgggagtttctaaccaatgaggacgcgcatgaaaagatctggtctattgctaaggagagatacaaaggatggcgatcaacgttaagctcaacatacaaggcatacaatagttatgctgaaaggatgaaaaacaagtctgaagatgtagacatcgtcgagtggcattacatggtgttgtattttggatctgagaaattccagaaaataagcagtcggaactcggaaaaccgtcagaaacaaagaacgaagcatataatgggttctagaactttttcccaaataagctttcaacagagagatccagaaactagtatagaaccaaccgatctatccctttggatgactactcattgtaaaaatgatgaatggtcggaagaggcttcacgtggcatttatgagaacgcagctgagaaaattgctgagaaaatatatcaaacagaaaaatatcatctaacaagagaagaggaaaatgctattttccaaacaacattcaaggaaacaacaggatgtaaggcaaacagacttcatggtcatgggtacctatcaagatatccaacaagaagtcaagtgatggaatcaaagttcctcgaacaagctcgtgccacggttgcaaccaaccaaaaaaacattgaactcgaaagtcagagcaaccgtgaaagcaccactccaatcgatccttcttccattgtccctactaaacctcctgaattcatcccagctgattctcctgcacctgcaccaagtagtgcaaacaacgttcgtacaccagacacaaacaataagaaagacaatatgccagcaaactatattagctcttacactctaaggaatgttgtgacaagacgtgtgcaggcaaggggcaacaaaagaagcgaatgtgtatggaatgcaaatgttcttgtattatga

SEQ ID NO: 35452 - DNA, 483 bp, Zea mays
  Peptide Sequence Number=SeqID_78827
atggagatagttgagttagttccttgcgcccgaaataaatggggcaactggcatgagttttggttctacgttgcggagggcacgatcgaagaccatccggggctccccgtggctgagatgtgctcacattattactcagcatacccgcagtttgaagtggcggaggatgatgcaaacgaaggggcccttcggtgcgcggccggcctgagcagcgggcgcgatttggttgaggagtttgtggcgtacggggtgtggcctttggcgcatggctgggcgctgggcgaagtatgccctcgccagatgccttcccatggtgggaacctgtggaagactacaactgtagtgcctacagctacagctacaactacagcacaactcctagcaagcagcatcagcagcaaccatcagcaagcagcaagcagcaacacgcaacaagcagcaagcagcaagcagcagcaacaacacgcagcagcacgcagctag

SEQ ID NO: 35453 - DNA, 507 bp, Zea mays
  Peptide Sequence Number=SeqID_78828
atgactcaagatagattaaatagtttggcaattctgtgcattgagaagaagttgttggatgagattgatctttatggtataatcgacgactttgtatcacaaaacggctatgatggtattcccaaggaaattcctgaccctgatgctaagaagcctgaggactgggacaatgaggaagatggtgaatggactacccatttgcccaaaatcaagaacccgaactaccagggtaaatggaaggcccatatgattgacaacctagatttcaaggatgatccatacatttatgcttttgacagcctaaaatacattggcattgagatgtggcaggttaaatcatgcactttgtttgacaacaccatcagcgctgatgatcttgcgttggccaagacttttgcagaggagacatggggcaagcacaaggagccttttattcgggttaaatatctattaaacaagcaaaatggctggttaaatggacacaaccagtctccatgtggtgattaa

SEQ ID NO: 35454 - DNA, 642 bp, Zea mays
  Peptide Sequence Number=SeqID_78829
atggaggtttctcaccggggaagaagaccctcgcagaagccgaaaggaaattcgtcgattgccggagactcggggatccaatcgacaaaccgaacgcgctgcgacgaagcactcgacgagacgaacgcagcgagaggttcacgggatgccagagaagatatgcgtgcaaggaattggacgaagactcaccggttagctctgtccacgcacggcggcgaaagaccgaagtccggtgaggtcgatctcgggcctccggtgaagtccggcctggtccgagggcttggcaagcttcacgggccactggcggagctagccgaagcactggctcgacatgggggtggctggagtgggctggccacggtggccgaagctctggcggcaatggcgggcggaattgagctcgccggagctaaggagaggtggctggccggtgaagggcgtgcgcggcgaacgccagtgcgcgctctggcgcctggcacagcgtcgagcacgaggcagcgcagagagaggtcaagttcaaacgcggattgggcccaaatctttgagattaaggccacgatcccgttgaaagatctcttcctctcaggtctgaattttcagaattctgaaaattcagaatttcccattaagtcccccacatga

SEQ ID NO: 35455 - DNA, 456 bp, Zea mays
  Peptide Sequence Number=SeqID_78830
atggtgcggttggttcgagcccaaggtcgggcgaggcggagactcctcctgaggccgaggccggggtcgggcgaggatgcgattcctcccgaggtcgaggttaaggccgagccctggggtcgagtgaggcggagaccaccttccgaggccgaggtgggggccgagccctggggtcgggcgaggcggagaccaccttccgaggtcgaggtgggggcagagccctggggtcgggcgaggcggagtcctcctcctgagttcgaggcccaaggtcgggcgaggcgaagcttcctattgcgcgtgaggctaaacttggctgttgtcagcctcaccctggtgggtggcacagcagttggagcggggcgggcggcgttgttttcctgtcaggtcggtcagtggaagggcaaagtgactgcggtcacttcgaccttgccgactgaggcacatgtgtcaggataa

SEQ ID NO: 35456 - DNA, 393 bp, Zea mays
  Peptide Sequence Number=SeqID_78831
atggtctcccatttcggttatggtgggtacaagtgcggtcactgcacgacagcagtcggggttagtgaggcattgtacgccaaggcgggagcaggttacacgacgcctccccagtacatggtgcagctgttcgagaagcaccaggtgccctgctgtagggtgaggatgaccctggagcctcatcccttacaaccaggctggcgttcgttggactccgagtctttcggataccgggctgaggatactatcgaggccattgctctccacgggctgacgaccttctgtggttttcaccccttggagctgtctactcatcctattggcttgttccccgcggagaaggaggacgacccaatgtggaaggaccgagtggagcatgccaaggatatatga

SEQ ID NO: 35457 - DNA, 498 bp, Zea mays
  Peptide Sequence Number=SeqID_78832
atggcccctcggaagggttcgacagccgcctcagagcactcgggctccgcgcccactactgatcaggggttcgaaggctggcccctcggaagggaaaatagcgccgcccgccccactccgactgcggtgccacccaccagggtgaggctgacaacagccaagttcagcctcacgcgcaacaggaagctccgcctcgcccgaccttgggccttgacctcaggaggaggtctccgcctcgcccgaccccagggctcggcccccacctcgacctcggaaggtggtctctgcctcgcccgaccccagggctcggcccccacctcggcctcaaaaggtggtctccgcctcgcccgaccccagggctcggcctcaacctcgacctcgggaggaatcgcgtccttgcctgaccccggcctcggcctcaggaggagtctccgcctcgctcgaccttgggctcggaccgaccgcgccacgggggatacatcattaccctacccctag

SEQ ID NO: 35458 - DNA, 360 bp, Zea mays
  Peptide Sequence Number=SeqID_78833
atgtctcagctaatggctttgttggaggctaccaagatcaccttagacaacagagaggaacttgtggtagacctatccacggagatggtggaaaaggacctgcaggtggagcagatgtccaacgagatccaggagcttgaggagctagtgggaaccagggataacaccattgaggttctcgaggatcagctaatcaacactcagcagcaacttgcggaagccaaccaacatttggatatgcaccaccaggagatccagaaaatggaggccaacgaggatgttgacatcgagggaggagcggagccggagcccgcatctatcctagacactgctggcttagggagaccaccttccccctag

SEQ ID NO: 35459 - DNA, 2115 bp, Zea mays
  Peptide Sequence Number=SeqID_78834
atggaggtgaagcagaagggtctgcacgatcatacctgcaacgtggaagcagcagtgcggaacatcccagttctgcttggaggtatggcccctcctgtgttcgatgaaatgcccccctactacagtgaggaggtcattgcctttccaaggtgctttggaggttctggttattcagtgttcgatgaaacatctgctgagaaggtggtctgggatgaagaagtgttacttggtttcgattcacttgatttttggcagcgtctagctcatggagtggggaaccagatgcccaacgattgcaagcaggatgttgtgcccgatgccccatggttttttgttggaatgtcacagcaagtaagtacatactcaatgtccagtgaaatgggtcttacagtggcatgggatggggagatgcaagctgaaactcacacgcatgaaggattactgcagcagcttgctcaaggtgaagaagccttaaaagaatcagctaagaaggagggtgacattgaagatgaggccagcaggcctgacccaccgagtgaggcaactgcagtggttatgaatggaggaaacatggatgagtttattcctgctagtgtggtcagtgtgcttgaggatgaccctaagaaggagaaggatgctgaaaatgttgatgctactagtgctggcggtatcctttctcaagaattggctccagaatcaatcaatgaaactaatggtgtaggcgagattgtaggcgtcgctggggttgatgatcatgaagaagaggtcgtgggtagcgacatacttgaggctatgacagatgaagtggatgaggaagaaggctgttttgaaggtttttcagctataagaatacatgatgaagacgtgaacctgaaatttcttttctgtggagtaccatgcaccctggatgcatgtttattgggcacactaaaagatggcttgaatgcactcttgaatattgagatttgtgcgagtaaacttcagaaccgagccagtgctcatccgcctcttcaagctgaagatctttcacatggagttgctacaatgcgctgcgaaatcacaacttgcagttctgcacatgtggcgtatcttgtttctggcagtgcccaaacttgttttggtgatcagcttctagggagctgtatcaagaatgaaattattgagaagaggcagttagtttgtgttctactgaataatgaggatatcaagccatcttcatttgagccttggccatccattggtgtggcttgcgaagcttctacttttgacgtatggataaccatgcaaaaatgggcagcacaggttttaaaacatcttgcaccagaaatctactatagaagcttggttgcgcttggaatcgcctggataaatggtataccagtgtcctcatttggtaggcaggatgcagaccagtttattttcttttgttctaaccagtgcggagatcaagctattctaaatggctcatttgctcatgtatccaactgggcaacaccctttactaaggatagtttcatgcttgttctatatgaagcatgtattgggcaagaggtgagattggaatgcaagaacatgttgctctttgaggggaggcaaaacaagggtagtgttcgacatgggatatctgaactgacacaatggtggctaaatggttttagcccaggaaacggtgctatggcagttcagtctcagccatacactcaacaaaaattcatgaacaaattaatgggcttacagttcagaatggtgtatgatagaggcaaggagaatatagcgactgatgcttttgttcaggatttgtggccgagggtgaccatttacattccatatgggaatgtgttctcagtgcagaaggacaagactagaagacttcctcagttttgggtgggcagaagctcaacattcagcactaaattgattcgaacctttcatgattcaatggtgtgggagtgttctgtaagcgcagcgaagcgtagtggatcagtctgcaaactatggtggagtagttcggagagcagtgtgctcaacgggattgtggatttcgtgggggctgcttggatacaactgaaggttgctgacagttttgtgatcaaagagcaattggcttgggactag

SEQ ID NO: 35460 - DNA, 618 bp, Zea mays
  Peptide Sequence Number=SeqID_78835
atgaccctggagcctcatcccctgcagccaggctggcgttcgctggactctgagtcctttggataccgggctgaggatacgatcgaggcgattgctcttcacggactgaccactttctgcggattccaccccttggagctgtccactcaccccattggcttgttccccgctgagaaggaggacgacccaatgtggaaggaccgagtggagcatgccaaggatatctgggccatctacccaggtcagactgctcacttaacggtgcggtgcatgaatgccctgtatcgtctgcaagtgatgcgtggagaggcaatgtcccatctgatggcattgttggaggcgacaaagatcactttggataacagagaggagcttgtggttgacttgtccactgagatggtggaaaaggacttacaggtggagcaactgtcaaatgagatccaagagcttgaggaactagtggggacgagggagaacaccattgaggagatccaggacatggaggccaacgaggatgtcgacatcgagggtggagaggagcctgtctccagcttggacactgctggctcagggagaccaccttcccccgagtcgagtgttgccttgtttgctcactag

SEQ ID NO: 35461 - DNA, 246 bp, Zea mays
  Peptide Sequence Number=SeqID_78836
atggcgacgagctccggcggcatgctgagcacgggcgcggacagggagagaggagagtgtgagaaagagcaagctcgggggagggagaggggagaaggggtctcagccggattttatagaggggagaggagagaggagagggattttcatttaagaagaaatgctattaaatattcaaaaaccaatcatgctcaatcaaaaattattccaaataacaaacacttgaaagaaaattcattatcataa

SEQ ID NO: 35462 - DNA, 534 bp, Zea mays
  Peptide Sequence Number=SeqID_78837
atgcaggtccggcgtttgttgggaaaggagctcgacacccggtcccgtgacgagctgctggtgaaagacgaggacctaggccgaggcgacccgcgcgtcaacaaacgtcgaggacggggctgggtgagcacgaagccggccatgggaagtcgaggggaaggagctcggactggagaagcaaggggagcaagcagcgggtgcggcatccatggaagcaggggcgcgcgccatggctggagcaggagcacgccggcgaggagaagacgcgagagggagggagaagcagggagggagcgccgtggggaagagccgctcggctggggaggtgtagcagccatggagcttggggaaagggaaccggcgagcagcggagaggaacaagcggccgatctatcaaacgcctgggagggagaagatccaggcgcgctcggccatgggaagaagacagagggagcgccgtgcgttggagaggaggaagaagcctgcgcgtgggagaatatcaagcgcgcggcgagggataaggctgacggctga

SEQ ID NO: 35463 - DNA, 978 bp, Zea mays
  Peptide Sequence Number=SeqID_78838
atgaggagccagccagagtatgatggtcgtgaattcgtcgagcatggcacagagaagtgtgtcgtgactgtatacattggatccagtccgcaccatgtggaatggagtgtcactgctgctgggcatagattcaaagacacctgccaagtcgtcgcccgcaaggcattgagggccctgtgtcaaatctatgaagaagaagtggccgacacaccgctcagattctttccgccctttcagagaaaccatccagtttggatggccaggatgcgtgctttggaggagcagcagctgcttgaggacgaccccacagtcgtgtacctcactgcatacctgctcatcctggatgcacaatatgatttcttggctcggcaccaccctcaagcccctgtatctgccttggaaagtcgtgaagtcattgttgttgaagccctaaagcaagccaaggatgagcatgtacagaagttgatgaaggcctacttggtaacccataaccaacgtagagccctacggatccaagagcccgcttcatccaacccagttcaacccaggagagctaaagatccccagattcttgatggtcacccggtctctactagaggagaaaagatggcttgggaactcccgaaaggagccatagtcttggaaggaattccagtcttccctcatgctatgaataagcaagagcaccccgaatccacccaagatcccccgctagagttgtttgagcccctcaccatgaagaagattccagcaccattccttgagatcaaggaagaagctgcaagcaccccgccagcaccgctgccctctgaggagctacaagcgccagtcctgcttgaagaagagtttgaccctgtcctaccatctcagtcgctgccagaagaagtcatcaacatcagctccctcttaacccatccaggagatgtctcagatgaagttgtgcgccagcctttccagaagagaagctacctggtctga

SEQ ID NO: 35464 - DNA, 699 bp, Zea mays
  Peptide Sequence Number=SeqID_78839
atgggtcggcgcgaggccgagcgcgaaggggggagaaaggtggccggagacgggcgtgagagaggtggaaatcccgcggccttcgtgttcgtcccgcgcccaggtcggcctgagtcagcttggggtagggtaatgatggtgcctcctgtcgacgtggtcggtccgcgccctaggttgggcgatgtggaggctcctccgaggtcgaggtcgagtctgtcttccgtggccatggtcgagtccgagcccctgggtcgggcgagggggagaccgtcggctgaggccagggctgagtccgagccctggggtcgggcgaagcggtgttcgtcgtcttccggggctgagcccaagtccgagccctgggtcgggcggagcggagttcgccgtctttcggggtttagcccgagtccgagccctgggtcgggcggagcggagttcaccgtcttcaggggcttagcccaagggcttagcccaagtccgagccctgggtcgggcggagcggagttcgccgtcttccggggcttagcccgagtccgagccctgggtcgggcggagcggtgtttcctatggtgcctgactacctgtcagcctcactctgtcgagcggcacaacagtcggagcggcgcaggcggcgctgtccttctgtcaggccggtcagtggagcggcgaagtgactgcggtcacttcggctctatcgactga

SEQ ID NO: 35465 - DNA, 545 bp, Zea mays
  Peptide Sequence Number=SeqID_78840
atggaggtgtgtgacctgcgcaaggtgcccgacgcggccgcctcgggcgaccctcgaccgtgtcgccaatcaggggatggtggtggcagccaggtgacggaagccatactcgctttcgacctcctccagcagcgctgcgaagacgaggtgctcgaggtggcccagcgggaccacgaactggtgatggaacctgctcaacaaccacgcgcgcttgacctagcccccaccggagaccctcgccgtggcctcctgagccggatcacgcctcaccttgaactgcatcgacgcctcaacctgccggggcaaggtcacgctataagaatgctgggggttgtacaactccatagcttggtgatcacagtggaggactacaatagctcctacagaaggcctgccagctttttcaattatgttgatttggagctactgcatgagcacgtcgtcacggcgctttcagtggagagctactacagtttcagttgtgttgatttggagctgctgcaggagcacgtcgtcacgacgctttcagtgaagagctactacag

SEQ ID NO: 35466 - DNA, 426 bp, Zea mays
  Peptide Sequence Number=SeqID_78841
atgcgctcctctccaggacagaggcatggcagccaggcgctagcagcctgtcggcatggacagaggcatgggtgccgtgcagccagcagcctgccagcctgtgcagcaaaggcgcagagcacgcagaagcagccgactttggcgccggagctcccaccgggcttccggttccatgccacggacgaggagttggtcgtccactacctcaagaagaaggctgcatccgtgccactccccgtcgccatcgtggtcaacctttacaacttcgatgcgtgggagctacctgcatttaacatgactaataatgttttatctattctattcatggacaacgttacaatagatagggataaaacactactttcctcgtattccagatggcataactaccaccaccactacaaggggttctctgacgatgcttga

SEQ ID NO: 35467 - DNA, 165 bp, Zea mays
  Peptide Sequence Number=SeqID_78842
atgcaggcggcatgcaaccgcgccaagtggacgcgcttctccgactcccgacacgccagcatggaggcccaggctcacgcgtcacgcaaccgggaccgggaaagggggataccccgaaaaggatccttccccgtgaaggaaccaggctccgagcctccttactga

SEQ ID NO: 35468 - DNA, 636 bp, Zea mays
  Peptide Sequence Number=SeqID_78843
atgtcttctcgctcccttatgcatcgcgtccttccaccttccaaacccccggatgggggatacccgccgtcttttcgcctcatcgttggaggaacgcaactccgtgggaattggtacctttcagccatcgttcggcttcaaggattttcatcagccagcccggctgtacccccccgccggcggtcgcccgagacggtgaccaccagctcctgggtggggagaagcaagccgggctacgatcttggtcccaccctcagcttcaaggatgttcatcatcctcgctggggtgggtgccggactgagccggagctctacctcccgcgcgggttcgcgggtcaccctctcttgcggcgttcgagggagagggcgctcgctggccccgtgggtggcccggacttcgacaacgcggggctggtcgacggcgggcgtcgtcacccccagcgtgtcgagctcgtcggcctggctcccggcggccctttctgccggaaggcggctgccgcgccgtgtgcatggggggaccgcccaaggtgccacgcgctgctagggcggcgttcgtgttctggggtggtcctgcctttgcaccgggacgacgccttcacgcggaggccggtgccccactcgtccgggaggatttga

SEQ ID NO: 35469 - DNA, 2979 bp, Zea mays
  Peptide Sequence Number=SeqID_78844
atggagctactggggagatcgttcgcgccgggccatgccgccgcggcgccgaggcggggaggcgggccctgcttcgcggcggtcggaagggaggggagtggtgcgcacaggaggagatcgtcgtcgtcgtcgtcgctgaggtcgactgcgccggtggacgcgctggccgagcgagtcgtggcgccgccggagagggccgaggcggtcccgccggagccgagcgtggccgcgcgggccgtggtcaccgtgcggcggagtcggaaaagggacgccaagtgccgggtcgccgagcggctggacgcgtgcgccgactgggtcggccgcagcgtcctcctcgagctcatcagcaccgagaccgacccaagaaaaggggggccaaagaagagcaggcggtcggcgctggtgggctggtttggggagaaggacgtgaaggcggagcgggtggtgtacaccgccgacttcaacgtcgacgggtccttcggcgagccgggcgcggtcgccgtgctcaaccggcaccagcgcgagttcttcgtcgagagcatcgtggtggagggctttccctccggccccgcgcacttcacctgctactcgtgggtgcagcccacgcgcgtgcaccgcgacccgcgcgtgttcttcaccaacaagccgtacctgccggcgcagacgccgccggggctgcgggagctccgccgcctggagctcagcgacctgaggggcgagggcgctggcaccggcggcgagcgcaggaccaccgatcgggtgtgggagtacgacgtgtacaacgacctcggcaacccggacatgggcgccgagttcgcgcgcccgatcctcggcggcgaccagcagctgccgtacccgcgccggatgcggacgggccggcctaagaccttcacaggcaagcctccgcttcttccccccccccccccccccccccccccccagctcactgttcagttcttgtcaccaccgccatccgccgccccatacattccgcgacaggaacagtaccgaccgggcatggcggagggcgtagcggtcgccgtggccgtcgccgtcgcgcgtcgctttcgtatcgaacccacacgatcgcgggcgacgttgaccgacgctaacgtttcctcgtcggcgcttgcagacgaccgcgcggagagcagggtggagtacccggagcccatctacgtgtcccgggacgaggagttcgaggagggcaagaacgagatgctgtcggaaggcgcgctcaaggcgctgctccacaacttcatgccgctgctggtgagctccgtgtcgccggacttccgcgacttcgccggcttccacgacgtggacaacctcttcaaggagggcctcaggctaaagcaggccctgcaggaccagctgttccagaagatccccttcgtgcgcaaggtccaggagaacagcgagggcctcctccgctacgacacgcccgacatcatcaagagagacaagtttgcttggctgcgggacgacgagttcgcgaggcaggcgctggctggcattaaccccgtcaacatcgagcgccttcaggcgttcccgccgatgagcaagctggacccggccgtgtacggcccgccggagtcggccatcacggaggagcacatcatcgggaggctcgacggaatgtcggtgcagcaggcgctggaggacaaccggctgtacatgctggactaccacgacatcttcctgccgttcctggaccggatcaacgcgcaggacgggcggaaggcctacggcacgcgcacgctcttcttcctgacgggcgcgggcacgctgaagcccatcgcgatcgagctgcgcctcccgccgatgaccgacgggtgcgcgcgcgccaagcgggtgctcacgccgcccgccgacgccaccagcaactggctgtggcagctcgccaaggcgcacgtctgctccaacgacgcgggcgtccaccagctcatcaaccactggctgaggacgcacgcgtgcatggagccgttcatcatcgctgcgcaccggcagatgagcgcgatgcaccccatcttcaagctgctgaagccgcacatgcgctacacgctcaagatcaacgcgctggcgcggcagatcctcatcaacggcgacggcgtcatcgagtccgggttcacccctggccgctactgcatggagatgagctcgttcgcgtaccgggagctctggcggctcgaccaggagggcctccccgccgatctcatcagaagaggaatggccgtggaggacccgacgaagccgcacggtctgcggctgctcatcgaggactacccgtacgccaccgacgggctgctcctctggtcggccatcacgcggtggtgcggcgcctacgtggccacgtactacccgtcggacgagtcggtgcaggccgacaccgagctgcagtcgtggtacacggaggccgtgcagacggggcacgcggacaagcgcggcgcgccgtggtggccgcgcctgacgacgcccggggacctggcgtcgctgctcacgacgctgctgtggctgacctcggcgcagcacgcggcgctcaacttcgggcagtacccgctgggcggctacatcccgaaccggccgccgctgatgcggcggctggtgcccgccgagggggacccggagcacgcgcacctggtggccgacccgcaccgcttcttcctgtcggcgctgcccggcctgacgcaggccaccacgttcatgaccgtcatcgacacgctgtccacgcactccgccgacgagcagtacctcggggagcgccccgacgaggcgtggacggccgacccggccgcgctggcggccgagcgcgagttcgcggacgaggtgcgccgcgccgaggaggagatcggccggcgcaacaccgacgcgggccgccgcaaccgctgcggcgccggcgtgctgccctatgagctcatggcacccacgtccggcccgggcatcacctgccgcggcgtccccaacagtgtcaccatttag

SEQ ID NO: 35470 - DNA, 963 bp, Zea mays
  Peptide Sequence Number=SeqID_78845
atgtgggcgctccccatccgggggctcggaaggtggaagggcgcgatgcatgaggagagtacgaagacatggttgccatccaagggggtcaccctccttttaaaggcgactctccccacttgcgtcctcagccgtcgcggactgagtcttcaccaacacgcctccaaggtcttccccctacgacacggggggctgggtcccacgcatcatgcaagctggcccagggcagaagaagccaaaccgccgcgcgcagagcgcgtaactgcccagcggttacaagcactcctccactttcgcctagaccagcgggtgaaagggcggaccgccatgcaggcggcatgcaaccgcaccaagggggcgcaccctttcgacttcgacgcgcctagcatggaggcccaggcccacacgtcatgtaaccggcgcgccggttactacgtgcgggaaactgcaccgccacttgcgccagtaccgcgccttcttgactgcgggaccggtgccgacaggcggcacctttggcaggcgaagcagacgacgcttcacctccgccttaatgaccgcgtcaaaaaagggaccgggaaaggggatactccgaaagggatccttctccgcgaaggaagcgggccccgagccctcctactgatcagaggttcgaaggctggcccctcggaagggttcaacagccgcctcagagcactcgggctccgcgcccactactggtcagaggttcgaaggctagcccctcggaagggttcgacagccgcctcaggcccctcgggctccgcgcccactactagtcaaaggctggcccccgaagggttcgacagccgcctcagagcacgcagagcgagggatgactctaggtatgtccgatacatggccaaggctcgggctacgctcccgaggctcgggggctgctctcgcaaacccggctccagccaaaccgttgacagcgtcaacatatag

SEQ ID NO: 35471 - DNA, 726 bp, Zea mays
  Peptide Sequence Number=SeqID_78846
atggtcggtccgagccctgggtcgggcgaggcggaggctcctccgaggtcgaggtcgagtctgtcttccgaggtcgaggtcgagtccgagcccctgggtcaggcgaggcggagttcgtcgtcttccggggccgaggccgagtccgagccctggggtcgggcgaggcggagtttgtcgtcttccggggctgaggccgagtccgagccctggggtcgggcgaggcggagttcgtcgtcttccggggccgaggccgactccgagccctggggtcgggcgaggcaaagttcgtcgtcttccggggtcgaggccgagttcgagccctggggtcggtcgaggcggagttcgccgtcttccggggccgaggccgagtccgagccctggggtcgggcgaggcggagccggtcagtggagcggcgaagtgactacggtcacttcggctctgtcgatcgaagggcgcgcgtcaggatgaggtgtcaggccatccttgcattaaatgctcctgcgatagggtcggtcggcgtggcgatttggccaaggttgcttcttggcgaaggctgggcctcgagcgagccgaagctttgtgctgatgggggttaccagctgagattaggagtcttgggggtacccctaattatggtccccgacacgccggttcctgggtatggagaagtcacatcgctgctcaagccagtaccgcgcctcctcgaggccgccgcagaagactga

SEQ ID NO: 35472 - DNA, 885 bp, Zea mays
  Peptide Sequence Number=SeqID_78847
atgcaggctcgtgctgatggaccaagagcgatgaagagcaagtattgggtcttgactgatggaccagagcagccgggtgaccagccgcggttagaatgcttgggtgttgtgaatggaggttgtcggtaccctgaatcagggctccggggccgccgcgtgaccggaaaaggtggtatactccaggataccatcagtaggtccggacctcctcgagaaagcgctggacctctgtactcacgacccggatctccgagtagggtccaaggctcccatgcaagcaagccggaccccttgggtgaggtccagacctctctgagcggggtccgggccacccacagcgaggtcccgagacaggggacaccctggcctaggcaaaggtctggcgatgccagggccatcctgcagacggcgtgcctgtccagtccattatcaaacagtgcgcccgtgctgcgggggcgggtgcactccgccacccggccggagaattccctctccgacatttggcgcgccagcatgatggtgcaaatcattgagcaccgcgccgagacttcgacggatttcctggtggaggaagaagttgtttcttccacgccacaggttcccaaccgcccagtgccgggcactgctgctgtgcacgctgcacagcagcatacaactgcgcagacatcccgtactccgccgaggacggctccgggagcattgtcagcagccagggagttgctgcgtcaccctccaagctccacggcctcaccgggggccatgaagcagtggcgggacgacgtcgaccgactgctcggcatggaacactctacctcgaccagaccaacgacttctgggcagaactcaaccgcaggcgtgcgggagaggatgcccgcatctctttag

SEQ ID NO: 35473 - DNA, 672 bp, Zea mays
  Peptide Sequence Number=SeqID_78848
atggaacacaaggggaaaaaaggggaatcgcggctcgtgttatcctgcgcccagggcagatgcgcttgcagtagggggttacaagcgttcgcgagagagggagagatcctgttcgtcagcccgtcctcccgcgcagccaccttctcgtacgagggccctggaccttccttttatagatgtaaggagagggcccaggtgtacaatggggggtgtagcagtatgctaacgtgtccggcagagaggagccagagtcctatgtacatgccgacgtggctgttggagagcccaaggtcgggcgaggcggagactcctccgaggtcgaggctgagggcgagccctggggtcgggcgaggcggagaccgtcttccgaggtcgaggttgagtccgagccctagggtcgggcgaggcggagactgtcttctgaggtcgaggttgagtccgagccctggtgtcgggcgaggcggagaccgtcttccgaggtcgaggcggggacgagccccagggtcgggcgaggcggagcttcctatggcgcctgaggctgggctcggcggctgtcaacctcaccctggcgggtggcacaacagtcggagcagggcaggcggcgctattttcctgtcaggtcagtcagtggaggggcgaagtgactgcggtcacttcggccctgccgactga

SEQ ID NO: 35474 - DNA, 390 bp, Zea mays
  Peptide Sequence Number=SeqID_78849
atgaccccgtctctcacagtctcgctcgcctctcgcaaaccctatccccgaccccgattcccctctcgcctctcggtctctagcggcggcaccgtcgttttcccccatcggctcggcgactcccgagtcccgacctcgatgctaccggctcagtggctctggtgctccgtcctccactcctcctcctccttcgtccattcctccggtgcaaggtttgttactttgtttatctcggcgcctcccgacctcgacaatatcggctctggttctctgactttgaaaggtccgtctctggtgtgccatgccgtcctattcggcggcctcagcaacaacatcatctcggccggagccctggggatcacgatcgcacagctggtgcgcatcaactga

SEQ ID NO: 35475 - DNA, 237 bp, Zea mays
  Peptide Sequence Number=SeqID_78850
atggagcagcatcccgggctgaagaggttgctggagactacccatctggagcttgacggggagttgttcgtcaacacgcagcaggcccctacctggcgcgccaactatcggcgtttcgacctcggggggtccctggatcgacgaggggctgagaaccgctgtcgtcatgggagcatgcggggtgccatcattacttgttttaccggggcgagccagatgggactgaaagtcgcctag

SEQ ID NO: 35476 - DNA, 471 bp, Zea mays
  Peptide Sequence Number=SeqID_78851
atgatgaccgcgtcaaaaaaggtgcgccacatcgtttatattcgtatccttttccccttccccttcctctctcttgttatagggaccgggaaaggggatactccgaaagggatccttctccgcgaaggaagcgggccccgagccctcctaccgatcagggccgcctcagaccactcgggctccacgcccactactgatcaggggttcgaaggctggccccccgaagggttcgacagccgccccagaacacgcagagcgagggatgactctgggtacgtccgatacatggccgaggctcgggctacactcctgagaggctcgggggctgctctcgcaaacccggctccgaccaaaccgttgacagcgtcaacataccagcccgagaactcggaacccgaccatgcacccgggctacgatcagatcgcatgagggaacaaccagaccggccgaggcgtcatgaaaggcactaa

SEQ ID NO: 35477 - DNA, 363 bp, Zea mays
  Peptide Sequence Number=SeqID_78852
atggagcgccgcagagctgcaccaccggcggcacagcgggtggtgctcggagctggtggagaatgggagatgactttgcaatacatagctgttttaagcgttgggctgactatctacttgcgattctctacatatgaggactccgaggatttggagaaagacctaaagctgttgctgtctccagtaagagtaggcgcagacgccttgtcatgggcagctaagaagatagagccaaacaaggtgggcctgccaacgtctccttccacgacggcggtgaaagaccgggttcttcaggccgcggcgaagcacgagtcgcagccatcggatgccgacgagtcgtcggtccaaacagccgaggcatga

SEQ ID NO: 35478 - DNA, 2838 bp, Zea mays
  Peptide Sequence Number=SeqID_78853
atggaaagcggcgccatggtactcggtgttgttcgtcccgaggagtcccctgaccgcaacggcggtgggccacgggacgatttgggcccatcgcagatgcaggtcgatggtcccgttgttctcaaccaatccgctgagctcgtctcggatgattcgatggccgtcgatgacgtcccagttcaacaaccatcaggccagccggtggaggcaacacaacagtctcctgcgacgctgattgatactatcatggaggtgcagaagcagctgaagcggaagagggcttctaatagcccagtgattgatgccgccgataaggacgctcttgttgctgggtgccggcaggagctcgaggggctcttccagtattacaaggaggtttctgaccgcaagatgcagcttgacggcgggaacctgtccttcaacgggatggttggctgtttgcttgaggagagcagtctcgggctgactaggttggtggacgaaatatatcaacagctgaagggattggagggtgtgtctgtggcttcagtccgcagctctgtgctgctcgctggccagaggatgatgtacgggaattcttcactggacgctgatgtgttagaagatgaatcggagtcggctctttggtgctgggagagtttgtccaatcctttcaatacatgccatgtttctcttaacaactggaggaaatctggagcttacatccaagtaaatgatctaaaaaaagcatcattgaaattaaacaaatcactgaacctggaagggatcagatcaatggtggaaagagcgacacaaaagaacacagaacggggtgtgaaagatgctgtatcagcagttaaggaattgatgcaagagacagataaaaatgaccaaaatgttagaaggcttgaggatactagtgtctctgagccgcagaatgggaactcacttggtaatgagaaagagattcagaaagcacaaaaacaagtggagaaggaaataaagcgccaggagaaagaagaagctcagatgagaaaacttcaaaagaaacagcaagaagaggccctaagagaacagaagagacatgaaaaggaggaggctgaagccaagaagcaacaaaagaagcaggaagatgaagctctgaaagaacagaagagacgtgaaaaggaggaggctgaagctaagaaacaacaaaagaagcaggaagaggaagttctgaaagaacagaagcgtcgtgaaaaggaagaagctgaaatgaagaaacaacagaaaaaacagcaagatgaagctgagaaagaacagaagcgccttgagaaggaagctgcacaactcaagaagcaactggtcattcaaaaacaagcttctatgatggaacgctttttcaaaagtaagaaagacaatggaaaacatcaaaaacctggagagaacaactcagctgaagatccatgcaatgacaacaaagagacaataccagcaaccacatcaaaaattgattcttcattgtatcaacaagagggatgggttttagatgatcttcggaggttgcaggtcactggttggaagaagctatctagctacaataggtcctccagatggggtacaagatgcaagcccaagatggaggcatttaaagagctgaagcttcagaaatcctcagatgatatggttgatgaaatactttccactccaaatgaagatggtggccgcaatccaattcaggagaacgaacatgataagcttgaaagtgatattgacatgatacaggctagtgaaatgcaatgccatggtgctagtaaccctaaacctctgcaaacgagattaattagaatgaagcttctgcaatttgacaaaagtaacaggccagcatattatggatcctggaggaagaaaagtgctgctattagtccaaggtgtccatttaagatggatcctgatcttgactacgaggttgatagtgatgatgaatgggaagaggaggatcctggtgagagtctttctgactgtgagaaggataatgatgaatttatggaggaagattccaaaattacagatgaagaggatgaagatagctttgttgtgcctgatggctatctctcagacaacgaggggatacaaattgaaagcctattggacgataaagaagaggaggccaatagctccccaaatggtcagtgtacagaagttgaagagttcaggtctctgctccgccaacaaagagtcctgaacactttgactgagcaagctctccggaagagccaacctcttattatatgcaacctaaatcacgaaaaagctgaattactgactgctgaagacctcaagggaacggaaaagattgagcagctatgcttgcaagttctttcaatgcgcatctgtccaggaggtgcaattgttgatgtgcctctaactgacagctcatctgcaactgttgaggaaattaaccaacccaatgtgaagaatggctctcctgaggctgcatctgctataccagaaacagacctgccagaatttgtacaggtgataagatcatgtcgagatggtatccacaaggtggtggaattactgcagcacaagtttccaaatgttccaaagactcaactgaatcgtaaagtgagggagatatctgacttcattgacaatcattggaaggtaaagaaagagattcttgacaagctagggttggattcgtcaccagtgaaacccaagaagaataaaagcatagctatgtacttctcgaagagatgtttacctccggaagaggctgtcaatgctctggctgcttctcctgagttgcggttgaaatctagaaatggtggccgcgaagctccccagatcaatctgttcccctcagagcagtaa

SEQ ID NO: 35479 - DNA, 2001 bp, Zea mays
  Peptide Sequence Number=SeqID_78854
atggaaggtgagcggcgccgatggaaggggatggcggggagcagggcgaggatggcaagggacgacactgtggatgggtgtaacaccccgtccaatccctggaccgacggagcagctatcgtcgtcgtcgccgactcgtcggggtctcggggctcggaggagcagctgtcgtcgtcgtcggggtctcggggctcaggctcgggggacagaaccgcagaagctacggtctccagcagccgagcaggggagtttgtcaccggctcaccgcctcaccggtgcgagtgcgccgcgctgccgcctgccgccgtgccgcccaccgccgccacctcgacgccgaacggccgaagagccactgccagtgccacaccacacgccgattctctgaacaccaatctgcgcaatcccggcaaaatcccaaaccctgcctcgtcgtcgcaccgcctccactcgtcccggatcaaccacctcctcggtccgcaaccacaaccacacccgccctcccgctcgccgcagccagaaccagctccaacccaaccagaaccagctcgccccggccgccgcgaccgtcccccctcatcgactcgaggcaacgaagcggccggatgggagcagcagcctgaccctgacgcgatgagcccgcccgccatgctgctgcccgtctgctccgccgcgcccagctgctcccccctctgcccggtgacggcctcgcacgtcgtcgcgcgggtggcgcggagggtggacgtcggcgccgcgctcaggtcctacgccgactcgctcgtcgcgcaggtgcccgaccgcccgccgctcgccgactcctccatactctccccctacatcgccgcgccggacgacatcgcgcgagccttcggcgcccccgcctccgagctcccgccgctccccagcgccgaccccagccctgggctatgttgcacgggcaccgaccagccgctggcggcagtcgcggacctggccgcaactgccgtggtcaactcggctcccaccgacgccgcggagcgggccctgtcggacgcgccgttccccagcacgttcccgtctgacgcgtccgaggtcgaggactccgtggccaggctcatcgataaggtcggcaagcaggtcttccaggcggaggacgcgctcaccgaggcctacgacaagctgaggctgtccgcgtacgacgcgctcggtgcgtggaggaagacggtgcgcgacgcgataggtgggctcaaggcgtcggtcgacgccggtaagcaacaggccgccggaggggtcacggatgcttccggcgcgttgcacgagaaggtggccggagctgggactgtggctgttgatgttctcaggaaggcgattgttgcagcagaggattcactgggcagtgctgccacattcgttgtgtattcttatgggtcggcgaaggagtctctaccaccaaatgttagagatctgttgagctcgtctgaggagaaagctagtctagtcttgagaccaatcggaaatgctctgcaacaggtctatgtagttgttgaaggtgttgagaagaatgttggtttggatccaagtgatcctattgttcaattggcagttgtgcttggaggttcagtgacaataggtggctattctggagacttgtcacctgaatcagcgtttgacttattgaaaaacgatgacaaagccgatttgagggaaaaagatggtgttcctgatctacgcctcggggctaggtctaaatatgcaagtgtagcttcgcctgagatcaaagatccagtaaagagtatgctcaaagatgaaagagagtttgatgatgctttactggcagttgtcatccgaaacttgaaattggtgaagcgaccttaccttgttaaaggtggtttccaagcatggtcaaagaaccttcgtgtcaaagaactgaaacctgagactgcattaacgtcaataaatgaggatgttgaggaaatcctagaacaaataaagcccaccccaactcttgtgtttggatctcttctg

SEQ ID NO: 35480 - DNA, 423 bp, Zea mays
  Peptide Sequence Number=SeqID_78855
atgactatgcgcagcctgagtgcaccggacagcgtccgaaacagagagaagaagaaaagaagagaaaatacaaaaagaaaaagacttggctggtgcagccatgactatgcgcagcctgagtgcatcggactgtccggtggtacactggacagcgtccggacatttttagacaggatcttctattccactgccacctactcgaagggtcttctcattccactgtgtcctagtcttcgagtagagttattcgcctattcaccccccccctctaggcgacatccagatcttgttcccgagcaaagggaacttacagattcggaccccgtgagaaagtgtcggaccccagcatacatcatctgggcctccgggtacgacccaggacctcagcattcccccgaatgggacctggacccctctaagtga

SEQ ID NO: 35481 - DNA, 483 bp, Zea mays
  Peptide Sequence Number=SeqID_78856
atgtccggcgggcccagaagtcagaactccaacggtcagattccaacggcactggtgacgtggctggggcaccggacatctctgctccgccaacaaagagtcctgaacactttgactgagcaagctctccggaagagccaacctcttattatatgcaacctaaatcacgaaaaagctgaattactgactgctgaagacctcaagggaacggaaaagattgagcagctatgcttgcaagttctttcaatgcgcatctgtccaggaggtgcaattgttgatgtgcctctaactgacagctcatctgcaactgttgaggaaattaaccaacccaatgtgaagaatggctctcctgaggctgcatctgctataccagaaacagacctgccagaatttgtacaggtgataagatcatgtcgagatggtatccacaaggtggtggaattactgcagcacaagtttccaaatgttccaagactcaactga

SEQ ID NO: 35482 - DNA, 192 bp, Zea mays
  Peptide Sequence Number=SeqID_78857
atgggccaccgtgcaacgctcgccgccgccgtccttctcgccgccgtcgtggcgctgtgcctggcggcgcgctacggcgaaatagtggtagcagtttcgaacaagaagaagaagaagcaggcgatgctgcctgtgcgcatgctccgaatttctagggcacgagttcatgaaccacgacccagaggaacatga

SEQ ID NO: 35483 - DNA, 879 bp, Zea mays
  Peptide Sequence Number=SeqID_78858
atggaactcgtcaccaaagtccaacctctcatcaatcatgcatgcacagaggaggctcaaagggaagcaaaagaaagaaatagtgtatggagaagagcaggacgcagggtgttcagtcagtggcccgcgcctcccccgctcggcccctgcgggagcatctccatcagcttggacaccatcgcctcgtacgccgaccccgcggcggccgggctcggcggcacgggcctcgcggcgtcggcgcaccgcgccgccaggcacagcgccacgacggcggcgagaaggacggcggcggcgagcgttgcacggtggcccatgactcttgatctctgctactgcctgtgctctgcctcagctccgctggctagggcgtgccactctgggcgggcgcggtacgtcgtagacagaatgctgacccgttttaagtgctgctggctgctgtttgcctttgccggttcgccctcggggatcaagaaccggtcaagcattcaactccgcgaccaccacgatgtgaactgtttttttttcctatccggctttggacccctgggctctgctgcgttggacggccagggaaacggtcaaggatttgccacgctcggtgacacggaggccgcccggcccgaattttcggtgatcctctcacgggcggcatggggttttcaggtgcagcggccaggccagcaggttgttgtgccggtgcaccgccgcctgatgtggaacccggagagcagcgaaaacagttggggtttgggacccccaaagtgccaaagtccacgcacgcgtgtcctcggcaggagccagcgcccgggtttgggtttccgacgcgtccaaggcagaggcagcacggggttggtagcgctggaaagtcaaggcggttga

SEQ ID NO: 35484 - DNA, 1010 bp, Zea mays
  Peptide Sequence Number=SeqID_78859
acaaatactttggcaaggatctgtttgagagaaagccactaataaggtcgcttatagaagaggagctctttaggctagcagacgaggcagagaagaaggaactggaagagtcggaagcagcagaggcgaaggctagagccgagcaagctgccaaggagatggcacaagttcaaacagttgaattggttatcaacgagcaaaatgtacttgaagatggtcgagatagcaacaccaaagacagtctaaagaacgcaaatgacagtgctaacaagaaatgtatcgatggtggggcttctgtggagtatggtttcaatgaaaacagctgttacgctgctgaaggttcagaagagcacaaagttgatgatgataataaaaacataactaaggatggcaatggtggaaaggtcgcagttgcacccactgcaaacactgattgtaccttacaactacagggttcaagcaacgtcgaagctgagacgactatgaagagcaatgttggaaccctagaagcgtcaaaagatggagaagtgagagatgccagaaatggagaaaacaatggcactgaagatggtgggaatgaaggaatcaggagtgggaatgttggtagcaatgcagaagctgaagagtctcacggtcatggaaataatgaacgcgcagaacataccgaagatgacaaggctcaggaatgtagccacaatgagaacagtgcaagtgtaggaatccttggcgatggagacggtgaagctagagaaggcgatataaatgcggaagcggaacaaagtcaagcagacggtggcggcaatagtaaagcggaagatgctgagcacaatgaaaacaccaaaactgacgccaattcaagcaagaatggtactactgctgctgggaatggaaagaccgatgttgacgtgaagggcgcaacagcgatggcgcagctgaaggaagccctgtgtgatgagatggatgtagattgcaagggaggtggagtaggaccccggttatgtagatcgtag

SEQ ID NO: 35485 - DNA, 396 bp, Zea mays
  Peptide Sequence Number=SeqID_78860
atgtcggacgaccttgttgttcctgtccactttgaagttggccaagaactttgctttcgcctcctagatcatccgctccttgtgctcctcgaactggagctgctcgtcagccagcaagaaatatcagaactatcccttgaaccggccattgagggccgatttgatgagcttagatgtgctgtccccagcggagtcgccaaaaagtatgttgacgccttttcggagcgccaaacactcaacaagaaccgtggcggtgccctctgcacaggggcggacggtccgcgcgcagggaccagacggtccgcggcctggtgcgaggcgcggtggtgctctctgcgcaagggcggactgtccgcggcctggggccggatggtccgcggcctggtgcgcggctag

SEQ ID NO: 35486 - DNA, 330 bp, Zea mays
  Peptide Sequence Number=SeqID_78861
atgggatccgacggcaagaggatgaataatgaaggggcagcccagttcggcggctcgcagccgcagcaacagccgccgccgcctcagccgccacagcagcagcagcaacatcaacagcatcacatggcaataggaggcagaggaggattcggccaacaaggcggcggcggcggctcctcgtcgtcgtcagggcttggccggcaagacagggcgagaggatattttccttttgggccacttcctcgtcacggacaaggtccctggaaacaccaaaaggaaaggagtgccgtgtttgagcgtactccatcaatcaacagtgtgtgtgtctga

SEQ ID NO: 35487 - DNA, 384 bp, Zea mays
  Peptide Sequence Number=SeqID_78862
atgagcaagaacacaagagacacaagatttatcccgaggttcggtcacaccacaaaagaccggttgaacctccccctagggcggttgaacctcccctggcaggcctggcagcctgtctgccagtctgactggcagactgacgcgcagactgacctgcagactgactgttggtcagaggtcagaggggtcagagaccagctgaactgcccctcaggaccagttcaactggtcttgtccagagagtttaggagagaaaaccccagctcaactgcccggaggcaagttcagctgctgaagaagctcaactcagctgaagttaagttcagctggaaagctcagctgcagttgaagaagttcagctgcttttcagcaagaacactctag

SEQ ID NO: 35488 - DNA, 1005 bp, Zea mays
  Peptide Sequence Number=SeqID_78863
atgacctcagtttgctcatcttgctgttctttcaaatgccagatagcccactggagacaaggtcacaaagatgaatgccatccaccaagtgttaatactaggcatgatgaagaagaagaaaaggctaaagtgggaagagctgccaaagagaatgcatcagttggtgttaaacaggttgctgaaatgaacaaaccagctgttggatctaaaacttctgatgcaaaccatgatttgaagagttcaaatggtaaaagtaaacatatgccttctgaagcagtatgttccagtgcagagattcctggaggtcataagtccaacagcacagttgaaatttctcaaaacgttcagtctgttgacagtagtaagatgggatcaagtatcaaacatgcaaattttgttgaagatggttcttccaccgaggacttaaatgaggcattgccatgtaactttcattcttcttcaccaaacattaatggtcgtagcagttttgtaaacaaagaattctgcaatcattccaaggaacaccaaagagctaaggatgccagtgttgttgaggattgttctcagacaagcagtaccagggagcttgaagacagtaacattcaccacgtagctgcatctgttgtcttggagtccaaaagttctaggactcctattcatgtagaacttgagaggtctaaaacaaaatctgctgggaatgacagcattcagagcacgaaacctgtgccatctgcattgactgttgacaaagccacttcagttcgtgggagtctttctattacacctaataattcatctaaagtagcagatagtcttcctgatagaagttttaaaccttcagataggtcaggctcaacaacaaataatcttgcaacatctctgaagaaaatgacactcttcccatatgaactttttgtgaagctctacagcaaggttgagttgcacccttttggtcttcataaccttggtaacagttgctatgcaaatgctgtttttagtgtttga

SEQ ID NO: 35489 - DNA, 753 bp, Zea mays
  Peptide Sequence Number=SeqID_78864
atgacaaaacaacggctcctcgtcctcggctcctcccgctcccctccgcactgtgtcgagccgagcgtgccgctggccgaccttggcaccttgcccgcgcccgcccgagccccgacgctgcctgaagcagcaagtgacagctcccctgggcgagccggtttactaccagcacgcgcaacgcctgaacggccgtcgctgccggctacgccaggtgctcaggtcttattcggccccttcgccggcgacgagcgccaccaggatgcgtccgagactaagttgatgaagcagcctacttgggtcttctttgagaaagaatcggcaaaggaaactttactggccactgaaacaaggtgtattgatgcaaccttctacacttgcattgatagattggcgatgcttagaccatcactcactgaaccaaatctaggaattgagtatgcagtatatctgtttgctaagtgtaaatcgagtgagatggtaactgacttaagagaacaaattctccaactcattcagcatgattgtaaggatcaagaggaaaaatcacgggcagagctactggagaagctcaacagatgtaaaagagatacacttatcgaactgtgtcgctcgtttgatttaattggctcaagagctaataggaagaaatacaagaaaagaaagcgtgtcagagaagaggaaaatttgtctgctggtaaaccttcaaaggctatcttcagcaaccttacctatcttgttagagcagtggtttga

SEQ ID NO: 35490 - DNA, 165 bp, Zea mays
  Peptide Sequence Number=SeqID_78865
atgacgaaggtgatgcttgccgaaagtgttcaaaactcagaaaatggaaacaaagataaattacaaatgtaccttcagcttgaaggaaagaaaatacaggcgtggcgcaaaagtgaatgccaagtcagcgtgaacagtacgggaatactgttcacctatttatag

SEQ ID NO: 35491 - DNA, 303 bp, Zea mays
  Peptide Sequence Number=SeqID_78866
atggtcatgggagcgagacaacggttgcggatgcgagccgttcaggcgagcgcacgcggagctacgacagttgtggtagacaaatctaacccatgggaccgagatgacaacgagtgggggtgggtaatagcagctgacaagtggggttgtggtggcatcgaggagaagcaagggtgcgtggttggagacaaagataaattacaaatgtaccttcggcttgaaggaaagaaaatacaggcgtggcgcaaaagtgaatgccaagtcagcgtgaacagtacgggaatactgttcacctatttatag

SEQ ID NO: 35492 - DNA, 726 bp, Zea mays
  Peptide Sequence Number=SeqID_78867
atgtcttcttcctcccttatgcgtcgtgtctttccatcttccaagcccccggatggggggcccggccgcacccctccaccggcggtcacccaagatggtgacctccggcttgatggtgggggaaagcgagccgggctgcggcctctacccctccctcggcctcaaggattttcgtcatccaggccaagatggaggatgaggcgagtcggggggctgcccctgcatgggtcggctgctgttttcttcccccggcgcctgggggagaatggcatccttcagtctcacggggacttcctccagccatgccgggataggccttccccatggagtggggttgttcgtacctgtggagggggaaccggagttccgctggcacttcgaatgccacgccaagtctcgcctgttgattatctgaaacgcttcaccaagcgtgagtcgccccgtgtcaaggtgacgagtgagctgggttgcccgtcagcgggactgacgccggagttgatcagccgaggcctcgggtcgggctggcgcccttggaagatggttggccgaggccccaggggtaaccggctgagccgcctgctcgggccggattcccggagaagtccccggaccgcgtcgccgtccgaggctgggtcggatctcgctgaaggcgtcgtcgatgccgagggtgctacagcccccttccagcgtgaagatccgagcctgcaggatcagattatcttgtag

SEQ ID NO: 35493 - DNA, 207 bp, Zea mays
  Peptide Sequence Number=SeqID_78868
atggtcaatgcggccgaaagtgggccggcagtaatgacggtggcaggcgggcgggagcagcagtcacgtcgtcagccaggctcacgtcccatccagggacagcaagagagcctcctcccacggcgtgaagacgggaccgggaaagggggataccccgaaaaggatccttctctgcgaaggaaccgggctccgagccccccctactga

SEQ ID NO: 35494 - DNA, 396 bp, Zea mays
  Peptide Sequence Number=SeqID_78869
atgacgaacggtgaggtgagcaccaacgacatgaacgcggcagcgctcggcgagcttgggatcgtgcagcagggccctcggccgaggttcagcgctagtggccatagagcaggcatgacggtgctccggccgtccggcgcgcagcagcaactacaaaaaagagaaaaacagaatctcgccctcgagattcaagaagaggttagcaagaaccacaaagctggttcatcggttgtccaaggctttcttgagttaactttgactcggcaaagcttgcaaggcgttaaagaagaggaagcaaccaatggtgaagttggggatgctttatccccgaacaaggatggaaaagaggaggctttaaagggtaggttcaaagtaagcatgagggcaagggcatag

SEQ ID NO: 35495 - DNA, 771 bp, Zea mays
  Peptide Sequence Number=SeqID_78870
atggaaggctctttggtcattaggacatcctactgctcagaggtggaaggattccctcatctcttgcggagttgcgcgcttcgcatggggatccgcaagaagccggagtacatctggaaagaatatcgcgagaatggaactgagaagtgctctatggcagtctacctgggagaaagccgaagctacccaaaccacccctttccaagtcaccttcaccggacaccacttcccaaacacttgccaaaatgttgcccgaaaagccctccgatagctatgccaaaactacagcagagaggaagagatcctactgaggatgaccccaccatcatctacatggtcggatatctccacactctcgataaccactatgatgacctttcctcccactacacccacctgaactcccgggtggaaagcttagagcaacaggtcaaggaacttaaaaaggagaaggcgtccgtccaagagagtctcgaaatagcagaaggtgaagaggccaacactcgtgaagcctaccgaaccctaaagatggactacgataagaagctaaagaagctcgccccaacgaagaaaattcgaaaaaagaccaagagccaaggatgccagactgagcggaagaaggaagcccctccagcactacctccctccaggatagagaacttgtccgacgttgaggacatgtccctagctagccttgacgaccttctcaaggaatttggggacactttagaaagggagttcggaagtaccttagaaagcgctcgcgtgtag

SEQ ID NO: 35496 - DNA, 558 bp, Zea mays
  Peptide Sequence Number=SeqID_78871
atggctcctgcagagatgaaggtacaagatataccagaaaagactattgacacttctctgtcttcctctgtcgatgtttcagaaatactgaagctaaaactaatgaaggcgcacgtgaagttgagaacctcgggaccacaatgtcagagattgacagacttatatttgacgtggctccccgagaaagacatcattgaagtatccactgataaggctttgactttaaaaatgaaagaattgaaaaaggcttcagaggagacagagtcggacctacagcacctgggcggccaaggactgtccgatgaagatatttctaaattgaaagaattctcccttgctcgtggatacaagcctagatccgtgctctttggcggtgtggatgaagagattttgggtgtattcctgaccgtgccgaagcaaagattgttaatattttatcaaagactattggatttccgaagcttgagcgagacctcagtaactataggagacaacacattattgggagcttattctactcgaattttaaggtgtaaactgttatgtctgcctatttga

SEQ ID NO: 35497 - DNA, 291 bp, Zea mays
  Peptide Sequence Number=SeqID_78872
atgccccctacaccaccacagggcatcccaactgctggaggagaccttgatgaagacgacgccgacgaccacgccggtggcagttcgagccacggcacggggtacaacccatacaaaattacatacatgccctttacatttggtgataattctatagcattctatcgaggtccaaatggccttttcatctttaagtcggttcctttttctgcgaacatgccgaagctttcctgcttcacagcttcgggcactgtgtcaaccttcgtatcttttgagcttccccctttctga

SEQ ID NO: 35498 - DNA, 309 bp, Zea mays
  Peptide Sequence Number=SeqID_78873
atgaagggcacgactcggcaaactcgctggcgggtttgtggccacgagactggggtcagagaggggagaacggcggggaaaaggctccgggcgggttgggacaattccggtgaggaattccggccgctaggagaggcaatcgactgtgatagggctcggtctagattcagtgaaggtggggaagcactatggaccaacgccgaggcactagacggggttgggttggccagacatcgtgggcgcgacgagcaagcgtggccgcacactggcgaggctagaagaccggcacgagcaggcacgggtctctag

SEQ ID NO: 35499 - DNA, 219 bp, Zea mays
  Peptide Sequence Number=SeqID_78874
atgtcgcaatctaaatttattaacaaattaatattgcgaggggctactgttgggggccttcggcttccgaaggtatcttcggacttgtatcagaaagggggaagctcaaaagatacgaaggttgacacagtgcccgaagctgtgaagcaggaaagcttcggcatgttcgcagaaaaaggaaccgacttaaagatgaaaaggccatttggacctcgatag

SEQ ID NO: 35500 - DNA, 447 bp, Zea mays
  Peptide Sequence Number=SeqID_78875
atgtttttgaggaccttcggaagccgaaggcccccaacagagctctcggaggagccggagccaaaggggtggatcgctagacccatcactcgtgacgtcgctcgcggaggggtagctgacggcctcgacttgaagtactaccctcgtcgttcgacctacagtgttggaggcgtgattgtctcgccaattagtgaaggcaatcccaggctgaacagcatggtcaacctggtcgccgtgctcaacacagaactggaccacgcccttgacgagttgggcaaggttcgggcggaggttgcggaattgcgtgttgagtgcgcaacacaccactatctggatggtggttctcccgcccctgtcgggattcagcacccttaccgttcaccgcctcgtggtctcttcgactatgctaccccagactataggacccggatagatttggatccatag

SEQ ID NO: 35501 - DNA, 345 bp, Zea mays
  Peptide Sequence Number=SeqID_78876
atgtgtcaagtgtttgaacgtactaagcacatgccgagaaatatggtaaatcggtacaagtgcggtcactgcaagacggcagtcggggtcagtgaggcattatacgccaaggcggtacttcttaggatgattggttgctggtgtgacttggcctccatccctgccaccgggatagacggtcgatgtatccatttagttcaatggatgttgatgttgcctttggtttccggatgtctcaaaaagctcatcaatcctgatctcatgggttggttcctcctcatatcaaaatctcgtataaatctttggcatgataatctccatgatgatccagaaatagttctatga

SEQ ID NO: 35502 - DNA, 531 bp, Zea mays
  Peptide Sequence Number=SeqID_78877
atgaccgcctcaaaaaggggtcgggaaaggagatattttgaaagagtccttctcagcaaaggaaatgggccccgagccctcctactgatcaggggttcgaaggttgcgccctgcggggttcggcaaccgccccagagcactggggctccgagccctctactgatcaggggttcgaaggctggctcctcggaagggttcgacagccaccccagagcatgcagagtcagagatgaccctggggaggcaccgagccctcggaccctatcaaatggtccgggtccagcgaatcacctgcaggataacgacactattcaccatattccgaccactgtgccaaccaccggggtaagactaacaacagcaagttaccgcctctgccgagttcagcctcgggcgcaacaaggattttcgcctcgcccgacccaggcctcggccccagcctcggcctcgggaggaatcgtcaccacgcccgacccaggcctcggcctcagcctcggcctcgggaggaggtcttcgcctcgctcgacctag

SEQ ID NO: 35503 - DNA, 342 bp, Zea mays
  Peptide Sequence Number=SeqID_78878
atggatgttttgatgattaggaaccttggcgaggaccagcaaggacttgggaaaggcctaggtgttgaagaggagcagcaagggcgcccacaacaggaaggagatcaagtccgactcggctacgactccatctcggctccacatactatatcttctgatcaatacagatttgaccttgcaatcgcggtttcgctacctcttggtgatgatgatgaagcaaggatccctacagacttcgatgaatgtgttagccgccaagatcttgaggcaaacaacaagctcctgaaggagcaaatggaggagacggtctgtggcggaactgcccgaatgattccaacttaa

SEQ ID NO: 35504 - DNA, 135 bp, Zea mays
  Peptide Sequence Number=SeqID_78879
atgtggtctcacattccggttatggtgggtacaagtgcggtcactgcacgacagcagtcagggtcagtactccttaggatgattggttgctggtgtgacttggcctccatccctgccactgggatagacggttga

SEQ ID NO: 35505 - DNA, 609 bp, Zea mays
  Peptide Sequence Number=SeqID_78880
atggagaacagcgaggaggggttcaccgctgtgcgcagaggagggcgcagggaactagctgccatggacagggaagaagggagctgggtggccatggaagggagggagctccctgcggtgccgagtgggaggaggagtgcctccatggaagaagaaagggggcgctgggaaggggatggagcagcggcactgtgcagggctgctgctgggcaccggccatggagcaaggagctcgctgaggttgttgtcgccgcgagcagggaggaagaaggggcgctatgcagggcgtctgctgcacccagggagctcctatggcaagggacagagggaggagggagctacgcaggaaggggcgccgagcatagggaactttggatgccctggctgctggccgagcagaggcgtcggtctgcaacagagggcgcgagccagagaagggtagaggttcggccatggctgtttctaccccgcgcaagggaggccaaggatggacgccatgggaaggagctcggctgtaggggggcttctcaccatggagagagggcgcaggggaaggtggagctgctgctgcgtgaggaagaaacagggagaagagagaatggcggctga

SEQ ID NO: 35506 - DNA, 783 bp, Zea mays
  Peptide Sequence Number=SeqID_78881
atgatcatgagactagagccactcgcgacgacgaggaaggcgatgtggacgcgggagatggagagcctgctctccatcgtcgactccatccatgagcttctcaaaggcggtggccagttcgaggtcatgccgacaggcacaatggagaacagcgaggaggggttcaccgctgtgcgcagaggagggcgcagggaactagctgccatggacagggaagaagggagctgggcggccatggaagggagggagctccctccgctgccgagtgggaggaggagcgcctccatggaagaagaaagggggcgctgggaaggggacggagcagtggcgctgtgtagggctgctgctgggcaccggccatggagcaaggagctcgctggaggttgttgtcgccgcgagcagggaggaagaaggggcgctatgcatggcgtctgctgcacccagggagctcttgtggcaagggacagagggagaagggagctacgcaggaaggggcgccgagcacagggatcttcggacgccctggctgctggccgagaagaggcgtcggtctgcaacagagggcgtgagccagagaagggtagaggtccggccatggctgcttctaccccgtgcaagggaggcccaggatggacaccatgggcaggagctttggctgtgggggggctgctcaccatggagagagggtgcaggggaaggtggagctgctgctgcgcgaggaagaaacagggagaagagagaatggcggctgaaaattttttgaggggtgggagtgcaaaatag

SEQ ID NO: 35507 - DNA, 321 bp, Zea mays
  Peptide Sequence Number=SeqID_78882
atgacagacctggaagttccacctgttgatgatgatgatagcgacgttcaatccccatcactggaagacgatgagcacaacgcgagtggtggcattctgcgcagcaccggtgttcgtgtcgtcaaggctacgcacccgcaagacacggggaaggcggaagggaatgccaggaggtttagggatccagcggaaggcgtgaggaaggcgacgggactccaagaggttcaaggatccggtggcgtgatcaggctctacgctggagcaggagtcttgaagtggatgggggaggatggatgcgatcgaagaaggggagggacgtga

SEQ ID NO: 35508 - DNA, 1107 bp, Zea mays
  Peptide Sequence Number=SeqID_78883
atgaccctggagcctcatcccctacagccaggctggcgttcattggactctgagtcttttggataccgggctgaggacacgatagaggcgattgctctgcacgggttaaccactttctgcggattccatcccttggagctagctacccaccccattggcttgttccccgccgaaagggaggacgacccaatgtggaaggatcgggtggagcatgccaaggacatctgggccatctacccaggtcagactgcgcacttgactgtacggtgcatgaatgctctgtaccgtctgcaagtgatgcgcggtgaggcgatgtcccatctgatggcattgttggaggcaacaaagatcaccctggacaacagagaggagctcgtggttgatttgtccactgagatgcagcagctagctgaggctaatgagcacctggatatgcatcaccaggagatccaggatatggaggccaacgaggacgtcgacattgagggaggagaggagcctgcctccagcatggccgggagacagcgtcgtggccagaatgagcgcgttcctccaccgccgccaccgcctcccactctgcaggagctaatggctcagcagaatgagatcttgaggcagctagctcagcgtcagccaccacctcaacattatggtggtggagaccatcagcgtcaccccgcggcagctacctaccaggagttcctcagtacccagcctccattgttcacaagggcagaggacccacttgatgcagattatgctggatatcatgcagatatggacgagaagaagagagacaggttcaggagggggctcagcactaagctccgtgaccgtctcaacaccgtcagggccaacagctacaatgagttggtcaacatggctatctcccaggaggactgtatcacagctcgtcaggccgaaaagaagaggaagacccctgtggcaggacccttagctcagccacagcgcttcaggattgtgtctgacactcagaacaggggaccccagcagcagcaagggagatgggtgatccgaccgcagcagcagcagcagcaggcacctaaccgcacccagtttccggctcagaggaacaatcagcagtag

SEQ ID NO: 35509 - DNA, 174 bp, Zea mays
  Peptide Sequence Number=SeqID_78884
atggggaagcctgtcccatcactcctcatgctcctcctcagccgagtgaccgcacttgtacccaccataaccagaatgggagatcatgtcttaggtcgcgtgagggcatatgtccactgccaggttcactcaggatttaataacattatgctaagagaagaaaaactaagttaa

SEQ ID NO: 35510 - DNA, 2361 bp, Zea mays
  Peptide Sequence Number=SeqID_78885
atgccttttcatggtgggagggtggtgcgaagtcctgccttcacactgaatctgcaaaaccgcgacccggccgcctttgtgcgcgaggcggaggatggggcggtgcggctcgttggacgttatgtgccgaggacagagggccagcgcagctttgatatccgcgggtcgaatgaccgtttgaacagggtttttgaattaaatcaattgccgtatgacagctatcctggtcaagacgacatggaccgccgtgggaagaagccggtggtggagactggagatggccctgcgccggcggccgccccatcctctaaaaagagaaaattaggtactgctatgggaggacttggggtttctgatagttttgctagagagttgatgaggacgtgcgcggccccgggggtaaggatgtcttcgcccgagctccgggagtctttggctcggatgctgagggttaccgggggttgttggcctaggaatgttcctatcccccgcgcggctggcgaggacttttttacatctcgcatggttcgtgaatggagagtttttccttacgggcggaatattgttgttgttgtgtcagcagtgatggacaaggaccgccagggagcagcacacaagcgccaggcggttgtcaggctcgttgaagctaggccgaagaggcagcggggagtggcggaggtcgcgaaggcggcccgagcgttgccgtcggcaggcaagcgtgtcgccgacttcgccactgatattagtgtggaggactatcttggtgggtcagacgaaggccagcttgctatagttgcgcctgccacggcgacaacgacggctgccgtagcgccgaaggcgaagggtggggctctcagcgccggaggtgaggtggtggccctcgcggctgtcagggatgaggcgggcgctacgtcccgccggctgaaggaggtggtggagtcgctaataagtgccgccaagctggcggacaaggtggccgcgctggagggagagaaggctgacctccagcgccaattggcgggggagaggagggagaccaatgaggccctcgccaaggcgcaggctgcgcaggcggagaccaatctggcacgggcggagggcaatcttgccagggagcgcgccgagcagctgcaggagcggctcatcgccctggagagccgcgtggagcgggccgaggccgcggcgcgtgcggaggccgaacggacgcgcacacaacttatggatacatatcgtgagctgggtgcgcggaccagtgacttcgaagtgccggaccgagagcccggactttgctgtctggaatgggtgcaggaggagctgcaggcactccccactgtcgtggaggggtttatgttgtacgcctccgtggtcacctgcgagggggaaatgaacgcgctctcccacgaagggtgccggcacttcgaggtcttcgaccaggccgatgaagattttgagcgagatatctataaggttgaagaccccgtagtgaaggaatccgccggggccatctacgaccggatgtggggtccgcacggtcgcgaggtggtcagggagcgggccgagacggcgagggctcaggcggcgcgtggcgagcgggtggacgacttcggggcgttgaacagcgcgctgcctgacccggagccgaccccggcggaggccgtgtctggggtcgccctggtgccaaccccggagactgcggaagacgcacccgatgcccccgcatccgctacggccggcgaagacctgcccccaaaggtggtcgaaggcgcgccagatgtccccgcagctgctgcgccgagtgctgaaggtcccgcggcggtggcggcggaaacaacgacggaagcaacggcggagcgaacggcggaggctcccgcaacgtcagggccttcgcaggttcaaaattttgggcctgcgcacgcaaccgctactactaaatttttggcggcttcaaccgcggaaggtggtaatgaatgtggtggatctgcatctgagttttttgattttgctgactctgggagctcggttgagtggactgaggagtcatcagaggaggacttggactactttgcggccttggatgtggctgcggcggaggcttcgccacacgccgcggacgcacaagatgtgccaggtcctagcaccgggcgccgacgacgaagggcggttgcgaagcgtagagttagtggggaggagggggctcggcttcgtgtgagtagggctggttggcaggaactgttgtctttgccgaccgccgcgagcacgggtgaaggggaactgcgaagtctttttgcgggtgaggagcttaggataatgttatttaattatagggagatgggaattattcctaaggttaagccgatgtag

SEQ ID NO: 35511 - DNA, 513 bp, Zea mays
  Peptide Sequence Number=SeqID_78886
atgaagtccatcaagagaagcaaaagtttgttgaaggagcaaagaaagaagtccgagaccgctgtgcccgtcgtatgcagtgacaactacctttgcgatgcaaaccgtagtggcgagctgccaaacaatctttacttgctggtggcgcagttctttctggtggaggtctgggctctggatacaatgaacagccacatggcgcagggtgagtccatagcggcctcctccctctcctcctggcatagcggctggcgggcgttccgcggcatggctggcgacgtgggtgcggatatgcggcggtcatggggtttcccgggcgtgcgggtggcggttcggaaccagacgcgggcgctggcgtgcgggcgtgtgggcggtgcggtatcggagggtttcgcggcagcggccgtgcgggcgagattcgcggcggcggcggatgcatttgatatagatcaacttttcgagtgcatgggaaagctaaaaaagtggacaatactttttgatattaacccttga

SEQ ID NO: 35512 - DNA, 807 bp, Zea mays
  Peptide Sequence Number=SeqID_78887
atggcaatagctctgttaatccagcctctcaagggcactgtacggggactgcccccgcctcccccacgcccgcccgccgcaatccccagtccccaaccgccctccgcaatcccctaccgcccgcccgtgatacccgccgccgcggcagccgcccgccgcaacctctgcctagataaggatagggggcgccctcctccctcgatcatccgcacttgtgtagccatcgcgccatctacaccggccaccgccacacgaaggttcgtctctggccttgcggcttgcgacctcgaggtgaccgagcccgcgggctccatgacgacaacggtgacgccggaggcaaagatggcggcgcagcagcaggcccccgcgtcgcgctcctcctcccgacctcgccgtcgagtccctattcccgccggacctcgatatcttcgcaggccgctggaccccgccggggcgggtgaccgatgcagtgcgctctcgatccgtgcagagcgcaggagcaaggcgccgacggaggaggccgcatccggagctgggcccatgtacgtgaaggtgagcatggatggcgcgccctacctcaggaaggtggacatcaagatgtactccagctacgaggacctctccctggcgctcgagaagatgttcagctgcttcatcgctggtcaaagtggtctgcataaatcatcgagcaaagacagactgactaatggctcaaaggtggatgccctcaaagatcaggagtatgtccttacatatgaggataaggatgcagactggatgcttgtcggtgatcttccctgggagtaa

SEQ ID NO: 35513 - DNA, 192 bp, Zea mays
  Peptide Sequence Number=SeqID_78888
atgccaggaggagagggaggaggccgctatggactcaccctgcgcctgcactggcacactcaaggttgtcacaaaaggatagtacttgggaagaaacaacaaccgaataccggctacttcaatcttcctcggccctcgtggaatgaaggaaccctcaatcgttacactcgagcagaacttgtcaaaggatag

SEQ ID NO: 35514 - DNA, 276 bp, Zea mays
  Peptide Sequence Number=SeqID_78889
atggagcccgcgggctcggtcacctcgaggtcgcaagccgcaaggccagagacgaaccttcgtgtggcggtggccggtgtagatggcgcgatggctacacaagtgcggatgatcgagggaggagggcgccccctatccttatctaggcagaggttgcggcgggcggctgccgcggcggcgggtatcacgggcgggcggaatattccagggatagtccaggtgcctgagggtacatgcgtccttacattgagacattgggcactcaggcacctataa

SEQ ID NO: 35515 - DNA, 258 bp, Zea mays
  Peptide Sequence Number=SeqID_78890
atgaccttgttcccccacagtggaaacatgcacgacttcctccttgcgctggcgctgcttggttgttttggttggttgatgggacaggaaggcgaggtgcctggtttctatgatgttgttattgatttcctccctgctagttgttctgacggtactgctgctgctgctgctgaggaaactacctctggtactgctgtggctggttctgacgctgatgctggtgctggtgctggtgctggtgtggttgaccttgcttga

SEQ ID NO: 35516 - DNA, 666 bp, Zea mays
  Peptide Sequence Number=SeqID_78891
atgacttctcacatatccacggaaggagggaacgcacattcccacacagacgggcttgcacgagagggctttcctcgtattttgtgggaggtgctgcagggagctggttacgctacgcctccccaggccgaggatactattgagtccactgctttgcatgtgcttaccaccttctacggttttcaccccttggagctatcaacccatcccattggcttgttccccgctgagaaggaggacgacccaatgtggaaggatcgggttgagcacgccaaggatttgatgggtctagtggagtctaccaagatcaccctggataacagggaggaccttgtggtcgacttgtccactgagctggtggaaaaggatctccaggtggagcagatggccacccaaatccaagagcttgaggatcaggtggaggccagggagaacaccatcgaggttctagaagatcagctccagaccacccagcaacagcttgagggagccaaccagcactttgatttgcaccatcaagagattcaaaacaaggaggtagaaggggccaatgaggatgtagacaccgagggaggaggagagctggaggctgcatccagcttggacattgttggctcaggaagacaaccttcccccaagtctagcgttgccttgtttgctcattag

SEQ ID NO: 35517 - DNA, 980 bp, Zea mays
  Peptide Sequence Number=SeqID_78892
atgaacgcgctctctcgcgaagggtgccggcactatgaggtcttcgaccaagctgatgaagatttcgagtgtgatatctacagggtcgaggaccctatagtgaaggaatccgccggagctctctacgaccggatgtggggccccttcggtcgagaggtggtcagggagcgagccgagacggcgaggggtcaggcggcgcgtggcgagagagtggatgactttggggctttgaatagcatgctgcctgacccggagccaaacccggcggcgactgtgactgaggccgccctggaaccgaccccggcaaccgccgaaggcgtgctagaagcccccgcagtcgctgcggccggcggaggcccgcccccggagaccgccgaaggcgctcctgatgcccccgcagccactggggcctgcggaggcccattgccaactgccgcgctgagggctgaggatcctgtgatggtggcggcggagtcgacagcggaggctcccgcgacggctgggtcttcgcaggttcaagattttgggcctgcgcacacaaccgcgactgctaatattttggcggcttcgaccgtggatgatgggaataaatcggatgagtctgcatctaagttttccgattttggtgattctgggagctctgttgagtggaccaaagagtcgtcggatgaggacttggactactttgcggccttggatgtggcagcggcggaagcttcgccacatgctgcggatgatgaagctgcgcctggtccgagcgctgggcgcaggcggcgaagggcggttgcgaagcgtagagtgagtgaggcggacggcggtcggcttcgtgtgagcagggctggcaggcaagaactgttgtccttgccggccactgtgggctcaggtgagggggagctgcgaagtctctttgcgggtgaggaactgaggataatgttgtttaactatagggaaatgggaattattccgaaggttgagccgat

SEQ ID NO: 35518 - DNA, 1500 bp, Zea mays
  Peptide Sequence Number=SeqID_78893
atggaggtagttgaattggttccttgcgcccgcaacaagtggggcaattggcatgaattttggttctacgtcgcagagggtaccgtcgaagaccatccggggctcctcgtgtccgagatgtgctcgcatttttactcagcatacccgccttttgaagtggcggaggaagatgcggacgaaggggcccttcggtgcaccgccggcctgagcagcgggcgcgacttggttgaggagtttgtggcgttcggggtatgtcctttggcgcatggctgggcgttgggcaaagtgtgccctcgccagatgccttcccatggcgggaagctggtgcgaagtcctgccttcgtgctagatctgcgtagccgcgatccagccgcctttgtgcgtgaggcggaggatggggcggtacggatcgttggccggtacgtgccgaggacagagggccagcgcagctgggatattcgcgggtcgaatgaccggttgaacagggtttttgagttgaatcgcctgccgtatggcgattatcccggccaagacgatgcggatcgtcgcgggaagaaaacggtggtagagtctggagacgaccccgcgccggcggccgccccgtcctctaagaggaggaaactaggtactgctatgggaagactcggggtttccgatggttttgctagagaattgatggggacatgtgcggccccgagggtaaggatgtcttcgcccgagctccgggagtcttcggcgcgtatgctgagggttaccgggggttggtggcctaagaatgttcctatcccccgcgcggccggccaagaggcagcgggggctgcgaaggctactacccccggcgcaggcaagccgccgctggcggcaaagtcggccgtccctgcatccagcagggcgccggaggctgcggctgtcgccggtggttccaagtctgcgaaagcagcaccggcggccagcagggtgccggaggccgcgaaggcggcccgagagttgccgtcgccgggcaagtacgacgttgacttcgcctccgacatttgtgtggacgattaccttgttgggtcggacgaaggccaacttgttgttgttccgcctgttgcggcgaccacggcggctgccgtggtgccaagggcgaagggcggtgctcctagtgccggtggcgagatgccggcacttactgccgtcagggacgaggcgggtgctgtatcccgccggctgaaggagatgaaggaggcactgagtcaggcggctgacttcgcagaccgcgcggcgtcgggggccctgacggcagctgtgtgtgccgaagtcgagagacttcgaatgcaacatgcagacgccgtccgggagaagtcggccgccgacagtaagtgccgcaagctggcggacaagggcagtcttgccagggagcgcgccgagcagctggaggagcggctcagcgtgctgcagagccgcgtggagagggtcgaggccgcgacgcgcacggaggctgagcggacacgcaaatag

SEQ ID NO: 35519 - DNA, 276 bp, Zea mays
  Peptide Sequence Number=SeqID_78894
atgggcaagaacaagaaaggtcgagacgactcccaggggatagccgccgaggtgtggacgtacatccgatcagtcgagcgcgttgggctcgagggttcggatgagtcggaggtctcctcggacgaggaggactctttcgactcgtccaaggagggaagcggcggtgacggcgacgacgagggcgacggcggcaacggcggtgacggcggcgatggcggcaacaacggcggcaagggcgacgacagcggcggtagcagcaagataacagccgagtag

SEQ ID NO: 35520 - DNA, 228 bp, Zea mays
  Peptide Sequence Number=SeqID_78895
atggaggcaccggacagtgtccggtgcgccaacggctccaagtcttcaacggtcggctgcgccaatttaggaaggcgacctgcactggacagtaaacaggggatgttcggtggtccaccggactgtccgggcgagagactccaagttgtggagattcctcgcaaacggggaaagagtaaaagaaagaagaacaccgtggtattccaagttgatcattggatcacttga

SEQ ID NO: 35521 - DNA, 294 bp, Zea mays
  Peptide Sequence Number=SeqID_78896
atggtttctgcactaaatggcaatagctctgttaacctgcctctcacgggcactgtgcggggtcagcggccgcgcagggcctgttacaatgggccggatcacacatgggcctctatgctggacgacgccgcacggtgggatgacctcgtcacaggtcttcgtccgatgtcgtatggggagaagggtgtccctgcccgatgtcctgtctccgctggaccaacgacctcggcgaaggcctcgagcgaagggtggcgtattcgccttcgccccaacactgagcttatcctcttataa

SEQ ID NO: 35522 - DNA, 84 bp, Zea mays
  Peptide Sequence Number=SeqID_78897
atggttgcgcagatgccaaagctcaaaagggggcttcgtcttcaggatgaaggtcttctctcagcaaagacatacacgatgtga

SEQ ID NO: 35523 - DNA, 1095 bp, Zea mays
  Peptide Sequence Number=SeqID_78898
atggcgaaacgcccgttcctcgaacggctcgcgcaacggctgcccccgcgaaccactcgtcccgtcgcattaactctgcggcagggcaggcgacacctttggcaagcaaagcgggcgatgcttcacctccgccatgatgaccgcgtcaaaaaagggaccgggaaaggggatactccgaaagggatccttctccgcgaaggaagtgggccccgagccctcctactgatgagaggttcgaaggctggcccctcggaagggttcgacagccgcctcagagcactcgggctccgcgcccactactggtcagaggttcgaaggctggcccctcggaagggttcgacagccgcctcaggccactcgggctccgcgcccactactgatcaggggttcgtaggctggcccccgaagggttcgacagccgcctcagagcacgcagagcgagggatcactctgggtacgtccgatacatggccggggctcgggctacgctcccgaggtaccctaggacattttcgagaccagcaggaacgattctgtaacggaatcccatcagagggaggcatcgagccctcggaccctatcaaacgggaccgggtccggcaaatcacctgcagggctcggactcaacctcgacctcggatgacggtctccgcctcgcccgaccccggggctcggactcaacctctacctcggacgacggactccgcctcgcccgacccagggctcggactcagcctcgacctcggacgacggactccgcctcgcccgaccccagggctcggactcagccttgacctcggacgacggattctgccttgcccgaccccagggctcggactcagcctcgacctcggacgacggactccgcctcgcccgaccccagggctcggactcagcctcgacctcggacgacggactccgcctcgctcgaccccagggctcggactcaacctcgacttcggaagacggtctccgcctcgcccgagcccagggctcagactcagcctcgacctcggaggagtcaccgcctcgcccgacctcgggctcgaaccgaccacgtcacaggggggccatcattaccctacccctagctag

SEQ ID NO: 35524 - DNA, 597 bp, Zea mays
  Peptide Sequence Number=SeqID_78899
atggccctgctagaccctcccaagtgcttccagtccgaggtggcactcaacttggtgcgcaacctgctcggatggggtgcgccggcgttcgccggaaggatccgtgtcggcgtctctcctcacgacgatctcgccgccgtggagttcgtgctcttcgtctccaacctcccctgtgggttggcgctgtcgatctcgtctttcttcgtccgtatggtggagctgctcgacctccaacctcagcacttcacaccccgcttcatctctcaggcggccatcttcgcctacctctgcgagatgtccgtgggggcgacgcttcttcctccaacatacggacaaaagggtgttgcgcagcgaccttccggaggcggaatgcgagttgagctgcggctccatctttcgcgtcttcaccagcatcccatggtgggaagcgagctgagctgcggcttcgtctctttggctttgatggcttcggtgtcgcctctaatggtgaccgttggtccggttgctgatactgaaggcgccacccgggaggtcgtacaagatgccgtggagacggcggccgcgtgcctccagcgcgaccctactgatgtcgagtag

SEQ ID NO: 35525 - DNA, 846 bp, Zea mays
  Peptide Sequence Number=SeqID_78900
atgagggctgtggtgcagcgcgtcctctcggccagtgtcgaggtcgaggggcgaatagtgtctgcgatcggccctggactcctcgttctcgtcggcgtccacgaggcggacacggactccgacgccgactacatgtataacactcttctcctttcattcgcctcccacttcctccagttactggtcctgaacatgaggctgttttcaaatgacaagactggaaaagcatgggatcaaagtgttatgcagcgtaactttgaagtgctattgggtaatatgatgatgcagcctttcaccattcagttcaccttatacggcatcctgaagggtaataagccagattttcacgtggctatgtcacctgcaaaagcgaaaccattctatgcttctctagttgagaaatttcaaaggtcatactcggctgattcagtgaaaggggtccggcactttcccatgggggtccggagccactgtagatattctggagtatatcgtcttttctggccatgtggcgacccgagagccatccacgtggtggggtcgggcgttgtttaccacgcgactagaggtagccgcatgggcatcgtgccttcacactgtagtaaggggtacccctgttccagggaaccggcgcccaaggaggatgactcgtgggtccgggcccctgtgtcagacactgggctgttggtttcggcggaggtgaagaggcgcgctaccacgggcggcggcttgctcctcacgctgcggttcgccttcttcgcactcggagaccgacgcccaaggagtatgactcgtgggcccaggcccccgcttcagaggttggtccgctgctttcggcggagatga

SEQ ID NO: 35526 - DNA, 510 bp, Zea mays
  Peptide Sequence Number=SeqID_78901
atgagcggggaggaggccgacggctccaagccccaaggaggcggtgtacactacggcaccttccaggggccgcccagctacccgcccccgcgcccgccgccgagcctctccgcccaccaccgcggcgactaccaggccgttcccgctcgagattacgaggcaggtgtgcggggacgtagccatgatcgacttccctgttgtggcattggttttggatggttcctcagcattgtcgtcccacgttcgatacctgggcagaattcatggtacagcaattgcagtgctgctgctatagcttcgtgtccttctgatttatttgctctttcttctaatgataaccccttgcgcttcaagcctttctgctgtgctgttccagagttgattacagggagaaaccaggttatgtcgcatgtgttgcagcgtcatcttgagtatcttgttttggcggctgctgtgtcatatccaaatccaatgaacttcatccctgctcttgaccattataatgcttga

SEQ ID NO: 35527 - DNA, 492 bp, Zea mays
  Peptide Sequence Number=SeqID_78902
atggcgtgtttgggcctcggcggccgcagaaaacacacgctacgagataatccgatcctgcaggctcggatctcgatagttgaagggagcagcagcaccctcggcgtcgactacaccttcggcgagggtctcctccaagaatccggctcgagcaggcggctcggctggtcaccccgaggcctcggccagctgtcccccgaagacatcagcctggcccgaggcctcggcagatcaactccggcgtcggtcccgctaacggacgacccggccaggctccggccgaccaagtcttcttttcgagccaactctgcctctgtccgtgctgacaccgctacccctgacttcggctcgtcgaagagcgaccgaggggttcctttaactaagcaaaagaagcctcggacagtaaggccgaccgagccgagggactcctacgcctctgggatacggatacctcgctcatcacctttgcacggggcgactcacgcttggtga

SEQ ID NO: 35528 - DNA, 312 bp, Zea mays
  Peptide Sequence Number=SeqID_78903
atggctgagcccgagtccgagccctggggtcgggcgaagcggagttcgtcgtcttccggggctgagcccgagtccgagccctggggtcgggcgaagcggatggagcggcgaagtgactacggtcacttcggctctgtcaactggaggacgcgcgtcaggacaaagcttcgtgctgatgggggttaccagctgagatttaggagccttgaggcccccgaggcctcggaggagtggtttgactcctccgaggtcttaatgcctcgcgcaatgcttcggctggtctggtcgttccctcatgcgagctggccgtag

SEQ ID NO: 35529 - DNA, 240 bp, Zea mays
  Peptide Sequence Number=SeqID_78904
atggcccggaactcttcttccttctaccgatggccatgccaccatcatctacctacggctcggctagcattgacaccgcgcctgcccaagggccacgaccaaccagagccgaagaaacagcccacacgggcgagcgcgatcctacgcatcgccgctgacacggcctatagcgttggatcattagagcgaggcaagtccggctcccaggcttacccaatcacgagttctgatgggttctag

SEQ ID NO: 35530 - DNA, 915 bp, Zea mays
  Peptide Sequence Number=SeqID_78905
atgtcttcttcctcccttatgcgtcgtgtctttccatcttccaagcccccagatggggggtatccaccgcctttccacctcctcgttggaggaacgcaactccatgggagttggtacctctcagccatcgttcggcttcaaggattttcatcagccggcccggccgcacccctacgccggagatcacccaggatggtgaccaccagcttctgggtggggaagagcaagccgggctgcgatcttggtcccaccctcagcttcaaggatgttcatcatcctcgctggggtgggggccacgctgagccggcgctctacctcccgcgcgggtccgcgggtcacccctttccgcggcgttcgggggtggaggcgctcgctggccctgcgggcggcgcggacttagacaacgtggggctgatcgacggcgggcgtcgtcacctccagcgtgtcggagtcgtcgaccgggcttccggcggcccctcctgccggagggcggccgccgcgccaggccggtgccccactcgtctgggaggatttgagtggggatctgccggggggctggcgtcccctgccatcggcgccgaggcggaggcggttcgagaagtcctcgtcgccgacgggatcactgccaccatccgcgccccgggccactgcgccggcgtacttgtcctcgcccctcgagcgtcggcgggggcgagggcaagatcgcagcagcgccggcccactgtcgctgtagtcagaacgggcggcggcgagccgctcgtcagtcttctgttgctccgcaggccttccccgtggagtggggtcgaatccctcggcccgatcggccttgttgtctggggctcctctagtttagttaaagagacccctcggccgctcttcgatgagccgaggccaggggtagcgatatcagtatga

SEQ ID NO: 35531 - DNA, 240 bp, Zea mays
  Peptide Sequence Number=SeqID_78906
atggcccggaactcttcttccttctaccgatggccatgccaccatcatctacctacggctcggctagcattgacaccgcgcctgcccaagggccacgaccaaccagagccgaagaaacagcccacacgggcgagcgcgatcctacgcatcgccgccgacacggcctatagcgttggatcattagagcgaggcaagtccggctcccaggcttacccaatcacgagttctgatgggttctag

SEQ ID NO: 35532 - DNA, 1065 bp, Zea mays
  Peptide Sequence Number=SeqID_78907
atggacgtcggcatgcccatctccaggggcagtgccaaatttcgtcacatcatcttcgttgacggcgtctccgtctccatgggcgatgccactaggggcaaccacggctcaacaatcaccagctccatcgatgggggacttgctgctgctcgtggcttccctgcacgacgaagagtgcgggagatgcgccggcagatactcgagacagccttggtgacagttgacgttggcacacgggggcgcgacctcgccctgtcggacgaccatcagcagcggcgtcgagccgctgtctccaagtgcgagcatggtgtgtatcccgcgagtgacgaacttcaactctacgacagtggtggtacggaaggtgctcccctcgtcatcggcaagggcgcactgcttagcgccaccacattccgctatcagcctccacgagggcgcatccgttggtcattgttgcgacctactccaggtggtcatccatgtgctcccctttcatccagatggcgtccatgggatctaggtggctgcacacgtgcaagtccaatgcgtggaggagtcggtctttgggcacccgtcatgctgcagctcgaggacgagttgcttgtccaggaggggatgttgaactgctccggcgtgaggatggcctcccactcctcttccgacttctgcacggatcccggcggcggcgtcgacgacgacatcgccgccacgctcgggggcctccgccctgccgcgccgtgcaacgctgacgccgccgcgtggcccctgcacggccgagctgcgcacgagaggggcgcggatcgagggcgcgcggcagagggcgagggtgcgaggagagaggagagcgggagcgcagcgtgcggcgccaaggcagcgcagcgggagcacgagcgggacgccatcctcagcctcagcagacgctggacgcacatagttgttttggcagcagttaagtgcaacgtgtcgcgttcgttgtctgataaggttctggacgggcgtgcttatggactggaccttttagagtctcttgttggaggaataaaggacctgactgtcccctacatttag

SEQ ID NO: 35533 - DNA, 534 bp, Zea mays
  Peptide Sequence Number=SeqID_78908
atggctgaaaacttggatgcattgaagtgtggtgggcgtaaactcacacctgaagaacgtagcgccgttgaaaattatcttgagagcctgacgcaggtattacaggtgcctggcccaacgggagccagcgcggcaccgatctctctggcgctgaatgccgaaagcaacaacgtcatgatgctgacacacgctatcacgcgttacggcatctctaccgacgatccgaataaatggcgttactacctcgattcggtagaagtccacctgccccctttctgggaacagtacatcaacgatgagaataccgttgaactgattcataccgattcgctgccgctggttatttcactcaacggtcatacgctgcaggagtacatgcaggaaactcgcagctatgccttgcaacctgttccgtcaacgcaggcgtcgattcgcggggaagagagtgagcaaatcgagctactcaatattcgcaaagaaacgcatgaagaatatgcgctgagtcgtccgcgcgggctgcgtgaagcgtgctga

SEQ ID NO: 35534 - DNA, 153 bp, Zea mays
  Peptide Sequence Number=SeqID_78909
atgttggacgaggccgcgggatgggacgacctcgtcataggccttcgtctggcgacgcgtgggacgagggcgaggctagcgaaggcatcgagcgaagggtggcgtcttcgccttcgccccaacatttgccctccgagggaccagttcgactaa

SEQ ID NO: 35535 - DNA, 423 bp, Zea mays
  Peptide Sequence Number=SeqID_78910
atgggaagcatgtatttatttctgtaccctggaacgggtgagtacgacaagttctttgaggagggcatttataaatgtgctggatgtggaactcccttatacaaatcatcgacaaagttcaactcagggtgtggctggccggcattctatgaaggacttcctggggccataaggcagacggcaaccaaacaactcgttcaggattatacgatacggctgttgaatgtgaaccatttcataagctgtagacgaagaaagagcctaacaatagcaaatcgaattgagactgacattatgatcggatttacaccttgtaccaatcttccagctcctcacacgaactcagttgtaaccgtatgcaagtatgtcttgtccagttgtcctattaatgtatctgaagccattgatcttacgggggattag

SEQ ID NO: 35536 - DNA, 780 bp, Zea mays
  Peptide Sequence Number=SeqID_78911
atgtcttccgtggtcgaggtagagtccgagcccgcccgggtcgggcgaggcggagaccgtcggctgaggccagggccgagtgcgagccctggggtcgagcgaggtggagttcgtcgtcttctggggccgaggccgagtccgagccctggggtcgggcgaggcggagttcgtcgtcttccggggccgaggccgagtccgagccctggggtcgggcgaggcggagttcgtcgtcttccgggccgagtccgagccctggggtcgggcgaggcggagttcgtcgtcttccgggcccgaggccgagtccgagccctggggtcgggcgaggcggagcttcctatggcgcccgaggccggacttggctgctgtcagcctcactctgtcgagtggcacagcagtcggagcggcgcaggcggcgctgtcctctcgtcaggccggtcagtggagcgacgaagtgactgcggtcacttcggctctgtcgcctggagggcgcgcgtcaggataaggtgtcaggccatcctcgcattaaatgcttctgcggtgcggtcggtcggtgtggcgtctggccaaggttgcttcttggcgaagactgggcctcgggcgagccgaaggcctttgcagctttgtgctgatgggggttaccagctgagattaggagtcttgggggtacccctaattatggtccccgacaaccgtctagtggagggtgttctggacaaagaaagcttgtaccttaaaacaggaggatataagaagctggagtggttgtctgaaggcttttga

SEQ ID NO: 35537 - DNA, 255 bp, Zea mays
  Peptide Sequence Number=SeqID_78912
atggagcggaatcagtggatggtcgatggctttgcaaaggccgattacgttgctgattctgctactaatctcggggaggagtcttatgaggcttgcatcactgcgggccatgccaaaatcattcatggacatgcgtttttgtcaagcttttctgaaaatctggctgtgggaagaatctggctgtggggagaatctgagtatcattacgattacgtgtggaggaagataaagttgttcatagggctcaggatctag

SEQ ID NO: 35538 - DNA, 405 bp, Zea mays
  Peptide Sequence Number=SeqID_78913
atggctctggacgccccggtggagcgacgggacgaggtacagatcgcgatggggaacggaaacggcgtggcgccgtctcaaccgtcgcggccagccggtcggccaacggctgctgcggcggcagcgccatacgcggacaggcggctgcggctgaacccaaatgcggatcacaagccggaagactacagcgacgtgcgcggcgagtacgcgccggccgtgtacagcgcactcgagcggcatctcccacccagcctcatcgatgccgaccgcgatgtcaagctacacttcatgcgggacattctcgcgcgctactggccgcagggcgagcgtaacaaggtctggctttcgattcctcttagtcacctacaacctactgatatgaaaaaccatgctgatagtttataa

SEQ ID NO: 35539 - DNA, 669 bp, Zea mays
  Peptide Sequence Number=SeqID_78914
atggcattccacacgcctgtccgcaaggagtggcacagtttccatccatgccacgggggcaaaggcatcgtcgaagtggacgtgctcggaggggtgaccgtcggtgctgaagtgagggtggactctggtggaggcctggagcagaggcgtgtgccacaactggaggggatcggcttgagtagaggcctctgctgcagccacgcgctggagcagaaggggcgtagccggagccgaggggcacagtcacacgctggagaagagctacagagggaacagaagcggcttgaggagttggggcggtggggccacatccagtccgagttctctcaagaaccaagtacaaacctccctagaaatctcaaggtgctcgtgggtttgactgtggtgagaatgagaatggccttacataggaacttgttgatcaagctatgggtgcatcaagctcgctgcgaggacgaaatcttccaaggaatgccaacaagcgtgcaagagtttcacactcaaggtttgaaaaagattctggttcagccaatgaaggaagaggaggacaaagatccacatgatgatgttgatgtgactgattctgaagatacacatgcacccaatggctcaaatgttggtggagaaaacaatgaggctgctccagatgagttcgaagatggatattga

SEQ ID NO: 35540 - DNA, 222 bp, Zea mays
  Peptide Sequence Number=SeqID_78915
atggcctcaggtgaatacgattcattacaatatttctgccccatacccctgattaaatgccttggatttgaagaagagaggtgcaaaggcacagagaatataggcagaggatactccacctttacaagggctgaggatttgggtgcaacttcgacaatatatttgttctatgtcaggttggtcactagggccgtcggtgtgacaagggtacaaagagtttga

SEQ ID NO: 35541 - DNA, 477 bp, Zea mays
  Peptide Sequence Number=SeqID_78916
atggcccgcacccgcgcctataaagcccccagggacttcgaccgtacccctctgcacgcgcttgacctcaccgaagcccaaacccaccagcgtttgcccgtgcacggcgtatccgtggccgcccgatccccctaccaccatagaccggccaacagaacccttcccaaccccgtccaaccctcggagaaggctgagcacacctcggtgaagctccccgagcaaggaatcggagtttgcttcgctggagaggccagtccatggtcaccggactccacccgaccaccggttaaagaaaataggaaagactataacctcgctgacggagactacgtcctcgtgccggagcaaggagctgcgcaggaggtagccccggatccagcaccagagcctgcactagaggatctgattgccactgctttggaaggcaagcctcggtttatgcataacctgttatttatgctattttactatacttaa

SEQ ID NO: 35542 - DNA, 162 bp, Zea mays
  Peptide Sequence Number=SeqID_78917
atggggattggtgtctacgggataaaaattggaataaggattaaggtgtggtaccgttctctggaggacatggttgctggagtgagttggtcgtccatcttgccaccgggttggactgtcgagtgggaccccacctcggctgaggaggaacatgaggagtga

SEQ ID NO: 35543 - DNA, 645 bp, Zea mays
  Peptide Sequence Number=SeqID_78918
atggcccgcagagacttcgatggttttgaggggcaaatttcgagtctggcgttcactgttgagttggacaagcgttcctgcgagctttttattgcagagacggtgatggaagtggaggaccttgttggtccagtgatgaaggctgaggttgagaagggtgctgctctatgtgggggttacgttagcgtgaaccatgtttttagcatgatggatcatgagtatgagaagcatagggccaagccaaagagggggagaaaaacaccgactgtggtccccgctcagtcgcatatgtcgattgagactgtcggtttgttcggaggagctccgggcactagagacgttgacccgtacctcgacgtgaccgccagagactccccatcctcactcgacccttcgccggaaccctaccaatgctggtcctttaagaagaaacaatttcagaagatcagcacagaagcaaacatagcgcgcagtatttgtgttgcctatctgggaatgaaggactttggctgtcattctgctgaagcttcctccagcattcttgagcccctcgggcatccgaagatagcaataggtgccactgggagttatgaagctagtcttcggctcatcttcctttttcatccagatttgatgatagcctga

SEQ ID NO: 35544 - DNA, 645 bp, Zea mays
  Peptide Sequence Number=SeqID_78919
atggcccgcacccgcgcctataaagtccccagggacttcgaccgtacccctccgcacgcgctcgacctcaccggagcccaaacccaccggcgtttgcccgtgcacggcgtgtccgcggccgcccgatccccctgtcaccgtagaccggccaacagaacccttcccaaccccgttcgaccctcggagaagactgagcacacctcagtgaagctccccgagcgaggaatcggagtttgcttcgccggagaggccagtccacggtcgccggactccacccaaccgccggcgagcgtagaccgggttaaagaaaataggaaagactgtaacctcgctgacggagagtacgtcctcgtgccggagcaaggagctgctcaggaggtagccccggatccagcactagagcctgcaccagaggatctgcctgccactgctttggaaggcaagccccgtagactttgcccctcacgcgacctgggacgtggtctcccattccggttatggtgggtacaagtgcggtcactgcacgacgacagtcgaggttctttggaggacatggttgctggagtgacttggccgtccatcttgccaccgggttggactgttgactgggaccccgcctcggctgaggaggagcatgaggagtga

SEQ ID NO: 35545 - DNA, 360 bp, Zea mays
  Peptide Sequence Number=SeqID_78920
atggagatgtggccgagcgccatgggtgagcagggagcagcgagggcgtggctgctggggaaacgaagctccacggcgagctggagcatcacggcgcgcaggagctctggccgagcgcagacgccatggcgcgcggcgagcagagcaggcatgcgcaggagattagagagaggagaaagacggcggaagggttggaggctagggaagccgagcgttgctgctccaccggtgcgggagctcggtggtggaagcagctggagtagatgtcgacttcgagatgagcctgagcgaaggtaccacggagataagaatcagacgtgtagggataagattgatgaagcaaaatatcagaagagatga

SEQ ID NO: 35546 - DNA, 537 bp, Zea mays
  Peptide Sequence Number=SeqID_78921
atggcggttggccctgcgcgcccgccctgcccggcgcggctcctccgcccccgcctcctcgtgcggccgctgtggcagaacctccaaggtttcaaggaaggtaatcaagttcaaggaagagaacggcggctggcgaaatccgagctggcaagcgtacggcagggagattcgcaatttgacgggaccgtgaccgagcgaattttatggcacggactgtggaaggactcggcaagcgacgacgcgaggaataaagcgagatcgcggtcgggagaactctatggtgtagactgcctcacggccacgacagctgtcgcgacacgcacgacgtcgccacaccacaatatcaccacggccataactcgatgtgcgcacatgcagctagagaccgagctaggaatcgcgcgcgagcttgaccaaatccgagctgggagaaagaggagcagggctggctggagccgggcgcggcgctggagggcgactcagatgcgcgacgcaggggctagagcaccgctggccatgggagggagaggcagctga

SEQ ID NO: 35547 - DNA, 129 bp, Zea mays
  Peptide Sequence Number=SeqID_78922
atggggctcggtgtatgcggctcgctctgccaaggtggtgatgaggaggatggttatgattatgcttatggtaatgatgaagtcgtggaggaagacttccaggagttccaagagtacgatgagtcctag

SEQ ID NO: 35548 - DNA, 174 bp, Zea mays
  Peptide Sequence Number=SeqID_78923
atgagacagggtctcccattccggttatggtgggtacaagtgcggtcactgcacggcggtgaccagggttctttggaggacatggttgctggagtcacttggccgtccatcttgccaccgggttggactgtcgagtgggaccccgcctcggctgaggaggagcatgaggagtga

SEQ ID NO: 35549 - DNA, 234 bp, Zea mays
  Peptide Sequence Number=SeqID_78924
atggtgaacagtacccccgtactgttcacgctgatttgtattcgcttgcgcgtcacgctcggactttttgccttctgtcaagccgaagattgcaacctcgctgatgaagagtacgtgctcatccctgagcaagaagctgaccaagaggaagctcaggagctagctacaatggctgctactgtggatctacctactaccccagcaattaaaggcaagccccggttttatgcataa

SEQ ID NO: 35550 - DNA, 363 bp, Zea mays
  Peptide Sequence Number=SeqID_78925
atggggaagcctgtcccatcactcctcgtgctcctcctcagccaagtacaatggatcaagcagtctcattttctgcgagaagcagacgattcgaatcgagtttttatccttgcaagtgaccgcacttgtacccaccataaccggaatgggagaccacgtctcaggtcgcgtgaggagggcaatctgctgctaggttcaatcaggttatgcataaaaccggggcttgccttccaaagctggggcaggcagatcctcgatggcaggctctggtactggatctggggctacctcctgagcaactccttgctccggcacgaggacatactctccgttagcgaggttgcaatctatcgaatgcaatga

SEQ ID NO: 35551 - DNA, 378 bp, Zea mays
  Peptide Sequence Number=SeqID_78926
atgggcaagagcaagaaaggcggaagctcctcgcaccatttcagcgacaagcggaagcgcgagccaactcctcctttggaggacttcggcgattccgagtactcggaggaggagttctccttcgagtctgagggatcgccgggctcggatgagtcggaggtctcctcgaacgagggggactcctctgactcgtccgaggaggggagcgacgacaacgacggcggtgagggcgacggctgtgacgggggcgaagacgatggcgatggcggcggcagcaagggcgacggcaagggcgacggcggcaacgacagcggcaacggcaagggcgacacgacagcggcaaggccagtggctaggcaccactggcttagatgttag

SEQ ID NO: 35552 - DNA, 225 bp, Zea mays
  Peptide Sequence Number=SeqID_78927
atgtacgaggattttactggtcgtttaatatccaacggcttcgcacgggagacgctcgtgttggcgtcgctcatcgacgacgagaagaagcttggcgactgccagttcgacctctggaagcagtattacgtggccacatgcgtcgctgtgttcggcaagctccggcgcagccaccgcttggacgcggtccaaagcggctgcaccgcgctgtccatcttcaaatag

SEQ ID NO: 35553 - DNA, 1323 bp, Zea mays
  Peptide Sequence Number=SeqID_78928
atgttgccctcggagggcgccgaacatggtgtttccagtgagcttctaatgggccccttcgacagggtccgagggctcgatgcctccctccggtgggattccgttacaaatcgttcccgctggtctcggaaatgtcctagggggtacctcgagtcaccggtactggtcccgcagtcgaggaggcgagggattggcatgagtggcggtgtcagctcgtatgacgcgtgggtcccagccccgtgtcgtggggggagaaccctagaggttgttagtggggacttcgcccgtgacgctaagcggtgcaagcgaggaggtctacctataaaagggggaaacgatcccctgggcagtggccatgccttcgtcctcccctcatgccttgtgcccttccgccttttgagcccccggatggggtgccctagcttcgccttgctcttgctatcattggaggagcacggcctcatggagatcgcttcaaggatcttcgtcatccttgctgaggtggagggagagctgagccgggctctacctcccgcatgggccagcaggccgtctcctccttcagcattcaggggagaaggcactcaccggccttgcggaggggcgaacttcgacaacgcaggactggtcggccgcaaacgccgtcagctccagcgtgtctggctcgctggctcagctggctctgtcgcggcctccgacgctgcctcctgccgcttgatctgggctcgggcgtctgttgcgccgcgcgcaccggtggatcgtccaagacgacgtcaaggcctgcctgtccgcgaggacctaagtggggatcagccggtgcaggctagggcgtccgccattcgtcggtgtggcgccgacgcgcaggtggccgctgtcgtcggtgctgaggtggtggcagccgaaggagctgtcttgccgcccgggacggaggtcgttgtcactgctgtcggggctgttgccggtgagccgcttggagtttgtcatcccgtgggcccctgttttcggaaacctcagctgctatgcgatgagccgaagccggaggcagcggtgctagcgcggacagacgcggagtcggctcggaacgaggcttcgtcggcccgggagatggcgtcttcccaggccgaggaagatgtggcagcaggctgctggagcttggccaagacatctgctggcgtggtgctggcgtcctcccttaggtggaggtccttttgctcgggtcgtcgtccgaggccgggcctggttccgccgagggtggaatcaatgccgagggtgctgctgctccccctgccgatgccagaacctgcaggaatagtttgtctgtag

SEQ ID NO: 35554 - DNA, 1212 bp, Zea mays
  Peptide Sequence Number=SeqID_78929
atggcgggagggaacacggcggcgacgctgtggtgcagccactgcggcatgggcatcgcggcgccggcgcccgggtccggctctatcgtccggtgcgcgttctgccgcggggtgacgcgcgtcgagcaccagcgcggcggcgtgggcgagagagccatgacgacgaggacgctcgcggctgcagcctcgctgccgcggcagcttccggtctccgcggggcccgtcgagatcccggccagctaccccagggtgagcggcggcaacaagaagcgggcgctcctggtcggggtcagctacacgggcaccgcgcacgagctcaaggggacggtcaacgacgtcaaggagatgaggaggctcctctgcgacaggttcgggttcccgggcgcctgcatcctggagctcaccgagaaggagagtgaccccaccagggtgccgacgagggagaacctgctgcgggcgatgcggtggctcgtggaggggtccagcagcggcgactcgctggtgttccacttctccgggcacggcgtgcagaagctggacatgaacgacgacgaggtggacgggtacaacgaggcgctctgccccatggacttcgagcggagcggcaagatcctggacgacgagatcaacgacaccatcgtgcggccgctcggcaagggcgtgaagctgcacgccatcgtggacacctgccacagcggcaccatactggacctcccctacctctgccgcatgtccagcaaacgaattgacacgcgcgtgcacacgcgcattgctcgacctttcgtttcaagaactgggtactggcagtgggagaaccacgcccgcccttcgggcatgctgacgaagcgccccaacggaggcctggccatctccatcagcggctgcagcgacgaccagaagtccgccgacgccagccttcagatgacgcatgccgcaaccgtgtgcgccacgcagggattttccgatgagtcgtcttcgatcggcgccatgacggacagcttcatcaaggcggtggaggccgagccggggacgacgtacgggcggctgctgagcgcgatgaggacgaggatccgtgacggccaggggagccgccgcctccccggcaggcttggctccttcgtccgctggatgatcccgtccagcagcgtgcaggagcctcagctttgctcttcagagatgttcgacatctacaggaagccgttcctcctctga

SEQ ID NO: 35555 - DNA, 174 bp, Zea mays
  Peptide Sequence Number=SeqID_78930
atgggagactatatctcaggtcgcgtgaggggtaaagtccactgccaggttcaatcaggatttaataacattatgctaaaagaaactgagtccaggagtaacttagggttccttaatcatgcggggcttccagtgggttatgcttattaccttttaggcttaggttttgattga

SEQ ID NO: 35556 - DNA, 399 bp, Zea mays
  Peptide Sequence Number=SeqID_78931
atggccagggtgttaaatccggcgagccacgggcctaatcctcgaatcaaaggggtgttctgtgcgaaggaggatgaaacgaactactatgatgcggcactcaccgaagatgatgacacatttgggctgtccacggcgcgatgcggagccgcggcggcacccaactccggtgacgaattgaggttggcgaggacccgatccttgcacgccaagcccttacctggcgcgccaactgtcggcgtctcggacccgggggggtaccttggaccgaccagtgaaatcgctgcgtgcccctacccagatgggttggcgcgggatggaacacaagaggtgggacaagccttgtattatcctgcaccaggggtgccgctcgtagtaggggttaagcgcgtcgcgtga

SEQ ID NO: 35557 - DNA, 270 bp, Zea mays
  Peptide Sequence Number=SeqID_78932
atggcgcaccggacagtccggtgcgccaccggtgcgccaacggtgcgccaccggggcctagatgctttcaccgcacttgtacccaccataaccggaatgggagactacgtctcaggtcgcgtgaggggtaaagtccactgccatgttcaatcaggatttaataacattatgctaaaagaaactgagtccaggagtaacttagggttccttaatcatgcggggcttccagtgggttatgcttattaccttttaggcttaggttttgattga

SEQ ID NO: 35558 - DNA, 683 bp, Zea mays
  Peptide Sequence Number=SeqID_78933
atgaacatgggtggggtgtccccgtcgacagtccggtgcaagcactgcagcacgcagctcaccgtgtgccccggcgagcgcgccatccagtgcacgcaatgctgcggcgtgacgcgtatccggcggcggcgggtccagcggccggcggcggcgccgcccaccacgggcttcccgcgcgcccgcggcaagaagcgggccctcctgatcggcatcacgtacgcggcggggctgcggccagctgaggggggccctcaacgacgtcaagtgcatgaggcaactcctctgccagcgcttcgccttccccagcgactgcatcatcatgctcactgctggacgagctctcgcggtgcagatgaccagaaggacccgttcaggctgcccaccaaggacaacatccggttggggatgcagtggctggtggaggggagcagcgagggcgactccctcgtgttccacttctccggcctgggcgcgcaggtcgccgacgacgacggcgacgagctggacgggtacgacgaggccatctgcccgatggactcgttccagaagggacccatcctggacgacgagatcaacgagactatggtccgcccgctggtccacggcgtcaagctgcacgccgtcgtcgacgcctgccacagcgccaccgtcctcgacctcccgttctgctgcaacatgtccag

SEQ ID NO: 35559 - DNA, 2985 bp, Zea mays
  Peptide Sequence Number=SeqID_78934
atggcggacacccgcaaattcgtgctgcccggccaacccccagacatctcgcagatactgcaggaggctcagaaccggtggctgcggcccaccgagatctgcgagatactgtccaactacaagctcttctccatcgccgccgagccgcccaacatgccgaggagtggctctctttttctatttgatcgcaaagtactgaggtacttcagaaaggatggacacaactggagaaagaaaaaagatggcaagactgtcaaagaagctcatgagaaactgaaagctggcagcattgatgtactccattgctactatgcccatggagaggagaacgaaaactttcaaaggcgaacatattggctgttggaagaggatttcactcatattgttcttgtacattacctagaagtcaagggatgcaagcaaagtttcaatcgtgtgaaagaagaacttatgcagctatcgaatgtcgacagtccttcatgttcaaattccatcactagtcagaatcagatgggcccacaaaacatggaggctgctgaaagcccaataagcggacagatttcagaatatgaagacactgaatcaggttatcatggtgaaatgttgccaataacagataacttagataaccgttcattttctaaccatgacatagctagaatgctcgacggcgccaacattgggctaagcgatgtttccagcactctgtttgattcagtgccattcaatgagcccttcaccaattattcagctgggttcacagagccaacactccattcttcatttgcctgcttagaggctaacgatttggacgatagctcttgtttgcagacatttacatctgaggctctatacactaaccacctcaaccagaaggaagctgatgcactgggtttcactggcatattagcatcagaggtgaacagagatagatataatgatggtagcatcaaacattcactcttgaagcagtcatcattggatctattgacgattgaggctcctggtttgaagaaaaatgacagcttttcaagatggatgagtaaagaacttgaagaggttgttgatttgggtattaaatccacttctgatgctttctggagtagcattgagacagtgaaggtgcctgatggttctaatgttctgactaatgaacagctggatgcttatgtagtgaacccttcactttctcaagaccaactattcagcattctcgatgtttcaccaagttgtgcatatattggtacaaatacaaaggtttcagttactggtacattcttggtgaataaaaaacatgtggaaagtcacaggtggtcatgtatgtttggggatgttgaagtaccagctgaggttttgaccgatggcaccctacgctgctatgcaccagcacaccaatcaggaagagttccattttatgtgacctgttcaaacagggtggcttgtagtgaagtgcgagaatttgagtatcgtgattctgaagctcattacatggagacttctcgttcccaagccaatggtgtaaatgaaatgcatctacacattcgtcttgagaagctactcactttggggccagatgaccatcaaatgcttgttataagcagtggtaatgagaaatatgagataatgaatgctataaattccttaatgcttgatgggaaatggtcaaatcaagaatcttctgtcaaggaagtagtttccactgctagggtccaaagtttaaagaaactggtgaaagagaagctgcatcaatggctcatctgcaaagtaaacgatgatggaaagggtcccaatgttctgtgcaaggaaggacagggtgtgattcatttagtagcagcactgggttatgattgggctataagaccgataatgattgctggtgtcaatgtgaacttccgggatgctcatggatggactgcactccactgggctgcatctttgggaagagagcggacagttagtgtcctcatagcaaatggagctgcagcaggagcactaaccgatccaacttctgagttcccttctggaagaagtccagctgatttagcttcagtaaatggacacaaggggattgctggttttctcgcagaatctgctttgacaagccatctgtcagcacttactattagggaatcaaatgatagcactgtagaagcgtgtgggctaccatttgctgaagatctcactggcatcgattctgtccatctcgctggagagggtcctgatgctgaatcacttgaaggttctttaagtgccgtgcggaaatccactcaagctgcagctcgtatatttcaagccttcagggtggagtcattccacagaaagaaagtcgtggaatacggagatgacacctgtggattatctgatgaatgcacactttcacttgtttctcttaaaaatgtcaaaccaggacaacatgatacacatctgcattctgctgctgttcgcatacagaacaagtttcgcggatggaagggaagaaaggaatttatgatcattcgccagagaattgtcaagctacaggctcatgtacgaggacatcaagtgaggaagaactatcggaaggtagtctggtcagtcggtatcgtcgagaaggtcatactgagatggaggagaaagaggcctgggttacgcgggtttcggcccgagaaacaactagaaggtccatcgcaaatccaacctgcaaaggctgaagatgaatacgatttcttgcacgacggcagaaggcaggccgaagccaggctacagagagcacttgcccgggtgcactctatgtcacagtacccagaagcgagagagcagtaccacaggcttacaacctgcgttgctgaaatgaaacagtccaggatgatgcaggatgagatgctaagccaggcggctggtggtgcggacgatttcatggctggactggaggacttgatctgcatagatgatgccccgccccgatgtctgccattcggtgaagctgagcctttttacatcagatag

SEQ ID NO: 35560 - DNA, 1299 bp, Zea mays
  Peptide Sequence Number=SeqID_78935
atgacgaactccaagcggctcgccggcagacctcctcacttgcactccttagcgtcacggacaaaatctccactgacatacttcggggttctccctccacgacacgggggctgggacccacacgtcatacgagctgatccgaagcatgaagaaggcgaaccgccgcacgcgaggcatgtaaccgtctcgcggttacaagcgctctcccatcttcgcagaaaccaggggtcgaaagggtggactgccacgcgacaggcatccaactgtaccgcaattgtgcgccctttcggcttcgaccacatccggcggaccagcacaaaggaagcaggcccgcatgtcatgacccaacaatgccagttaaaggtgacggccacgggccggtcagccgcgggggaccaggaaaggggatgttgtggaaaggatccttctcggcgaagaaagcgggccccgagccctcctactgatcaggggttcgaaggctggcccctcggaagggctggcccctcagaagggttcgacagtcaccccagagcacgcagagtgagggatgactctgggtacgttcgatacatagccgaggctcgggctacgctcccgaggtaccctaggacatttccgagactggcgggaatgatttgtaacggaatcccaccgaagggaggcatcgagccctcggaccctgtcgaaggggaaaacagcgccgctcgctccgctccgactgccgtgtcagccaccccgacgacgactgacaacaagtcacgatcaaccaccgagttcagcctcggacgcaataggaagctccgcctcgcccgacctcatgctccggcctcgagaggaggtttccgcctcgcccgacctcaggctccagcctcgggaggaggtctccgcctcgcccgacccccaaactcggcttcgaccccggtctcgggaggaatcacgtcctcgcccgaccctggccttggcctcaagagaagtctccgcctcaaccgaccctgggctcaggccgaccacgctaacaggggatacatcatttccctattcctagcctgctcaggctacaaggaacaagaccggcgtcccatctggcttaccccgacgacgggactcaagcgctcctccgatggccacgccatcacatgtacagggcccaagctctcccccaacggccacgttggcatgtgcacagggcttaggcactccactgccggacacaaagtgataccgaacggctatgtgcttagtgcggttgtgttcaacgggattatccgccatgcggattgcactctcattgtcacatag

SEQ ID NO: 35561 - DNA, 297 bp, Zea mays
  Peptide Sequence Number=SeqID_78936
atgagactgaggtccgtcctctggtttcggatcctcgtctgtttgatcttcagcgtgctactgcggcacgggtacgtcggttcagccggtgctgagtctgaggcgcatctcacctatctgcctggcctcttgacccttctgactatcagcggcagatatgttgaggagtgggccgaggatgcagctctacgacagtttgacactcagggtacagcagctgatgatgatgatgatgatgatgatgattttggggttcctcctccgcctccgcctcctatgccttccccgctcccatga

SEQ ID NO: 35562 - DNA, 450 bp, Zea mays
  Peptide Sequence Number=SeqID_78937
atgaacaaaaaacactggcattcgaagtgccattacaaacggaactccggttccccctccgcaggtacgaacaaccccactccgaggggaaggcctgcggagcaacggaaggccgacgaacagcgcgccgtcacctgctccagcagcggcgacgacgacgacttctgcttcggggggcctaacagcggtaacgctgacctcaggctagatgccgccgccaggaggcccccgcccatgccaaaacttgtgaggcaaggacgggcagaaggccgagaagttggaggtcagcccgtggccggccccggctatcgcgccggcggaagaacctcttccagctgccgtggcagacgccggcgccgcgagcggctccaaggccactcgcgtctgaagaccaggcacgctgcagctgccagcgccacgggcaacacccgctcctccccccatcactga

SEQ ID NO: 35563 - DNA, 2784 bp, Zea mays
  Peptide Sequence Number=SeqID_78938
atgccatcttcttcttcttccgccgacgccacgccgccggccgccgcctcgtctgaggagacgttgagtagcgtgatggtggaggagttgtgtgccggcgactctgttgaatttggagtgtcacggatgacgtctgcccgtattgaagatatgcagcggttgggctactttggcggcggagtcgcccgtgctccggggacggaggaagtccccgagccggagggcgaattggttgttttcgaggcgttcttcgtcgccggactccgcttgcctgcgcaccggtttgttggcgagaaaagggtggttgagggcggagttgcccagttcgggtcatgcacgttcacgccgaagaccggcaagaccacaatgccagtagtggagttggtcccgtgcgcccgcaacaagtggggcaattggaatgaattttggttttatgttgctgaggccactgtcgaaggccatgaaggactccccgtgtctgaaatgtgctctcactattactctgcatatccgccttttgaagtggcagaagaggatgcagacgaaggggcccttcggagcgccgccggccagagcagcggccgtgatttagttgaagagttcgtggcgtacggggtttggcccttggcgcacggctgggcgctgggcgaagtatgccctcgccagatgccctttcacggaggaagggtggtgcgaagtcctgcctttgcgctgaatttgcgaaatcgtgacccggccgcctttgtgcgtgatgctgaggacttggcggtgcggctcgtggggcgttacgtgccgaggacggaaggccagcgcagctttgacatccgcgggtcaaatgaacgtttgaacagggtcttcgaattaaatcaactgccgtacgacggctaccctggtcaagacgaagcggaccgccgtgggaagaaaccggcggtggagactggaggcgaccctgcgctggtggccgccgcctcctcgaaaaagaggaaattaggtactgcgatgggaagacttggggtgtccgatagttttgctagagatttaatgaggacgtgcgcggccccgggggaaaggatgtcttcggcggagctccgggagtcttcggctcggatgctgagggttaccgggggttgttggcctaaagacattcctatcccctgcgcggctgaggaggactgttttacatctcgtatggttcatcggtggagagtttttccttatgggcgaaatatcggtcatgttgtgtgggcagtgatggacaaggatcgccaaggcgcggcgcgaaaacgccaggcgaccgtgagggttcacgaagcccggccgaaaaggcagcggggaacggcgaaggctgaggcctccggcgggggcaagccgccgctgccggcgaaggtgggcgcctccgcgcctggcaaggcgccggagatgactgtgggcgccggaggccccaagctgtcgaaggtggtgccgtccgtcagcggagtggcggaggctgcgaaggcggcccgatcgttaccgccgcctggcgaacgcgttgccgacttcggcaccgagattaatgtggaggattatcttggggggtcggacgagggcccgcttgctctagttgtgcctggcgcggcgatcgcgacggctgcgccagcgccgaaggcggggggagagacccttggcgctgggggcgaggtgtctgccctcgcgctggtcagagacgaggcgggcgtggcgacccgtcggctgaagggagcgacggaggcgctgagtcgagcgacggaggcgctgagtcaggtggctgacttcaccagccgcgctgcgtcgggggcccttacggcaacattgtctgccgaggtcgagagacttcggacgcaacatgcggacgctgtccatgagaagtcggcctccgacagcaagtgccgcaaactggcggagaaggtggccgcccttgagaaggagaaggctgacctccggcgccagctggcgggggagaggagggaggccaacgaagccatcgccaaagagcaggctgcgcaggcggaggccaggctggcgcgggcggaaggcaatatcgccaaggagctcgccggagagctgcagcggcggcttactgccctggagagccgcgcggagggggccgaggccgcgatgcgagcggaggccgaacggacgcgcacgcagctcatgacttcatatcgcgagctgggtgtgcggacgggtgacttcgaggtgccggagcgagaggccgggcttcgctgtctggaatgggtgcaggaagaactgcaggagctccccactgtcttggcggggttgatgtcgttcacctccctggtcacctgcgaggcagcgatgaacgcgctctctcgcgaaggctgccggcactttgaggccctcgaccaggtggatgaggattttgggtgtgatatctttgaggtcgaagaccccgtggtgaaggaatccgccggggccctctatgaccggatgtggggttcatacggtcgtgaggtggtccgggcgcgggccgaggctgcgagggctcaggcggagcgcggcgagcgggtggacgacttcggggcgctgaacagcgcgctgcctgagccggagacgacccctgcggaggccgcgactggagtcgccccgggaccgaccccggagactgcggaagatgcaccaggcgcccctgcatctgccgcggccggcgaagaccttcccccaagggtggccgaaggcgcgcctgatgcccccgcagctgctgtgccgagcgctgaagatccagcggaggcagcggcggagcgctga

SEQ ID NO: 35564 - DNA, 522 bp, Zea mays
  Peptide Sequence Number=SeqID_78939
atggccgcgacggcgtgcgcctacgcctaccagggggcccgcccgccgcaggttctgctgccggccacgttcatcgacgtcgacggcgccgtccagcagtccgcaccaccgccgccgcccccactgccacgaccgtccttcctgtcgcaccacctcgacatctgcaccgagggcctcggctcagagagctccggcgacatcgatctcaccgacgacgtcgacgacaacgctgccgcctgcgtcgacgtcgggcaggcaccgacgtgcaagaggcagcatcgtgacggaggccacgaggaaacggggagggcgaggaacgccaggccagcgttcccgccgccgatctcgctgatcggggccggcgggaagccgtggctctacctccggccgctgcgggaggacggccgtctcgtgctgagggaggtcaggataccgttgcgggagctgctccaggcgcgccgggaggacggccggttcaagctccagttcgcccagccccagccggacgacaggtgccagtag

SEQ ID NO: 35565 - DNA, 885 bp, Zea mays
  Peptide Sequence Number=SeqID_78940
atggctgcagccgcggggaggaaggtggcggtcgccgccgtgcagttcgcctgcaccgacgtcgaggcggagaacgtcgccaccgccgagaggttgattagagaagcacacaagaaaggtgcaaagattgtactcgttcaggcagctttgcccctcatggtccataggatgcaacagcttgcaaaggagctggaagttgtcatacctgtcagttttttcgaagaagcaaacaatgcacattataattcggtggctattatcgatgctgatggcgctgatcttggactctatcgcaaatcacacattccagatggaccaggatatcaagagaagttttatttcaaccccggtgacactggctttaaggctttcaaaaccaagtatgccaccattggtgttggaatctgctgggatcagtggtttccagagtgtgcaagagcaatggcacttctgggggctgaaatactgttttatcccactgcaattggatccgaaccccaggattgtaacctggattcccgtgaacattggaagcgggttatgcaaggccatgctggtgccaacttggtccctcttgttgcttccaaccggattggcagagaaactgttgacactgagcatggcaagagctcgataaccttctatgggaattccttcattgcagatagaaggttaaatgtcagaaacacgacttcaattgaattctctgcaggaccaaccggagaaatagtgaagcttgctaacgacaaagacgaggaagtgctggtggcagagtttgacttggatgagatcaagtcgattaggcatggttgggggatattcagggaccggcgccctgaactatacaaagtgctactgacgttggatggcgagaaacaatcataa

SEQ ID NO: 35566 - DNA, 168 bp, Zea mays
  Peptide Sequence Number=SeqID_78941
atgctgctcctgctcctgtcgtcgacgttcctgctcctcatgcaggcggtggtgcagtctctccaagtggctggactgtccggtcacgggacggcgaagcggacgctcagcaagacgggatgtggttgcaatgctgacaacctggggatgggggggtttggtgtgtag

SEQ ID NO: 35567 - DNA, 858 bp, Zea mays
  Peptide Sequence Number=SeqID_78942
atgagccggaaggataagttgcttggcccatcactcgcgacgctgctcgcgggtgtcacttccatgatgcgctcgacaccctgctacgtcgggcacttaaccgacggtgctgaggtctgctcagagcactattctatctctgagcgggactcagctgaggcggccatgcaagatgctgcacgacgtgcgctttcgcactactgctcggttctcggtggggtagctgacggtctcaacctgaagtattacccccgccgtccatctggcagcacaggaggcgtgattgtctcacctgtcggtgagggcaatcctaggttgagcagcacagtcaacctagccgctgtgctaaacacggagctggaccatgcattagacgagctgagtagggctcgtgctgagatcgccctgctacgggctgagcgcgcggaacgtcgtcacctggatgatggttcccctgctcccgtcgggactcagcacccgtaccactcacctcggcgtggacgccagttgtcgacgtttcgagacaggggggtccctaagccgacgagtgagtgtgctgcgtgccccagcccagatgggtcgagcgcgtgggcgagcgcgaaggggggagaggcgaggtggccggagccgagcgtgagagaggtggaagtcccgcggccttcgtgttcgtcccgcgcccaggtcaggtgcgcttgcagtaggggggttacaagcgtccacgcgggtgagggaagcgagcggccccaagagagcgcctgtcccgtcctcggtcccgcgcggccaacctcctctgagaaggccctggtccttccttttatagtcgtaaggagaggatccaggtgtacaatggggatgtag

SEQ ID NO: 35568 - DNA, 912 bp, Zea mays
  Peptide Sequence Number=SeqID_78943
atggccgccgccgccgccatctctctatccttccactttcgtttccgcccgccctttccatctccacgtacccccacgcgccacgctcccttttccttgttctccccttcccttcttgccccctgccgcctccgcgtcgctcccggccgcccctcaccgtccccgtggcgccccgacgtgcgggcgcgcgctggaagcaccatcggggcgccgcctgcgcttgtgcgcccaggcggagccgtggagacggaccgcctcccctccgacgtgcgggaccgggccatggaggcggtcgaccacttcggcggtcgcgtcaccataggagacgtcgcttctcgcgctgggctgcagctcgcgcaggcggagcgcgcgctccaagcactcgccgccgacactgaaggcttcctggaggtatcggaggacggggaggtgctatacgtcttcccaaaggactacagggcaaagctggctggcaaatcgtttaggatgcgggtcgagcctctggttgacaaagccaagcaagtgggtgcttatctggtacgtgtttcatttggcactgcgctcattgcctcaattgtgctggtgtacactacaatcattgccattctctcaagctcaagtaaagcgaatgcaacagagaaggcgatggttgctggtttgggaggactcaatctctttggtgtcatcattcttggaaacttgttgaagcaaatgacagtgacacctggtggactaatctcatttgccgcacagttatatcctttgcttcagttgctcagtgcacgtgatatggctgaacggaaagtaatcacgccagaggagattgtctatactactgaaaaggatctattggagcaggattatgaagtcaaggagtgggagaggagatttaaggagctcgagtcagagtga

SEQ ID NO: 35569 - DNA, 300 bp, Zea mays
  Peptide Sequence Number=SeqID_78944
atggcgagctcgccggtgctcgccgtctcctccaaccccctccctcccccgagcgcctataaaaggacccgcccgagccccgtcttcaccacacaactccggccacctccactgccttctcccccgagccattcgagcaagcgtcgtcgtgctcccttcatcgctctactatgccagaagctccgccacactctcacggtcacagggcgccacttctccccctctattgtggccggcaacctcaccggcggcatcactgccgcgggcaccagccaccgtaccgcggaccggccgccatag

SEQ ID NO: 35570 - DNA, 318 bp, Zea mays
  Peptide Sequence Number=SeqID_78945
atgatgctggtagactacacaatgggtctcctccagcagtcgggataccctgtggtggtgcagggggcatctctggctaaggtgcaggggaaggcggcctctcagactccacctcctgctgaggcgagggggaagagtcctgctggtcctggtcctggtcctactcctactcctggcgttggcgctcctgctcctcgtacaggcgacaatgcagtctctctaggtgactggactgacctggcaccgtacgacgcagtggacgctccatcaggcgagaaggcaaaaaggggatcacagacttacgtgcagtgcacctga

SEQ ID NO: 35571 - DNA, 240 bp, Zea mays
  Peptide Sequence Number=SeqID_78946
atggaattaccactagacgcgcagagcagcggaagacgtctcgatgtagacgaacgcgtcgagcagtgtcgtgcagtcgtcggcgtccttcacgtcctcgcacggttcgtcctagtgctccagatgcagcacctccgaggtgctctcagttctgacgatactgctgttgctgctgaggaaactgcctctggtactggtgctggtgctgacgctgatgctggtgctagtgaccttgcttga

SEQ ID NO: 35572 - DNA, 1035 bp, Zea mays
  Peptide Sequence Number=SeqID_78947
atggaagcgcggccgcggctgctcttagtcgtcgtcgcgatcttcgtgtcgatatctgccgtcgcggcagccgtcataaacgtcaagaactacggggcccatggcaatggtgtcaatgacgacaccaaggggacgctcaaggccgccacggacctgaaacggttcggcaacgactggattgagttcgggtgggtgaacgggctcaccgtcgccggtggcgtcattgacggccagggcgccgcctcgtggcctttcaacaagtgtcccattcgcaaggactgcaaagtgctgccaacaagcgtgttgttcgtgaacaaccagaacacggtggtgcgcgacgtcacgtccgtgaaccccaagttcttccacatggcgctgctgtcggtgaagaacatccggatgagcgggctcaagatcagcgcgccctccaacagccccaacacggatggcatccacatcgagcgcagcagcgggatatccatcatggacacgcacatcagcacgggcgacgactgcatctccatcggccagggcaacgacaacgtggacgtggcccgcgtgcagtgcggcccaggccacggcatgagcgtcggcagcttgggtcgctactccggcgagggagacgtcacacgggtgcacgtccgcgacatgaccttcacgggcaccatgaacggcgttcgcatcaagacatgggagaactccccttccaagagcaacgccgcgcacatggtcttcgagaacatggtcatgagggacgtgcagaaccccattatcatcgatcagaagtactgcccctactacaactgcgagcacaagtacgtgtccggggtgactctcaatgacattcacttcaagaacatcaagggcacggcgacgacgccggtggcggtgttgctccggtgcggtgtgccgtgcaggggtctggtgctgcaggacgtggaccttaggtacaaggggcagggtggtacatcggccaagtgcgagaacgccaaggccaagtaccttggctaccagtttcccaaaccctgcccctag

SEQ ID NO: 35573 - DNA, 231 bp, Zea mays
  Peptide Sequence Number=SeqID_78948
atgtccccggcgtgcggccccggctcggctgcccggcgtggtggcccggtgcggcaccgacgcgacggcccgatggccaacctgtcgtgcgcgcggcccgacggctctcccagcgcgcgggcgcggcctcggcacgacagtgtgggcgcgcgaccccggcgtggcggcgttgcgcggttcggcccggcgcgccgtcgcgcggcccagccacggcctccccgatacatctga

SEQ ID NO: 35574 - DNA, 255 bp, Zea mays
  Peptide Sequence Number=SeqID_78949
atgggcgagcgcgccagggagcagcagctggccatggaagagagcaagatgcagggacatgccatgggagagcggcagcagggagatggacggatcggcacagtggagaagagaccaacacaagtcttttgtgcgcactttgtcctcactcatgcgcacccgagaaaacttctcggtcgatcactcatcccaatttgctccaagccatgcacgcttaacttggaggtcctttcaaggaaggcttccgaaaattag

SEQ ID NO: 35575 - DNA, 150 bp, Zea mays
  Peptide Sequence Number=SeqID_78950
atggcagtcagggtcagtgaggcattgtacgccaaggcggttcttttggaggatatggttgctggagtgacttggccgtccatctttgccacagggttggacagtcgagtgggaccctacctcaccaggggaaggagcatgaaggagtga

SEQ ID NO: 35576 - DNA, 315 bp, Zea mays
  Peptide Sequence Number=SeqID_78951
atggctggtctacggcccagcaccacggttccctatttttttccccgactagtcgattcgcgtgatgttgcatccccgatgagaaattggttcaaccccaccccgaattccctgatctactcgaacatattccatcccgtgggtgtattaggtgacttgggccacttacccgaagtgaagatgatcgcggaggtggtcggccacggcgacagcggtccccagcccttacggaggtcggagaggatcgtgcagcgacccacggggacgaattcgctccacgcagttcgccagggtgccactggtgacccgaattga

SEQ ID NO: 35577 - DNA, 534 bp, Zea mays
  Peptide Sequence Number=SeqID_78952
atggccatcgtagaccggccaaaccagccactcccagccccgtctgaccctcgggatagcttcaccggagacgccggatcgacatcgtcggacttcaaccgaccaccgtcgcacgtagaccaagctccacagccggagcgcacgccgtcgatgagctcgaccgcctgcgcacgtggtcaaaccgattctggccatcaccatcgacgagtcgcacctcgacgtgaccgccaggacctcccggatctaaccccgcccttcaccggacctccctcgccgccggctgaagatactatcgagtccaccgctcttcacgtgctgacgaccttttgtggctttcaccccttagagctatcgactcatcccattggcttattcctcacggagaaggaggatgacccaatgtggaaggatctagtggagcatgccaaggatgtgtgggctccttacccaggggaggaccttgtggtagatttgtccactgagctagtggaaaaggacttccaggtggagcagatggccactcaaatccaatag

SEQ ID NO: 35578 - DNA, 399 bp, Zea mays
  Peptide Sequence Number=SeqID_78953
atggcgagagtagcatgtaccctccgtggcaagaggctagatggtggtgtatctgtgctctcggagacaaagaagtggaagaagcaaatgtcgaaggtgatgaccaagtgtcgcaaaattccgaagttgaagctcgagacaacatctactcaaaccccagaaaagacactggcgacactggaagctataaggttgcctaccattgaagagactcccttagcaatagttgtttctgaaactaaggaaaccattgcttcggagctcttaataagcagtgacgaggcagacaaagaatgcatagctccattaatgagctcgtacttgtgcgatgacgaagacgatgatgcactggtcaagaccacttctgtgatagatgtgcaatcaatggatatcacatag

SEQ ID NO: 35579 - DNA, 684 bp, Zea mays
  Peptide Sequence Number=SeqID_78954
atggctgaaaggtaccaactcccgcggagttgcgctcctccaacgatgaggcggaaagacggcgggtatcccccatccgggggcttggaaggtggaaagacacgatgcatgagtgagcgcgaagacatggtctacttccaagggggtcaccctccttttaaaggcgactatccctacttgcgtccccagccgtcacaggctgagtcttctccaacacactccaaggccctcccctgcggcgcgggggctgggtcccacatgtcatgcaagccggctcagagcagaagaagccaaaccgccgtgcgcggcggcgcttctggcaggagaagcgggcgacgcttcgccttcgccgtaataaccgcgccaaaaaagggatcgggaaagggggatacccctaaaaggatccttccccaggaaggaaccaggctccgagcctccctactgatcagaggttcgaaggctggccccccgaagggttcgacagccgcctcagatcgcgtgggccctacacccactactggtcagagaggctcgggggctgctctctcaaacccggctctggccgaaccgttgacagcgtcaacataccagcccgagaacttgggacccgaccgtacacccgggctacggccagctcgcatgagggaacaaccagaccagccgaagcattacgcgaggcattaa

SEQ ID NO: 35580 - DNA, 426 bp, Zea mays
  Peptide Sequence Number=SeqID_78955
atgaggcaaccgagggcacctctggctggaggcaccggactgtccggtgtgcaccggacagtgtccggtgcgcccagaggacaccaactcaaactcttcgccctcgggaattctcggaagccggcgcgctataattcaccggactgtccgccgaagcctcgggtcgggctggcgccctctgaggacggctggccgaggccctggggcgaccggccgagccgcctgctcgggccagattcccggagaagaccctggcagcgattgcccgggcgtggcgatgacgtcgaccttcggagtggagatcttcggaccgtgtcgctgtccaaggctaggtcggacctcgccgaagatgtcgtcgatgccgagggtgttgctgcccctttccagcgtcaagacctgagcctgcaggatcagattgtcttgtag

SEQ ID NO: 35581 - DNA, 555 bp, Zea mays
  Peptide Sequence Number=SeqID_78956
atggtgacctccagcttgatggtgggggaaagcgagtcgggctgcggcctctgcccctacctcagcctcaaggattttcatcaccagggctggggaggggactgcaccgtgcctggctctcggacgcgagtggcttcggagccgctcgcggcgccggcgtcttccatggcagctggaagaggttcttccgccgacgagatagccagggccgcccacggactgacctccaactctacggccttctgcccgtccttgcctcacgagtttgggcatgggcgggggcctcctggcagcagcacccgccctgaggtcagtgctgccgctgtttggccccccggagcagaagtcgtcgtcgtcgctgctgctggagcaggcgacggcgcgccgttcgtcggaggacaccaactcaaactcttcgccctcgggaattctcggaagccggcgcgctataattcaccggactgtccggtgtgcaccggacatgtccggtgctccaaggaagcgcgatctccggaactcgccagcctcgggttcgcgcggcagccgctccgctaa

SEQ ID NO: 35582 - DNA, 435 bp, Zea mays
  Peptide Sequence Number=SeqID_78957
atggcggggacaccttccctaggtcccgacgatcttcctcagccgcaccccgaggtcagggcgcctacacaggcggggtttccccggcgacgagctccgttccgcctcagcaccaaattctccttcgctactttctttcacgggcgaggtcggtcggcgtgtgagctccacgtccgcgccgacaagattgctgaaggtgataggaagccgactggcgaaagggtgccaccgacaatatacaatacggtttacaatgagtttgtgtgttgttcaacatgtctctctgcttatggtgcacagatgtggagccaaaagacgatggtcgacaacgaagagcaaatcatgtcgtcggcgcggtcgtggactagcgggacatgtgtccaggatgtaggcacgcgtatggagtatgcaactcgtaatggtttcggtggttga

SEQ ID NO: 35583 - DNA, 228 bp, Zea mays
  Peptide Sequence Number=SeqID_78958
atgcaccaggggagtctttgtaaaggctacatagtgtatccctggcccttcaccttggtagtgaagatcgggtcttgcaaacctaggctggaaagggatcacggctcatggatggttcgagatacagatgatctgagatacaatgattttattgatggttttggtaaagaagaaggcgtcgaggaggatctacaggagttccgagacttcaacgagttcgaggattag

SEQ ID NO: 35584 - DNA, 219 bp, Zea mays
  Peptide Sequence Number=SeqID_78959
atggcgaacaatataggttttccaaagctagatgccattttatcaacgatgccctccgaagatttttcaaattgcctcgcttacacgtatttgaaggttgttgaaatattgcataacttggttaacatttgttttctaactttgccgggcctgattttgaacaaggcgctaaagaacagaaaaatattgtgggtgaagccgcctagaaggaaattgtaa

SEQ ID NO: 35585 - DNA, 594 bp, Zea mays
  Peptide Sequence Number=SeqID_78960
atggcgcctcctgttgacgtggctggcctacgccctaggttgggcgatgtggaggctcctccgaagccgaggtcgagtctgtcttccatggccgaggccgagtccgagcccctgggtcgagcgaggcagaggtcgtcggcaaaggccagggcggagtccgagccctggggtcgggcgaagcggagttcgtcgtcttctggggctgagcccgagtccgagccctgggtcgggcgaagcggagttcgccgtcttccgggacttagcccgagtccgagccctgggtcgggcagagtggagttcgccgtcttctgggacttagcccgagcccgagccctgggtcgggcgaagcggagcttcctatggtgcctttggcagggcctgactgcctgtcagtctcactctatcaagtggcactgcagtcggagtggcacaggcggcgctgtccttctgttaggccgatgctcgagaccaactgatgcaattcttgaggatctcctagacctgtgggttaggacccacacacgcttttgtagcgccactttgatcttgttggttgatgttgatcgcattgtcttcattggggttagcggctaa

SEQ ID NO: 35586 - DNA, 2925 bp, Zea mays
  Peptide Sequence Number=SeqID_78961
atggagcggaatggcgagagccacctcaaggacccgcttctgccgacgacatctggcgcctctcctgctggggcgtctccaaggaaggagaggaagacgaggaaggtcctgttcagtgtccggggcatctcctgcgcttcttgtgccgtgtcgattgagaccgttgtggccggcttgaacggggtggagagcatccaggtctcctcacttcagggccaggccgtggttcagtacaggccagaggaaactgatgcaagaaccataaaagaagctattgaggacctcaactttgaggttgatgaacttcaagaacaagaaattgctgtgtgcagactacgcataaaaggaatggcttgtacaagctgttctgaatctgttgaacgggcgcttcaaatggtacctggagttaagaaagctgcagtgggtcttgctctagaggaagccaaggtccattacgatccaaatgtcactagtcgtgatcgcataattgaagctgttgaagatgctggatttggtgccgatctcattagttctggggatgatgtgaacaaagtgcatctaaagcttgagggtgtgaattctccagaagacaccatactcatccagtctgtactggaagctgtggaaggggtgaacaatgttgaatgggacacagttgagcagacaatagaagttgcatatgatcctgatttcactggtccaagattacttattcagtgcattcaggacactgcacagccccctaaatgctttaatgttaccttgcactcaccaccaaagcaaagagaagcagagcgcaatcatgaaattaggaattacaggaaccaatttctttggagctgcctgttttcggttcctgtattcctgttctccatggttcttcctatgctttctccttttggggattggttggagtacagaatctgcaacaacatgacaataggcatgctactacggtggttgctgtgttccccagttcagtttattgttggttggagattttatgttggagcctatcatgcactcaaacgaggatactcaaacatggatgtgctggttgctttgggaacaaatgctgcttacttctattctgtgtatattgttctgaaagcacttacatcagactcatttgaaggccaggacttctttgaaactagcgctatgttgatatcttttatattgctgggaaaatatctcgagatagtggcaaagggaaagacatcagatgcgttgtcgaaattgacagagcttgcaccagaaacagcgtgccttcttactttggacaaggacggaaatgccatttcagaaacagagatcagcactcaattacttcagagaaatgatgtcatcaagattgtgcctggcaccaaagttcctgttgacggcgttgtcataaaaggtcaaagccatgtcaatgaaagtatgataactggggaagcaaggcctattgcaaagaaaccaggcgacagggttattgggggtactgtaaatgataacggttgcataattgttaaggcgactcatgttgggtcagaaacagctttgtcgcaaatagtccagttggttgaagctgctcaacttgcaagagctccagtgcagaagttagcagacaagatttcacgtttttttgttccaactgtggtggtggctgcatttcttacatggcttggctggttcatacctgggcaacttcacctctacccccagcaatggatcccaaaggccatggatagttttgagcttgctttgcagtttggaatttctgtcctagttgtcgcatgcccatgtgctttgggacttgctacaccaactgctgttatggttgcaactggtaaaggtgcttctcaaggtgttctcattaagggtggaaatgcacttgagaaagctcataagattaaggctatcatatttgataaaactggaacgctgacagttggtaaaccttctgtcgttcaaacaaaggtcttctcaaagataccacttctagaactctgtgatctggctgctggtgctgaggcaaacagcgagcatcctctatcaaaagctatcgttgagcacacaaagaagctcaaggaacaatatggatctcacagtgatcacatgatggaatctagggactttgaggtgcatccaggagcaggtgtcagtgcccatatcgaaggcaggctggttttggttggaaacaaaaggctgatgcaggaatttgaagttccgttgagtcctgaggtggaggcgtacatgtccgaaacagaagagcttgctaggacctgcgtacttgttgctatcgataagatcatctgtggggccctcgctgtttcggatcctctgaagcctaaggcaggccaagtcatttcttaccttaagtcaatgggcatctccagtatcatggtgaccggtgataattgggctaccgcaaaatcaattgcaaaggaagttgggatcagccaggtgtttgccgagatcgacccagtgggaaaagctgaaaagatcaaagacttgcagatgcaagggttgacggtggcaatggttggcgatggggtaaacgactccccagcattggcggcggcagacgtgggcatggcgatcggtgctggcacagacgtggccatcgaggctgctgacatcgttctaatgaagagcaaccttgaggacgtcatcaccgccattgatctctcgcgcaagaccctctccaggatccggctgaactacgtgtgggccctgggctacaacgtcctgggcatgccgatcgccgccggcgtcctgttccctttcacgggcatccggctgcccccttggctcgccggggcatgcatggctgcctcgtcggtgagcgtcgtctgctcctccctgctcctccagctctacaagaaaccgctgcacgttgaagacgcgcccaggcccagggaggactcagatttggtgtga

SEQ ID NO: 35587 - DNA, 444 bp, Zea mays
  Peptide Sequence Number=SeqID_78962
atgggtcagtggctcgggtggggcaggggagcgagcaacaggacacaaaggcgagggtgcctaacgagtggggccacgacagagccaggcctgtcggtcagcggcatggggcaagcacaagcgcgggcgcgcactgaccggcggggcctgccaggcgatgacccagagcagagggagggggtcagcgtggtgcttacgcgtgggacgcagggtccaccggtcagcggccacacgaagggacaggagaggggtcgcggctgggaggctacaggtgggtcccatcttgtcggggttgccgtcaacctcgatcgtgcgctcagctcgagcgccatggccagaattggcgacctcacacgggcaaaggaggacatggggcggtggcggttggccaaagaaccccgacacgacaacacggtgtcggtgccgctgatcgtcggcgcctaa

SEQ ID NO: 35588 - DNA, 162 bp, Zea mays
  Peptide Sequence Number=SeqID_78963
atgagcgtgcctgccctctgcgcgcgctggcgcgcaataaatgcgctgcaggtgaggaagcgacaaatttttgttgcttttgctccaaggtggtaccaaatgaggaaaaacaagattgaagagcgggaggacttggtcctccacatagggacgaatctctag

SEQ ID NO: 35589 - DNA, 510 bp, Zea mays
  Peptide Sequence Number=SeqID_78964
atggtgcggctatactcaaggcttacggcggtggagcccatcgttagggatggtgccgagcgcggcccgaatcgggtgacgcaagaactccggtggggatcagggttagcacgtgaggcgagcctctttttatgggttggtgaggcgaccagctggagccaagcgcgcatggcggtgactgttgcaacaaaccggcctcatagacatgcccgagaagatctacagagcagcctgcccacgcagacccacgcctcagcggtggaggaaagtgggcacccaccgcagaggctggccgaggacccacctgtcggcgcggatcaccgccaaggtgcacgggtttggctgacagccgagcccacatgtcggaaaccagggcgcacagctggacggattgggtcgagcgatgctttaggcccagtgcgaggtaatgttttcaacatgaaatacacacaccacatttgtttcaatagtatattattttgggtgtgtagtcaaattaagaaaggttga

SEQ ID NO: 35590 - DNA, 579 bp, Zea mays
  Peptide Sequence Number=SeqID_78965
atgggctccaccgccgtaagccttgagtatagccgcaccattgcttcgagcactggcgtccgccgagtgcttcctgtcaccgtggaggggcatgctactgcgattagccaagatttggggagcatcggtgtgagccttacgattcaagatcacacgtgggcctcagagcaggacgaggccgtgccgcggggagacgtcaccgcaggccttcgtctggtgctgaataaagcgaagggtgtccctgcccgttttgtcttcgtcaaaccagcgactgcagcgaaaggcgacgaacgaagggtggcgtctctgccttcgccccaacatttgccctccgagggaccagttcgacaaagtcacctggtgccgaagacgtcgctagatggcggagacgctgccctcgctcgaagtggttccgcgggggtttttgatgtgaccgttgatggacggcgtactgttggattgcgggtttcccgaagcgtcgcgtcctgtcggattgcgggtttcccgaagagccgcgccctgcctataaaagggggcgggggtcggcgctgtttgaactttgccttccgcgctccgtaa

SEQ ID NO: 35591 - DNA, 441 bp, Zea mays
  Peptide Sequence Number=SeqID_78966
atgttgtctgcccctcgctggcggctcggctcctccacggcggtcgacagcatcaccaactccgacttccacaggtcatccacggagccacccattgttccagacgacaatctcagtcgagaaccacggtaccgcgccggcttgctagcttccccatcctgtccgactattctggtgcaagacttaagactaactctgaactctccaaggtcctcagacaagttgtctcatcgattcagtgatttattgacatcaaaacaagagaatgaagaggacaaaaacattaagatcattttattgttgatcaagttatcgttgatcccgatcttcgcatgccaattaagtaaatcgatgcaatgtcaatgtgtaggtttaaattcacgtgctgatgtttatgaagctattagaggcgaggaaaccagatcatctttaattaggtaa

SEQ ID NO: 35592 - DNA, 720 bp, Zea mays
  Peptide Sequence Number=SeqID_78967
atgagcagtctgaggttttcgagtgtgttgcaggagacttccgtgagcagcaacctggtgaagccaaaggtgccccctgcaccaccacagggcaccccaactgctggaggagaccctgacggagacgacaacgacggtggcagttcgagccatagcacggagcttttagaggagcaagagccagaaggatggatcgcccgacccgtcactcgtgacgccgctcgtagttgtcatttccacgatgctgtcgacaccttggtgcatcaggccttcgaccgacacacttggtccatcgagtaccgctgtgtagtctaccatcatagtcgtgggttatacctggaccaatgggaggctacctgcttggtgcgctatccggacgatgatctccggggtttagaggcctactcagagaattattctatcactaaacgggacactgccgaggcagtcatgcaggatgctgcatggcgcaatcctagattgagcagcatggccaacctggtcaccgtgctcaacaccgagctagaccacgcccttgacgagttgggcaaggctcgggcggagattgcagaattgcatgctgagcgcgtggagcaccgccatcaggaggaaggttcccccgcccctattcggactcaacacccttatcgctcgccgccccatggtcaacatgcttatggcacccctgactgtaggaccaagatagacttggagccatag

SEQ ID NO: 35593 - DNA, 540 bp, Zea mays
  Peptide Sequence Number=SeqID_78968
atggtgggcgcgcaggagcttccctggctggccctcacctccagccgtcaggcttctctccccagcctctctcttcttgaacgtagggagccttcttctcccagggagcagccgctcacctccactgctccctccggcgtcggccagcgggcaggattccctaccttcctccctcgctcagccctattctggcctgtcctcctcctgatcttcagccagcaagaagccagcggtctctccaggcttgcccatggcgctcggctggccatggcatcccccttgcagcttgcctccctgccggatctcttcctagtggccgcggcgagctcccttcctccaagcacccggcccgcagggacctcctctggtccgaacttgagcaggtgctctcccccacgccatcctctctctcccacgcggcagcaggcagagcaccatctccctagtatcgactcccttggcgtcctgctcctccatgggatgggcccctccctgcacctcccctccaggcctatggcgctcgtgctctctctccactga

SEQ ID NO: 35594 - DNA, 735 bp, Zea mays
  Peptide Sequence Number=SeqID_78969
ggagttcgccgtcttccgggtcttagcccgagtccgagccctgggtcgggcggagcggagttcgccgtcttccgggtcttagcccgagtccgagccctggggtcgggcggagcggagttcgccgtcttccgggtcttagcccgagtccgagccctggggtcgggcggagcggagttcgccgtcttccgggtcttagcccgagtccgagccctggggtcgggcggagcggagttcgccgtcttccgggtcttagcccgagtccgagccctggggtcgggcggagcggagttcgccgtcttccgggtcttagcccgagtccgagccctggggtcgggcggagcggagttcgccgtcttccgggtcttagcccgagtccgagccctggggtcgggcggagcggagttcgccgtggcgcctttggcaaggcctgacttcggagtggcgcaggcggcgctgtccttctgtcagactggccagtggagcggtggagtgacggcggtcacctcggctctgccgggggcgcgtgtcaggatagaggtgtcaggccacctttgcgttaaatgcccctgcaatttggtcagttggtgtggtgatttagtcaaggttgcttctgagcgaagccaaggcattgggcgagccggtgatgtgtccgccataaaaagggggcctcgggcgagacggaagtctctcgaggtcggctgcctttggccgaggctaggctcgggtgaagcgtga

SEQ ID NO: 35595 - DNA, 549 bp, Zea mays
  Peptide Sequence Number=SeqID_78970
atggatgaactattggagatgcttgggcgtttagagccagatataggatgtgaagatgctggtggtgcaagtactggaggaggcaaccatggcgaagaggatgctgttggaaacactgaaggtgaacatgtaacgcaatgtgataacgaggagcatgtggcagtacattcacgacaacaggaacacaatatggggatgttagaaagatggcataagcttattgcgcccaaatatgcaaggccaaagggaaggacgataaaaactagtgaacaaagagttctgaaactgggtgcgaaaggagaaaagaagaagactcgaaagtgccaaaaatgtggcattgctgatggacacaacagtcgaacctgcttgtctatagaggaaaatagggtaaaattggctagccttgctgatagaaaaagaggacgaccgcctgggtctagaaacaaaaattcaacaatggccccgcagtggaatgagacaaccacatcaaaaaaacataaacataccgattgtgaagaacatggttcggatgacgataatttggcatga

SEQ ID NO: 35596 - DNA, 1431 bp, Zea mays
  Peptide Sequence Number=SeqID_78971
atgcggaaggttgatcgacccccaaccaatccgaagcgtttaatcattgagtcaagtcaagaatgcttcagtgttgacattccacgctcgactgacatggcagatcctacaaatacgccgtctgatggtgatcctcctcagcatagaaagaggggtgttgcagctgctgctaaaaatattgctatgcctaatgtggatgatgatggtgactttgagccacccaaaaagaagtgcaatatctcaatggatgccccaactaaaacgcagaggctcaacatcagatgcaacctaggagatgttcttgcgtccattcagatattgaatgaaaagcaacgtcaagctatagtcagaaaaggattttctagtattcttgacatgacaattgatgcaattggatgtcgaacacttctctgttggctcatgcagaagctagatcccagagacatgactcttcgtattggtccagacaaagaactcaaaatcaccaagcagattgtccatcagatattgggtcttccaaatttgggtggtggaaagccccttaatattgatgaagcgaacgctgcggcaacacttcagtcctcattgaatattagcaaggatgagtttgttatttcaaagctccaagacagattgaggctaggccaggatgatgatctttctatcagatgtttttttctcattctcttcaaccggctgctattcccgacagctagctggtctatttctttcaatgaggttctacttacagaagaaatggagcgattccctcaaattgattggtgccatctaatttttagtgatttatgtgaggctgcccagagatggcacaacaggagcattaacaatgtgtcagcgacgatatatggttgttccatcattgttctttttcggagcaacagtgagacatgttatgtctcaaaatcgccatctacttgtcagattgagtttccaatgaggccagaaacttttgatgaagacccaaatcaacatggtcgacttccaaatataatcatccaactccctcttatgcaagacctgatggcaaataagattcagatgcttcctgtgcatcaacgccagaagttccaagctacattgattgattatgacttagaggttggcaaaatatttgcctctatcaagcaatgtttgaatactattggtacaaagcagtccaatctagctgctacatttggagatttgattgatgaggttcttcgggccgatgaatctgttacaccaaatactcaaggtcagacagtggtaggtggcacagttgaccatgattctagaccagtatttgacaagactcctattgggagtgtttctgcactaggcctcttcttatatgaattagaatgtgctcgcgctcttcgggcatacttgtgttctaggttcattgaattggacagatttagccttgaatag

SEQ ID NO: 35597 - DNA, 792 bp, Zea mays
  Peptide Sequence Number=SeqID_78972
atgtctgctcagattgcgctgcgagtgcaccgcctattggatcttccagccttcttgctagcagccggtgctgagtctgaggcgcatctcacctatttgccaggccttctgtcctttctgactatcagcggcagatatgttgaggagtgggtccgcgtcttctatgcctctgtttggattgacccggatcatcagtggatgaggtttcgctttgagcgcgaggatgttacgatcactgctaggacagctcacgtcgcggctctgttccgcccgcctttcacagatgggtcgcgacgttctccagcagacttcactactgcagcgaagtacttatatgagctcgtcagacggacactcctgcctaggatgggatacagggaggctaccactcatattcagctttggctccttggtgccctggtatcccactctgagtttgatgttgtggactttctgatctgtgagattgaggacaccgttctggatgggattcgtgctcgacggcagctaccctatgctcactacttgtgccacatatttgcgcagctgattcagccacctcgatttcagagcacccttgaggcctcacgccttgtgtttggatcttaccgtcctgctcctgagattccagccgaggatgcagcacttcgacagtttgacacccagggtacagcagctgatgatgatgatgatgatgattttgggattcctcctccgcctccgcctcctatgcctccacgctcacatgatcatgaggctgggagctctagtgctgcccctgctactccttag

SEQ ID NO: 35598 - DNA, 521 bp, Zea mays
  Peptide Sequence Number=SeqID_78973
gcgattatgtctacttgaaagtttcaccaatgaagggtgtatcgcgtttcggggttaaagggaaacttgcacccagtagccgcggcgaagaaaagggcggaggggcttaccggcggcgagactgttccggtgaagtggtcgaggatgaaggggaggtcgcggggatcacaacgggaggtccacgggatgctagagaagttatgagtgaaaggaattgggcggagactcactggatagctcggtccacgcgcgacggcggaagaccgaagtccggtgaggtcgatctcgggcctccggtgaagtccggtcgggtccgagggcttggcgagcttcacgggctactggcggagctagccgaagcactggcctgcccagaggatggctggagggggctggccacggtggccgaagctctggcggcaatggcgggcggaaatgagctcgccggagctaaaggaaagtggctggccggtgagggtgagtgcggggcgaagtggggcgcgcctgggagggatttatag

SEQ ID NO: 35599 - DNA, 111 bp, Zea mays
  Peptide Sequence Number=SeqID_78974
atggcgggcggaaatgagctcgccggagctaaaggaaagtggctggccggtgaggagaacacagatgatctttgggaagaggtttttccattcaggaattcagaaatctga

SEQ ID NO: 35600 - DNA, 531 bp, Zea mays
  Peptide Sequence Number=SeqID_78975
ctcagcggcaagcgcgtaggcatcctcgggctgggcagcgtcggctcgctggtcgccaagcgcctccaggcattcggctgcgccgtgtcctaccactcgagggcgcgcaaggcctccgtcgcctaccgctacttccccgacgcccgcgcgctcgccgcgggctccgacgccctggtcgtcgcgtgcgcgctaaacgacgccacgcggcgcgtcgtcgggcgccacgtgctggacgcgctgggccccggcggcgtcctggtgaacgtcgcgcgcgggggggtcgtggacgagcaggagctggtcgcggcgctgcgggacgggaggatcgccggcgcgggtctcgacgtcttccaggacgagccgcacctgcctccagggctgggaggcatggacaatgtcgtcctgacggcgcaccaggcggcgttcaccgaggagtctagcgccgacctccgcgagctcatgattgggaacctcgaagccttcttctctgggaagccgttgctgacgccagtgatgacacggccacagtga

SEQ ID NO: 35601 - DNA, 351 bp, Zea mays
  Peptide Sequence Number=SeqID_78976
atggcattgtgctgcttcttctacgtgctcggcacatggcaacacaacatctacgtcaagggcgactgcatctcagtcacggtgagccaacaaagggcctgtggctacgggtccgaaggcgtcgacgttgcgtggctcatctttgagatgcaccacgatggtgccgccaaggtctcactcattcgaattctccagcggaccatagatggtctcaccaccagtagatctagggggtgggccaccagggacattgcccagggcgcggcgcacctccgctataattcactggactgtctggtgcgccagcagagcagcggtcatctgcgcacaacggtcgactctgcaaagtaa

SEQ ID NO: 35602 - DNA, 396 bp, Zea mays
  Peptide Sequence Number=SeqID_78977
atggagtgctctctggtgtgtttgtgctgtgtcctgtgtgcactgtgcatgggcatatcatcattatattgcagtgtgaagtccaccattgagaggtacaagaaggccaacagtgactcctccaactctggcacagttgcagaagtcaatgcccagtattcatatgggcaaatcctaagaaatgcatgcataccgatcatgtacaaagtactaccagcaggagtcctccaagctgcgacagatgatccacagcttgcaaaacgcaaacaccctaacttgtttagatggtctagtaggaacatagtgggagattccatccacaccatgggcctcagggatcttaaacaaatggagggcaagctggagaaagccataatcaagattagagctagaaag

SEQ ID NO: 35603 - DNA, 1470 bp, Zea mays
  Peptide Sequence Number=SeqID_78978
atgtccaatgtaccacctgatagagcattagatagggtattcatgaagcatggcattagaacccgcaaggtgaatctaccccgtactagtggaagcggcgcaagccctaatggtttgatcctagctgggtgcggcgtgctatccccaattcattggtttctctactccgggtctgatattggggtttgctgcggtggtaactgcatggacacagtaagggaggaggcatggccagtggctgcaccgcggcagcagccatcagctccccaaccgcagcagcaacagcagaatggccgtattgatctcagggagctcaaagctcagatggagaagcagcttggtccggatcgctcgcggcgatattttggctacttgaatggctacttatcagagaggctcggcaggcaagactttgaaaagctgtgcctgcataccctggggcgggagaaccttcaactgcacaaccggctaatccgtgcaattctctacaatgcctaccagggaaagtgcccgccacctccactggatgcagggagacctgtaggagcatcagtaaagaaggcttatcaggctgctgaagtgttgaatgcttgcaatggtgatgccaggttgttacagattcagagattgaggcctgtggccagagcacaggatcatactttaaaagacagtacaaataacacgggtccaaattgtagggtggctgctgccaatcacaaccaagttactcacgatgcttctggatctctggagaatggtacactaaatcaacttgagttgaagagattgcgttttcaacaatgcgaacctgtagagccagtggcaaagcatccgcgtgtggaacagttgccacccaataatttgcctgtacagagaagaagcatgagcagcactgcagaacagtctgcagaaatattgagaagtcctgtacgagctccactgggaattccattttgttcagcaagtgtgggtggtgcaaggaaatttccacctccactaattgttgcaggtgaggatcacttcaacagctgttctgagcatgatgggctgttcagcactgaactgctgcatagacggatggagaaaacagcagaaacgctgggtttagctggtatcacaatggatagtgctgagcttctgaatattgctctggacaagtacatgaaaaacctgattaggtcatctgttgagttagtaggaggtagtgttcagagggatgcaaggaaagggacaccaacctacaagcagcaagcctatggaaagcagattaatggtgtccggctgccaaaccatgttcatatgcaatcagccagtggatcaccaggagccaagaatgagattggaattaaccatttgatctccatcaatgactttaaggtagccatgcagctaaaccctcaacatctcggggagaactggccagtccttctggagaagatatgtctatgttcttcagaggaaaatgactga

SEQ ID NO: 35604 - DNA, 1686 bp, Zea mays
  Peptide Sequence Number=SeqID_78979
atggccgccgccgccgccgccgccgccgccgccgatgtgcccgccgaggccgccgccatcgcgcggcgcctggcctcctgcaacaccggcacccgggagcgcgctgtccgctacctcctctccgacttcctgccggcctccgcgcggcgcctttccgccaccgacctcatcaagctctggaagggcctcttcttctgcttctggcatgccgacaagccgctctaccagagctccgtcgccacgcgccttgcctccgccgtctccgccccgccgtcccccaccgacggcgccgccttccttgccgcctacctcaccacgctccgccgcgagtgggcacacatcgacgtccaccgcctcgacaagttctacctcctcaaccgccggttcctccaccacgccttcctgctcctcagcgccaactccttcgcccccgtcgtcacctcccaggtcgtgtccgtcctgtcggataaggccctgctcccggaagccgacagcgccgccgccggcacctcccggggcctcgggtaccacgtcgccgaggcattcctagacgagctcttgcctgtgctccccgttaccctggagacggtggacgccctgctggctccgttcttcatcgtgttggcgaagtcgaccgatcgggtgatggtgagtaaggtgaagacatgcgtgtttgagaggttactggagagtggcagtcgtttgcttgagatggtgaagaaaggggaggaggtggacaagggtagcgctgaggagaagctcgggaaatttgggttactgtttggatttagcaagaggttcctggatattggtgcgaatgcagcgacggtgcaatggaaccggaaggtgctctttgggttgagggatgcatttgtgaagattgagaaggctttgcagctatctggtctcgagatccctgtgccacagtttgaggctgctgagctgtccgtgcaaccaaatgcgggcgatgaaaaggcacaaaagaagaaaaagacgaagaatgttgcattggctgaaggtgagatgggggatgccaaggatttgaagcgtgagaagaaggtaaagaaagacaagaaggtgaagaaagagaagaagaaaaagaggaaggtggaggttgttgatgaagggaacaccaccgataagagtactgatgctcctgtagatgatcagcagatcggtgatggtgctgatggcattacatttgatgagacattaaagtccaatcttcagaagcagtttgagatggctgcagcagaagctggtatggtcaaagggggcagcagctcaagcgcttcaccagtgacaccagtcagtgggaaagtggcaacaaagaggaagcgctcaaagtctgccgataagctgtctgaagcttctgatgggggtgatggcagcgaaggtaatcttcttgcccaggatggagagaagagtggtaagaaggtgaggttctcgatgaagaataatttagtttggaaacctcacaatcctttgccaccgcagtgtttgaggctgccaccttcggctactccaaggggaagtgctctaaaaaagggcgtaaagccaggtcccataacaccgacaccattgaggaaggcgaagcctaaggcaaaatctgcaaagaaggtcttgaagaagcaaccttcatctgctgtgaagcgcttgcggaagttgcagagtttttcagcatga

SEQ ID NO: 35605 - DNA, 63 bp, Zea mays
  Peptide Sequence Number=SeqID_78980
atggccaaacgggccgtccgacccgggcccgtgaagtccgagattgggccacctgaagtttaa

SEQ ID NO: 35606 - DNA, 840 bp, Zea mays
  Peptide Sequence Number=SeqID_78981
atgtccggtgcaccaggggactccaactccgaactgctcgccttcgggaattggcaggagcgactccgctataattcaccggactgtccggtgtacaccggacatgtccggtgctccaaggaagagtcgcctccggaactcgccagcctcgggcgggcccagaagtcagaactccaacggtcaaattgcaacggctttggtgacgtggctgtcgcaccggacatgtccgagtcgctcctgccaattcccgaaggcgagcagttcggagttggagtcccctggtgcaccggacatgtccggtggcacaacggacagtccgatgagcggtccacggtgaactccgttcgcctgcaaaactacgtcctctacgcgctgctaggacctccagcggcgctagcaccttccatccgttcaccagggcaacacgcatcttgcaagctgctcgacgtcaagctcaccccgggaccccctacgccgcgccgccgccgccaccaacagcgacagtcgatagggcgagccgcctgccgcggggccgacaaccgggaccccctaagccgcaccgccgtcgccaccaacagcgatagcagagaaggcgagccgcctgccgcggggccgcgacacgatccggcaaccggccgaggggtgaagcaacagacgagcgtggacgctgacagccgagcgtggacgccgatcgtgccaagcgcccagtcccgattccgccctgcgccgccgcccgccctgacatggcaaacagaacaatggtcatctactctgtcattctccatgaacaagctgcttcttgcatccctctatttggtttgcacgactgcaagagctgag

SEQ ID NO: 35607 - DNA, 273 bp, Zea mays
  Peptide Sequence Number=SeqID_78982
atggaggtgaagcagcccgaggaggaggaggaggagaaggcaaagctgcggtggacagcgggtcagggcgcggacgccgaggctgggctgatctacagcgcggactacagcggcgtggccatgcatgctggctctccgccgacgacgaagccgaagcacaggcaccccagacctttgtaccgttggattgtacaagcagcgctgccggccgtctctgtaaataagctaggccttgcttctgttgctcttgctctccgcctctgccctgcatga

SEQ ID NO: 35608 - DNA, 1396 bp, Zea mays
  Peptide Sequence Number=SeqID_78983
atgacggtggcaggcgcgcgggagcagcggtcacgtcgtcagccaagctcacgtcccatccgggggcagcaagagaaccccctctcacggcgtgaagacaacgcgcccgtgatccgttcctcgaacggctcgcgcacgcgcaacggccgccctgccaactactcgaaacaaccgcgtcgcttctggcaggagcagcgggcgacgcttcgccttcgccgaaacaaccgcgccaaaaaaaagggaccgggaaagggggataccccgaaagggatccttccccgtaaaggaaccaggctccgagcctacttactgatcaggggttcgaaggctggccccccgaagggttcaacagccgcctcagatcgcgtgggccctacacccactactggtcagaggggttcgaaggctggcccccgaagggttcacagtcgcctcagacgccgagcgagggatgaccaggggtatgttcgatacataaccaaggctcgggctgcgctcccgagctcaccggagacaccatgttcggtgcccatcgagggtaacatggcgctctcccccctcctccttgcggaagggcgacgtaggggcaggtggtaccctttacccacaagtcatgttacccgtctgccaagggatcgtgacttcccatacacctctaccgaggaggcgaggcagggaatcccttgcaggaccgccatcgcagcaaaatcctcccgagggcctccctacactgaccactcccctactgcccttgcccctttcgggagcgcagccacggcgaggtgcggtccacggtggtgttgttcctccggtgaggaatccgtgcgccacagaggccccaacgccacaatcaccgcgaccgacgggtccgtcaggacccaaccacgcaccccggccgatcagcgacgccggagaaacggtatgtcgacggcgcccgagcgcgaccgcggcagcgggtttgttccgcaaggaatgcggcgcgagtggacgagcggaggagagaggatacgcttgggctccgaggactcggtacttaagtacccgcgagccggtccacgcgcacgaacgagctgccccgagatctccggccaaggagtccgcgtcgcgccggtcgtgcaagaaacgcgggtgagtttgttggggaagaatctgacatgtgggtcccccgaagcagcgacagagaagtccgttgacgcggtgagcggagcgcggcgcttgaggaagaacgtggctgacggcgtgggcccactcggaagcgactacggcgtacgcgcgatcagcggattttgcaggcgcgcgtggtatgacatgtgggccccgcgaggcagatggagtggagcgcgcgtggaagagttttgggccgcgcgggttgctccatctggtgggccaaattgtg

SEQ ID NO: 35609 - DNA, 737 bp, Zea mays
  Peptide Sequence Number=SeqID_78984
caagaggtggagtctgtgagggcgtccctcccctgtgccccagctggaggcgccctctgcaccaccacagggcgtcccggctgctagacgagctactggaagagatctcgatgaagacgacaatggtggaagctcaagccacagtaccgcgctttctaaggaacaggagcataaaggatggatcggccgacccattacccatgacgccgctcgcgcatagttgcgggacatacctgaaccgctgggaggctacctgtttggtgcgccgtccggaggatgacttccggggtgcagagatctgctcaaagcactattctatctctgagagggacactgtagaggcggccatgcaggatgctgcacgacatgcactctcgcagtattgctcattgttcagtggggtggacgatggtcttaacctcaggtattacccccatcgttcgactagcagtacggggagtgtgattgtctcacctgttgacgaaggcaatcctaggttgagcaacacagtcaacctagtcattgtgctcaacattgagctggaccacactcttgatgagttgagtagggctcgtgctgagatcgcgaagctgcaggataaccgcgcgaagcgctgtcaccaggagtatggttctcctgccccagctaggactcagcacccgtaccgctcactgccacatggacaccatgcttatgtcactcctgactgtaggaccaagatagatctggatccttag

SEQ ID NO: 35610 - DNA, 1122 bp, Zea mays
  Peptide Sequence Number=SeqID_78985
atgccctcgcccccacgtcggcagccacacacacgtgatcttcatagtctgcactctcaggcgcagcggattccgccacccgccctcgcaaacgccgccatggatggtggccgcatcctcgacccacttctctcgggcgcagcgaatttcgcctcactcatgcgtcctcataccgctcggcccccttcgcgcacagctagccacatgtcgcgcatggcggactcgcctccccatctgcaccgtaaccacttgctccttgtggcctccaccatcccattcgtgggagccgcatccatggccgggctagcctccctcgtcatcagaccctacttagtaccgttcctcctccccacttctgcctctgcctcctccggtcatgtcgtctctggcgagctctacgccccatcccacgtcgcgctcgccgagcttgatgcctttgaggcaagcgcctcgcctcctcgtcaaactcgttgttccctatccactgaggacaaaaggatgcaactcctggataaacttaagtacatggagcgagaattggtagcaaccaaagggtgggagagtgcattacaagaacgactactaaaggagttgggtgacaatcaggagcgtattgtggtcaaggctgctcgcctgtctggagagaggaaggaaacaagagatggacaagaccatgaaaaggtgggtgcttactggctggagccgccggccaacaaggagatcttctcggctggcgacgaccttgaaatcgcgtcgccgatgtttcctaactctaactacatacagttgctctcgaccagcattggggatggagtgaaatggttggtgaacaagttgaagggcaagatgcagaagccattggcggacctgcttagcacaacctccctgtgggcctgttcccaagcaaaaaaaccaactatacaagttcgcgtcggctctgagcagtggtttgacgccacggtgtcaggtatgctgggcgagggctgcctcatgcagagggtcaccattgttaaggctgccgctgccaaggtcgagatcaagtggtcgtgcaaccaggattcctacgaggtcgtcaggggcggcatcaccgtcgacgagttcgctgcacaccgagatggatag

SEQ ID NO: 35611 - DNA, 789 bp, Zea mays
  Peptide Sequence Number=SeqID_78986
atgactgagcccgcacgaggttggattctgattgccctctgcctctgcctcgcacgattggttgatctcgccagggttgatagggttttgatgagaactttggatcttgattgcagcattagaaagcctggcaatggccacggcagacaccagagggtggtgaaccagcctgacaccactggctaccagcctgcaccagcgcctggcctcctccaaactcctgcgcgctcgccacctgcgcctcagaatgcagccatgcatgttcctgtctccgcatcatggctacagcaccaggatccacatgtgtcatcttcattgtctgccagcgagaaaccggctaatccgctgttaccattaccgaaagctacacatgctgctccaagggctctaccaaaaaactctaacacagcccttcctcagggaggatcgcaaggagaaacatcaaaggggtttaactttcagtttggtagtataaatatgaatgggctaccgcaatttcctgccaggacaagctcaactcctccaaatttggatgaacaaaaacttcctttaccgtccctcaaatccaaaaattccttcctaggactggtacggtgctccagttcatctaaagcagtttgccttttggggaatacagtaacttttttagtaccagtgatgcaaagggacacaagctctagcgatgtttctgcttctcatgtaggccgtgtaagacgtcgtaaacatccaactgaggctaccacagatgggaatagagctaatggacaaccattgcttgtcaatgattag

SEQ ID NO: 35612 - DNA, 354 bp, Zea mays
  Peptide Sequence Number=SeqID_78987
atggcgcttcctgttgacgtggcgggcctgtgccctaggtcgggcgacgtggaggctcttctgaagccggggtcgagtctgtcttccatggccgaggccgagcccgagctcctgggtcgggcgaggcggaggtcgttcggcagaggccagggcggagtccgagccctggggtcgggcgaagcggacccgagtccgagccctgggtcgggcggagcggagttcgccgtcttccggggccttagcccgagtccgagccctgggtcgggcggagcggagttcgccgtcttccggggcctagcccgagtccgagccctgggtcgggcggagcggagttcgccgtcttccggggcctag

SEQ ID NO: 35613 - DNA, 384 bp, Zea mays
  Peptide Sequence Number=SeqID_78988
atggcggtgctctctgcggagatgcggatggtccgtggccaggggccgaacgtctgcgacctggcgcagaggctagggtcctgcctgacgagccggacagtccgcgcgggcgcaggggtggcgaagtttgccgatggcgcatctaatcgacgtagagccggagagagtttagcgtcttgggcaagtctttgccttgtagtgtttgcaactggccttaaccagaaagttcaggagagaaaaccccagttcaactgccctaaggcaagttcaactggtgtatggtcaaagaggtttacagttgaagttgaagttcagctggagttgagaaagctcaattgtagttgtaaaagctcaactgcagttgaagaagttcagctcagctaa

SEQ ID NO: 35614 - DNA, 275 bp, Zea mays
  Peptide Sequence Number=SeqID_78989
attcccggccttgcaaacctttcaatccattgcttggggaaacctatgaagctgattaccctgaaaaggggatccgttttttctctgaaaaggtcagtcatcatcctatggtcatggcatgtcactgtgaggggaaaggttggaaattttggggagacagcaatctgaagagcaaattctggggacaatccattcaattggatcctaatggtgtgctaactttagagtttgatgatggagaaattttccaatggagcaagctattgtccctctag

SEQ ID NO: 35615 - DNA, 942 bp, Zea mays
  Peptide Sequence Number=SeqID_78990
atggaaagatttctgcacaagcttgccgtcccttgcctgcgaacagtagcaaatcacgtgagccagaactcggcacaagcagcgatcgtgcctgtttgtttgggattctgggcagattctggccgccagaagctgaagccgcggctaaacgcccagcttctgggacagcttctggcggtcgcgcttcccacggaagccggccttgcacagggaatcagaagccgcccgacccacgcgtccgctggaagccgggtattcgcgacggttttcatccaccccctgcgtcctctgcaagcctcagctctctccctcaatcgccgcctgctcctccgtcgcatcggtgcggcggcctggaccacagtcccgtctccccttccgcggcattcgctcagcagacgtggctgcatcgtcgctagggatttgacctccccgctgccaggtcttcgctattcggtcgtcccccgtagacgtggctccatcgtcgctagggttttgacctcgccgccgccagatctcggggtgttagctgtttgtctctctgttgcatcacagaatctccaccccaacgaagctgactccattgccgacaaggcaattggaaggatgcaagagatttcggacaagatattttccgtagcgagggaaacaatccgtcctggacgcgggttgacctcatttgatgctaccaaacttcgtgtagctttggaggagatagcttgcatgctggagcaagactctctggttttgcaagaacatttggacatcgtgaacaactttaacatcccggttgacagcagctatgaaccttctaccttgtcgtcaccacccccatctgacgacgacctgactccacattgggactttgcggagcatttccaaaacttctggggagttgaatatgactccgatcagatgccttcgtttagtgacaatgatgtttaa

SEQ ID NO: 35616 - DNA, 1416 bp, Zea mays
  Peptide Sequence Number=SeqID_78991
atgaacaaaaacactggcattcaaagtgccattacaaacagaactccggttccacctccgcaggtacgaacaaccccactcgatggggggcagcctgcggagcaacagaagaccgacgggcagctcgtcgtcgcccgctccggcagcaacaacgacgacccccgctccgggtggccgaactgcagcatcgatggcctcagggcggacgctgctgcaaccttgcccccgcctgcgccgacgctcgaggggcgaggacaagggccgtcagccctccggcagatccccactcagatcctcccggacgagtggggcaccgacctccgcgtggaggcaccgtaccggtgcaaaggcaggaccgccccagaacacgaacgccgccctggcagcgcgcgacatcttgggcggtcctcccgtgcgcacggcgtgacaaccgccttcgcggcagaagggggcaccgggagccaagccggcgagtccaacgcgctgaggctgacgacgcccgccgtcgaccagccccgcgttgtcgaagtccgcccctctcgcagggccagtgagcgccctctccctcgaacgatgaaggagaggctgacccacgaaaccgtgcgggagatagagctccggctcagcccggcctccaccccagcgaggatgatgaacatccttgaagctgagggtgggaccaagatcgcagcctggctcgcttctccccacccaggggctggtgaaggtggaaagacacgatgcataagggagcacgaggacatggtcgcctttcaagggggtcgccctccttttaaaggcgactctccctactcgcgtccccaaccgtcgtgggctgagtcttctccaacatgctccaaggtcctccccctacggcgcgggggctgggtcccacacgtcatgcaagccggcccagagcagaagaagccaaaccaccgcgcgcggtgcatgcaaccgcccagcggttacaagcggccctccacttttgccaagaccagcgggcgagagggcgggcagccatgcaggcggcatgcaaccgcgccaagtgggcgcacctctccgacttccagcgtgcccagcatggaggcccaggcccacgcgtcatgcaaccggcgtgccggatgctacgtgcgagcaactgcaccgccactcgcgccactgccacgcctcctcgactacggaaccagcgggcaggagcagcggtcacgtcgtcagccaagcttacgtcccatccgggggcagcgagagaaccctctttcacggcgtgaagacgacgcgcccgtgttccgttcctcaaacagctcgcgcacgcgcaacggccgccccgcgaaccgcacgccccatcgcattaactccatggcgggaaaggcggcgcctccggcaggggaagcgagcgacgtttcgtcttcgccataa

SEQ ID NO: 35617 - DNA, 771 bp, Zea mays
  Peptide Sequence Number=SeqID_78992
atgccatccctgacaccaccagatgatgagactataaggaccctctacattggcggactcgatagcagaataaccgagcaggatttgagggatcagttttatgcccatggtgagatcgagtccataaggatggtacttcaacgtgcaatcgcatttgtgacgtatactacaagagaaggcgcagagaaggctgcagaagagcttgctaataagctagtcatcaagggcgtgcgcctgaagctgatgtggggcaagcctcaggccccaaagcctgaggaggatgagtctgggaggctggggcaggtttcccacggagggctgctccctagggctgtcatatctcagcagcagagcggtgaccagcctcagccccccgggatggagggccaacagcaacaggctgcaccagcatcgtactacttcaacattccagcaccaccagcaacggagcggactgtgtatccatccatggatccacagaggatgggtgctatagtaaaaccacatgacagtgaaggcaaaccagggccgcagcaagccgggcaagctcaggcatcaagcaacccagcacaagggggcggctatcctgcaccaccgccatactaccatggtcagtatccaccatactatccacccccaccaccatacggtggctacatgcctccaccgcgcatgccctacccaccgcaatatccgccttaccagccgatgctagctcaaccagcacaggtcgacctaacgactagtaaaaatactgacgcaagctcataa

SEQ ID NO: 35618 - DNA, 2664 bp, Zea mays
  Peptide Sequence Number=SeqID_78993
atgtcgctatgccgaagctccctggaagcttcctggaaggtagcttcagcgtgtaccttcgcgctaagtgctgatcgttcgaaggccgcgagcccgcgcctgttcgcttcgctccgagccccctccaggcccaagcccgcccatctcccgaccacacacgcgcctattccttcccgccccgccgcgcgccgccacctctacggctccccggcggccatgctgaccgggcgggagagcctggtccgcctcatcggccggcgccgccgctcccctctccccgcttcgctcgtcgccgccctatccttaccctccccttccccctccacctccctcgcccaggttgaagtcaaacccgccgccccggacccacggaacgcgccgccgattaacatttcttcgttttcgtccaggcagacgatgggggtggctcgggagaagcggccgggggtgaggctggttcgacgtcgggaggaagccgcgtcgttggcatgggcgcggagtgggtgtaaaaaggtttctgccgagcctacaataaacaatttgaacaatgagtccgagacagaaaatatgaaacagattgatgaaggtttgtcgagtgatcaagcattcttcgcattcgatagtgagattgggagttcaaaggctggcactactatttcatcgcctacctgtatgaatgactcacttggcacttctgagactattacttcctatgcaccttcaaatactgtcttatcagatgcaaaggatgctgtaaatgatggcgcaggggaacttccaacggtggcaacctcttgcagttttgatgaatgcgcagtcatggattctagcaccgttgtagtagttgacactgttatagttggccggaggttccatgagaacattgaattaagagaagatgcagacattacctttatgagagatcctcagaatgctaaggaccctgatgctataaaggtgctacatgcagggtctgaatgtgaggagatgcttggatacttgcctcgagatcttgctaaagttttggctcctctagtggacaagcatcatgttgaatgcgagaatgcactgcactatggtgacataaatacatctatgagggcgcagtgctctgttccagttaataggccaactaaagatttttatatcaactttgctgatgacattaatcactcagcttggtataggaaggctgtaatatttccagtgttcttaaggcgcctaggtgagcaaatgcaccagacaaccgccttagcgcctaggcggggatctgtggttggtctgcatgaacagcagtttggcaatgttcccatccagattactatccagaaatggccatggttccggaagggcagcatctcatatcaagagatttcagatctggagcatgcagtcatggagttggagtgttatattgacatgctttcttgcaccattgatccttttgaatatgatatgaaggagattcttgatgtgttaagtgttcctgaaatgaaggaaattctcaaggagcttcctaagacaagccttgttcatgatgtccgcgtactggtgcgaagacgggtcacaaagcacctagacctgtcccaaagcaatggtcacactaacaagagggacatgaaactcctaaagaagctgtcggagccaacaacactcggccacaacatgggcgacaacatagtatcctacctcggtgctagagcgggagacaatgcgtcctgggtctattcgaaaatactcacattaggtgtctctgtttatgaaagagaccgcaggtatgaagatgcagtcaggattctaaagacactacttagcacagttgcttgtgatagacggcgaggatattgggcattgaggctatccattgatttggagcatatgggtcgtccaaatgagagcctatccacagctgaaggaggggcaactgatccatgggtccgtgctggttcaaagttcgctctgcaaaggagagttctgcgtttaagcaaacctccacgacgctggaaagttcccagttacgctgattatgttaagagaaatataagagaggtaagcattgaaggaaggccattgaattgcgagacaggagcaaagaatgtattttacggttacgatggggaactttgtggggtagaacagttggctttacaatattatgctgatgaaggtggtggttggcaagacatacaagatgttttccagtctaaattccagacagccccccttgatctgggaacagacgatttttacaaatctagagagaacattgcagaatctcagttgaagaggatacgggacggaatggccgaagagatgctaatcagctcatgggagctacatcaggggacatcctgccagggtgttaactgggcccgttattcgttaactgatctacgggctgttgttgcatgcgttggtggccaccgtttggcatcgctcctccgccatctagccgttgattacaggagctggtcgagtggaatgcccgatctgctgctatggcgtttccttgatgaaagaggtggaggtgaggctaaacttgtggaggtcaaaggacccagggaccagctgtcagagcaacagcgtgcatggattcttgttctcatggattttggatttgacgtggaagtttgcaaagtaagcccggtcaccaagcggagatag

SEQ ID NO: 35619 - DNA, 1500 bp, Zea mays
  Peptide Sequence Number=SeqID_78994
atggacaaggatcgtcaggaggctgcgcagaagcatcgggcagtcatcaggctgcccggggctaggccgaagagggcgcgggggactgcgaagtctgccgcccccggcggtagccagtcgacgctggcggcgaagtcggccgcccctgggtccagcaaggtgtcggaggtcgtgaaggcagccggagccggcggaaccaagtccgcctcggccgggtccgcgaaggcccgagaattgccttcgccggggaagcgcgttgccgacttcggcaccgatattagtgtggacgattatctcgttggatcgggcgaggggcaacttgttgttgttccgcctgtggcggcgaccgcggtgtctgccgcggtgcctggggcgaagggtagcgctctcagcgctggcggtgagattccggcgctcgctaccatcaaggacgaggcgggcgccatgtcccgccggctgaaggaggcgtcgcagcggctaagtcaggcggctgacttcgctgaccgcgtggcgtcgggggcccttacggcagttgtgtctgctgaagtcgagagacttcgggcgcagcatgctgacgccgtccgggaaaagtcggccgccgatagcaagtgccgcaaactggcggagaaggtggccgcgctggagggcgagaggactgagctccggcgccagctggcggaggagaggagggaagctaatcaggccctcgccaaggcgctgtctgcgcagaaagaggccaatttggcgcgggtggagggtagcctcgccagccagtgcgccgaggaatgggaggagcagttcaacactctgcaggcccgcatggagagggccgaggcttctacgcgctgggaagttgagcggacgcgcaagcagcttatggactcataccacgagctgggcgcgcggaccgctgacttcgaagtgcccgaccgagactcaggccttcgttgcctcgagtggctgcaagaggagttgttggcgctcccgaccattgtggagggatttatgtcctttgcctccctggtcacctgcgaaggggcgatgaacgcgctgtcccgcgaagggtgccgtcactatgaggtcttcgaccgatctgatgaggatttcgagcgcgagatttacaaggttgaggaccctgtggtgaaggaatctgcgggagccctctttgaccggatgtggggcccccacggtcgggaggtggtcagggagcggtccgaccgggcgaggggtcaggcggcgtgtgacgagaaagtgaaggacttcggagctttgaacagcgcgcggcctgaggcagagtcgaacccggtggcggctggggccgaggtcgccccggcgccgcccccagaaaccgtcgaaggctccctcgctgcccctgcggctactgcgtccggtggtggctcgtcgccaaccgctgtgccgagggctgaggatcccccgaagacggcgacggagccggcagcggaggatcccacggcggctgggtcttcgcaggtggcttag

SEQ ID NO: 35620 - DNA, 306 bp, Zea mays
  Peptide Sequence Number=SeqID_78995
atggctttgtccactattctcctttcttcctttccaatacatttccttttgctttatttctttcaggggtcccagatcaaggatcacccaggaatttttggcttgctggctaaggacattgctagcgatggagtgctctggtgttcggctggggccaaggggccccagcagctggtttactatagaatatacctcaatgtcctgactatccctttgtttcttgtcgcacatgtggttcctcagggatgcctggtctactggactacaaatggtttattttctgtagctcagtatctctacgcctaa

SEQ ID NO: 35621 - DNA, 1161 bp, Zea mays
  Peptide Sequence Number=SeqID_78996
atgggcggcaggagggaggccatagagcgggagctgaagaagcttcgggcagagcgggaggagctcgacggccggatacggctgctggaatcgcagctcgaggcagggcctgcgggattcaacggtgcggcggcggggaaaggagtaggggacgatgcgtgcggcgggagtggagcgtgccagagccgcgtgggtaacgagtttgctccggacggtagcctcccggcggatatgatctaccggtacagccgccacctccttctcccggacttcggggtcgaagatgtgtcatcacaatcgcagcatattgctggggaaaacggtgcagttagcacgctcgtttcggctgatcctctgacctttgtcatctttctggcaggccagcggaagctgtcacagtcgtcgattttagttgttggggctggaggtttgggctctcccctggcattgtatctagcagcttgtggtgtcggtcgcttgggcattgtggatggtgatgatgttgaattgaataatcttcatcgacagataattcataaagaagcatatgttggacaatctaaagtgaagtcagcagctgatgcttgccgggaatatgatatagttgttgatgcaactgacaaccttcctactaggtatatgatcagcgattgctgtgttttgctgaacaagccacttgtatctggtgcggcattaggcttagaagggcagttgactgtttatcatcataatggaagcccatgctatcggtgcctctttccaactccaccacctgtggcagcctgccagagatgctcagacagtggtgtccttggggttgttccgggagtgattggttgcttacaagctctggaggctataaaggttgcaactggtgttggtgagcccctatgcggaagaatgctactatttgatgcactctctgctcgtattagagttagactgcaccgaaactccgagagcaccaaggatggaggtcccttggtgaagatgtcagcgaactacgagatcttcgggatgtggaggacacaaacgtccttgatggctacatgcttgggcaaagtggagatcaatcccaacatgtttcgcgcgctagtgatgtacccggttgatggtgaggtagacgatgcttacattgttgtagtagaagattgctcatga

SEQ ID NO: 35622 - DNA, 466 bp, Zea mays
  Peptide Sequence Number=SeqID_78997
atggcgcaccggctgctgcgggacgcgcaggcggacgggtgggagcggtcggacttccccatcatctgcgagtcatgcctcggcgacaacccctacgtccggatgttaagagctgaatatgacaaagaatgcaaaatttgtgcacgtccttttactgtattccggtggcgtcctgggcgagatgcaaggtacaagaagactgagatctgccagacatgttgcaagctaaagaatgtctgccaggtccgagatacagcactctctatcaattccaatgatgcaattccaaggagtgatgtcaatcgcgaatattttgcagaagagcatgataggagggccagagctggcatagactatgattcatcctatgggaaggctcgcccaaatgataccattctgaagcttcaaaggacagcaccatattacaagaggaacagagctcatgtttgcagtttctttgtgcgag

SEQ ID NO: 35623 - DNA, 228 bp, Zea mays
  Peptide Sequence Number=SeqID_78998
atggcttggaaaagaccactcttattaacatgcaaaatacatcgttcgaatccattcgttgaaatgaaacctcccaagattatgtggaatcaatcatttgatctgcgctcccccatcgccaccagcgacgacgccacccctgttgcgtccatgggtgccaggaaagacggtcagctcggcaacctcctcaaggctccgaagctgttggacacttacaccaagtcctaa

SEQ ID NO: 35624 - DNA, 213 bp, Zea mays
  Peptide Sequence Number=SeqID_78999
atggcgcaccggacagtccggtgcgccaccggtgcgccaacggtgtgccaccgcactgtcttcttctccgcagtcccagtcctggtactggctgctcaatgttttcaaatcgggctccattggttctgtggaagagttctggagttatttgaagaatttctgatgcctgacctctggtcggttttcccagccctggacgatcaggagctctga

SEQ ID NO: 35625 - DNA, 3444 bp, Zea mays
  Peptide Sequence Number=SeqID_79000
atggagatagtggtggaggaaggaaatgtcgatgttggcaatactgctgaaccatcgtatgaggttgtggctctaagtggttgttcagcacaattgtcaactaatgacattgataaacatgaactagctatagagagcaaggatagtaagacttatgtttcattcactcctcatacagatgtgatacacctgacatctttggatgttacaaatgaatcaagtcaaataagttctgatgcggatatggtagagcagaacaaacaagatgctttggacacacttattaaaatatcacaacataaaaaaccaaagaaattgaatgtagctcgagttgtctctgaagccctcagtgcatatatacactgtattaggggtgaagagcatttacctcatagagaaggtggaaaagtcttcttggagaacacattcatttccagtctgcttaagcgtgatggtgaccctaaggtgctcttaaattgtgttccttccaatgaatatagaaaattttcactggtacctggcagttctaaatgcaaaaaaagtgagttaaaaggtctagaaagacagattaaacttgcagcagaacataaagagctttaccaagacaagtggtcgaaccttgatgttgcatcatggccagttatagagaagatcacaacacaaatgcaaaccgatgggtttaagctacctgcaatattatgggactcgagattaaacacaaagaaaaaacatcaaaatcttgaccacaatgtggatgaagatggagagagttcaagtgatgttcaaataatcgatactccatgtgagttatctaaatcgtcaaatacatcacatcagattgaaccatatatatctccatatgttctacctgctaaagtaacattaacaaacacgcaagaactgatgtttgtattatgcacatatatcatggggatagacaacgccaaatatttaaaaaaacattggattcagagcactaaaccttatccaatttctttaagtcttcaaaaacttaaagatatattggatgtaaataagccgatggatacagattgttttaacatggctgttcggatgatcgcatgcaatgatgccttgttcttgttggaagacaaataccactacatggatctacaattatgttccataagtaaatttggtcgagaccctcgccttcgtgcaaagccagatatcaacatgctggcaaaattattagaatgttggcctgacatggagtacgatgtttcagattgcaaacaaattctattgcccttttctttcatgggtcacttcaccttatatgtacttaacatggacactagaagcatctatataatggactccatgcctataccatcatggtttaagggtgatcatcctagcatgcattatatccataatatacattatattgccaataatatgaatgctgccatggaattggccaatcctacatggaaagacgatatttatatgcggcgtcgtatagtaccaacatgggttccaagaacattaaactgggatttatctggctttcttgttatcaactttatgcacgattggaatggtataaggttaccctgcatttgcactcactgtaatctgtcaccactgccagcatatgagcctgcatttgattgggagaatgagaggtctttgatatttggccaaagggtgccagaaagtataccagcaataagcaacagtggcttgaagataactgtcaaggtactatctttgtcattccaagctggattagttgaacctttcagtggaacgatttgcttgtataacagagatagaagagaaaaactgtcagaagacttctactttcacatacttccaacagatatgcaggatgctcagggttctttggatcgtcgaggagttttttcattggacacacattcaccatcagtctgccttttgattcaattggaaaaggctgctactgaagaagggggagtaacaccttctgtttattctcataaagagccttgttgtgctgcctacatcgattgcatgttctcatattattcctgcacccatgctttcatgacagaactgccacgtgataatgaacacaagattgtaaacatcaataaggaagggcacatgttgacacaacttactatggctgatacttctgatgttcctatagaagatcctcttagcatcttaaactcaagaactgatgataatcatgccctagagttgagggataaggagctccttgtgtcagagctgcaaaatacgcttgatcaaaaatcaaaacagttgggtgaaactgaaattaaacttagtgccatgatggatgaggttaattctctgaagaaagaacttgaacaaacccggggtcttcttgacgaatctcagatgaattgtgcgcaccttgaaaactgtttacatgaagcaatagaagaggcccgaacaaacaaatgtttagctgacagaagggctgttgagtatgatgctctgcggtcgtctgctttgaggatacatggtttgttcgaaaggctaaataactgcatcactgcaccaggtgtgactggctttgcaaagtcactgcattctttggctgcctccttggcaagctctgtaaagaaggatgaagctgataccactgttcagtttcaacaatgcatcaagatcctggcggacaaagtttatttactgacacgacagagtgctgagctgctagaacgctattcagctatgcaggcagtacatggaggtatcacaaaagagctggatgagaagaaagagctgattaagaatctctacaataaacttcaacaagaaaaacagcctaaacaaccaaatgctaccttcagtatggtatttagcatcatgaactccagggtcgtatggtacgccgtgacagtacgtcagtacctgaccaaccagaaaattttgatatgggagggctttaccatcagggaacatgttcacgcatggttgggctccaaagttgcaatgttccagtattcctcagtcaaaatttacaatgcctgcaaaccacaacctactcttgagattcacaatcccgatatgcacgagtggtacgggcaagagatacgaaatgtatgtatcgttcgttcctggcggtcgtggacgtccatgctgtacacagcagggttgcgcgtgattaattttgcagcgaaatggaggaggtacatgtatattttccctcttgatgaggatgctgacttgattttaggggaagcacagtcctcaaaaacactagagaattctgaacacaacataaagcctcaaagctttgatgtggccaaggttgatgaaattctccaaccacttgctggaaagacattatcttacaagatgtttgcacgtgatacacaggcttcacgaagtgtgttgcagcagccacaccacagacaacagctatcagagccgatcagggataccaaccggcggacgtga

SEQ ID NO: 35626 - DNA, 276 bp, Zea mays
  Peptide Sequence Number=SeqID_79001
atggaggccgaggtggcggaggacgataggctccacgtcacggtgcgctggttgtcggtgtcgcagcggtcgagggggctgacgcagcggcagtccaacttcgacgagcgctcggccttagcccagtcgtcgaggcccgcggccgttgtggagctcgggcgcctcccctgtctcggaggtggcgtcaacgtggacgccaaggaaattcgcatggttgtccccgtcgagatgccgcagaacggctcggccggcaaaggtccgcgcgcggaattctag

SEQ ID NO: 35627 - DNA, 546 bp, Zea mays
  Peptide Sequence Number=SeqID_79002
atgcagcgacgcgatggctgccgtggtgtcagggaactggtccacgatgagcgtccgcgcggcgcagaacttgaagaggaacagcagcagtgtgtaccatatgatgcactggagggcaggcttgagcacgcggccagcctcgcgaggacgaccagcttctgcagcgtgtccgctgccaggaaccggagattcatggcgtacaggtcgttggtggagatgaagtggaaggatttgaatcaagccttaaagattgattactctcaagttattgatacaacatacatatttaagtatgcaaatttaccgactactgcatcaccttccttgaacagtctgtgcaaggctgttttggagtatttagttcgagaagaaggagaaccacataattgcttaaaggatgcagaagctgcaatgaatctagttcttgcaaagcttaagaatgagtttaatgaccccattgaaattgctgcaagtattgtaactgaatctgattttgtgaagttgctcgctcatagaattctagtgtcttattatgactatggatga

SEQ ID NO: 35628 - DNA, 336 bp, Zea mays
  Peptide Sequence Number=SeqID_79003
atgaagctatggaaggagacttccaggagttccaagactacgacgagttctaggtgtgggttagcggcaaccccccagtcggctgcctgtgaaggccgcgttatctacgtttcttttccgcactttgatttattccgtgctcgcggttatgagcggccaagggagctccagagattagtgatacttgatcagagatactttggtacaggtgacaatgagattgatggttctgattacgattatggtattggttgtcagcattgcaaccactgctcaggcgaagatgaagctatggaaggagacttccaggagttccaagactacgacgagttctag

SEQ ID NO: 35629 - DNA, 387 bp, Zea mays
  Peptide Sequence Number=SeqID_79004
atggcctgcggcaatatactcggcttcggtgccaaaggtccacacttagccaataaaaagaccaagaactgggttcaacaaagagagcaagggataaccgaaggcaccctggtctggcgcaccggactgtccggtgcaccaccggacagtgtccggtgcaccaggggacttcacgctgaactcctcaccttcgggaaaatccagaggcgctccgctataattcaccggactgtccggtgccccagggaagagcgactctggaactcgccagcttcgggaattcactccgctataattcaccggacatgtccgatgtacaccggactgtccggtgagccagcggagcaacggctattcggcgccaacggtcacctgctacagcattaa

SEQ ID NO: 35630 - DNA, 321 bp, Zea mays
  Peptide Sequence Number=SeqID_79005
atgggtgtgggcaagggacggcttgacgactcccaggggattgccgcggaggtctggacttatatccgggccgtcgagcgctccaggctcgagggctcggatgagtcggagtactcctcggacgaggaggactcttcggactcgtccgaggagggcggcagcagtgatggcggagacgacgacgacgacggaggcgacggtgacgacggctacgacagcggcggtggcggtgacggtggcagcaagggcggcaacggcggcagcggcagggacaacaacggcggcggcagcagcaagggcagcaacaaggccagtggctag

SEQ ID NO: 35631 - DNA, 702 bp, Zea mays
  Peptide Sequence Number=SeqID_79006
atgactgaaggagcagacgttgggatgcaacaacagataaccccgaatgtcaccaccaatgatgccgatgaaggtgtgctctttgtagagaatcatgacgaggatgtacttttcgaagatgatgacgaagaagatggatacctattcgctgggcaagatggtgaatctattgaggatatcgagattgatgaaactcaagatgcatttactgttaccccagacgtacctgacccgtatgataaggtgtatagtaacatacctgaagaaacacattcgttggacattattgctgactgcgtttactgcaaagcaaagaagtttcagtatgaaccacctggattttgttgtcgtaatggacagattgatctagccccgttcgagacaccacctcaacttaggaggctgtgggagtgctcagatgctgatgcgagacacttccgtgataacattcgattttttaatggccatttctctttcacttctctgtactgttgccttgatagtatgactgcaaacatgaattgtggtatttacacgtcccgtgcacatggcatgatgtaccacaatgtaaggtcgtttggtagggaagctggggcagaacataaacaccttgaactttacttctacgatgatgatcctagcctcgagcatagatatcgtaaatgtcgtcaagatcaacttgagaagacaaggcagtattaa

SEQ ID NO: 35632 - DNA, 1464 bp, Zea mays
  Peptide Sequence Number=SeqID_79007
atggatttgctaggagttgttccaactggccttgcaacttcaacacctgagacaaatacatctcagtcccaagggagcagcgacagcagtggtaataacaagagcaagagccattcaacggagccagcaactgtttttgttgtactatgccttgataattccaaggtttaccccttcctcccaaactttcctggccatactcatagatacaagcagacagaacaagaaaccagaccatacttgtcactgcagctatttggcagcactgaggaggattttccacctaagatggactcagtgaataagtacttatcttatgagagtagcaatcctctggatgagagatctccttcatcctctctgcctataacccgcaagtttttccccatacactcggttgatgaagaggttcagcaccctcatattacagattatggggaagatgctacgatgggtgaagttagcacaaatcaggcatggttggcaccaccacttgatctcttcaaggattcagagcgtcccatcgagaacggatcgccaccaaatcctggttaccaatcctgttatgcctcaacatcttgttcagatcattcaacttcaacctcaaactcagatggacaggatcgaactggtaggattattgtccagctgtttggcaaggaacctagcacaatacctcggaaccttcgtgatgatatagtaaattggctcaaacacagccctactaaaatggagggttacatttgccccggttgccttgtactatccatgtacctattaatgccgggtattgcatgggatgagcttgaagaaaatctcctccagagagtaaactcattagttcaaagttctgatttggatttctggagaaaaggaaggtttttagttcgaaccaactccgagttggtatcatataaagctggaatgacccgtttaccaaaatcgtggagaacatggaatacccctgaattgacccttgtgtcaccaattgctgttgttggtgggcagaagacctccctcattcttaaaggccacaatctatctattcctggcacacagatccactgtacaagcatagggaagtacatatccaaagaagttctgtgctcagcatatccaggtaccatatatgatgattcaggtgttgagacatttgacttgccaggaaaactagatcttattattgggcgctgctttgttgaggtagaaaacaggttcagggccgatggggaggagttggaggacggcagtgcgctggaggccgccattgggaaggaggagttcgagggggtctggaattctgaaaccgacgggagcaacacgagcttcgagttcatacaggacgaggacgagtgggttttgtgcggcggcggcgaccagtttcatcgggctgtgcccaccagtgaagctgaagcctcgcaagcccagtttcatcgtgcttctctgaacgtttgcagggtttag

SEQ ID NO: 35633 - DNA, 1461 bp, Zea mays
  Peptide Sequence Number=SeqID_79008
atgtccgaatttcccaatctgcgctgcgcgtgtctgccactgccactcgcgcgctgcttctgcacttctgtgcgactgtctgtcggtgggtggcgcgagctcctccgcctccgggatgagaagaagaaacgcatggcgcgtggcggtgttttttgccacgaccagcaattggaggagcgtgcacgcaaagatggccctagcgaaatccatgcgcgcaggccgcaggcgcacgcacgcacgcacgcacgcaaaggtgggacgatgtccaagatcttggtaagcacagaatccgcccgcacactcgctcgggcccatgttccggcaggcactgcacatactcctgcaaggctgcagtgcgcctccaaggtgaagagccagccaaagcgcccaagctacgaaacgccaactcgtcaagaaccccagttgttgcccggccgcgcagccatgaggtggggacttagaagcagctgtaagcaacggcacaaggaatccctgcaaccactggagcaagagagcaaggggaagagcaaggccagcttctcgtccttcttgcccctggcatggcttgccaagctcacggccaggaacggcgtgcccgctaccaaggtcgtgcatgcgacgtcgtccgcggcgaagaacacggctcaggccgccaccgcattcccgtcctgcttccacaagcccgccagccccagcaccgcgtcggcgtcgcgaagcagcctgagcctggcctcttcgtcatcatccgccgccgacgcagaggcagccggcattgtcccttgccgtcgcgacgacgctaccggcggggacacggtggcaggcatcgccccgcgccgccgctcggtgggcaacgatgacgccaggaccgaggccgcgaccgcgaccgcgcggcagctgtaccacagtcgtcgccactactcggtcggtggcgaccgcgaccttcctcacctcggccacctcgtctccctctccccgaacccgaaggcggcgccgccgacaccggcgccggtgcggacgctgacgccgacgctgcccccactgccttccgattccgacacggacgaggagaagcggacgacggcacggaaccgccggcgccggcgccggcgcgccgtcagcgggcggcggtcgttctcctcggcgaaggccacggtgcgtgtgcgctcgcctaggccgcctgccgcggcggtgtcggagctggagcggttcgcggtggtgcggcggacgcgggacccgcatcgcgcgttccgggcgtccatggtggagatgatcgcgagcaagcgcatggtggggcgtcccgacgagctggagacgctgctggcgtgctacctgtcgctcaacgccgacgagcaccacgactgcatcgtcaaggtcttccggcaggtctggttcgagctcaacaacgcctcccgtgccactgccaccgccccgccgcagcgcactgcgcacctgagcggctga

SEQ ID NO: 35634 - DNA, 1123 bp, Zea mays
  Peptide Sequence Number=SeqID_79009
gcagtcctcctcaccgttgatccgcctcaacattcgtggcaaccgattgtcgggaccaaccgtgcatcctcccttatatggagaggccgagcaaggcagggccgcccagatagagacgccgtcgaggccgagcagagctctgcacctccacctaggtcccccgcctcccagagtggaggacgagctcctcccgtgctttcgccagatatgtgctccgagctccgccccctgtctccttaggccacagggaggttgtgtgggggtggagtctgacaaggccaaggcaccgtcgacaagagcctcacccagttcacccagcagggatcgacagaaatctgccggttattttcgtacagttggtgaacgtggggtcgtgcgcgtctggtgcttggagagacgactaataggttataatgatgagattcttgtcttgaagtttatcggggaggaggaacaatgcattgccgtagctaccaacttggagcaggtccgtgtttacgatgttgcgtcgatgtcatgttcttatgtactcgctggccacactgaaatagttgtttgcattgacaccttcgtcataccttcgtggtttctttacggcaggatcggagaagagtcgaggcttcgggctggtaagcaagcacgaccagagaagtttgagatcccaactaaaatcaagctgacactgcagccatggacgtcgagcttaagaggtggtcatcaagaaggcatacgagatggaccttgcccagttgtacagccagtgacactatcgctacagtttttcaaggataggggagatatgcacagtcgatacattcctcagcaagattacttctcagagggactctacacgttcgatattgggcagaatgaccttgctggtgagttctattcaagaacagaggaccaggtcatcgtttccattccaactattttgctggaatttgagaatggtctcaagaaactgtatgaccaaggtgctaggaagttctggattcacaacacaggccccctcggctgcttgcctcaaaacatcgccctgttcggcaaagacccatcccaactggatgagctccactgtgtggcgaagcacaaccgtgccgcaaagcttttcaacttatag

SEQ ID NO: 35635 - DNA, 309 bp, Zea mays
  Peptide Sequence Number=SeqID_79010
atggaatctgccgccgagatttgtgcccagaagttgtccttggcggttgttgcagcccgtgacacactgaatgcttctgctgccgcgagtattgttgctggtgattattgcgccacgttttccataggtaacgatgtggtttctactcttgatgttcttgaatccgctgtggcggcggaaaaaagtgctatgcattcttacaaacaggccagtgcagctgtcgattgtgctaaggagacagtggccaagtattctgaggtttgtattctgaaacttatactgagccaggcaattcttgagattgtttag

SEQ ID NO: 35636 - DNA, 2808 bp, Zea mays
  Peptide Sequence Number=SeqID_79011
atgtcgcggtcgtataccaacctgctcgacctcgcggagggcaacttcgcggcgctgggcccggccggcggcagcgggcggcagagacatgggtcgttcgggctgcggcggatgtcgcgggtgatgacggtgccggggacgctgtcggagctcgacggcgaggacgagtcggagccggccgcgaccagcagcgtcgcctccgacgtgccctcgtcggtggcggtggaccgcctcatagtggtctcgaatcagttgcccatcgtcgcgcgccgcaggcccgacggccgagggtggtccttctcgtgggacggcgactcgctcctactccagctccgcgacggcattcccgacgagatggaggtgctcttcgtcggatcgctccgcgccgacgtccccgcagccgagcaggacgaggtgtcgcagacgctgctcgaccgattccgctgcgcgccggtgttcctccctgaccacctcaacgaccggttctaccacggcttctgcaagcgccagctctggcctctgttccactacatgctccccttctcatcgcccgcttccgcgtccgccgccgctacctcttcctccgtcgccacttcgtcacccggcaacggtcgcttcgaccgcagcgcttgggaggcgtacgtgctcgccaacaagttcttcttcgagaaggtcgtggaggtaatcaacccggaggatgactacgtctgggttcacgactaccatctcctggcgctgcctacctttctccgccgccgcttcaaccgcctccgcatcggattcttcctccacagccccttcccctcgtccgagatctaccgcaccctccctgttcgcgacgagatactgaaggcgctgctcaattgtgacctcattgggttccacacttttgattacgccaggcacttcctctcgtgctgcagtaggatgctgggaattgaataccagtcaaagcgtgggcacattggattggattactttggccgcactgtagggatcaagatcatgccagtgggagttcatatgggtcagttggagtcgggtctgcgcttgcctgatagggagtggaggctttctgagcttcaacagcagtttcagggcaaaactgtcttgcttggtgtggatgatatggatatctttaaggggatcaatttgaagcttcttgcatttgagaacatgttgagaacacatcccaagtggcaggggagagcagtgttagtgcagattgctaacccagcccgtggaaggggtaaggatctggaagccatccaggctgagattgaggagagctgccagaggatcaatggagactttggccagtcagggtatagccctgttgttttcatcgatcgtgatgtgtcaagtgtcgagaagattgcctattatacgatagcggaatgcgtggttgtgactgctgtgagggatgggatgaacttgacaccatatgagtacattgtctgtaggcagggtgcaccaggatctgagtcagtatcagaggtgggtgggccaaagaagagcatgctggttgtgtcagagtttattggctgctcgccgtcactgagtggtgctattagggtcaatccatggaatatagaggcaacagcagaggcgatgaatgaggccatttcaatgccagaacaggaaaaacagttgaggcatgagaaacattaccgttatgtcagcagccatgatgttgcttattggtcaaagagcttcatcctagacttggaaagggcttgtagggaccactttaagaggacatgttggggcatagggttgggttttggtttcagggtggtggccttggacgctcatttcagaaagcttaacatggattcaattgttaatgcttatgagatttcagggagcagggctatattgcttgattatgatggaacactggttcctcaaacttcaatcaacaaggaacctagtccagaggttttgaacatcatcaataccctttgctcagatagtagaaacatcgtttttcttgtcagtggtagagacaaagatatgttaggaaagtggttctcctcatgtccaaaattggggattgcagctgaacatggttacttcttgaggtggtctagcgaagaagagtggcaaacatgcactcaggccatggactttggatggatgcaaatggcaaagccagtgatgaatttgtatacagaagcaactgatggatcctacattgagacaaaagaaagtgccttggtgtggcaccatcaggatgctgacccaggctttggatcctcacaggcaaaggagctgcttgatcacctggaaagtgtactagcaaatgaaccagtctctgtcaagagtggccagttcatcgttgaagtcaaaccacaggctgtagttactttaccacctttcttaccttatgcaaaaaatttcctgcaagtggttagtactagtggcaagggagtaagcaagggaatagttgccgagaggatacttgcatcagtgaaggagaggggaaagcaggctgatttcgtattgtgcatcggcgatgataggtccgatgaggacatgtttgaaaatattgccgatatcattaagaggaatatggttgctccaagaacatcattgtttgcatgcactgtgggacaaaaaccaagcaaagccaaattctacctggacgatacatttgaagtggtcgctatgctgagcgcacttgcagatgccactggagctgaactggaatctgattcggctgatgaattggccgcatctatctcatcacttgatattggtgacgaacaatcagaaaccagtgatacaccaattggagggtcttag

SEQ ID NO: 35637 - DNA, 669 bp, Zea mays
  Peptide Sequence Number=SeqID_79012
atgcagtacaaggggtcaagcagtctcattagctgcgagaagcagacgattcgaatcgagttttatccttacaaaggcctcaccgccttggcatacaatgccccactgaccccggctaccgtcgtgcaggagatcctcgatagcagcctcggaagcttgctcttggtccttctcttggacagttccttgctcggggatgagcacgcgggggagctcgtcgacggcgaggagtccggcctatccagggcgaaattgaccaatcaaacgggtcagagagcttcaccagatatcaaggaaggcgggcgaccgaagtccggcgggggtgatctcgggcttccggtgaagttctgctgggtccgagggcttggaaagcttcacgggccactagcgaagctaaccgaagcgctggcgcgacttgggggtgactggagtgggctggccacggtggccgaagctctggcggcaatggcgggcggaaaagagctcgccggagctaaggagggagatatggagcccggaaatccggtttgtctccctgctcaaacccgaggcaaatccagggttttgtcgtgtctagggctcgcgtcccaatgccatcttctggcatgcgacagagaggatcgcctattcacccctctaggtgctctcaagattctaggtcggacctag

SEQ ID NO: 35638 - DNA, 315 bp, Zea mays
  Peptide Sequence Number=SeqID_79013
atggactttgcctcgcccgacccccagggctcggactcagccacgactcagaagacgacggactccgcctcgcccgaccccagggctcggacacaacctcggcctcggaagatggtctccacctcgcccgaccccagggctcggacacaacctcgacctcggaagatggtctccgcctcgctcgacctaggggtcggactcagcctcgacctcggaagacggactcgacctcgaccttggaggagcctccgcctcgcccgacccagggctcggaccgaccacatcataggggggccatcattaccctacgcctag

SEQ ID NO: 35639 - DNA, 204 bp, Zea mays
  Peptide Sequence Number=SeqID_79014
atggctcgggtagacgggtcgacgggatggctcgggcagacgcaaggcaccaaaccgagctggaattgggaggacatgtcctttgacggcaagggacaccacactcaggttaaccttacattgggttctctttgctgccttcactaccctcgtatagtgaaggtgtcagacggtgatggttccatggatggcgcctgtgcctga

SEQ ID NO: 35640 - DNA, 264 bp, Zea mays
  Peptide Sequence Number=SeqID_79015
atgtcctcgcgagcacaacgcacccacccccttctcctattgcggccggtagcctcaccggcaatctcccccgccgcgggcgcctgccacctcgtcgtggaccgaccatcccaagcgccctccggccaaattggccctaccaccgtgatcccctacccccgcccgtgccttgccaccactctactatcacagaactgggaccccggaggagaaccgccgcggacctcaccggcgatcgagcccgaccgaagaagagggatctga

SEQ ID NO: 35641 - DNA, 387 bp, Zea mays
  Peptide Sequence Number=SeqID_79016
atgaagaccaagatgatgagccacctcaggaggatgacatttatcaagggggagatgatgataatgaagacatggaagatgatcaagggattcgagatcaaagaccaccacacccaagagtccatcaagcaattcaaagagatcaccccgtcaactccatacttgccatacatgatagaggatgcactaagagatccaaactgggtggtagcaatgcaagaggagctcaacaatttcacaaggaatgagccgccgtcgcccgtcttgcccaccgccaccgctgcttgtctggcccaccgccgccgccagttctcccccaccgtggccgtcacccgcaccggcccctaccccagtgaagcatcccgatccattgggactcaaatgtga

SEQ ID NO: 35642 - DNA, 177 bp, Zea mays
  Peptide Sequence Number=SeqID_79017
atgtacaaccggctcaagacaatggtcaaccaagtgcgcaacctcgggagcaccaagtgggatgaccatgaaatggtcaaggacgccgccaacatcgccatcaacaagagacttctcttcccaaacgtcgaccacaagtgcctcatggctaaggaaggcaaaaagaagaagaagtag

SEQ ID NO: 35643 - DNA, 117 bp, Zea mays
  Peptide Sequence Number=SeqID_79018
agatacttcggtacaggtggatatgagattgatggttttgattatgattatgatgctggcgaagatgaagctgtggaaggagacttccaggagttccaagattacgacgagttctag

SEQ ID NO: 35644 - DNA, 213 bp, Zea mays
  Peptide Sequence Number=SeqID_79019
atgtgtgagagagagtgggaggtgtttctcaagttggaaatggagttcaaatcgtgctcactgctatggggtgagaggggggcggttgaaccggcgctgaccacctctgaccagctggtggccagtctgagcgtcagactgcaagtcagattgcaaaagaggctgagaggacctcaaggggcgctcaagacgccttcgggggcggttgaccag

SEQ ID NO: 35645 - DNA, 1509 bp, Zea mays
  Peptide Sequence Number=SeqID_79020
atgacctcaatttctattggcattaataagctaggtgatgcggatattgtgagaaagattatctccctgctaccacaacaaagatatgggagcatcatcaccatccttcataacatggaggacttgagcaacatgaccccggccattgtgattgggaaaatcgcggcttttgagatgtcgcggaaaatgtgtcggggagaggagccaacttcctcaagaccatatgcttttgcatgtgatgaaaggaagggcaaaaagaaggctcccactccaagttcctcaagtgaagaagaggaagaagaagaaagtgatgatgatgaagataatcaaccatgcacatcatcctccgaggacgaagaaacaatccgacacgtcggaaaggtaatggggacgatccacaagattcatctaatgggtgtgcccctgcaagtagaggatcttctctttaacattgacaggaaaaagcaaagaaagagaggatgctttgcatgcagggagaagggccacttcagggacagctgtccaactatgaccgaacctaaaaaggggaggagcaaaggcaaggcgctaacaagtgtcaaaacttgggacgattcttcaagcgaagatgaacctccaaggacgcgcagccaccgatcctcatcacgctcatcacacaaatgccttatggcaagaggtttgctagaaaaatttgaaacttttgcaaacttaaatagtgagctatcaactaaaattgagctattagaatctagtgctccatccactgctaccgatgatggtctcattaaaaagaatgaaaaacttaaggctaagttagctagctcccaagaagctattgaaaatttgctagagaaaatggaaattcttagcatacacaataatgagctaactactaagctagaaaacattggtagcaccccagcaacatctttagttgaaatacctgaaattattaagaaagatgcttctacttcctgctttgatttaattaatgattctaacccctgcaaccaagtcgttgttaagaatattgttgtagagacatgttcggatgaggttgcaaaggaaaatgaacaattaaagcaagaagtggctcgccttggcaaggctttgtatgacaagaaaggcaaagccaaacaaatccgacctccacaggataacaccactgcgggagtgaacaagcctgtagagggagaaactgtgatttgtaggctatgccacatggaaggccacaagtctttccaatgcaaggcgatgaccggggataaacaaaggcaaaagctcaagcaaaagccaacaaacaaaatctccaacacctacatcaaaaaggtgaacaaaaaggatgctacaccatatttgatcaagaagaaaaagaatggaaaggtgatagcaatcaaggcaaacaagcaagtcaacaaaggaaagggggccaaacgcatctgggtgccaaaggaaataatttcaaccatgaaaagcaccaagaaggtttggatcccgaaagggaagtga

SEQ ID NO: 35646 - DNA, 747 bp, Zea mays
  Peptide Sequence Number=SeqID_79021
atgaacgtgggacatgggagccatactctaacatggcatataactcgaatgaccatacaagagcagaaccaaacacccactcgcttcgtcacagtacgccgcaaagacatcagcccagccttccccaattccggccacacccgctacgcctgtggtgccgcctgccgcctccccttcctcttcgcttcccgtgcaagcttcaccgccgccatctcgtcctctcgttgcgatgcttccctttccgcgccgcggttcctctatccccgccttccctgcccgctccggctcttgcacctgaccaagctgatgggtcgcgatgctgagaagacctctccgccggtgccatcgtcggaattggaacaggaagaagacgacgactgctacctaagcgatcaggaggacgatgccctagaagagtccgttctccatgtgatcaccaaggaatccctcttggcagcgcagaaggaggatcttaggaaggtgatggagctgctagggttgagggagcaccatgcccggacgctcctcatccactaccgctgggacgtggagaggatttttgagcttctcgatcagaagggaagggatagcctcttctcggaggctggtattcctcttcagtacaccaataatgctggtccaacctcctcagcggaggtgacctgcaatgtttgttatgatgatgtgccaccctcgtgtgccttggagatggactgcggccacagctactgcagtgattgtgagtaa

SEQ ID NO: 35647 - DNA, 1157 bp, Zea mays
  Peptide Sequence Number=SeqID_79022
atgtgggtcggcgagggtagtgcgaacggaggagggtaccggggaagcgtcgggtggagtgctggtcgtagcggctgccaggatgagccggtcaacggggcggagaacgccagcggcgcgccgagtcaccatcgggtggacgtgcccggggtcgcggtggatggcgaccgggtggtatacggacgactcggagtgagccgccggaacgtcgggagcggttggtggggccggctcacggcggtgatagacgacggcggggtcggcgaatcgggccgcgctcgtcgacgggcccgagtcggggggcgccgaggtagtggcgtggccgcggcgatggcggggtcgacggggccgcgcgtggcgcaggcggggtcgacggggccgcgcgtggcgcaggcggggttgacggggccgcgcgtgtcgcggaagaggtcgtgggggccgcacgaggacaaggggaaacacatcttcgtcaaagatgacatgacgagagatgatgatgcgatgggaggtgaggtccagacatcgggcgaagtggggggtagggtggcggtccgccttcgagggaagacagttgaggaggtgggtggcagtgtgcagggcctctgcccagtagctggcagggagagacgcctggaagaggaggcagcggagcatattagtggtggtgcggatcatgcgttcggctctgccgttctgagcagaagtgtaggggcacgagagacgcaactggacgccatgagtaaggaagaaggagcgagaggcgtggttatcaaactcgcggccattgtcacactgcagagcacggaccgggcgacgaaattgagtggatacccaggtgaagaagggaggtccaaagatcacaatgaaccaggtcaaaagcctgctcagcccgagaagaagaggatggccgagacgtcgatgccatgtggtggaggaggtggtggagaccagggcaggaggagacacgccggcggtggagggctggagcgtgtagagaggccccgagctgtcacagcgggtgagaagggtcctggtggccagatccttcacagaaaaaccagaggggtcaaactcaatagaacaggagttgtcagtggtgaatcgacgaacagaaagaaggttgtgagtgatgtggggcgctcgagaacatcgttgag

SEQ ID NO: 35648 - DNA, 231 bp, Zea mays
  Peptide Sequence Number=SeqID_79023
atggcagctcagtctggcacaccggactgtccggtggtgcaccggacagtgtccggtggtgcaccggacagtgtccgatctgagcaaacggaggaaggagttgaaatagactccaagcccaggcgacatccagatcctgttcccgggtcaaaggggaactttcagagccgagctaaccctgaaacgagcgagccagcgagccacaagcattttgtccagccctacccttga

SEQ ID NO: 35649 - DNA, 324 bp, Zea mays
  Peptide Sequence Number=SeqID_79024
atggggctagggtgcaactgtcctgtccacggccaaaaccgtgtgccgcggcgacaaagcgagggcgggttagggacttggggagctggggagcgcagcagcgggggcaaatttattgtaggtctgggttctgctgcagcagtccaaacagctgcaacagtgtcggcttgtagccagtcgaacacgcccctggtttgtgcgaactgctatgtaagagtgaacggaacggagcgtgactgtgagagcgagatgggaacggagcggctccgtccggttgattttttggagcggaatggttccggatctgaggaaaatattccctaa

SEQ ID NO: 35650 - DNA, 2127 bp, Zea mays
  Peptide Sequence Number=SeqID_79025
atggcggaggaattccaatcacctcctcctgctgctcccgcccattccctatcgcctcgcggattcgccgtgcccgaccgccctgccaccggcactccggccccatggaactcctccctcctcactaggatttcgacgtcgaaacgagctgacaggactggtgattcggaccagatccaaccagtgcacgtagcagattttcccagagttgttcggaatgcccaagccagcctgaagaatttctctggcaagaacatgcttgctggtggcattgataaagaaacatcccttgcgtggatgatatgcggaaatgagctttttatatggaactacttagtttctgttgcaaaagactgtattgtacttgacattccatcttctctcatcggatacaatgatgtgaaacccctcctcagtattcagtggacagtttgtataatgagatggcacaatagtggtgcatcaacaaggaacagtggagagatgttacatagaaaaagttcaactggcgtgattctctgcaacaaaagaacacaagctgttgcttattggcctgatatcagtgctgaatctagtaggagcccagttcttagttcatcagaccatggtgaggtgtccacatgtggtgctgcatctgattttctgaggtttaattcgcttattgcggctgcagttccaggatgtattcacgagtgcattgcaatagcttctgagcctgcaggtgctttgtggctgttccagtgttcaccggaaggaattcgtcaaagaaaagttcatgcagatacattaggagatggtgggtctgatctttatcagaaatgtgatggtggaaggtccttggtttggttaccaagtaatgtctcatctgagggttctgaccggaagttctttttattgacaaataatgaggtgcaatgttggagcatctcactcttgcatgacatcaatgtaaaaaagttagggtctcacgaaattgttggtactgacggagatgtgggcattaagaaagatatagctggacagaaaaacatatggcttttggacatgcagatagatgagcatgggaaggaatttagcattcttgttgctacattatgcaaagatagggttagtgggtcaaactacactcaatattctcttctaacaatgatgtacaaacctaaccagaagttttcatctgaagataatgtagctaaagttgaaaggtttttggagaaaaaagctccctctcaggtgataattcctaaggctagggtagaggatgataaattcttgttctccatgaggctaaaaactggtggtaagccctctggttctgttataatcctgtcaggtgatggaacagcaacagtggccatgtattggagaggttccacccgactttatcagtttgatctgccttgggatgctggaaaggtcctagatgcttccattatcccatcagctgaggacagagatgaaggtgcttgggttgttctaacacaaaaggcaggaatctgggcgattcctgaaaaagctgtattagttggtggggtagaaccaccagagcgcagcttgtcacgaaagggtagttgtaatggaacaattgctgaggagaaaagaagtcaggtcttcagtgctagtgttgttcccaggagagctagctctgaggcttggagtgctggagagaggcaaaggcctgcatcaactggcatagctcagcagtctgcggtcgatgaagagtccgaaatgctattgaaccagttatttcatgattttatgatctccactgcagttaatgaggcatttcaaaagcttaaagcagcaggagcatttgagaaagagggcgagatgaacatatttgttcggatgagcaaatccattgtaaacacattagctaaacactggacaacaacaagagaagctgaatttcttgcctcaacaattgtttcatcccttgttgagaagcagcaaaaacacgagaaattccttcagtttcttgtcttatcaaagtgtcatgaagaactcgcttcaaagcaaagttcaagtatagaagcaagattcttatttgctaggtgcccggggccccgaggggccccgagggctttatttgccaggtgccccggcatatggacttccggaggctag

SEQ ID NO: 35651 - DNA, 1878 bp, Zea mays
  Peptide Sequence Number=SeqID_79026
atggatagcgccgcggactcgtcttcaccgaggtgccaccacggtcagtatcgacaggatgccggagaactcgaggaccagactagcaccagcaagatgccgtccagtgcttctgagcttccatgctccttgaagcgtgaggtccgagtccttgaaaagcgactggatgatcaattcgtcatgcgccgtgctcttgagaaagcactaggttacaagccttgtgctgttcatgcatcaagtgtgaactgcattccagagccgactgaggagctaatcaaggagatcgcagtgctcgagctagaggtcatatgcttggagaaacatctcctgacactataccgaaaggcatttgagcaacaattgtcccctgtgaactctgcttgtgacgcggaaaataacaagcagccagcaaggtctttttcaggcatactatctgaagcttcagtgctcagtttctcgaccccaaggaagcatcagccagtccagtccagtcgaatggtcctggcacgcaagtccacgcctacagcttctacaagcgaggctagcagtgaaaagatcaacatcggacgcagccattcctcgctcctgcaccgttctgtcagggtgtctccatccgcaaacaatcttgctagagctctgaaaccatgtcatacttcacctctatcttttgttgaggaagggaagtgcatggagcctggagttgtgagcttggcggacatcttggggaccagggttgcggaccatgttcctcaaacgcccaacaagatatccgaggacatgatcagatgcatcgcggccatatacataaggctgagagacgtcccttccgccgccgcgcagcatgccttcttcccctcaccgtgctcgtccttctcttcagcaagcggactgtcttccaaatacactgcagatgtatggagttggagccccaggtgcaggagagagagcttcactgaggcgtggcaggtgcaggacaacgagctaggcctaggcggtggtgaagcaagggactcggggctgcagtacgattctgtgatagaggtgtctgctctttgcaagggcgatcagaggtccgctgacgttaaggacatgctgcgcaagtatatgtcacttgtacagcttctagaaagtgtcgacctcggtggaatgaaaaacgaggagaagcttgctttctggatcaacgtgcataacgcgatgatgatgcatgcccatatagagtacgggatcccacagagcaacagcaaaaggatactgcttaccaaggtatcctacatcgttagtggccagagagtaaacgcggagctgatagagtaccagatcctgtgctgccgagcacactcttctggacagtggcttcggctgctgctccacccgaaatggaagtccggcagggacagggacgaggagctgcaaggcttcgccgtggatcggcccgagcctctggtgcacttcgcactgtcctccggtagctactcggatccagtggtgcggctctacagccccaagagcctgttccagcagctggaggcggcgaaggaggagcacatccgcgccaacgtcgccgtcggcgtgcgcgggcgggggcagcgcaagatcatcctccccagggccctggagctgtacgcgagggacgccgggctgggtgcgcaggaggtggtggccgcggtcgcgtgccacctgcccgacggcctccgggacgccgtgcgccggagcccgccggccgggcgggcgcgcggcggcgtggagtggaagccccacaacctggcgttccggtacctgctggccaaggagctggtcggcgggtcgcccgcgtgcgggcggcagcaacttaagaaatgcggccccccgatcggtgcgccgctgcgtgctgatcggtga

SEQ ID NO: 35652 - DNA, 153 bp, Zea mays
  Peptide Sequence Number=SeqID_79027
atggagacacgtacaaggatactgagccccgacatgtgggcccagaggcagaatagaaggaagaaactaataggccgcgcagcccagaggccttacgtcaggctccgcccgttggcttatgaagcgccccaatcctctgggactcaaatgtga

SEQ ID NO: 35653 - DNA, 309 bp, Zea mays
  Peptide Sequence Number=SeqID_79028
atggatctacttcatggagatcatcaagcctttactaatgttgttgtgctaatgctactggtcaagggattggaacaaccatcatggacacggccatggtcgaggcagagggcattggtggtcctcctggtggccgtggtggcaaccaagcttcaccccaacgttggtgctagactacaacaacaacaacaacaaagccttttagtcccaaacaagttgggtagcctagagttaaaacccaacaaaacccaaaaatcaaggttcgggcacatggatagctgttttccatccactcctattcaaggctaa

SEQ ID NO: 35654 - DNA, 2676 bp, Zea mays
  Peptide Sequence Number=SeqID_79029
atgaagggtgaagaattccaggaagagcttgcaagctttctgaaagagcggagtgatctgctgtgggttcatgagatatgcttaaaccagttctcatctgcttccgacacccttcatacctatgctctgcgtcgtagtcctgatggagatgccagcttcacaaccagcagaaagccactatcctttgctgaaagaagacgtcttctttatctctctaaaattgctgcaacagcaggtaaggacattgattatgaagtgaaggttgcacggatagaagcggacattcggattctaaaactgcaggaagaaattgttcagcatgatccagaatatgcacaagtcaaatctacaaacacattgcttggtccatcagaactgattgagatgtgcttgaggagagaccgagagctctcccttaaagcctttgaagtatttgctttgacaagctcatcgttccgaagttccaacagaggccttctagaggcatgctggatgaatgcaactgaccaagatgattgggtaaagctttcagaggcatccatgtcagaaggttggagtgacgaggtcatcgaagaatctcttcaagcaactgtcctcttcaaagcttccaggttgtgttacagcccggatgctgtggtgtatgacggcacctttgaggatgttctgcctgtgaagaaagaggatgtacatctgagaggtttggagagtaaatgtttgtcagttgaagaagtgttgatgcagcacgaggattttccagatgctgacgcgccaaccgatgccccgcgactccaccacatcccgcttcacgccagcgcctggaatccaggcgggctagccttcgttccacctagctgggtcacgtcggttactgggatagtgtcgccgtactacaccgcacgtcgcagcatccaacaattgatcttcgtcgtcgccgaccaggccgacgtcgggcccggcgcgctgctgttggactgcctcagcccgcgctaccagtccgggttcttcttctccccacacagcactggacacagtcattcctgtcaactccgtcagctacgaggtcttcctgctactgatctggttcctatacagcggcacccgggcggcggtgagcgcgcatgcaggcacgcacactacgccgtcgtcgacctcgcgctcgacacgctcgccgccgcacgctccttcggagtggaggagctcctgctgctcacccaggagccattgatgggccaggaggttgctacaagctatgtaaacaacctgcgctctatgatcgaagtacatattcgtgcccttgtcgataaagaagttgacaacattcttaggaaatgtggactgtcaaataagatgccatacataaaggagtacggtagcaaggttgatgcaagggttccaaggttacgttcaaatgcctgctatggtttggcaagagctctagcagaatcttataacaattatcctgacccaagcttctgtgcggcttctggccgccagaagctgaagctggaaccaaacggcaaaattttcgcgcggcttctgcgcgaagcgcttggtgacaccggcgcccttggtccgtcgtgcaggttcctccggtcccccaccatcgcgttggcatcttcgcagggtatggaatgtcgtagtaacagagaatttttgtgcgttgtcgccttcagatttccgtatcaactcgagttgttcgtcttcggttccaagatcaagtgcaaccaagcagactccatagccgacaagacaattggaaggatgcaagagattgcggacaagctattttccgtagcccgggaaacaatccgtccaggacgcgggttgacctcatttgacgccaccaaacttcgtgtagcattggaggacatagcttgcatgcttgagcaagactctctgctgttgcaagagaatttggacaacgtgaacaacgttaacaacccgggtgacagcagctacgaaccgtcagccttgtcctcaccacccccagctgacgactaccttactccagattgggactttgcggagcactttgaaaacttctggggtctagaatatgactcggaccagatgccttcgtttagtgacaatgaggtcttggtcgagaccctcatactggttcaatcagtgctccagatgagtggtgggctaagcaaaatgaaccccctagagaatgaggacgagctaaaggttatgtttggacccattgtctgcacaaatcaaacaacccttgttcctggcgtcgaggatgcaaattcatcatctgatgatcatgtcgaagccactttaggtgggggtgaaaacagcacacctgatccatgctcaaatgcgactaggaagcgtaaggtgcgtcatgattctccaaaaccaaagaagaaaaaagatacgagggaagagtacatgaaacgcctagtcgaggcttttgagtcgcgttcaatgaccactaacaagtccatcacctctgctgagaccgaccctgtccgtgttgaggttaatgcgcagttgcaacaagtgatcgatgatggtgcacctgaaggcaacgacctacatttgtttgccactcatctgttgattgagaaaaagtttagagatgtatttgcaacactgaagaccaaagaaggaaggaacgcttggctgcacagtgctttcgagatacatgttaaaaagtcgacttag

SEQ ID NO: 35655 - DNA, 372 bp, Zea mays
  Peptide Sequence Number=SeqID_79030
atgacgcatgcaaccactattcccacatgctgcctgtcaactctcgatgggacatacaatacgataagagtgcagaatggccctcgagcgcaaactctgtcatacccgaagtcgaccttggccttgggacaaactctccgtcacccaagcccggcctcggctacctgctcccgtgaatcccgcaggaggccactccttcaatgtgagacaaccgatcaagccaaggatggaggcaagaagagcttcgaggtaccgagtgcatgggagaaggtcaaggagaccaggaacccaaagccaggggtgaagaagaagacttgcaaagtcaaggttgatcgagttaagagttatggtgcatcaaggatcactacataa

SEQ ID NO: 35656 - DNA, 963 bp, Zea mays
  Peptide Sequence Number=SeqID_79031
atggcatcaaattacttaggcaaatccgtggggattgaggggggaaatggactaattatccccctcaattggttatgtggtggtgctacgggtagagatcacacgtggtcaagtattagtggccacagttgtggccggttcactaatgatcagactaagaagaccgaacaagcaaggagagacctctatagatatatgcactaccacaacagatacaaggctcacaccgactctcttaagcaggaagcaaagcttaagaatgagatccaagggaagatatccatttcagaaaataaggagtcaaagataaaagattattcttgggtcataaatgggttaaacaggctattcagatcaaggcgtgttctatcctattcgtatccgtttgcattctacatgtttggtgatgagattttcaaggatgagatgactcctcaggagagagaactgaagcagaatttgtttgaggatcagcaacaacaattagaatttaatgttgaaagattgtctggtttccttgagaaagattttcaactttttaccgatgatgaggtcatggatacaatgaagcatgtcatcaatctttccaatgtggttgataggctctgcaaacaaatgtatcagtgcattgagaatgatttgttatatcctctacgcacacctcacaatatcgctccatacaaatctaagggccttgacagggcctcagagctcaatattagctgggatcctgctgaacaaagttcacagtcaacaaaacatagtcaggaggatgaacacaggaaccaaccagcatcgattagtctggggaaacgaactcatgagttgcatggctcgagttctggtaataggggggataatagggggcaccgatctaacaagcgagaccgggtagatgccaatggcggtggtgatgcactttttgatctcaatgtgccagccgaattggtggacaagatctga

SEQ ID NO: 35657 - DNA, 945 bp, Zea mays
  Peptide Sequence Number=SeqID_79032
atggaaaaactgcgggtaggaatcgtttttggtggtaaatcagcggaacatgaagtgtctctgcaatcggcaaaaaacattgtcgatgccattgataaaagtcgcttcgacgttgtgctgctgggcattgataaacaagggcaatggcacgtcagcgatgccagcaattatctgctaaatgcagacgatcctgcccatattgcgttgcgcccttcggcgaccagccttgcgcaggttctgatgttctggcttcagcagcctgtatggacaaagatgtcaccaaacgtctgctacgccgatgccgggctgaacattgcgccatttattaccctgacgcgcgccaatcgtcacaacattagttttgccgaagtggagtctaaactggggttaccactgtttgtaaaaccggcttatcagggctcttctgttggtgtcagcaaagtaaccagtgtagaacagtacgcaattgccgtcgatctggcgttcgagttcgatcataaagtgatcgttgagcaagggatcaaaggtcgtgagatcgaatgcgcagttctgggcaacgacaatccgcaagccagcacctgtggagagatcgtactcaccagcgatttctatgcctacgacaccaagtacattgacgaagatggcgcgaaagtggtagttccggcagccattgcgccagaaatcaacgataagatccgggcgattgccgttcaggcttatcaaacgttgggatgcgcaggcatggcgcgtgtagacgtgtttttaaccccagagaacgaagtggtgatcaacgagatcaacaccctgcctggcttcactaatatcagtatgtatccgaagctgtggcaagccagcggtctgggttacaccgatctgatcacacgtttgattgaactggcgctggagcgtcacgctgcggataacgcattgaaaaccacaatgtaa

SEQ ID NO: 35658 - DNA, 516 bp, Zea mays
  Peptide Sequence Number=SeqID_79033
atggctggtcgaagtgaccgcatccacttcgaccttccactgaccgacctgacagggagacagcgccgctcgcccctctccgactgctgtgccacccaccagggtaaggctgacaacagctacgatcagcctcaggcgcaacaggaagctccgcctcgcccgaccttgggcctcgacctcaggaggaggtctccgcctcgcccgaccccagggctcagcctcaacctcggcctcggaaggaggactccgcctcgcccgaccctagggctcggcctcaacctcgacctcagaaggtggtctccgcctcgcccgaccccagggctcggcctcaacctcgacctcgggaggaatcgcgtcctcgcccgaccccagcctcggtctcaggaggagtctccgcctcgcccaaccttgggctcggaccgaccgcaccacaggggatacatcattaccctacccctagctagctcaagctacgggggaacaagaccggcgtcccatccaggctcgccccggtaa

SEQ ID NO: 35659 - DNA, 381 bp, Zea mays
  Peptide Sequence Number=SeqID_79034
atgaagctgtggaaggagacttccaggagttccaggactacgacgagttctaggtgtgggttagcggcaaccccccagtcggctgcctgtgaaggccgcgttatctacgtttcttttccgcactttgatttattcagtaatggcggcagcaggcgaacggaagcaacagtcaaatcgtctgcaggctcatgtcccctcctagagcagcaggggagccctctcccacggcgtgaagatgacgcgcccgtgttccgttcctcgaacgactcgcgcacgcgcaacggccgccccgtgaaccacccgtcccgtcgcattaactccgcggcagggcaagcgacacctttggcaggcgaagcgggcgtcgtttcacctccgccatga

SEQ ID NO: 35660 - DNA, 828 bp, Zea mays
  Peptide Sequence Number=SeqID_79035
atggacgtctgctcccaaaggttccaccaccttcgggagagcttcctgtggctcccccgtcgctttctcctcaccgtcagtgcacgcccccgccggcgttcgtgctccttggcttgctggcttaccacgaggatgtccgctcccgcaggttccactacctcccgggagcttcctatggctcctcccctgctgcgggcgcctgctgcactgtcgcggccgctctcgctggcgaccatcagcgtgtgctgcttcctccttgctattagtgtaggctccgtcctcgcgtcctccatggcgcgtgtgcggaagggcatgttccaccctgaggaggcacaagacctgctcgacaagttgctgcgccaaggcacactccctcttgggcatgagctaaatgggttcctcgccgcactcgcacgtgcaccgccctccatcgcctacagatatggtcctgcccttgccgtggcactcttcaacccgcgtctcgcactaccggactcatcattttgcactcggcaaggccttatactcggaacaaaagatgatacatatcaaaagctcaaagaagaaaatgagaggctaataaggagcttgacacaactaaaagggaaatgcattgctcaaccttctcaagataaccgtgatcacatggtgaagaagcttgagacgggaacaaccgtggcgtgcactaaatcccttgaagaaaatgtcaaggacttgaggattgccaagaggaggaagcaaaagaagaaaagcaatactgcctccaaaagcctcaaccatgccttcataaaaggagatggagatggtatgaagctttgggatgcttga

SEQ ID NO: 35661 - DNA, 495 bp, Zea mays
  Peptide Sequence Number=SeqID_79036
atgcgggctcgtgctgatggaccgggagcggtgaagggtgagtgctgggtcttgactgatgtaccaaagcagacagagggaaccggtggcggcacatggcgtgatcacggagggtgcgtcaagacaaagcaactccgtgtgaaggacgtggtcgtgggatcaaaatcccaagagttggtccatttcgcccctagtggagtggatagactctatcagcgaacgcactgccatccttgcttggcctcacatcctccgcagctgggcgtcaccaggacgctatgcacgctgctcccgcatctggagctcgcccaccctactcgctcatcgtctgaccatgcgcactcgctgtcggtcgcgctcggctgctcgtcgttgtcctgcctcctcgtccacgccgcagtcgtcatcgaccctctccaacctcgtctgcgttgcgacctccatcctgcctgctcgcggtttccccctctgctcaaacgtcggcgcccgtggtga

SEQ ID NO: 35662 - DNA, 912 bp, Zea mays
  Peptide Sequence Number=SeqID_79037
atggggaagaaccaggcgtacaaggcgatgcagcgggcacgactggggtcctcgaaccggcgcgccgggcgccgccgacgcccccaaagacgggcatggccaactaccttgggtgattatgtggatcgtggaaagcaaagcctagaaacaatatgtcttcttttggcttacaaggtcaagtacccggagaacttctttcttctaaggggcaaccatgaatgcgcatcagtaaatcgcatctatggtttttatgacgagtgcaaacgcagattcagtgtaaagctgtggaaaacattcacagactgttttaactgcttgccagtgtcagcattgatagatgaaaagattctctgtatgcatggtggtctatctctggagttgaacaagcttgagcaaatactcaacctgaatcgccccacagacgtgcctgatactggattgctctgtgatcttctttggtctgatccttccaatgaagcaacgggctgggccatcaatgatcgaggtgtttcattcacatttggtcctgataaagtttcagaatttcttgagaagcatgatttggaccttatctgccgagcacatcaggttgttgtgttcttaaagatgggaccaagttatggttatcgaggcagagtgatgcttgcttttgaagataatggatcctcaaaaattggagtccgatttgacaagcagatccctgatggtaatgatcttggtggtttgtgcgaggaagatcatggcttcttctgctctgctgaatcactttgcccagacttttctgctggtgaagaagttgagaggctagctatgaccgagctaatagaggatgaagctctacttacagattggaagcagcagttggatcgtgatgttgaaacccttaaagccaaatcaaacattggcagctga

SEQ ID NO: 35663 - DNA, 84 bp, Zea mays
  Peptide Sequence Number=SeqID_79038
atggcgcctacgccatgcacaggcgagaggagtaccttttgggataataacttgaggttattgctaaaacttggcttctactaa

SEQ ID NO: 35664 - DNA, 558 bp, Zea mays
  Peptide Sequence Number=SeqID_79039
atggagtcttcggtgaagacaaggcttccactccactctatcggtattatttacccttcgtcgtcactccgcaccattctccactatggtataatcttcattcatattcatttgtaccattggggagaaagtgctaaaggttcaacacaaaccaataaaaagatccaagttagggttcaaaagaaaggagcaaaagaaaccgaagagaaccctggtctggcgcaccggactgttctgtgcaccaccggacagtgtccggtgcaccaggagcgatcgactcaaactcttcacctttgggtttctggagagccgctccgctataattcaccagactgtccagtgtgccagtggagcaacggctatcgagcgcaatggtcaactccaaaggtcgtctgcaaacatgaacagagcgcggacagtttgtgcagagtcagagcagcgccagaaggcgcaccggacagtgaacagtgcctatccggtgcggcaccggactgtccggtgccccaagctgtcagagctccaacggtcgaaaccgtcagaaccctaacggttgggtga

SEQ ID NO: 35665 - DNA, 453 bp, Zea mays
  Peptide Sequence Number=SeqID_79040
gacggtgcggccgtgggatttaccccaccgacgatcgcgaagtgcaaaagcatcgggctgcagaccgcgcggggatcggccaccaacgggtacgcgcagagcaacacgttcttcgtcaagccccgctccaccacatccggcgagggtccgggcgggccccacaggccgctgcgccccgacgccgccggcgcggttggcggcgggatgcgcaagcccaacaaggagatccttgagcacgaccgcaagcgccaagtcgagctcaagctgctcgtgctcagggacgcgctcgaggagcacggctacaccgaagacgagatcgaggagcgcgtcgcggaggcgcgcaagaccgcggaggcagaggcggccgcggcagcggaggaggcagggagcggtcgtggcgccggtcgaccgcctctgcccgggagagggtatggatctgttggcgtcttttag

SEQ ID NO: 35666 - DNA, 156 bp, Zea mays
  Peptide Sequence Number=SeqID_79041
atggcgacgattccctcgggcgagcgagcggtggcaatcgtgggggacaacagcggtggtgcctcgaggggagcgaccggcggcggcgctccccaagcatccaaaaccagattcgccgccaaaaatctacaatctctaccaaatatttacaattag

SEQ ID NO: 35667 - DNA, 831 bp, Zea mays
  Peptide Sequence Number=SeqID_79042
atggagcgatccttaattttgaacgagacattgaagaagcaagatatttttctccaccccaaaaaggatgacagatgtggatctattggttattacagaacactgaccaaaccagaaagacagattcagacaaacaaaactggtgcaaacccgaatggaatcctcctgcagattgtgacgctgctcagaggaacttcctatacggccgcccgacatcctcatcctgcatatgctgcatccaaaccagtaggatccattaagtctgtgcatcctaggagtaagtgggacgattatcaaaagatcttaataatatgggcagtaaagttgaggagctccagcacctcctccatcatctctggctacggacgtgtagaggtgtttctcgcctcccggggctgtcccacaccacctcgcgcagccgctccagcgcctcctccctcatctccggcggcagtggcctctgggttgaagaggcagcacatgcgtcaggcaagcctgcgaggccttgggcccgccgcagaggtcttgcttccaacgcgggaaggccgttgcaaagggaacccacatgttaacgtcgcgggcacagatgaggacgggcgggcgcagagcagttgcagctcccggggcatcctccttctcgcgaccctggggttgaagcgggtcaggcaagcctgcgaggccttgggcctgctgcagaggtcctgcttccaacgcgggaaggccgtcgcaaaggggacccaccggttaacgtcgcgggcacagatgaggacgggtgggcacagagcagttgcagctctcggggcatcctccttctcgcgaccctggggttga

SEQ ID NO: 35668 - DNA, 915 bp, Zea mays
  Peptide Sequence Number=SeqID_79043
atgaggataggggttcaaggaagtccagatcacagtcaagatcaaagagaacaaggaaggaaaagaagagccagtcaaggtccaagcgcagaggcagtgaaagcgaggaggaaggcccgggttaagaacgtgggtacccacgttcttaaggttaagaacgtgggtaccgtcgaacttattgtgcagtcctcgcagacccacgtagggttaagaacgtgggtgcccacgttcttaaggacacataagttcgacggccacgtgaccccgtcgaacttaaccttaagaacgtgggtgtcgtcgaacttatgggaaaaaattcaacggcccccgtcgaatttaaaaacgcacgttcttaatgttaagttcgacggtactcacgttcttaatgttaagttcgacggtacccacgttcttaaccttaagttcgacggggccgtcgaacttacttctctaagttcgtccaaaaatcaccgtcggctatattcgtcggtaaacccacgttcttatggtgctaaaggttcaacacaaaccaacaaaagatccaagttagggttaaaaagaaaggagcaaaagaaaccgaagagaaccctggtctggcgcaccggactttctggtgtgccaccggacagtgtccggtgcaccaggggcaatcgactcaaactcttcacctttgaatttctggagagccgctccactataattcaccggactttccggtgtgccagcggagcaacggctatcgagcgcaacggtcaactccaacggtcgcctgcaaacttgaacagtgcacggacagttcgcgcagagtcagtgcagcgccagaaggcgcaccggacggtgaacagtgcatgtccggtgcggcaccggactatctggtgccccaagatgtcagagctccaacggccgaaaccgtaa

SEQ ID NO: 35669 - DNA, 837 bp, Zea mays
  Peptide Sequence Number=SeqID_79044
atggaactttacaagaagaacttaaaagaaaaggcggcggcaagcggcacacgaggcgtgaatcctggaccgcgctgccggtttctgcggttcttctccgccgacacgcgtgattacggcccggaaaataatgagtacatgttctctgttctctctgccatatttgatacaagcagtatccacggaagttacagcaggggtacccccaagactcctaaaactcggctgataaacaccatcagcataaagctgcaaaggcctgatgggcgcaatacaggtcaaagctccgtccgctcaaggaacgcaatctcgccccgcccgagcctagcctcgggcaggaacggaagacccaggcagattcacgcctcgcccgagggcctcctcaagcaactgacgcatcttcgactcgcccgaggtccagttcggacaggcttcgcggagaagcaaccttggccagatcgccttgccagcccaccggatcgcaggagcattcaatgcaaggatcgcctgacaccttatcctgacgcgcgctcctcagtcgacaaggccgaagtgaccgcggaaaacagcgccgcctgcactactccgactgctgtgccacccgccagggtgaggctgacagcagccaagtccagcctcgggcgccataggaagctccgccccgcccgaccccagggctcggactcaacctcgacctcggacgacggtctccgcctcgcccgaccccagggctcggactcaacctcgacctcggacgacagtctccgcctcgcccgaccccagggctcggactcaacctcgaccccggatggcagtctccgcctcgcccgaccctag

SEQ ID NO: 35670 - DNA, 519 bp, Zea mays
  Peptide Sequence Number=SeqID_79045
atgtcgggttccccgacaagctcttccgctgcgcgcgctgccgccgccgcttccagcactcgtacgtctactgtcactatacacttccggtatcatggttacgctgccgtttgtcgtacgtcgttgcttccaatattaacgcgtgcacacatgtggcgtgcgtgggcggcacacagctactgcaccaactactacggcgacgcggccccggcccaggcgggcgccggcgtgtgcgactggtgcctccgcgacgacgtcggcggcgggacgaagaagcggcagcactcttcggcgtcggcggcggcatgcggcggcaagcagccgcaccggcaggcggaagaagaagaagaagaagaagcagcagcagcaggctggaggaggagcgcgcagcatcagccagcgtcgtcgtcgtcgttcccgcccagcggcgggtgcagcaaggtcaccggcggcagcgagcacgccgagggcggccggaggccccgccggtacaagctcctcaaggacgtgctgtgctag

SEQ ID NO: 35671 - DNA, 1075 bp, Zea mays
  Peptide Sequence Number=SeqID_79046
atgacgtgcatgccggctgtgtctgccccatccgtcctcgcgccggccccggcgtcgacccgcacccacctctgctactcaacggaaatgcgacgcggcgcgctctccctccgtcccgcccgcgctatccccacgttgaggctcggcggccaccgcgacgcccgtggcgctgtcgtcgtccgcgccactgcggcagagggagccgtggagctgcaggccaaggtgacgagcaagtgcttcttcgacgtggaggtcggcggggagcctgcgggccgcatcgtcatcgggctcttcggagaggtcgtacctaagaccgtcgacaacttccgtgcgctctgcactggtgagaaagggtacggctacaagggctgctccttccaccggatcatcaaggactttatgattcaaggcggggacttccagcaaaacaatccacgtgccgaacaaccaccccgccaagcgcaagccccgccgccgcctggaaggaggaggacaagccccgccgctgccaccctcgcattgccagcccccgcccaccgcgcccacccccgcaccgcaactcccaccgcgcccgccgctgaggcagcgcgcgccccctccccaacagacgtgcacaccaacgctcctctgttccatcccactgaccagatccaccacagcctcacacgtctagccatgccagcgccgccgcattcaaagctaccacaacacctggccaaccgcgtcgtcggcgctggtgctgacagcattgttgtgacctgtgttaagcacgagtatcagcccgccgaggtcaccaagatggatggtgccatccagagagtgtatacgcgcaagaactggtcctccatggtgctctgcaactgcagccaccccaataatgtggtcccgctcacctcggagatcgtcagcgcccagaccggcacgttcctccacctcctgcctggctcgacgatgacgagatcagggaactgtccttcacctgaaacttcctcatcggtcacaactagattgactcggctgatctggccacacgccccagggccatccactatacctccgacggtttcaatttctg

SEQ ID NO: 35672 - DNA, 324 bp, Zea mays
  Peptide Sequence Number=SeqID_79047
atggcatcgacctgtttccgcgccgccgcccgcgtggcctccgccgccggccgctcggcggcggccacccgatcggctccctccgcggcccgtgccgccgccgccgcccaccgcgcctcgtccttctccaggatgccggtggagctcgggtgctgcgcgggattgtcgctgctgccgctgcacagcgcggtggcggcggccaggctgacgtcgcggctgagcacggcgtcgagctgccgtgctctctctcaggcgaaatgtcatcctgaccattttaactcgtcaacgatcatgttcaacacaaaaccacttccattttcgtga

SEQ ID NO: 35673 - DNA, 678 bp, Zea mays
  Peptide Sequence Number=SeqID_79048
atggcatggctacgtaccgtcggcggcggcgggcggtttgcttcactcgagccagaacgacggcgagcaaagggagcagcggaggaaaaggagcagcaaggcggcgggcggctagggttttacggagcgcggaaagcagaattcaaacagcgccgcccccgccccccttttataggcagggcgcggctcctcgggaaacccacaacccgacaggccgcgacgcttcgggaaacccgcaatccaacagtacgccgtccatcaacggtcacatcaaaaacccccgcggaaccacttcgagcgagggcagcgtctccgccatctagcgacgtcttcggcaccagggtgccgtgcagctggaacgggatggacatcgcgttcaaggtggacgccggctcgaacgcgaactacttggcggtgctgatcgagtacgagtccggcgacggcgagctcaggtccgtggagctcatgcagcgcgggcgaggcggcgcggcggcgtggacgccgatgcagcagtcgtggggcgcggtgtggaggtacaactccggcgccaccctgcaggggcccttctccgtccgcctcacgtccggctccggcaggacggtcgtcgccagcgacgtcatccccgcggggtggacgcccggcgccacgtaccgctcggtcgtcaacttcagcaactaa

SEQ ID NO: 35674 - DNA, 645 bp, Zea mays
  Peptide Sequence Number=SeqID_79049
atgcccatggatcaagcattcaggcactgcgataaagacacgctgaagatggccatgctgaaacacgaagagactttcagacagcaagtaataaagctcaaaagctcaaagagctttccagaatttgttgaagctactactagttcacgagctccatcgcttattcgcttatacaggatccagaagctcctgatgcgagacttcacacgggagctcaagctcaagagccagaggagcatgcccacctcgccgaacggcagctgcgccgagtacagcagaggggctgccggctggccggctcctctgtgcccctcgcgacttagccggacgctgggctggcccctgcccctggtcgaccggctgctgtgccgcgccgtgcagccgcaaaaagtgcacaagcagaagcaagagaccaagaagcaaaagcaggagtgcagaagtagaaccgcgacggctgacgacgaggcagtgaggtggacggtgatgggcggcgaccggcggctgactgctgtgctgtgcgcctgtgcgggttgctgcggccgggacgggcggaccgcggacggctgtgaggcgcgggtgcggcttcctaggcgcctggcgtcacgtggtgcggctgcaggctgctcgctgcctcgctgctgttag

SEQ ID NO: 35675 - DNA, 459 bp, Zea mays
  Peptide Sequence Number=SeqID_79050
atggggattggggacgcccttggctctgcgctgggcagcagcgagccaacgatggtgcgggggtgctcgcacgccacatcagatcgcgtcgagccggcggtggccggtcctgcacacccctgcgtctgcgtcaccagatctgcccgcgcaagggtcgacgcgcagggcaactacgcgtggccatgcctcgtgcctgcgtgctctcccatggagaaacggtggcggctgggctcgactatacgcactcgcatgcatcctccctcggcctccaccgagatcctcttctcgccggccatggcggcagtcaccctaggccccctcccctcggccgcagacgcgccgcctgaccccagatcacgctccgccaccccaggctaccgacaaccgcctctaccttgtctggacccgcgctgccaccttcctggtcgtggctcactttcctctcccttggctggctag

SEQ ID NO: 35676 - DNA, 768 bp, Zea mays
  Peptide Sequence Number=SeqID_79051
atgccactgcgtgagtcggtgtcggggccggtgtcggacgaatacggggaggaggcgcttgctcctacgccctctgccgagaatggggtagtgcggaggtggaggcatgagaggagagagaaaagaagcaggatgttgaacgaggtggtggcaactgaggcgaggaccatcattatcatgcagagtttatactccaaaacatggttttcctacgtgccaaaggttcacaacaagccaataaaaagaccaaagatgggttcaaataaagagagcaaaagacaacccaaaggcaccctggtctggcgcatcggactgtccggtgtgccactggacagtgtccggtgcaccagggaactcgaagctgaacttgccaccttcgggaaaatgggaggtcgctccgctataattcaccggactgtccggtgtgctagtggagcaacggctacttcgcgccaacggtcgactgcaaccgcattcaatgcgctacagtgcgcgccagattcagagcacgcgcagttggtgcaccggccagtctacaggacctgtctggtgcaccaccggacagcccagaggccccaccagtcagagctccaacggtcgaaccctaacgaccgactgacgtggctggcgcaccagactgtccggtgcgccatgcgacaacagccttccaacggccactttttggtggttggggctataaatacccctaccaccccacattcaattgtatccaagttttccaccttcaacacattacaagagctatag

SEQ ID NO: 35677 - DNA, 1113 bp, Zea mays
  Peptide Sequence Number=SeqID_79052
atggccgcggctgccgccgtcccggacggcgtctcctcctgcgggagcaccaacatgcgccgcgccgaccaccttcctcagctcccgattccgctgccctgcatgggcgagcccaccgccgcctcccgcgtctcgccgggctcctccccggcccgctccgaggcctcgcgaggcgccccctgctacaacgccgacgccgagccggacccggacccggagccggagcccgaggcgtccgtggggcggagcacgcagatgctgctcgcgatggccgccatgggcgggcacggcgggcactacggccgccgcccggcctcgtcctacggcagctgcgccgcgtggagcgccgggtcgctcaccaggcaccgccccgcatcgccgtccccgatctgcagccccgcgaacagccacgacggcggcggcgaggaggaggaggaccgcgaaccgcacggcgttgaaggcgccaatcaaatgcctccgagattcatccacaagaccacaccagctagatttatgcgccgagttcgctcctcacgtaatttccgacagcgcgtggatgcattagatgctaccaatgaatggagattgcccaaagtcagtgaaggggatgacgagggaggtgataaaaaagactggcagagcaataccgtgtcatctcgcgtatcttcagcccgtgattggaattttgagtctgacggtgcctatcagggtagcaatcgtagtgatcgtgcatttggcgattcagatggtgagaactgtccagttgaagtgcaaaggacagagagatggaccccgagctccgtgttaaaaccccaaggcaatttagtccatgctaagttggttgcctggaaggatgcgcagattgcaaagctcatagaaaagctgaaaaagaaagaagccgatattgatgattggcagaggaagaagaccataaaggccaggcagaagatgagaagcgctgagttgaagctggagaagaagagagcggaaatcgcagaaaagatgcaaaaggcaataaagcgtgcacaaaaaaaggctgataagaagaaagtcaaggagcagctgtgctgtgatagtgtacatcacttcaactttgtgagtatgatgcgatga

SEQ ID NO: 35678 - DNA, 489 bp, Zea mays
  Peptide Sequence Number=SeqID_79053
atggccgtgaacttcgagcaacatgctcacataacactcggcaaacagcacagacctgggcaccggcttaggttctttgccgagtgttatgtcgctggcactcggcaaagaggtcggctttgccgagtgtcgcacagaacactcggcaaagagcctgacatggggaccctctctggcgggctctttgccgagtgcgccaattggcactcggcaaagaaggcggctttgccgagtgctgccaggaagacactcggcaaagctatcttcgttgccgagtgtcaccgtcgacactcggcaaagccgccgtctccgtcacccggcgtcgtaacggtcgcttttctttgccgagtgctccctggcactcggcaaacatctgtgccgagtgcccgagaaaaagtactcggcaaagaagtctttgccgatgcactgtttgccgagtcttctttgccaagtgttacactcggcaaaggctttgccgagtgtttttaa

SEQ ID NO: 35679 - DNA, 1602 bp, Zea mays
  Peptide Sequence Number=SeqID_79054
atgacgctgtgctcctcccgtctccccgtctgtctctgccaggagcaagcaaagcggaccaccgttgcattggctttagctgtaccgccgcaggccgtgtctctagagaggaaggagaaacctcagcgccgccacgacttcctcctcgggccataccatttcggcggtcgtataaatccacaccaccccgagcacacaaaagctctagagctttgcctgcttcacagaccaaccaaactaaagcagcggtggtcgcgtcgccgccgcgacgaaggctcgtcgtcgtcggtcacatcgtccccgctgcacaacttctccaccatgccgctccacgcgtcgcccggcggcgcgccggccccgacgccgccgtggctggtgcgcgagctccgctccgacgagcgcgggctgtgcctcatccacctcctcctcaactgcgccgcggcggcgggcgcgggccgcctggacgccgccaacgccgcgctggagcacatcgcgtcgctggcgtcccccgacggcgacgccatgcagcgcgtggccgccgccttcgcggaggcgctggcgcggcgcgccctgcgcgcgtggcccgggctgtgccgcgcgctgctgctgccccgggccgggcccacgcccgccgagctcgccgccgcgcgccgccacttcctcgacctctgcccgttcctccgcctcgcgggcgccgccgccaaccagtccgtgctggaggccatggagtcggagaggatggtgcacgtcgtcgacctcggcggcgccgacgccgcgcagtgggtcgagctgctgcacctgctggccgcgcggcccgagggcccgccgcacctccgcctcaccgccgtgcacgagcaccgggacgtgctgacgcagacggccgtggcgctgaccaaggaggcggagcggctggacgtgccgttccagttcaaccccgtggtgtcccggctggaggcgctggacgtggagtccctccgcgtgaagaccggcgaggcgctggccgtcacctccagcctgcagctgcactgcctcctggcatccgacgacgactccggcaagcaccaccagggcagcggggaccacaagaggcagcggagcccggagtccggggtgtccccgtccacgtcgcgcgcggacgcgttcctgggcgcgctgtggggcctgtcgcccaaggtggtggtggtgacggagcaggaggcgtcgcacaacgcggcgccgctgacggagcggttcgtggaggcgctcaactactacgcggcgctgttcgactgcctggagtcggcggcgccccgcgggtcggtggagcgcgcgcgcgtcgagcgctggctcctcggggaggaggtgaagaacatcgtggcctgcgacggcgcggaccggcgggagcggcacgagcgcctggaccgctgggcggcgcggatggagggcgccggcttcgcccgcgtcccgctcagctactacgcgctgctgcaggcccggcgggcggcgcaggggctgggctgcgacgggttcaaggtgcgggaggagaagggcgccttcttcctctgctggcaggagcgcgccatcttctccgtctccgcctggcgcggccgtcgcttcgactga

SEQ ID NO: 35680 - DNA, 759 bp, Zea mays
  Peptide Sequence Number=SeqID_79055
atggaaactttggttttcccatgcgccggggtcgttggacgcgctgaaaaactgtcagtgacgtttgattgtttgcagcagttgagactcgatatgtctcactctggaacaggacccggaggaggagcacaccatttagactctattaattgttattgtgtatggactgaatttatgtgggcagaaggcggtggagagggcgagtccctggggacggtgttcctggcgctgcagtgcgcggcacacctggccgccgcggccgtcgtcgtgcacgagaagccgttccgctcggcggcgcacccgctggccctgcgccacgacgttggagttgtcgggcgtgggaaggaggagcgggccgctgaccgtgggatcgtcggcagtgggcgcacagggaatgcagcagccattgccgtcgcccttgtgcgcagtggccggagaaggaggaggggcgacaaaggtagcagcggcgaagaagtcgtgcctgcaaagaagaggaggggaaggccccaaaagcgcttcgccagtaagatcgatcaagcagatgttgaaaactttgtagaacaggtcgatgccgaccaagaagctgacgatgccaagctgaagaacagcgctgcagctggtggtaccaagagaggcagaccactgaaagagggctccaatattgccgtagaagatactaattctactgttcgattaagcagtgatgaattaacgaggaccaatgggttcaggcagattgggagccagctgaaaaactaa

SEQ ID NO: 35681 - DNA, 1417 bp, Zea mays
  Peptide Sequence Number=SeqID_79056
atgcaggcggcatgcaaccgcaccaagggggcgcaccctttcgacttcgacgcgtccagcatggaggcccaggcccacacatcatgtcagtccgccgcggaagaaggcgagacggtcgatatggccaaaggtgggccggcattaatggcggcggcaggcgggcggaagcagcagtcaaatcgtgacacctttggcaggcgaagcgggcgacgcttcacctccgccatgatgaccgtgtcaaaaaaggtgcgccacgacgttcaatttcgtatccttttcctcttcccctttctctctcttgctacaaggaccgggaaaggggatactccaaaagggatccttctccgcgaaggaagcgggccccgagcccccctactgatcagaggttcgaaggctggcccctcggaagggttcgacagccacctcagagcactcgggctccgcgcccactactggtcacaggttcgaaggctggcccctcggaagggttcgacagccgcctcaggccactcgggctccgcgcccactactgatcaggggttcgtaggctggcccccgaagggttcgacagccgccttagagcacgcagagcgagggatgactctgggtacgtccgatacatggccgaggctcgggctacgctcccgaggctcgggggctgctctcgcaaacccggctccgaccaaaccgttgacagcgtcaacataccagcccgagaacttggaacctgactatgcacccgggcaacgaccactggtaacccccatcagcacaaagctgcaaaggcctgatgggcacaattcaggtcaatgctccgtccactcaagggacacgatctcgcctcgcccgagcccagcctcgggcaaagatagccgacctaggaggattcacgtctcgcccgagggtctcctcaagcaacgggcgcaccttcgactcgcccgaggcccagcacgggcaggcttcgcggagaagcaaccttggccagatcgccatgccaaccgaccgtatcgcaggagcattcaatgcaaggatcgtctgacaccttatcctgacgcgcgctcctcagtcgacagggccgaagaagctccgcctcgcccgaccccagggctcggactcaacctcgacgtcggacgacagactccgcctcgcccgaccccagggctcgggctcaacctcgacctcggacgacggtctccgcctcgcccgaccctagggctcggactctacctcgacgccggacgacggtctccgcctcgcctgaccccagggctcggactcagcctcgacctcggagaagccaccacctcacccgacctcgggctcggaccgaccacatcacaagggggccatcattaccctacccctagccagctcaggctacggggaacaagaccggcgtcccatctggctcgccccg

SEQ ID NO: 35682 - DNA, 813 bp, Zea mays
  Peptide Sequence Number=SeqID_79057
atggagcctattactagttgtggaccaccagatatttctcgtccattccaaggaacacccaaactgcaatcttctacaatgggttctgctaaactagctatgccacctcgtcgagccaatgaaaactttcttgaagcctatgaagttattttaatattggatgaccgtgaaaaattcgggtctcgttcaagaaaagttgctgataacatttgttccctgagccattttgctgtggatgtcaggcaattgcctgtgggagatggtatttggattgcccgtcataaggaagatcacacagagtatgttcttgatttcattgttgaaaggaaagaggttatggatttagatggctcaattgaagacaaccgatatagagatcagaaattaaggatgaagaaatgtgggctgaggaagttgatatatcttgttgaaggtgatctcaaccgtgcaccaaagagggttaaaacagcctgtttcaccactgagattctcgatggatttgatgttcagagaactactgggtttgccgatacccagaagagatatgttgatcttacacgttcggtaatagcatactatgatgcaagtttctcgatcgttggtaaagcttcccctgtttgcccaacctacgatgacttcaagagaaagtgttatgatcttaagaagaaaacagtgagcgacatatttggctgtcagcttatgcaggtaccacaagtaacagaagaagctgcacaagctgttgtagagctctatccaacccctttgttactggcaaaggcatactctatacttgtcacaaacgaatcaagctga

SEQ ID NO: 35683 - DNA, 690 bp, Zea mays
  Peptide Sequence Number=SeqID_79058
atgaggccgctgccgaagaaaccaaatgcagcgctgccggtgccgaagcaactcaaggtgcatcacccggaaaatgagtccctctctcgtttcttcctagagaagtggcgggcgatgatgcaggagccggatgggctctcgcagaacaactacctggccttcgccaacgccaaccgcagcctctgctcctccaaggagccaatccggaccctcaaggacttctcgaacgtcaagggtgtgggaacatggctcataaatcatatgaaaagtttctttgaaaagtcgagtcaggatttatctcctgccaaaggaaagaaagcaaaagggacaaaaagttatttgccaaggaagaacactgctgcttatgccatactaataacactccatagtccaaataaaagtaaagcaaaacagagttacgggaaggactggtacactggttggagctgcatgaagacacttctatccaatcgacttgtcaccaagtggagtaacccagcaaagcacagtcctgagcttgtcagcgacagttctctgacaaaaaagaagagcaattgctaccgtcaagttcaagctactatctgcaatacatttgtaacttatggtttacctatcatgtgtagaattacgaaggaatcatttgttgcgattcagattcagaagagccatgtggaaaggacattcccctaa

SEQ ID NO: 35684 - DNA, 507 bp, Zea mays
  Peptide Sequence Number=SeqID_79059
atggcctccctcggacccccgacgccgagggctatcggcggctgttcactcaagcaaccaatcaccttctacccctcgctcacccgccggatgatctacgacacgccatcaacagtcgccgggacgcgtggagctctatcaatgcttcgcgtgaacgacgacacgagaacgagatccatcgccgggaagagtacgaccgagaccatggcgtcccagcacggagttaggctaccaggaccgagtcagctacggcttcaactggtggcaccacctggggacggtcgagacaccacgacgaccactcccctccccgggacagacaacatcatcgacgacaggaggatacatgtggagtatcggcacttactctgcgcctcagggccattcaatggccccctaacttcaaggtatccaacgttgacaaatatgaacctaagcaggatccgggaggctggctggccgtctacaccaccgctgcccgagctactggggcgaccgaggacgtaa

SEQ ID NO: 35685 - DNA, 1350 bp, Zea mays
  Peptide Sequence Number=SeqID_79060
atggaggcactaaagccggagcgggtcgtcgacgacgccgcggcggacttcatctgcgacgccccctccaacgccctcgacgagatcctcgtccgcctgtcgcccaagtggaccctccgcatgcggtcggtctgcagggcgtggcgcgacaagctggaccactgggccacccggtcccggcgcaagaacccgccgcagccgctgctctgcttcgaccgcgtcgcctgccccgaccgctacgtccgtctcacggactactgcgtcgagtctctcgacctccgctccggcaggccgcaccacgtcctacggttcaccgccagcgactactacgaggccgccggggcccgtgacgacgacgacgacgacccgcccggcgacaccgagcccgaggtctcccgtgtcgtcgactacgcgaagatggagagggagaactacgcggacgggttcaagcagatggtcctgctccacgcttccgtcgacggctacctcctcgtgtccttctccttcgactggtacgtgatcaacccggcgacgcgccactgggcctccattccggacctcacgctctggaacgtgatcggcttctacgagcacttctcttccggcgagtaccgcgtgctgtgcagcggcggacgcacgcgtaccagtagtaccgtagacgaaggcccggaacggtggtaccacatcgtcacagtgacccggcccgtgcagtggcggtccatcgggcggcccatcgcgcggcacgtgccccgggaccacgggctagcggcgggggtgcggatggccggcgtctccccgcccgtccagctgaggcaccgccacctgcactggccgccgcagaagagccaggggtaccgcatactggtgttcgacatatgggtcgatgcgttcagctggaaggagcctgctcccgtgacagacatggaccaaaaggacatggcgctgctcgagttccccaacggccgcctcggcatgtccgtctccgggaagaacttggcgacggtagagctctggcgtctggaggactatcataacgagctctgggtcctcgcgtaccggatccagctgccactcccgtggatgcggcttatgcaggacgacgactgctggatccccccgtccgttgtctcggccgatggggatgtgctgatcctgtccgggcgctggctcttgcactgtgacaggaacgggaatctgctgcgcgagtttgggcttcctcatgttcggaggatgctgcctattaggcacgtgctgagggagagcctcgtccagcaccggacgttcctgaatcccaagcctgctcgtgaaccgccgttcttccgttggctgtgtggtgatcccagctggtga

SEQ ID NO: 35686 - DNA, 2061 bp, Zea mays
  Peptide Sequence Number=SeqID_79061
atggaggaccgaagagagcgttctctgattgacccggacgtcgaatgcagtcatcaggtcaggatgccgcgcacgaagaatgtgtcggcgccagggggaggcgatgatgaggatcctcgtcgccccttcaggcaggtcaagggcaagacagtatacttggagcagcaggaaggccgcaagaagcggcgtacggatagggcagcttgtgcagcggcagccgcagcagcagccgctgcgcaggccgagctaggggatcagccacagactccgtcagatcagattgcgtaccgtgttcgtcgtctcgcctcccggcctcgctcctccactcacaccactgcttccactccaccacccactttgcctgctcccatcacccctgttgctccatccaccaccacagccatacccgctacctccactacaccagcttccactgctcctcctcccgctcccgcttcagctcctcctatccctccacctcgattctgggagcgcgatgagactgaggtacgaccccttgctgcggatcccagactttttgaccttcagcgtgctacagcggcacgggagtccttcttcagggcacagttgtctgcacagattgctctgcgagtggcaccggctttgatctccagctattctgattgccgccgtcagattcgccagctctttggatttcccgagtcgacgactcgacttcacagcctctgctacggcacctctgaccctcctcgtcgccctcacggcggtgtggctccgggtacagctcacgtcgcggctctgttctgcccgcccttctcagatgggtcgcgacgttcaccggtagattttactacagcggccaagtacttatttgagcttatcagacggactcttctgccgaggatgggatacagggaggctaccacacatatccaactctggctccttggtgccctggtctctcactctgagtttaacgtcgtggatttccttatttgtgagatcgaggataccgttttggatgacattcgtgctcgtcgacagttgccatatgctcactacttgtgccacatctttgcgcagctgattcggcctccactgtttcagggcatgcttgaggcctcacgccttgtttttggatcctaccgtcctgcgcctgaggctcctgtgccagcttctgctcctgtttttgactctcaggccgaggatgcagctcttcgtcagttcgacactcaggatacatcagttgatgatgatgatgatttttgggttcctcctccgcctcctatgcctccacgctcacatgatcatgaggatgggagttctagtgctacccctgctgcccctccggctattgaccctgctattgcttcgattctccagtctctcactcagcagcaggctcacctggcagccgagcagacctgccaaaggtcgccggcgctggggtccacgtcgccgcccgagaggtcgtcggcgaggcggtgcaggatgcgcgcgcgtcctctaggatccagacactccgcttcaactgaggatctcgacgcagtcggctcccaggagaaggagacgacaaagcaggagcttccgcccctatgggaggaggaagatccgagaggctgttctccatgccctagaagggcccgccacatggcccagtggaagaccgcccgcgacaaggtcgaggcgcgactctccatgctctcgtactcggccacgacagtcacctccaccaccgtcagctcctcctcgtccaccatcgtcggcgagcatgcggcgcccgacatcttcctgcgcctccgaaactccgagaccggggattattttcgtggcacatctgtgcaggggcattttgcagagcgcgatggaggtgggggctggcgaggctgggagctcctgttaggcttgggagtggtgatgtgcggacgaggttcagaactgggagcaacgatggaggcgagggcggggggccgagagctcctgctagggttgggagcggcgattctgcacgcccggcctccgtcgtatgcgccgtacgtgggaagcgtgaagagcgctcgaaaccgcgtggggttttaa

SEQ ID NO: 35687 - DNA, 1035 bp, Zea mays
  Peptide Sequence Number=SeqID_79062
atggacatgagccactacatccccgattggagcagcagcatgggagacaccttcgcgccactgggcggcgaggacgacgacgggctcatcgagctcatgtggcgcaacggccacgtggtcatgcaggcccaggcgccgcggaagccgccgagacccgacgacgacgaggcggcggcggcgcaggcgcaggcgtggttccagtacccggtggaggagagggccgacctcttctcggagctcttcggggaggcgcaggcggccgtcggcggcgcgcgcggggaggccgcgcgccagagtatccggatgatgccgccgccgccgccgccgccgaggcccgcgcaagcgccgcgggaggagaaggcgtgcccgggagacggcggcacggcgacggcgacggacggcgccggctcgtccgtgctcacggtcgtgtccagcctctgcgggagcaacggcaaccacgtgcaggcgacggcgccgggggacgtcgccagggcccgcgacgtgctgatggtgacctcgtcgtcgacgacgcgttccaggtcatgcaccaccaagagcgagcagccgggtcccgggcccggcgctgcccgccggagcggcaagaggaagcataacgacgccaccgatgccgaggacgtggggctggagtgcgagccggcgcagaggacgacgactgccaagcggcgccgcgccgcgcaagtccacaacctctcggagcggaggagacgggacaggatcaacgagaagatgaaggccctgcaggaactcataccccactgcaacaaagcggacaaggcgtcgatgctggacgaggcgatcgagtacctcaagtcgctgcagctccagctgcaggtggtgtggatgggcggcggcatcgcggcggcgggggtgcaccagcggacgatggtggccgcgcccgggcgtcctccccacgtgggcttccctgccggcgtcggcgcccgacctctatacgcgctacctcgccgtcgaccacctgccgccaccgcccttggtgccaccgccacgcacggttga

SEQ ID NO: 35688 - DNA, 570 bp, Zea mays
  Peptide Sequence Number=SeqID_79063
atgggcatcatcgagaaagtagagttgactcgtgtgagtctaccgaccatagacaaccaagaactaatgacgttgatccttctttcaactttggtcatgagagatttagatgatgatgatctagggattcctcctccaccacctcttgtgccacctcactcgcatgatcacgaggcaggtggttctagtgttgtttctcccgctgcacctccagcgattgatatagccctgacatctattcttcaatccttgactcaacggcattttgacttggcaattgagaagactcgtcaggtcgttggagttgtgagtgtccagtcaccagtgccattagtttctgtagtgtctactctagcagtggcagtggaagtctcagtaccagctacagcaccagcatctcaggctctgcagtctgatccttatagtgtaccatcatctaagtcaacaccagctctagcctctacaacagatcctagattcgagactaactctgatactgttctggactttgcactgactgctcgccctcaccctgatgtgtctgcccctccttcttgttctggtctctag

SEQ ID NO: 35689 - DNA, 618 bp, Zea mays
  Peptide Sequence Number=SeqID_79064
atggacctggagcgcggcgacaagaagccgccgccgcccgctccacggaccgctgctacgaccactacgacgacgacgacgtcggcctgcagcggtaagaagcggccgccgctcagggacagcctcgtggcgctgcagccggtgctgctgcgcgcggcggcggccctggccgcggccgccgccgccgcggtgatggcgctcgacgcccagtcctacaccgcggtggtcgccatcgtcggcacccgcccgctcacgcagaccttcaccgccaggttcagcgacacgccggcgttcgtgtacttcgtcatagccaacgccatcgctgccgcgtacaacctcctggtgctgctcgtccggcggcggaggactacggcgagcttggtcgtgcgcatgcttgacatggtggtcatggcgctgctggcgaccggcgccgcggcggcggcgtcaatggccgagctaggaaggaacggcaacgcgcgggcgcggtggaacccgatgtgcgacaggttcggctccttctgccgccgcggcggcgccgcgctggcgtcgtcgttcgtcggcgtcgcgctcatgctggcgctcaacctgctctcagccgcgtccggtgccgggtgctag

SEQ ID NO: 35690 - DNA, 114 bp, Zea mays
  Peptide Sequence Number=SeqID_79065
atggacggctgcaatggacaagagcagactcaagaagaacttgttgttgctgtcctctttgaagcgcactatgactcggataaggttaaggattttgtggctcaaagatggtga

SEQ ID NO: 35691 - DNA, 1309 bp, Zea mays
  Peptide Sequence Number=SeqID_79066
atgtcaattctgaagcaacttttgcagactttacagccaactgaaaattttgatgatgttctttccgagttccaaccatctcttgctccttgcaatgttgattacctgtattgtggagcatgtaaaatattggaggatattatggatctagacaaatctggggaaccaaatgggaaaaatatacacatgggatgctccaaagcaatcattccctttctacgaaagcgtcttggatactcagctcataagctgctcagtgccgatttccctagcgaagatgctggaaaaggatggcagagtaaaggtgatcttatacagaagatattgcaaatatacctctggaatagtgactctacttcagatctacttgctgagataggtcgtgaattgcctaagcacgaggagaacacagggagtttaaacaagacgatcaaacaagcactgaaggctagaggatcagttgatactattcttcaagagattcagaaatcagtggatgcatttgtctctctaataggaatgtgcaagtcccacgaaaaggtttctatgcatgcaatggcagttaaacatggggggaaatttattgacacatttctgaaagccttcaactttctagagagacatttcaagcaacataatgacaccatagttaaaatggtcaaggcgctgctacacagctgctccgccgagaaggaattccagatgggtaaattattatgcaatctcatccacggtttcttcagcaccgtgcgtagtagtcatgcacaaactgcaagttggcatgtcaacctagacctgagtggttacgcgtatgggaacgtggatgaggaagatgaggagcagacggagatcgactccgaccttccagctgatgagcacgataatggcaatgccatggaggaggatgttgtggaaggaacatctctggttatctggagttggcggtggccttttcattcatggttgcctgcactcatcctcggagggttgcagcaatgtcggtctccagccgaatcaaacgaagatgacgagcggcgggaggatgatggaaaggaggatctccaggaaggtgcagcagcgaccatcgtcatcaggatctccaggaaagtgcaacagcggttgtccaccatcgggatccttgtggtcggggccctgccatggggatcagaccgcatgcaggcgcacagatcagagggccagcacgcgaggacgatgcgggatgcaggttctgggagcccagatccgtgggagaggcagcgggctggtgatgggaggatgaggcggctagcggggtcagtggcaatgagag

SEQ ID NO: 35692 - DNA, 243 bp, Zea mays
  Peptide Sequence Number=SeqID_79067
atgggagaggagagcataaatggtgcttccagcaaaagacagaagggttgcaagggcaaagtctcagaaaaagtgaatcctgatgataaactcaagcaacctacaatactggatgctttcaaaagagcaggagtaacagtcagtcatgcagcaaataaagcttcttcacaaccatcatcaagtgaaatgatgtcaaaggatattgaacaagatgctactgatcctgtgttgaaagtcgcctag

SEQ ID NO: 35693 - DNA, 510 bp, Zea mays
  Peptide Sequence Number=SeqID_79068
atggataagggaggtggaggcatcagggagggaggggctccaagtgaaggttgggagattttaggtaggaagaagagtgtgccttatgtgcttgggaaggctggtgaaagggggaaaggtacaacgccgaaggatgacgagcgccgccatttttctgaggtacaagttgtacccggcggcggccatcgcgttggggtctcccacgctggcgaacctagcgagacctccttcgcccacccgacggctcccaagcgagctctcgaatctcttgtggcctccatggccagagcatcatggtggggaataggagagcagggatggaggcggggagtggcggggctgcgagttcttggccagggttgggagcagccgaagaccggtggacgcgaccgaggttcaaaagcgagttggagaaagtcctcgggtccgaaacacagcgcacgcgtcggcgcgctcgcgccaccgtacgcgggaagcacagagagggcttcaaaacgggtcaggttttaa

SEQ ID NO: 35694 - DNA, 471 bp, Zea mays
  Peptide Sequence Number=SeqID_79069
atgccggacgccgccagggcggctcccgagctaggccttgggtttggggtcgggattggagccaaagccgccggaaccggaaggggtgaggaggacaagaggggaagcaagacggcgggggctcgtcagcttgtgcgaggagcgcgtgcgcctgctgcaggaccagttcgctgtctccgtcaaccacgtccacgcccctcgccatcctcgtcgccaccttttccactacgagaagcacccgcccgcgctcgaccagctccgcgcctccctccatccctcgccgagacgcgcgcgggaggcagttgcgcgggcgtgcgggagcggggctttcgctggcgcgcgggcgttgcgggcgcggcggtttcgctggcgcgcgggcgtgcgggagcgggagcgtgggggagcaggggcgggggctggacggcagctattgcgcaggggtttgcggcgtgctgccgtgcggtgcggtag

SEQ ID NO: 35695 - DNA, 2571 bp, Zea mays
  Peptide Sequence Number=SeqID_79070
atggggtgtctgggtgtggacatgggtctcggccttttgcgcctcactccactcgcccaccccaccctacccccgcgccatcgccggatagtagagcagcagttcgtgcgtgtggcctcgaagcgtagacagagcagaaacgcgcactgggggtgctggtgggtgggggccatctataaaggccgcgcgcgcgcgctgatgagtagtggagccatcacggcatcacccatcagcccatcaccacctcaaccgacagctcgtcactctcctactcccgtcccacctcccatcatccgcgagccccgccaggccccagctgcagcagcggctatggcgtcgtctccgcccgacgtggacctgggcaagctgagctacgagatcttctccctactcgagagcaagttcctcttcggcggcggctccgtgccgggcacgccagcgcgggcggcggctccgggccccggggaggaccgcggcagggtgcgggtgctggcgatcgacgggtgcgggccgggccccggcgacgcgctgctggcggcggccgcgctcgcgaggctggaggcggcgctgcgggcgcgcgcgggggaccccgggcgcgcgcgtggccgacttcttcgacgcggcggcgggggccggcgccggcgggcgtgctgggccgcgatgctgtttcgtgcggggcgacgacgggcggggcgcggtacacgggcggcggacgcgctggcgtttcgtggcgggccagcctcgggagaggcggcgggtgggggcagcggcggcggcgggggcgtacggggcaagtgggccgcgctgttccggcgcggggggaggcggggtgcgccctcgccgccgctgcggcgggtgttcggggacgccacgctcagggacaccgtggcgccgctgctggtgccctgctacgacctggccacggccgcgcccttcctcttctcccgcgccgacgccgtcgggagcggcagcctcgacttccgcctccgcgacgtgtgcgccgccacctgcgccgccgccgggggcgccgcgcccgccgtgcggtccgtggacggccgcacggccatcgccgccgcgtccggcggcgtcgccgccatgggcaaccccgccgcggccgccatcacgcacgtgctccacaacaagcgggagttcccgctcgccgccggcgtcgacgacctcctcgtcgtgtccatcggctcgggatcgtccttcgcctccgccgccgccgcttctgctccttccaccggctggcggacgcccgtcccgccgcgctcgccgtcgcccgccgagatggtccgcctcacctccgagggtgtcgccgacatggtcgaccaagcagtggccatggcgttcgggcacacgtgcgggcgcaactacgttcgcatccaggcgtcgtgcgtcgggacggcgctgaggtcgctggacgcgaagaaggcggtggccttggcggacggcatgctggcgcagcggaacgtggaggcggagctgttccgggggcggcggctgtcggccaagtcgaaccgggagaagctggacgcgttcgcggcggagctggtgaaggagcaggagcggcgggaccgccaccgtgccgttcccggcatcgcagggctcgtaccagccctagccccagccattggcgatcgagtggatccgaggacgagctggtcaaagaatataattcgtgttaaggcatttcacaaccacaccccagataaccttagcaaccgagcatctaaagaaaaggcgtccacaatccgtgttctaccatcgcgcccagccccgcatgcagccgccccgcaatctccgccgccgagcacagccgccccgcagtcctgtaattccgccgcccgcattcaccgcgccatcgcgcccgcagtcccatccccgcgcccgcagttcctggtccaccccgcagtccatgccgccgagcacagcttcccatcgcgcccgcagtcccctccccgcgcccgcagttcccgccccgccccgcagtccacgccaccgagcacagcttcccatcccgtcccgcagtccccgccgcctccccgtgcccgcagttcccgccccgtgcaacgcctctgcgcccggaatggagtacctccgccgtcaatggaactgcgggacgggatggagcagcgagcaccaaatctccaccctgcgccaccaaatctccgtcgctccgccgtcaatggaaggcagcgacggcgtcacgggcgtggcatcgaacgcggacgcggtggcgatgtggatggtgtcctgcagggcgccgtgcggctggtgctcaagtccacaggcgacaccacgcctccgtcctcggtgtcctccacaacacccccaacatcccgacggctgggcggcacgggacgcgcgctcctcacggtctccaacatcctgttgggtcgccaccgcctctgctgcaggaaatccctgctcagcacctgctccacctcgaactggaagtcgtgcacgagcacgtcggtggggcccttggccgcggtggcgccggagcgcgccagcacggcggcggtgaagatggatggctattattcgttggttgatgatgcagagtaa

SEQ ID NO: 35696 - DNA, 186 bp, Zea mays
  Peptide Sequence Number=SeqID_79071
atgaagtggtcaataatgcttgaagaaacaccagtagctgcccatttctacggtacattgaaaaagggcaatatagaaacaccagtggctgcccatttctacgatactttgaaaaagggcaacatattgggaaacattgttgatctcaacaattggaatttagtatggttcgtggggcagttttaa

SEQ ID NO: 35697 - DNA, 2616 bp, Zea mays
  Peptide Sequence Number=SeqID_79072
atgatcaccggcggccagagctacgtctcggcgccgccggccttctcggccgacgggcgcctcctcctcgtctgctccggtcgcgccgtctccgtcttcagcaccgccaccgccatgctagtgtcggagctggaggggcacgagggggacgtcaccgccgtggtggtggtggcgccgccagcgcaggcgaccgcggcggccaagcttgcgagctactgctggacggcggggctcgacggggtgctcatctactgggacttcttggccgcggaggtgatgcggaaggtccaggttgggctccccgtccactccatggtggttcctgacatatataggacctcaaaaggagttgaggtgtcgagcccctttgcattcatctctgtggaggatacgagtaagctggcaagtgaaccaaaagcgctgtgtgggcagatgagagtttatgacctgacaaaggggcgccaagtgggtggcctcctggccgagacacgtaaaccagaaaagatcgttgcaagtagttctggagaattcttgggcattacaaataaaagaaagctccatatatggcgcataccaacaaaagatttcaagcctgacaagataaggaagataaagctccggcacaccaaacacttgaccactctggcattccatccaactgagagaactgtggctggtggtgatgtaacagggcggatcctgatttggagatgttttggaaactcaaagttctctgaaagtagtgtacagtcgaaagaggatgacggaagggatggtgttaggggggatgatgatgcagacacttgcacaacatggcattggcactcaagcagttctttccctggaagacctgtacttctcaatgacaattttttctatgttaggtggtttggagggagttattgttgtgtggcaactagatactggaaagagaaggtgtcatgtacaaataaccaagtctatcttctaaaaatgcctaatatggaggtcatgagatctattgctggaatcaagctgccaattgcttcaccaaacttgggcggatctaatcgggctgtgtatggatttgattatactaatagacttgttgctataccaactgaagattactgcatacagttctacaatttgtttgagaacgctgaggtttcagaggtgcaagtgtgtgagaggaatttccagcctattgatgatatcactatgtacatttccatggtttcattgtcaatcgatggcgatttgatgtgcaccgtggatgtcaaacttcctgaagaaggtttaggtggtcttgttacattgaagttttggaatcatgggtcaagagctggacattattttttgtccaccgtcatttatgagcctcacagtgatgatggggtttcttctgttgcattccgcccaggaagaaatatggccgttagctcttcttttggtggtaactttaaggtttgggtccagagtttgtcttcacaatcaaatgatgaaagaaattgttctggttggagatgccaatcagttggctcatacaagaagaaacctatgacatcagcagccttctcagccgatggatctgttcttgcagttgcagctgagagtaccatcacattgtgggatcctgataataatgcgcttgttggtgtcattgcagaaacactatcgccagtgacaaatctttctttcgttgggacatcagtgtttttgatgtctctatgtcagagttcaagaccacagattgctctatggaatgtttcaaatctttccatgcagtggtcttacagcatttatgcagaagctgcatgctgttcgccagatgggagtgaatttgcagttcttgctcttcttagttgtcctgatggagaagcatcaacacaacaagatggagtaattcttctttttgatgcagaaagctcaaaccccattgcctcctggtcggtaaagaaggcatcgggtggcagcatttcttttgtaaaaggtgacgtccctttggatgcaaatgctgatagttcgagagacaaagagccaatgttgcttgtttatgtaaatggttctcatgaatacgccatctttgatccccgggagagtgaggaggtggtcattagcaagaacaagcacaagaagattcaagctgaggaacctgcaccaatcggctacgcttctatttacggagagcttacaaaactggagccaaagaaagaagtttcagatgttccattcgtcccttcggacaggccttgggaaaccatattcagcgggtcgtctcatgttctcccgcctctcacaaaactatgctctgcattcttgtcatcgctgctggagaaacggcctgttgcaaacgaaaagctcacgcttggatatctgaagttgataagctttgttactgggatccctgaatattggtatgggtttgggtcaatttatgtacccacgggtttgttaatgggttcaaatggaaacccaacggtgggtatgggaaacccgttgggtacccgaaacccgcatgggtttgggtttgggcaaaattttatacccgtcatgggtattgggtttttagcgggcgtattttttattcgcgggtatgggtttgggcaatttaccgtcgcattagagcaaggctaa

SEQ ID NO: 35698 - DNA, 420 bp, Zea mays
  Peptide Sequence Number=SeqID_79073
atggctggaaggtaccaactcccacggagttgcgttcctccgacgatgaggcggaaagacggcgggtatcccccatccgggggcttggaaggtggaaagacgcgatgcataagggagagcgaagacatgggaccgggaaagggggataccccgaaaaggatccttccccgcgaaggaaccgggctccgagcctccctacttatcagaggttcgaaggctggccccccggaagggttcgacagccgcctcagatcgcgtgggccctacacccactactggtcagaggttcgaaggccggcccctcggaagggttccacggccgcctcaggctactcgggctccgcgcccattactgatcaagggttcgaaggctggcccccgaagggttcacagccgcctcagacgccgagcgagggatga

SEQ ID NO: 35699 - DNA, 252 bp, Zea mays
  Peptide Sequence Number=SeqID_79074
atggcgcctcctgttgacgtggctggcctgcgccctaggttgggcgatgtggaggctcctccgaagccgaggtcgagtctgtcttccgtggccgaggccgagtctgagcccctgggtcgggcgaggcggaggtcgtcggctgaggccagggcggagtccgagccctggggtcgggcgaagcggagccggtcagtggagcggcgaagtgacggcggtcacttcggctctgccggggagcgcgcgtcaggataa

SEQ ID NO: 35700 - DNA, 105 bp, Zea mays
  Peptide Sequence Number=SeqID_79075
atggagaagcattttgtgttcgtttattttctttatcccttattggtaccgcttttgcatgatgaattaaagagacgtgcttattgtacaatcggccataaatga

SEQ ID NO: 35701 - DNA, 405 bp, Zea mays
  Peptide Sequence Number=SeqID_79076
atggcaagagaagctggagcagctagcttacctgcggcaggaggaggaggcaatggccgggtggggcttggacgcttggaggaggggcaagctgaggcgaatggcaagactcgagagattgttggggagagacgatcagacgtgagtcgacagacgagtgggggtgtcgtgtgccgcggaccgcggtaccggtgcataagttcatctacaactattctaaagtcgactgtccggaataccgtagattattctggacaggagaagctttttggaaaatcacataagcgcggaccgtctgggcccttgcggcggaccgtccgcgaaactagggggcggactgtccggaccaggggcgcggaccgtccgcggtcggtagaaaaggagcaacggctaggaagtggttga

SEQ ID NO: 35702 - DNA, 2004 bp, Zea mays
  Peptide Sequence Number=SeqID_79077
atgttactcactgtaagtgattgggtgagctccaatttctcttgttctccattcagcgaggagaagaaaaaagaagaaccagagacacccaggtatcgtgatcgtgctaaggagcggcgtgaagatcaaaaccctgattatgaacctacagaacttggttcgtttcatgcagtggcacctcctgggagtgatttgaggttggcggatgcccacaagatttcaattgagaaaagcaaatatcttggaggacagggtccttttcagacagggataacacgatgtggtgtttgccaggattatattgcttggaacaatgttactattctttctcacctgctattgctagcgcaagcagttcctcacctcactgtgcattacctatcaaactggagcatgggcaaggccacaaggcaacacttggccattggctaccaaactgacttgatcatggaatatgcagtccatgtaattttgtgttcattgatttcgcagaaatcccctgttgatgagcaactggtggtcctattgtactgcttatttataggtgatttggagcatacacatctggtcaagggcctgggctatgctctacttcacaaagtacggagtgaaattgaaaagaaacctgaggcagaggatgggaaggatgcaaagtcaagggcaacaaaagaagatcaggcagtctccttccgcactgcaactgcaaagtctgtctaccagtggatcataaagcctcaaagcataattaaagagaatgaattgtttcttcctggtcggatgtcatttatttacaacttggaggaggtagtaaccaatgacattccaacaactcttcataggagcaaagctgattgcccagttcaagaggagatggtaactgtaagtgtggatggttctgtacttgacaggattgctaaaattatgacgtaccttcggcttggatcatcagggaaggttttgaagaaaaagaaaaaggagagagatataaaagggaagaacaatttggcaagtggcgactgtgatgagtcagtaaaaccttccaaaattaatggttctactcagaaacatcaatcagatatgccaccaccaccagctcgaccccctcagaacaataatttcactggaaaggagaaacaaccagtccctgttgcaagagcagacgatgatgacatttttgttggagatggagttgactatacagttcctaacgaggaaatgagtcagagccctgtttctgatatggatgaatccccacataaccatcagaagcagtccaatttcattgaacccatgtatggccctgtaccaccatctgaacctgctcaagcttggcaacagccgaatgggtatgatgctgttcaagcccagatggcagctgctggatatcaaggtgactggtcaagctatgtgtatgcagaacagcagttgggttatccagagcagtacgtgcagcaaagcacacaggaatatgatgtgttagctgaccccagtatatcacaggatccgaggttcatgactcaggcagacaaggatcggggtttaggttctgttttcaaacgtgacgatcaaaggcttaatcagctgagggaaaaggacgaacgggagagagatccaaattttatttcagatagttactcagagtgttatcctggttaccaggagtataataatgagatcgcaggaagcgatgatgaagatgatttatcgaagatggatatgggtggacgggcgaagggccgtcttcacaggtgggacttcgagactgaagaggagtgggccaagtacaacgatcagaaagaagccatgccgaaggctgccttccagttcggggtgaagatgcaggacggcaggaaaaccaggaagcagaacaaggaccagaagctgacgaatgacctccacaagatcaacaagattctggctaggaagaagggcgagaaagatggggcggaagatggcggtcactacgatgatgatttacctagctcaaagaaacagcgtggctga

SEQ ID NO: 35703 - DNA, 645 bp, Zea mays
  Peptide Sequence Number=SeqID_79078
atgactctgggtacgtccgatacatggccgaggctcgggctacgctcccgaggtaccctaggacatttccgagaccagcaggagcgattctgtaacggaatcccatcggagggaggcatcaagcccttggaccctatcgaacgggaccgggtccggcaaatcacctgcagtcggcagggccgaagtgaccgcagtcacttcgcccctccactgactgacctgacaggaaaacagcgccgcctgccctgctccgactattgtgccacccgccagagtgaggctgacagcagccgagtccagcctcaggcgccacaggaagctccgcctcgcccgaccctagggctcggcccccgcctcggcctcggaaggtggtctccgcctcgcccgaccccagggctcgacctcaacctcgacctcggaaggcgatctccgcctcgcccgaccccagggctcgggctcaacctcgacctcgggcggaatcgcgtccttgcccaaccccggcctcggcctcaggaggagtctccgcctcgcccgaccttgggctcggaccgaccacgccgcagggggtacatcattgacctacccctagctagctcaggctacgggggaacaaggccggcgtcccatctaggctcgcctcgttga

SEQ ID NO: 35704 - DNA, 888 bp, Zea mays
  Peptide Sequence Number=SeqID_79079
atgatcgaggtggtgctcaacgaccgcctggggaagaaggtgcgggtcaagtgcaacgaggacgacaccatcggcgacctcaagaagctggtggcggcgcagacggggacgcgccccgagaagatccgcatccagaagtggtacaacatctacaaggaccacatcaccctcaaggactacgaggttggtctgaattctgaagtcatgggtgcaattcgcttcgcgatgcagggcgtcactgtgcagtccccctccacttcttcgcgcggaagaatccgcccgcggcaccgaccggaagcttcgcggtcgtcttctctcctgttcgaggcgcctgcgtttcggcgattcgcgacgaggcgacggcgattcgggcgcgctagcgtgcctgtccccgtcggagctgtggacgacgaagtggaggtggtcagcaaggtgctccggtcaagaccgaagacgaagcgggcgcaaatccggctccatccagcacagttccgaatggcatcctcgaaagaagataccatgaagtctttggttaaagtacttgtcgactgtgccgaggatgccacaaaatcccttcgtggattagtagatcatgcattagaccacatgcatgacgaagagatattagctagaaccctctttgccatgaaagaaaaacttgatttgcttcaccaagatgccttagaggcaaaagtccaagcttttcctgaaattgctaagtacgagggggatgacataagtgttcaaccgacatctccttccacccctccaacagttactgaaccatctgtcgacgaagaggagttctactgcccggatgtgagtgacgagtggtacttcagcgactcagataggtcaactcgtaatagctattggaatatttattag

SEQ ID NO: 35705 - DNA, 1581 bp, Zea mays
  Peptide Sequence Number=SeqID_79080
atggctccccttgcaaacgatgaagatcacaaaatttacggagagggttgtggtagccacttcctcgtggtggcgtacagcatccaaggccatgtcaaccctgcacgcacgctcgcccatcgccttgctcagaccagcggctgcacggccaccctctcggtcccgctctcctgccaccgccgcatgttcccctcttcttccgacgacgacggcgaggccaccaccatcatcagcgacgggctcatctcctacctccccttctccgacggcaaagacgacgggagctggcccgtggactcggaagaccgggcgcggcgccgtgacgcgaacttcagaaccctgtccgccgtcgtgagccgcctcgcgtccggcggcagccggccgccggtgacctgcgtggtgtgcaccctgagcatgccgatggtgcgcgaggtcgcccgcgcgcacggcctcccgctggccgtctactggatccagccagcgaccgttctcgccacgtactaccactacttccacgggcacgacgcgctcctccgcctcctcggcctcgacgacggcggcggccgcggccacggccagcatgaggtcactctcccgggcctgcaccgccctcttagggcccgtgacatgccgacctttctcagcgaggagaagtcgcaggacggcctgtccaagatggtcctccaatcactgcgcgagctgtttcagaagatggaccaggagcaggaggagaataagccggtggttctggtgaacacgttcggggagctggaagacgtcgcgctcagagcagtccacccatacatggacgtcttcgccgtcgggccggcggttcctgttcctggtgttcttggtggtagtcgtcatcagggcgagatgaacagtgcgagcgagctagcacagatccatctcgtcccgcacgacgacgagacgaagaaggcgtacatggagtggctcgacgcgcagccggagaagtccgtcgtgtacctctcgttcggaagcttgctggggtacacgaagcgacaggcagaggaggtcttacatgggctccaagccagcgggcgaccctacctgtgggtggtgcgcaaggagggccgtgccgaggaggtggacctctggctgacggaggtggaggaggagaagaaggacatcagcaaggggatggtggtggcgtggtgcgaccagcagcgggtgctggcgcacccgtccgtggggtgctttgtgacgcattgcgggtggaactcgacgctggaggccgtggtctgcggcgtgcccatggtggccgtgccgagctggtcggaccagccggtgaatgcgtggctggtggaggaggagtggggggtgggcgtcagggcggagcgggacggggaaggggtgctgacgaggggagagctcgcgcggtgcgtggagctgctgatgggtggcggtgacagggcggtgcaggtgagggcgaatgcgagtgggctgaaggagagagctcgacgggccgtggctgcagctgggccgttggaagcatgtctcgagagctttgttgaaaccatgcaaggtctaggccgatcaggaaaacagatagcattttag

SEQ ID NO: 35706 - DNA, 153 bp, Zea mays
  Peptide Sequence Number=SeqID_79081
atggaggcgagcccggtggagggcagcgcttgcggctgcgtcgagggaagaatagggtggcgacaagtggaggaagaaggcggggcaaggtggcggtgccaccggcgacagtgtgaccggtctgcgtgcgacggtgccagtttaaggatgtaa

SEQ ID NO: 35707 - DNA, 195 bp, Zea mays
  Peptide Sequence Number=SeqID_79082
atgccgcctaaggaatggctccgcccgattcctggcccaaaccggagcaaaataaagttgctccagtgggtgggtttatgtagatgggagtaccaccgtgacttgggagctaacttggataatgatctcttagttctcaaggctgtaaattaccttttcctgcaccaagctgtgaagttgtttcctctcagatga

SEQ ID NO: 35708 - DNA, 1275 bp, Zea mays
  Peptide Sequence Number=SeqID_79083
atggcggattggaatcgaccgtgggacgtgaatgcacattgtgatcgctccggcagcgaccggcggcctcctctgcctcggcctgatagcagtacggacgagctcccctcttactccattgcgatgctaccaattcgtggagacaattactacccagtcccattatgggaaagaaaattctgccgcaacgcttacggcatcccttggaagaagttctgcgaaaagaagcaatttattgaattatacaaaaacgtcatggactgggacgattcaggagctttggaaaattttgaggctgcaaaggagaggttcagggcaaagtatcatggggaacctttcgaggatcctttgctagaccctgatatgtacatcgacgagatcgaccacctatgcgaagtcgacccagagttggtagctgacctggataaggtacctgacgtggataaggtacttgagcaacaattggtagccaacttgggttgtgaagagccggttgctgatctggtacccatgggtcacggagaactgggtgccattccgacacccacaggttggggagaagaggatgccattccgacacccacaggttggggagaagaggatgccaatctggcacccgtaggttggggagaaccggttgccaatgtggcagccattggatggggagaatcggccagcctgacacctgatactgcttgggagggccgcaactctggatggaactctcctctggatcagccgcaatgcacaccaagcaactggaacgataactcctatggcgatagatcatccaacaattggtaccagcaggaagtggatccgagccacatgccatttgggactagaaggaatttgaatggcggcggccgcggcagtagttgcaggaactcgaacggtggcgttggcaacaggaacaataacctctatggaggtagatcatccaacactcggtaccaacaggaggtggatccgggccgcaactcatctgggactagaaggaagctgaatggcggtagtggcaacagaaacaataacttctatggaggtggatcatccaacaataggtaccaacaggaggtggatccgggccgcatgtctcctggggctgggaggaagcagaatggcggtggccgtggctgcggccgcagtggcagtaagtggaatggtggtggtggcagcggctggcagcagggccagagaggaagaaggaccagggagatggagtggcgtccggtgcagcacaagagggatccccaagatgaccctgccgcttga

SEQ ID NO: 35709 - DNA, 687 bp, Zea mays
  Peptide Sequence Number=SeqID_79084
atgccgcgcacgaagaatgtgtcggcgccagggggaggcgatgatgaggattctcgtcgccccttcaggcaggtcaagggcaagaccatatacttagagcagcaggaaggccgcaagaagcggcgtatggacagagcagcccgagcagcggcagcagcagcagcagccactgagcaggtcgagctaggagatcagcctcagactccttcagatcagattgcgtaccgtgttcgtcgtctcgcctcccagcctcgctcctccactaccaccactgcttcagcttccactccaccacccactttgcctgttcctgtcacccctgttgcgccatccaccacctccactacaccagcttccactgctcctcctcccgctcctgtttccgctcctcctatcccacctgctcgcttccgggagcgcgatgagactgaggtgcgacctctggctgcagatcccaggttgtttgaccttcagcgtgctacagcggcacaggtacgtaggttcagatacgtacccatggagtcttggttaccggctcagagggaccctgctgcagttgacctcttcagcaccaggattcaagaatccttctttagggcacagatgtctgcacagaattgctctgtgagtgcaccggactttggaacttcaaggttttctgctaagccagccagatgctactcctga

SEQ ID NO: 35710 - DNA, 393 bp, Zea mays
  Peptide Sequence Number=SeqID_79085
atgccgtcagtgcagagccgcattacgcaccagttcagcctgcccaagacgtcgtctgaaatggcaagtattgagaaattcctccagttccaggacgacgtgccttgtaagatccgtgccaagcggggatgcgccacccatctgcgcaacatcgccgagagggtgaggagaacaaagatcagtgagcgaatccgaaagctgcaagaactcgttccgaacatggacaagcaaaccaacacatctgacatgctagatttggctgtcgactacatcaaggatctccagaggcaggttaagaactcgaaagcatcttcacttgggatagaaaaagattatgaatcaccagaagtgctggcaaatgaatgccccggtcctgatgaggatgaccattga

SEQ ID NO: 35711 - DNA, 699 bp, Zea mays
  Peptide Sequence Number=SeqID_79086
atggcgctcgtgccgtgcgcactgccgagactctatggatgtcttggacatcttgatgtaatcaagtacctttccgctatttatttcgagcattgtgtgatgatgtccaattatgtaatcgctaagtgcatggcccatatcaggtgcactgcacgtaagtctgtgatccgctttttgccttctcgcctggtggagcgtccactgcgtcgtacggtgccaggtcagtccagtcaactggagagattgcatcgtcgcctgcacgaggagcaggagtgccgacgccaggagcaggagcagcaggactcttccccctcgcctcagcaggaggtggagtctgagaggccgccttcccctgcacctcagccagagatgccccctgcaccaccacaaggcatcccggctgctggaggagaccctgacggagacggagacgacgacgatgctggtggtagttcgtgccacggcacggagctctcggagaagccagagctggagggatggatcgctagacccatcactcgtgacgccgctcgcaggtgtcacttccatgacgctcttgataccctgttgcatcgggccttcgaccgacacacttggtccatcgagtactgttgtgtagtctaccagcatcgtcgcgggctatacccggaccagtgggaggctacttgcttggtgcgccatccggacgatgatctctag

SEQ ID NO: 35712 - DNA, 48 bp, Zea mays
  Peptide Sequence Number=SeqID_79087
atggccgccgccgcgccagtactgtgtgctgccagggccgagtgccag

SEQ ID NO: 35713 - DNA, 936 bp, Zea mays
  Peptide Sequence Number=SeqID_79088
atgagaacggacacttctgccgcggatgggatattagggaggctaccacacatatccagctctggcttcttggtgcccaggtctctcactctgagtttgacgttgtgggatttccttatttgtgagatcgaggacaccgttttggatggcatgcgtgctcgtcgacagctgccatatgctcactacctgtgtcacatatttgcgcagctgattcggcctccacagttccagggcacacttgaggcctcacacctcgtctttgggtcctaccgtccagcgcctgaggatcctgtgccagcttctgctccagtttttgacactcaggccgaggatggtgctcttcatcagttcaaagctcatgatgcagcagttgatgatgatgatgatgatgatgatgatgatgatgatgatgatgattttgggattccacctccgcatccgcctcctatgcctccacgctcacatgatcatgaggccgggagttctagtgctacccctgctgcccctccggctattgaccctgctattgcttcaattctccagtctctcactcagcagcaggctcacttggcagccgagcagacccggttatccgagaggatgctctcgatgtttcagaccatacaggacaggcaggattctcttcagcagcagcttcttcaggatcgggctgagagcagggcattcatggctcttatgctacaacattctggtgtctcgattcccccggttcagtctgctccacctcctccgcttcaggctcttgttgtgccagcgattcagtcaggacccctcttccttctgttggtccttcttcctcttcgctccggccggtcaccctggctttcacgtcaccggttctcagctccgtctgccctcatccgccagtgccaccagcttctgctgtcaccactactgctgtggcagtgtctatga

SEQ ID NO: 35714 - DNA, 1185 bp, Zea mays
  Peptide Sequence Number=SeqID_79089
atgaccaaggatcgccaggaagctgcacagaagcgtcggggcggtcatcagggcttcccgaggctaggcggaagaggggcgcgggggactgagaaggctaccgcccccggcggtagcccagccgacgctggcggcgaagtcggccgcccctgggtccagcaaggatcaggcgaggggcaactcgttgttgttccgcctgcggtggcgaccacggtgtctgccgcggtgcctggggtgaagggtagcgctctcagcgctggcagtgagatttcggcggtcactgccatcaaggacgaagcgggcactgtgtcccgccggctgagggaggcgtcgcagcggctgagtcaagcggccgacttcgccgaccgcctggcgtcgggggcccttactgcagatgtgtctgccgaagtcgagagacttcgggcgcagcatgctgacgccgtccgggaaaagtcggccgcggatagcaagtgccgcaagctggcggagaaggtggccgccctggagggcgagaggacggacctctggcgccagctggtggaggagaggagggaggctaaccaggccatcgccaaggcgcaagcgacgcaggcggaggccaatttggcgcgggtggagggtagtctcgccagccagcgcgccgaggaatgggaggtacagttcagcgctctgcaggcccgcgtggagagggccgaggcctctatgtgctcggaagttgagcggacgcgcaaacagctcgtggactcataccgcgagctgggcgcgcggactgctgacttcgaagtgcccgaccgagaggcgggccttcgcttcctcgagtggctgcaagaggaattgttggcgctcccgaccattgtggagggatttatgtcctttgccgccctcgtcacctgcgaaggggcgatgaacatgctgtcccgcgaggggtgcagtcactatgaggtcttcgacctatctgatgaagattttgggcgcgaggtttttaaggtcgaagaccctgtggtgaaggactccgtgggggccctcttcgaccagatgtggggccctcacggtcgggaggtggttagggagcggtccgaccgggccagggatcaggcggtgcgtgccgaggacgtggaggacttcggacccctgaacagcgtgcggcccgaagcggaggccaacccggtggtgcccgagggctga

SEQ ID NO: 35715 - DNA, 450 bp, Zea mays
  Peptide Sequence Number=SeqID_79090
atgtggagaattaggtcacggaagagaaagcctcgcatgaatacaacaaaatatggggagaatgccaaggtccccaaaagccgacaaagatcggaaaatgatgctgatgctgctgtccatgttgacaaaactattttcccccaagttgaaggtgttgtccatgatggagttgtttttccccaagttgaagctgatatccatgttgaaggtggtgtttttccccaagttgaagctgatgtccatgatgcagaagctgttattccccatgttgaaggtgttgtccatgttgaaggtggtgtttgtccccaagttgaacctgctgtccatgaagtaggagttgttgttcccctcgttgaaggtgttgtccaagttcagtcacctcccaagtctagaactcctaagaagatcctatcgaagaagctcacaccaaggaagctgaagaggatgtaa

SEQ ID NO: 35716 - DNA, 1254 bp, Zea mays
  Peptide Sequence Number=SeqID_79091
atggtcttcgactgtgccttcggcaacgtagaaccaaaattcccaccagttgccccatttattgcgggcgcaggaaaccaactcaacgacttccatcgaagtcttgccggtcttcggcgtaaatgtgcaagaaccaaattgagcaatcttatttccgattttccttttctgccaatgcagacaataatacttcgtgaagacttcgaccgagggctacccgccgtacgaaatcgttgcccagacatattttgccagggccaccacggcattcggcgtcagctggtggacctggacgtcgaatttacgcagaacttctcccacaaatcgatgcgcaggcagacgaagtccagcggcgaaaaaagcctcgaagacgaccaacttgccttccggctcggggacctcctctgtccccgggacacgtgccactccgccgccgaaacacccaagctgttgccatgtcttgcacacggccccgaggacatccgcgacacgccgaactccactgtgtcacccgagcgcaactcctacgccggtcacattgctcagcgtctcctcggacgacgcgccggccggcggcgtatcggcaacagaagaagaagaggacggcatcgctacgtaccgtcggcggcggcgggcggtttgcttcacacgggccagatctccaacgagcaagagcaaggagggcagacgagcagcgggcggtttgagaaggaagttagggtttttgcggagcgcggaaaagataaagttcaaaacgtgccgccccccgccccccttttatacacagggcgcggcacttcgggaaacccgcaatccaatagtacggcgtcaatcaacggtcatgtcaaaaaacccccgcagaaccacttcgagcgagggcagcgtctccaccatctagcgacgtcttcggcaccagatgacttagtcgaactggtccctcggagggcaaatgttggggcgaaggcgaagacgccacccttcgctcgatgccttcgccaacctcgctgcgccaacggagacaagacgactggcagacttacccttcgtcccacgcgtcgccggacgaagacctgtgacgaggtcgtctcatctcgcggcctcgcccaacatggaggcccacgtgtgatccggcccattgtaacaggcccaacatggccgccgtggattacgggcctaatttgtaaaggtctccctgtaattacagtctgtaaccctgctttatgggaatattccggggataacctaggcgcctga

SEQ ID NO: 35717 - DNA, 456 bp, Zea mays
  Peptide Sequence Number=SeqID_79092
atgcaattgaatgggggtggttggggtacccacagccccaaccacaaaagtggccgttggaaggccgtctgtcgcacggcgcaccggacagtccggtcagccacgtcaaccggtcgttgggttctaaccgttggagctctgactggtggggcctctgggctgtccggtggtgcaccggacaggtcctgtagactgtccgttttgacattaaaaactgctaatgagatttggctaaaattgcatgagctccatgacgacacatccaatgtccgtgagcaaaaacattgcctattcttaaatgagtataattcttttgctatgaaggataatgagcttgttagatatatgtattctcgtttgaatctaatcatcaataagctcaatcctattggcattaataagctaggtgatgtggacattgtgaggaagattatctccgcactaccacaacaatga

SEQ ID NO: 35718 - DNA, 1143 bp, Zea mays
  Peptide Sequence Number=SeqID_79093
atggcggcagacgtggcaatggttggcgatggggtaaacgactccccagcattggcggcggcagacgtgggcatggcgatcggtgctggcacagacgtggccatcgatgctgctgacatcgttctaatgaagagcaaccttgaggacgtcatcactgccattgatctctcgcacaagaccctctccaggatccggctgaactacgtgtgggccctgggctacgtcctgggcatgccgatcgccgccagcgtcttgttccctttcacgggcgtcgcattgatccagtacactgatgcggctactgctttagctgctagagaatccttagatggaaggagcatcccaagcgccgcacccgcccatcccggcgcgaccgcgatatcgccctcgaccctcgcaacgtcgccctactcatcttcaaggccctcacccttgacctacagggccaccacctccctgcgatgcgcgtcctcaccggctcgcgcgccgcggagcacactcgcccgttcaccgcccctcgccgcgggcagcccgccgtcagccgccctcgccgcgcccgctcctcactggctcgccgcgggcagcccgccgtctgccgcccctcgccgcgtccgctcctcaccggctcgccgcgggcacgcccgccatccgccgcgcccgctcctcaccggctcgccacgggcacgcccgccgtccaccgcccctcgccgcgaacacgccgccgtccatcgcccctcgccgcgcccgctcttcaccgacgcgtgccgcacgcccgtgcccgctcctcaccgccacacgcccaccgtccaccgcccctcgccgcggcacgccgctgttcgcccctttccgcacccgctcctcaccgctccgtcgaattcgaacccgcccaggctccggacacgcgtcgtcgacgtcctcccacgtccgctccgagaaaaagttctaattgccatgccataccagacccatccataccagtggacacggactattcgaatagatttcaactctgcgcagagggggaaggatggacttgccttcgtcgaagctttcctggcacataagtcctacttccggaagttcgggctctggtccctcttccggggctacgggttctggatcaacgatccccgcttcttctag

SEQ ID NO: 35719 - DNA, 1008 bp, Zea mays
  Peptide Sequence Number=SeqID_79094
atggtggctgcagctgcagtatcagctacagctgcagtatcagctgcatctgggaaaccagttaatgcacctgacctccctacttttgataaatggttgtctataagtacctctattctaactgcactgttgagtggaagaaatgtgctgagatgtcagtctgaaagcaagactcatacaagtcctactgagaagaatggacaacttcctgtaggatctaatgctattgagatcacattatcgtgcttggaaagtaacaatgggcttaacatgaaattttcttcatcatggtgtcaaagggtgcttccaactgataaggagatatacttgaaaggtttgcctgccttttacaccacaagaatgcatgaagtgcagctacaaaaggcattgcggtcctttggctcaatggttaaaggaccagcagtcagggtattctcaaagaagctagaagatgaatgccgggcaatatgggaatctggaaggcagcaatgtgacactgttagcctaactggcagaccatgtaagcaccgcaggcatggcgatttcttttcatcagatgcaatggagcaacattttagtggatatgtcttcctccatgcatgttcctgtggccggtcacgccgccttagagatgaaccttttgactttcagacaaccaacgtgtcttttaattgtttccaaaattgcgatgacctattacctacccttgcgcttccaagaggcaacaatgttggttcattttcagtatcctcttggtgcttggtgcgtcttgaaggagcaaggattaaagtcataggggttggaggtggtggctccaatgctgtgtacaagatgattgaaagctccatgaagggtgtggaattctggattgtgaacactaattttcaggctatgcggatgtcacccattgaaccagaaaataggttacagattggccaggaattgacacgtggtcttggtgctggtgctgatatggtttttgtgacgataactgccaacacttcttaa

SEQ ID NO: 35720 - DNA, 960 bp, Zea mays
  Peptide Sequence Number=SeqID_79095
atggatccttcctcgaggacagattcggtgcttacgctggcactagcgaaccaaacgcgctccctgctcgccgagttggacacgcgcctccactccatcgacgccaagcgggagactcgggagagcgctctcgagtcccggtcggctgaagccgcccaatccatggcggatttctcctccaaccttcgcacagacgttgcagcacacttgaccgccgcagatgctgtcgtcgacgccttgttgggtcagatcgaagctgatgcggtcactcgggtctccaccgcgtctgccagcacgccgtcgaccccggttgtggccgttgggatcgccatcgtcgccgacaactggggcgggggtttcgacggaggtgaggactcaattgagcagcactacaccgtgccatccatcgtcgccgacaattggggcgggctcttcgatggcgataacgttgttgccaatgccctcgacgccatccccacggacacgctcagccgcctcacctgcctcgcccgccgcgaccatgccgccctccaggagctcgagtcaccaccaacagacgaagtcatgcgagcctgtgacgccttcctccttctggttggtggggaccatttcatgccagtgctacgtggcgctctgttcgtcatctgctccagttgcgtcagtctattccagctgcccgtcaactttgctgtctcgagcagaggaacgcgtcgactgttgtgtagctcctgccccaaagttctctcctactcttacaggaaccctgccaggaagaagatgcagctgcagtcaccatttgggggcgacgcgtacaacaccgatgagttcgagcaggcggatccggagtcctattccaaggagtacgggctctcgttcggcatcagccactcgatcagcaccgaggacggaattcttactaccatatcaatctcgacatccacaatcctccacacatcactg

SEQ ID NO: 35721 - DNA, 1944 bp, Zea mays
  Peptide Sequence Number=SeqID_79096
atggatccttcctcgaggacagattcggtgcttacgctggcactagcgaaccaaacgcgctccctgctcgccgagttggacacgcgcctccactccatcgacgccaagcgggagactcgggagagcgctctcgagtcccggtcggctgaagctgcccaatccatggcggatttctcctccaaccttcgcacagacgttgcagcacacttgatcgccgcagatgctgtcgtcgacgccttgttgggtcagatcgaagctgatgcggtcactcgggtctccaccgcgtctgccagcacgccgtcgaccccggctgtggccgttgggatcgccatcgttgccgacaactggggcgggggtttcgacggaggtgaggactcaattgagcagcactacaccgtgccatccatcgtcgccgacaattggggcgggctcttcgatggcgataacgttgttgccaatgccctcgacgccatccccacggacacgctcagccgcctcacctgcctcgcccgccgcgaccatgccgccctccaggagctcgagtcaccaccaacggacgaagtcatgcgagcctgtgacgccttcctccttccggttggtggggaccatttcatgccagtgctacgtggcgctctgttcgtcatctgctccagctgcgtcagtctattccagctgcccgtcaactttgctgtctcgagcagaggaacgcgtcgactgttgtgtagctcctgccccaaagttctctcctactcttacaggaaccctgccaggaagaagatgcagctgcagtcaccatttgggggcgacgcgtacaacaccgatgagttcgagcaggcggatccggagtcctattccaaggagtacgggctctcgttcggcatcagccactcgatcagcaccgaggacggaattcttactaccatatcaatctcgacatccacaatcctccacacatcactggtacatacacttccaggtgcttcagttccaagccttgccatgctgagctcgatgtctctggtgcatgccagcttaggtgcacatcaggtgtttgaggaattgtcatcctgcaccgacaacgtcttcaacaatagcatcggcttcacacccgcgctcatggcttatggtattgatattcgtgtaatccatgctatcaagtcaagaagaagtcctgttggtaaggtactgacaattcttcaagcgaactctttatcctctaaggaagttgagaggcgatcatgcatttccttggaggaattcatatgtaattacttttcgtgcgacacccccatcataattagtggcaccatcgatcattggcttgcaaggacaaaatggaatgacattgagtacctcaaggagatcgttggagatcatattttcgctgttgaagttgggaaaaattacgtgtgtcgtgagtggaagcaggagctgatcacattttctcagttgctggatagaatgacgtcaattgtctgttcatcaaacttgacatattgtgctcagcatccatggtttgagcagttaaaagagctcagtgaatacatgatggttaccgaatgttgttatgctggtgcaggggaactccaatcacttaatgcttggtttggtccagaggagacagtggcaccattgcaccatgatccacatcacaacatcttagctcaggtcttgggcaagaagtatattagattctatcgtgctgtcatagctggggactcgtatccacacacagcgactatgctaagcagtaccagtcaggtagaccttgacaacattgatttgaaggagtttccaacggttgaaagcctggaattcattgactgcatattggtagagggcgacctgctttacatccctactaaatggtggcactacgtcagatctcttcccaccagtttctcggttagcttttggtggcactacaaggttgttgactactag

SEQ ID NO: 35722 - DNA, 228 bp, Zea mays
  Peptide Sequence Number=SeqID_79097
atgaccttttgttactcctcgggtctgcaacacctgaattggtacgctgaaatcaggtggtcccaagttacaactaggtggcctagaagaactgataacgagattaagaatatctggaactcaagggtcaaaaagaagctttggcagaaaggcattgatccgaacacccacaagcctttggccgaggttaaacacagcaaagcagatccaactagcagtaccgaatga

SEQ ID NO: 35723 - DNA, 1941 bp, Zea mays
  Peptide Sequence Number=SeqID_79098
atggatccttcctcgaggacagattcggtgcttacgctggcactagcgaaccaaacgcgctccctgctcgccgagttggacacgcgcctccactccatcgacgccaagcgggagactcgggagagcgctctcgagtcccggtcggctgaagccgcccaatccatggcggatttctcctccaaccttcgcacagatgttgcagcacacttgaccgccgcagatgctgtcgtcgacgccttgttgggtcagatcgaagctgatgcggtaactcgggtctccaccgcgtctgccagcacgccgtcgaccccggctgtggccgttgggatcgccatcgtcgccgacaactggggcgggggtttcgacggaggtgaggactcaattgagcagcactacaccgtgccatccatcgtcgccgacaattggggcgggctcttcgatggcgataacgttgttgccaatgccctcgacgccatccccacggacacgctcagccgcctcacctgcctcgcccgccgcgaccatgccgccctccaggagctcgagtcaccacgaacggacgaagtcatgcgagcctgtgacgccttcctccttccggtcggtggggaccatttcatgccagtgctacgtggcgctctgttcgtcatctgctccaactgcgtcagtctattccagctgcccgtcaactttgctgtctcgagcagaggaacgcgccgactgttgtgtagctcctgctccaaagttctctcctcttacaggaaccctgccaggaagaagatgcagctgcagtcaccatttgggggcgacgcgtacaacaccgatgagttcgagcaggcggatccggagtcctattccaaggagtacgggctctcgttcggcatcagccactcgatcagcaccgaggacggaattcttactaccatatcaatctcgacatccacaatcctccacacatcactggtacatacacttccaagtgcttcagttccaagccttgccatgctgagctcgatgtctctggtgcatgccagcttaggtgcacatcaggtgtttgaggaattgtcatcctgcaccgacaacgtcttcaacaatagcatcggcttcacacccgcgctcatggcttatggtattgatattcgtgtaatccatgctgtcaagtcaagaagaagtcatgttggtaaggtactgacaattcttcaagcgaactctttatcctctaaggaagttgagaggcgatcatgcatttccttggaggaattcatatgtaattacttctcgtgcgacacccccatcataattagtggcaccatcgatcattggcttgcaaggacaaaatggaatgacattgagtacctcaaggagatcgttggagatcatatttttgctgttgaagttgggaaaaattacgtgtgtcgtgagtggaagcaggagctgatcacattttctcagttgctggatagaatgacgtcaattgtctgttcatcaaacttgacatatcgtgctcagcatccatggtttgagcagttaaaagagctcagtgaatacatgatggttaccgaatgttgttatgctggtgcaggggaactccaatcacttaatgcttggtttggtcgagaggagacagtggcaccattgcaccatgatccacatcacaacatcttagctcaggtcttgggcaagaagtatattagattctatcgtgctgtcatagttggggactcgtatccacacacagcgactatgctaagcagtaccagtcaggtagaccttgacaacattgatttgaaggagtttccaacggttgaaagcctggaattcattgactgcatattggtagagggcgacctgctttacatccctactaaatggtggcactacgtcagatctcttcccaccagtttctcggttagcttttggtggcactacaaggttgttgactactag

SEQ ID NO: 35724 - DNA, 231 bp, Zea mays
  Peptide Sequence Number=SeqID_79099
atggtgaaggtggcggtggtggccgtgctgctgatgcaatgctgcgacgtgatccttgcggcgaggccgttgctgcatccggctgcagggtggcagcagcatgggcagggcgccgggacgacggcggtgatgcaggtgctagacaaggggtcgccgggcggcgccggcaacggcaactgcgactggacgaaacccgggaaccccggctgcccgccccaaccatcgtcttag

SEQ ID NO: 35725 - DNA, 633 bp, Zea mays
  Peptide Sequence Number=SeqID_79100
atgcaagacggctcaaagcagaagaagccaaaccgccgtgcgcgatgcgtgcaaccgcccagcagttacaagcagctctccacttttgcccagaccagcgggcgaaagggcgggcagccatgcaggcggcatgcaaccacgccaagtgggcgcacttctcctactcccaacacgcccagcatggaggcccaggcccacgcgtcatgcaaccggcgcgccgaatgcttcgtgcatgcaactgcaccgccacttgcgccaccaccgcgcctcctcgactgcggaaccaatgccgcgactcgaggcgacccagaacacgacccagcggcgctagcctggcgcgatgggaccgggaaaggggataccccaaaaaggatccttccccgtgaaggaaccaggctccgagcctccctactgatcagaggttcgaaggctggcccctcggaagggttcaacagccgcctcagagcgcgtgggctccacacccgctactggtcagaggttcgaaggccggcccctcggaagggttcaatggccgcctcaggctactcgggctccgcgcccactactgatcaggggttcgaaggctggcccccgaaggattcacagccgcctcagacacagagcgagggatga

SEQ ID NO: 35726 - DNA, 585 bp, Zea mays
  Peptide Sequence Number=SeqID_79101
atgggggatacccgccgtctttccgcctcatcgccggaggagcgcaactccgtgggagttggtacctttcagccatcgttcggcttcaagtattttcatcagctagcccggttgtaccccccccgccggcagtcacccaagacggcgactaccagcccctgggtggggagaagcaagccgggctgcgatcttggtcccaccctcagcttcaaggatgttcatcatcctcgctggggtggaggccgggctgagccggagctctacctcccgcgcgggttcgtgggtcaccctctcctgcggtgttcgagggagagggcgctcgctggccctgcgggcgggccggacctcgacaacgcggggctggtcaacggcgggcgtcgtcagccccagcgtgtcgagctcgtcggcttggctcccggcagcccctcctgccggaaggcggctgccgcgccgtgtgcacgggaggaccgcccaagatgtcgcgcgctgttagggcggcgttcgtgttctggggcggtcctgcctttgcaccggtatggcgcctccgcgcggaggtcggtgccccactcgtccgggaggatctga

SEQ ID NO: 35727 - DNA, 474 bp, Zea mays
  Peptide Sequence Number=SeqID_79102
atggtcgccttccaagggggtcgccctccttttaaaggcgactatccctacttgcgtccccagccgtcacgggctgagtcttctccaacacgctctaaggccctccccctgcggcgcgggggctgggtcccacatgtcatgcgagccggctcagagcagaagaagccaaaccgccatgcgcgggaccgggaaaggggggataccccaaaaaggatccttccctgtgaaggaaccaggctccgagccaccctactgatcagaggttcgaaggctggcccctcgaaagggttcgacaaccgcctcagatcgcgtgggccctacacccactactggtcagaggttcgaaggtcggcccctcggaagggttccacggccgcctcaggctactcgggctccgcgcccattactgatcaggggttcgaaggctggcccccgaagggttcacaaccgcctcagacgccgagcgagggatga

SEQ ID NO: 35728 - DNA, 600 bp, Zea mays
  Peptide Sequence Number=SeqID_79103
atggaggcaatcagcaacaccaggttaaccctcgagatcctggtggccgacagcgtggtcctcgtcggcgagatggtgacctccaagctcttccaaatctggcactccgctgacgtccagaggcctccgccctttgggatctccttaatcacaagatttaccaaaaaaactcagaagataggcatgagagctataaatattcttggaataaaaggtgaggctgcatgcacttgtttggatctcatgttgattcagggccagttgaggacggaacaacaactggtctacgtgttgtacagttgtgctgttcgtgctatcggtttggaaagaacatgtggaaagccaatctcggatcttgcttccttcaggtttccacattgtagacacacaagagtccagcctgcgacaaacgctcctgcaggagattggagcctagatccagtttgctttgttggaaaacttcaagcacctctagacggaaggagattggagcctagatccagtttgctttgttggaaaacttcaagcaccactagacggaagtgtatggcaaaaaagcgtggtagtttgatacttgttggctggtcccttctgcactaa

SEQ ID NO: 35729 - DNA, 228 bp, Zea mays
  Peptide Sequence Number=SeqID_79104
atggtgaaggcggcggcggtggccgtgctgctgatgcaatgctgcgacgtgatccttggggcgaggccgttgctgcatgcggtggcagggtggcagcatgggcagggcgccgggacgacgacggtgatgcaggtgctagacaaggggtcgtcgggcggccccggcaacggcaactgcgactgcacgaaacccgggcacccccgctgcccgccgccaccatcgtcgtag

SEQ ID NO: 35730 - DNA, 660 bp, Zea mays
  Peptide Sequence Number=SeqID_79105
atggccgattctaaagatcccaacagtgcttctccaaacagcgacacaaggctgactaatttatcggtcgcagagcatgaaaacttagaagatgacatgaagaagatggatgaggagatccaacgacaacaagatcagatgctcaaggtggcaaaaaagtggtacctctcgcacttcaaggtagatcgccaccagaaggtcataaaggaaagggaaatagacgccgattacatgtcatccgtgctgcaacagctccccacaataggtgatgccaggggacgagatctagattccagcaaggaggaggaagacgaccctgtcgcaaggtcgcggaccgtccggcccagagctgcggaccgtccggccgccaccgctgttcacctcgcggagccgaacccaaggtattgctcatcacgagaagcaacaatggtgaaggcggcggtggtggccgtgctgctgatgcaatgctgcgacgtgatccttggggcgaggccgttgctgcatgcggcggcagggtggcagcatgggcagggcgccgggacggcaacggtgatgcaggttctagacaaggggtcgtcgggcggccgcggccctggcaaaggcaactgcgactggacgaaacccgggcaccccggctgcccgccaaaaccatcgtcgtag

SEQ ID NO: 35731 - DNA, 228 bp, Zea mays
  Peptide Sequence Number=SeqID_79106
atggtgagggcggcgatggtggccgtgctgctgatgcaatgctgcgacgtgatccttggggcgaggccgttgctgcatgcggcagcagggtggcagcatgggcagggcgccgggacgacgacggtgatgcaggtgctagacaaggggtcgacgggcggccccggcaatggcaactgcgaatggacgaaacccgggcaccccggctgcccgccgcaaccatcgtcgtag

SEQ ID NO: 35732 - DNA, 774 bp, Zea mays
  Peptide Sequence Number=SeqID_79107
atgaacacattgcataattcacctatccgagagaatgctgttctgaagcggggcgttgcgatacagcatgaacgccaaaaagagtttgatgtgaggacccaggaagtcgacagcctgaaagagatggtattgcagtatcaggagcagctaagaactcttgaggtaaactgtgatacatggtttgatgcagataaacatctgaagcaggctcagcagaacaattctatgcctgctaaacttgcaaaattgcggggggagttgctcactccaacatccaaaggtggtggtggtgcaggtgaaggatttgatgtgacgaagagtggagatgcacgtgttggtttagttggcattccttcggttgggaaatcaacattgttgaacaagctgacatggacattttcagaggcactaaagatgcaaatggaggttcagaagcgactacatgagcaactcgaggttcaaatacaattgcaactaacaattgaagcacaaggaagatacttgcagatgatcattgaggagcaacaaaagcttggtggatcaattaaagcttctgaggatcagaagctttctgattcacctccaagcttagatgactacccagagatcatgcaaccttctcctaagaaaccaaggatagacgcattatcaccagattcagagcgcgatacaacacaacctgaatttgaatcccatttgatcggtccgtgggatcacggcattgcattcccattggaggagttcaaagcagaccctactatgagcaagtcataa

SEQ ID NO: 35733 - DNA, 234 bp, Zea mays
  Peptide Sequence Number=SeqID_79108
atggtgaaggcggcggtggtggccgtgctgctgatgcaatgctgcgacgtgatccttggggcgaggccgttgctgcatgcggcggcagggtggcagcatgggcagggcgccgggacggcgacggtgatgcaggttctagacaaggggtcgtcgggcggccgcggccccggcaacggcaactgcgactggacgagacccgggcaccccggctgcccgccaaaaccatcgtcgtag

SEQ ID NO: 35734 - DNA, 288 bp, Zea mays
  Peptide Sequence Number=SeqID_79109
atggtgaaagatcttctgagagccagggcttgctggttcgccaagctcaccggttgtcggggatgggtcgcatcgtcgaggcgagcgaggttgggtctaccaagagcgggatggtgtcatgacgataacgagcggggcgaggacgttgggaaggagccagggtcaggcgacgtcaggcgtcaggaaggaggcgacagtgtcaagaacggagcacctgggcggattggccccgacaggctgggatgtaataagaagaaatggtacctgatggatagatgcgaggactag

SEQ ID NO: 35735 - DNA, 360 bp, Zea mays
  Peptide Sequence Number=SeqID_79110
atggcagaggatctggaggtcgactgcggtacgggggccgcgattgagatcgagagcggggggagaagaaataggggcagtggggagttcaggcaggcgaaatcggtggcgtgcacgcaggcatctgggtggcggggtcaggacctcctggcaggacagatcggcggtgatatcgtgcgggagggtgtagggggcgcagaactccagccacggcgtgcggcaatctcaggggcgggggcggcggcgtggggaggggcggcggcgtggggaggggcgcgcggatggggcgtggggaggggcggtcgcgtaggggtggtgaagggcgcgcggatggggcgagggcagacgggggcacggtag

SEQ ID NO: 35736 - DNA, 231 bp, Zea mays
  Peptide Sequence Number=SeqID_79111
atgaagaaatgcggaagcgaattacataatcttacatttatttcaaaaaagcagcaaaagtctgctacttcctcacctaaaaacaacgaagggataaaccctgagtatggaatactcagcaagtcttacccgactaaagaaaagactctcaagggtatgctggttatatgggagtcaagggtttcaaggagggtaatcaagatcaaggaaggtaatgcaggaattgtttaa

SEQ ID NO: 35737 - DNA, 657 bp, Zea mays
  Peptide Sequence Number=SeqID_79112
atggttcgcattcggtttacctttaaaaccgggtgtgacagcgcggaggagcatcgctgcggctgccaggttctgaccgaccccactagatgcgggtggcggcctgaccctgacgtcgttggcgacgcggtgctggaaaccctgggacaggtgacgtacttctccggtcgggggttggcccgcccatacctgcccgacgtcccggcggatcggctcaagcgctcctgctccctcgtcgagcctggcctgcgccccgcggacttgctcgagctgtgggtcgtgacccccctgaaagggaaatgtgcccttgggccatttctaagtattttggtgattgagtgccaacacaagtgcttaaatgtgaatttatgctcatggatggacaaagtgcaaatcaagagtaaagctcttgttgcgacttgtgtgcgtgctgttgctctgattttgagtcttgtgtgtgttgctagttcctcccttactccgtatttctttgtgaatctcaagtgtaagggcgagaggctccaagttgtggagattcctcgcaaacgggatattgaaaagcaaagcaaaacaccgtggtattcaagttggtctttggaccgcttgagaggagttgattgcaaccctcgtccgttgggacgccacaacgtggagtag

SEQ ID NO: 35738 - DNA, 129 bp, Zea mays
  Peptide Sequence Number=SeqID_79113
atgggaaccaatgggcatctcgacctcgacgagggaggtaaatccgtcgatcaaaagatattatgctttctgtatgcatgtgtgcaagattccaagccgaccctaaggaagctcaccttacggccgtaa

SEQ ID NO: 35739 - DNA, 780 bp, Zea mays
  Peptide Sequence Number=SeqID_79114
atggggtcggagaagggtggagcgaaggttattggcggcggcgggatcttcaacctatttgattggaagcgaaagtcgcgcaagaagctgttctccaactcgcccgaggggtccaagcttgttaagaggagcgaagaaaccttgctatcagggcgtctccacttgggtgatgatgatgaaggaattggtgtatcaagcttcaaggggagcagcgactacagctgtgcgtcttcagtgaccgatgaggaagtgcgtgagatgaaggcgccaggatgtgataaagatgattcagataacaaggttgaagcaaaaggccaaattttccgaggcagtaaaataaaggatagaccagctttggactcgtccctcttccagaaattggagaacatgcatgtgtacaacaaacaagggaaagagcccttttgccgtggagggtacaggcggctgttgttcgactgcgtaaatgagtgcctggagacaaggcgcacggcctacttccgggcaggatatgcagcatggagcaagggagcagcagcgctgatccggggcgttgaggcccaagtctgcagtgagatcaccagctggaagagcatgggagactggacggaggatgagcttgtcgacaaggacatgagcagcgggctgggcacatgggtcgacttcctggtggaggagttcgaggctggtgtggaggtggagaaccacgtactgggctcgctgcttgacgaggtcgtcgccgacatggtcgtgggacgccacggcaggagtgtaaatttgtag

SEQ ID NO: 35740 - DNA, 132 bp, Zea mays
  Peptide Sequence Number=SeqID_79115
atggcggcgtgtgccatggacgagctcatctggctcgcccaggccggcaagcaaatctgggtcaagggaatgcccggtgacgcgagggatttctcagctcagacgcctaccggtccaagtcaacaagagtga

SEQ ID NO: 35741 - DNA, 525 bp, Zea mays
  Peptide Sequence Number=SeqID_79116
atggaggcccaagcccacgtgtcgtgcaacaggcgcgccggatgctgcgtgcgagcaactgcaccgccacccgcgccactgtcgcgcctccttgactacggaaccagtaccgcggctcgaggcaaccctacgcacgacccagcggcgccagcttggcgcgacgatcaatgcgaccaaaaatgggctggcagtaatggcggtggcaggcgggcaggagcagcggtcacgtcgtcagccaggcttacgtcccatccgcgggcaggaccaggaaagggggataccccgaaaaggatccttctccgtgaaggaaccaggctccgagcctccctactgatcagaggttcgaaggctggcccctcggaagggttcaacagccgcctcagagcgcgtgggctccacacccactactggtcagaggttcgaaggccggtccctcggaagggttcaacggccgcctcaggctactcgggctccgcgcccactactgatcaggggttcgaaggctggcccccgaagggttcatag

SEQ ID NO: 35742 - DNA, 150 bp, Zea mays
  Peptide Sequence Number=SeqID_79117
atgcagtggcttcttggacgtgggatgcacaggatgagacatgtggcatatgcaggatggcttttgatggctgctgtcctgactgattacaagaagtctagtatcagagctaggcaattgattggattctgttctggtagggtattctaa

SEQ ID NO: 35743 - DNA, 598 bp, Zea mays
  Peptide Sequence Number=SeqID_79118
atgaaggcgctgagcgtgggcatcgggagggtcccacgtgtcgtgcacagagcgaggtggtacatcgggaggggtgttgtcccacctttaggcaagagtgccagaggtggaggcgtggagccaggagcgggtggtggagcgctggcatccgaagggtacccaaagaaggtcgcaagacccctcgaagatggctcacgaaccgggcgacccacctaccaagcagctcggcgggaaggtccaaagggccaaccggggacagcctgccaagccgaccagcccgcccgccgaacaaatattcgccgagcaccccagcgaggcagagctgccgagcaacctagtgaggcggggctgcctagcaacccaacggggcgaggctatcaaccaacccagcggggcaaggctgctgaccaacccaacgaggcgaggctgccgaccatcctgcccgtcgagcaacctagaaagacgacaatgaaccgacctataggaccaaacgacctcgaccttaaagacctcaacatcgtggtctctatagtgacccatacgccgaaggggatgggacattacgtcgtaccagacgtgcgcctacgcatgatgaaag

SEQ ID NO: 35744 - DNA, 1540 bp, Zea mays
  Peptide Sequence Number=SeqID_79119
atgaacgaactcactggcattcgaagtgccattacaaacggaactccggttccccctccgcaggtacaaacaaccccactccgagggggaaggcctgcggagcaacggaaggccgacgagtggtgcgccgtcgcccgctccagcagcagcgacgacaacgccttctgctccgagggaccaagcagcggcagcgccagcctcgggctcgatgccgctgccaggaagcccccgcccatgccaaaacttgtgaggcaaggacgggcagaaggccatagagtcggaggtcagcccgcggtcggccccggccatctcgccggcgggagaacttcttcaagctgccgcggcggatgccagcgccgcgagtggctccgaagccactcacgcctgaaggccaggcacgctgcagctgccagcgccacgggcgacggccgcctttccctccgatcactgagtgaaggagcgggctgccgcccacgcgggggccgacctcaactcggcgcactcccctccccagccctggcgatgaaaatccttgaggctgagggagaggaagaggccgcggccccggctcgctttccctcaccatcaagtcggaggtcgccatctcaggtgaccgccggcggaggggagcagccgggcagcatgatgaaaatccttgaagccgaacgatggctgagagggagcctccctccttttaaaggcaactccccctacgtgcgcccccaggcgccgcgggccgagtcttctccaacacgctccaaggccctcccctgcgactcgggggctgggtcccgcatgtcatgcaagccggctcagggcagaagaagccaaaccgccgcgcatggtgcgcacgaccgtccagcggttacaggcgaccccccattttcgcccagaccaacgggcagaaggggcgggcagccatgcaggcggcatgcaaccgcgccagatggacgcgcttctccgacttctgacacgccagcctggggcccaggcccacgcgtcgagcaaatggcacgccagttgctgcatgcaagcaaccgcaccgccacttgtgccaccatcgcgcctcttcggttgcgaagcctatgccacgactcgaggcgacccagcgcacgacccagcagcgccagactggcgcgtcggtcaaatgcggtcaaaaatgggtcggcggtaatgacggtggcaggcgggcgggagcagcggtcacgtcgtcggccaagctcacgtcccatccgggggcagcaagagaaccccctctcacggcgtgaagacaacgcgcccgtgatccgttccctcgaacggctcgcgcacgcgcaaaggccgccccgccaaccactcgcccccgtcgcattaaatccgcggcgggacaggcggcgtttctggcaggagaagcgggcgacgcttcgccttcgccgtaacaaccgcgccaaaaaaggggttcgaaggctggcccccgaagggttcaccttctcttcaaacgccgagcgagggatgaccaggggtacgtttgttttgccaaggctcgggctgcgctcccgag

SEQ ID NO: 35745 - DNA, 564 bp, Zea mays
  Peptide Sequence Number=SeqID_79120
atggaaaaatatactcaaatcaccgtcgaaggtccgcccaaggatcgtaaaatgtctcagacccctggagcacgcctccgccaccacgcgctccagcagcatctcgccatcgccgcagcagctcggctcttcgtcgtcctcctcctcatcatcgtcgacgtcgccgtagcagcacccggcgccctcgcccgtctcccacgcggcggcggcggcgctgaagaagtagcggtcgtcgccgtagaggcccggcgtgtccggcacggccggcgcgatgcaggggatgaggctgagcacgcgcgcggacggggtgcggaaccggaacgccggcgtctcgtctatggagtactcgcgctcgccgcagcggagccggtcgcctcgcgcgccggcccaggccggcgagtccgtgaccgtgaccgacgcatcgtgcgagcaggtgcagggacagacttgtgcgacgcgccgccctttcgcgcccacagcactgccaccagcagcagccgcccacgcccggataccgaacggacggtcttcttcagtcccgccgcatttgcgctgagagtctga

SEQ ID NO: 35746 - DNA, 555 bp, Zea mays
  Peptide Sequence Number=SeqID_79121
atggcgcggtggaggaggatgtcgcagggggatccaggatctcatcacggcgtgtgcggcgagcgtggtggggacgcgcgacacgagatcaggtggcggccgcaggatggagaggctatcgcgaccgagatttccggaggcagaacacagccgcatgctacaggtctgcgcaagatagtggcttccctggaagagaagatcaatgcagagataactctctctatgcagcacaaaggccacgcaatgggaaaggggcaacctcacctggtgtccttggctcatgtcaggcgatggagttcgcgagtgcaaaagccacgcgaggcgggcggtgggtccttaccacgaaggggacgaactgaggagagggaggcgctagagccacgagcatcggagcatgggagccggcgtgggagcagtgaagggagaaaaggggccagcgtgagcacgggaaggaaaagggaggcggcggattcatccaagttaatgcacgatgacgaagctccccacgacaacagtgggatggaagagcggaggaattttgctagagaggaatga

SEQ ID NO: 35747 - DNA, 555 bp, Zea mays
  Peptide Sequence Number=SeqID_79122
atggatcacgtgctcgcaggactgatgggcgaccatctcgcgttgatcgtggaccggctgctgacagagtcgacgctggaggcggcgatcggtagtgggaagcatatggtcgatctgcgtcaggagatagtggacgtcgagatttgccaggaggactgggacacctgcatggaggccccctgcgcctgctgtggcagcctcaagggaggttgtacggacatggtggacatcggggaggggatgggacagaccggggtgtgttgtggtggggacagcggcggcggtggcggtgcggtcgcggcgatggtactcctctacctcgaccagccggagatctgccaggtggccctccttaacagcgccttccacggcgtagcctcggcggactgcgtctgggccgccaagctccccgccaactaccgctaccttgcggccctagccgcgaccgccgatgacgagggctgtggcgatggagatgccagcggcaagcgcttgaccaagaaggagatttatgttcggacgggtgaaggtgagatactgcaaggcaccgactag

SEQ ID NO: 35748 - DNA, 595 bp, Zea mays
  Peptide Sequence Number=SeqID_79123
atggcgccgaggtgcgtgctacgctggcccaacctgaacgacgtggcgccaacgtggtaccgagctcggcgccaagatctatggcgccgagctcggatatgtaacaacaaactcggcgccaagatctatggcgccgagctcggttccatgtcggtgccacgtcggtgccacgacgtccgtttgtgccagcgtaacacgcacctcggcgccatagcctatggcgccgagctgtgttacctcggcgccattggctatggcgccgagaaaaggaaaacggcagaccgcgtcgcgccgacggctggcgaattaggggatgtttggtttgtggctaaatgtgccacactttgcctaaggttcaatgcgctgccccactcccctctgcatggaactgaaggcaggcatcggcgcatattcatcaaggatattttagccccttcaatcatctctgagacaaccgatcaagccaaggatggaggcaagaagagcttcgaggtatcgagtgcacgggagaaggtcaaggagaccaggaacccaaagccaggggtgaagaagaagacttgcaaagtcaaggttgatcgagttaagaagacttatg

SEQ ID NO: 35749 - DNA, 243 bp, Zea mays
  Peptide Sequence Number=SeqID_79124
atggtccatgtcaaaggacgtggatgggcgggtgggcggtgcaggtgcaggtgcaggtgcagctggttgtcactctcgcgagtccatgggggtagccgggtaggggtagctgccgcgcatgctgcacagtgcggcgggagatcattcatgcagggcatgcgctgcgcagttgcgcgtagctgtcgtggtggaagcagcagcggctgctgcccggccgggaccggctcaccggcctctgcgtga

SEQ ID NO: 35750 - DNA, 54 bp, Zea mays
  Peptide Sequence Number=SeqID_79125
atgacgaattcggattgcgatatggacgaaggccctaagccgaagatcttctaa

SEQ ID NO: 35751 - DNA, 342 bp, Zea mays
  Peptide Sequence Number=SeqID_79126
atgctccaaggcccacccctgcgactcgggggctgggtcccgcatgtcatgcagaccggctccgagcagaagaagtcgaaccgccgcgcgtggtgcgcacaaccgcccagcggttacaagcgcccccccacttttgcccagaccaacgggcgggaggggcaggcggacgggagcagcagtcacgtcgtcagccaggctcacgtcccatccagggacagcaagagagcctcctcccacggcgtgaagacggagaagcggacgacgcttcgccttcgccgtaataaccgcgccaaaaaagggaccgggaaagggggataccccgaaaaggatccttccctgtga

SEQ ID NO: 35752 - DNA, 539 bp, Zea mays
  Peptide Sequence Number=SeqID_79127
ggggcttggcattaggtttttcgcctgtttccttgttcgacacgatggttcagatcgtcgagcaccgcgacttgtctcccgaggacttcctgatggaggaaggagcagcatcttccatgccacagggctctcaccgccctacgcctggtgctgctgctatgcacgctacgcagcagcacacgcccacgcagacgtccaaggctccgtcgagggctgctcatggtggggcgttgtctgcaaccagggagttgttgcgtaacccaccaagttccacggcctcgccggaggccatgaggcagtggcgtgaagatgtcgatcgcctcctcgtcatggcccatcctggctcggccaggtccaggccacgatcattccggcatcaacgcgaggcgtcggcgtctgtgcgctcaccctcaatgagggaactcaaccgtaggcgtgcgggcgaggatgctcgagtctctctggagagggcgcgtgagcgccgccaaaatttcgagggacgcaactttgaacaagacttcactgcaaaggatgcctaa

SEQ ID NO: 35753 - DNA, 138 bp, Zea mays
  Peptide Sequence Number=SeqID_79128
atggatccgtctgctatcgtgggcaggactgcagccaccaccatgcgcgatcattatgttaatcagaacattgagcgaccgcccgggaaaacagtgctaccacaagggaggaatgggtccccttggatgattaattag

SEQ ID NO: 35754 - DNA, 360 bp, Zea mays
  Peptide Sequence Number=SeqID_79129
atggctcgccgcctcgtcgctagccggggcaaggagaaggttgacgaaggtgacctggccgcgggagaacgggacctcgggtatcagacccccgagcaagtcctcaaggacatcgtcactggagactctgactctggtgatgatgacgaccgtcgcaagaagctatacgctatgtatggcggaagctgggagctcacctcccgtaggaatgtgaagtccctacgccatgagccacgctgcgttcaagcagctgtagatcccagggtcccgactggggccctcacgccctttatcaggagtgagccctcaactggtgtatccccttgggagcatcgcactcccggttacattcgggactga

SEQ ID NO: 35755 - DNA, 369 bp, Zea mays
  Peptide Sequence Number=SeqID_79130
atgctcgtgccgctcgctgatgcggttcacgagtttcaggatctcccggcattccgaggcgctgtggcgactgttggggtggcgacacctgagccacccatctgggtaactccggtctacggtgccgagtgccatgcacggccctcggcagctctggcacatttgtcggccagcgtaaagagcgtcgtgacggtttccacgtcatgtgtcgccaatttctccaacatcttcttatcacacaccctctgtcggaaagcagtgataatggaagcatcggagatgcgaggtatagtcccccgtaccttggtgaaacgggagatgaaagcatggagggtttccctgggttcctgcctcactgcatggagatga

SEQ ID NO: 35756 - DNA, 309 bp, Zea mays
  Peptide Sequence Number=SeqID_79131
atggctagagcacaccttggcaccaaggactgtgatcacatgtggcagaaacttaaggagcaaaaagagtacgtcctcgtgccggatcaaggagctgctcaggaggtagccccagatccagcaccagagcctgcaccagaggacctgtctgccactgctttagaaggcaagccccgccttgcttgtggcataaattttacaagttctctggaggacatggttgctggagtgacttggccgtccatcttgccaccgggttggattgtcgagtgggaccccgcctcggctgaggaggagcatgaggagtga

SEQ ID NO: 35757 - DNA, 327 bp, Zea mays
  Peptide Sequence Number=SeqID_79132
atggaggcaagaagagcttcgaggtaccgagtgcagggagaaggtcaaggagaccaggaacccaaagccaggggtgaagaagaagacttgcaaagtcaagagtccaacatcgacctcaaacaagccaaattgggtaaaacgatgaaaaaggttaattatgtaagagaaagtaccattctgagctctgctggaggagaaatagaaaagctaggagaagaacaagaaagattctcaggaaaatcctcccaaaagttgaagtcaaacggagaaagaacggaggaaaaagcacttagtgtactgttggttggtgcacaggacagtgaatag

SEQ ID NO: 35758 - DNA, 414 bp, Zea mays
  Peptide Sequence Number=SeqID_79133
atggtggagtttcatatccgcgggtacgggtatggatactacacaatatccacgggtaataatttcgcaggtatggatatctgctatccatatccgtcaaccgatggatatatgacatgtggacccaaacagtggaagcaggtcccagcggccagcctcgggcttgtacttgttcactgcttcgcggggtcagctgtcagcgcgtcagcagcaagccagcaactagcaatagctaggccgcaccgcaaggccaatgggcagtggccagcagtccaaggtccaagcggcccaggactcaggtccaagcgaacggcctgtggctctgcctatcgccctctcggtctcggtcaatcagaaagccgagcagccgccgagcacaggggcgccgccgagcagccaagccaccgagcataa

SEQ ID NO: 35759 - DNA, 207 bp, Zea mays
  Peptide Sequence Number=SeqID_79134
atggaggacgacgacgacaacggtcggtaccctagaaccatcaacgaggagctcgttgagttagggcagcttcccgatgacgtcgatgacatgggagatgctgttgctgccttgttcggtgtcgataccactcctaatcccgggtcggattcgcagtggtactctagctgcctagcaatagactctaaacggtactctaaaatctag

SEQ ID NO: 35760 - DNA, 75 bp, Zea mays
  Peptide Sequence Number=SeqID_79135
atggtgcagagtcgtcttcttctccttgtaggacctagaacccgcccttgggggagagatcttaggatgctccag

SEQ ID NO: 35761 - DNA, 891 bp, Zea mays
  Peptide Sequence Number=SeqID_79136
atgagtacagaaattgacccaaacccgtaccctaatagagcaaaaacccaccaggttttggatagcgggtacccattgccatctctattcagaacggtcacaagccagcaagcacagtgccgacgagctcagcgcgcgggcgagatcaccggccggcgtcaagtcaagcgcgcatcatcgtgcaacacgcatctcgccgggcattattggttctcccacgaaccgaggctttttttccccagtggtgctggtgcggctgctgtttccacaggagtcacgctgtcccgtgtgcaatatctatcccgtgacccgtcgtcgtccttgcttctctgcgcgtggcagtggcatcgccttcgtctccggccggcccggctctcttttccccccgctagtgcagcggccatgactagcagactgctcagtatgccgtgtgacgatgggtattggattggaacggaacggttcgttcaaccccaggatgatacggagcaggaagaatccggcaaagatccttatcaacagtggaagccacgagctcggaagaaggtccacacaccacggccccaagcggacggccccaactttcccggtcttcttcattgcatgcatgtatgcatcagtcgctatgcctccaatgacgcggcaagttcgtgccatggaaaggtgaaggtgaagggaccagttgggataaccattctgataaagatgcacacggcgtccagtcctacattcaaccccactgagcaactgaacagagaaagatattcctccgacactgatactggacaaggagacctctgcagtgccaaggtgaatggaatccggtgccctatgcttttgcccatcaacgatccagcagttgtgaacagtgacaaccaggagatgtggtag

SEQ ID NO: 35762 - DNA, 1095 bp, Zea mays
  Peptide Sequence Number=SeqID_79137
atgggagctgtgaagcatacattgaaaatgctttcatggctcctactcttcgcacaattggctgcggccaccacctccaagtgcacaaatgccacaaatgggactgagactgacagcctgggtgcaatgaaactgaagctgattgccattgcatccatcctcacagctggagcagctggtgtgctagtgccagtacttggccgctccatggccgcgctacatcctgatggtgacatttttttcgctgtcaaggcatttgcagccggtgtcatcctggccacgggcatggtccacattctgccagcagcatttgatgggctgacatccccatgcctctacaaaggtggcagtggtgggaacattttcccctttgcaggactcattgcaatgtctgctgcaatggccactatggtgatagactcactagctgctgggtactaccgccggtctcacttcaagaaggcacggccaatcgacatcctagagatccatgaacaaccaggagatgaggaaaggtctgggcatgcacaacatgtgcatgtgcacacccatgcaacacatgggcattcacacggagaggtggatgtcatcagttcaccagaggaggcttcaatagctgacacgatccggcacagggtggtccttgagctcggaattttggtgcattcagtgataattggggtgtccttaggtgcatctgtgaggtcatcgaccataaggcctcttgttggtgcccttagcttccatcaattctttgaaggcattggcctgggtggttgcattgtgcaggcaaatttcaagttgagggctaccgtcatgatggcaatttttttctccctgactgcacccattggcattgcattagggattggaatttcatcaagctacaatggccatagcactacagcgttcattgttgaaggagtgttcaactcagcctcagcaggaattttgatctacatgtcattagtcgatcttctggccacagatttcaataagcccaaactgcagacgaatacaaagcttcagctgatgacatatcttgcacttttcttaggtgcagggatgatgtccatgcttgctatatgggcatag

SEQ ID NO: 35763 - DNA, 57 bp, Zea mays
  Peptide Sequence Number=SeqID_79138
atggccatgccagtgaagctgactcctgcctccctctcgctgaaggcggcctcttga

SEQ ID NO: 35764 - DNA, 1146 bp, Zea mays
  Peptide Sequence Number=SeqID_79139
atggcaccggtggaggcggagcagcaccggcggagggcgttggcgctcgcggcgcacgacgcctccggcgccgtctcccccatccgcatctcgcgaagggacactggagatgacgatgttgccatacagatactgtactgcgggatatgccactctgacctgcacaccatcaagaacgagtggaagaacgccaactaccctgttgtccctgggcacgagatcgccgggctgatcaccgaggttggcaagaacgtgaagaggttcaacgtcggagacaaggttggcgtcgggtgcatggtcaacacatgccagtcctgcgagagctgcgagggagggcacgagaactactgctccaagatcatcttcacctacaactcccacgacagggacggcaccgtcacctacggtggctactctgacatggttgtcgtcaacgagcgcttcgtcatccggttccctgatggcatgcccctcgacagaggcgcgccgctgctctgtgcagggataaccgtgtacaaccccatgaagcaccacgggctaaacgaggcaggcaagcacatcggcgtggttggactcggggggcttgggcacgtcgccgtgaagttcgcgaaggcgttcgggatgagggtgaccgtgatcagcacgtccccggggaagagggaggaagctatggagacgcttggtgcagacgcctttgttgtcagcggtgatgctaaccagatgaagatagggtgcagcttcagatctctatcaatggtggctgcgaagggcacaatggatggcattatgaacacggcctctgcaagcatgtccatgtacgcttaccttgctctcctcaagccccagggcaagatgatcctgcttggcctgcctgagaagcctctgcagatctctgccttctctttggttactgggggcaagactctggccgggagctgcatggggagcatcagggacacgcaggagatgatggacttcgcagccaagcacgggttggcagcggacatcgaactgatcggcaccgaagaagttaatgaggccatggaacgcctcgccaagggcgaggtcaggtaccgcttcgtcatcgacatcggcaacaccctcaacgcggcatcactagggagctcgccggtcccagctctgtag

SEQ ID NO: 35765 - DNA, 375 bp, Zea mays
  Peptide Sequence Number=SeqID_79140
atggcgaagtctctgcgatccaagcgcgagaagcggctgcggacattgcgccgggagatagcggagcccttctacgacaagaaggaggccgccaagctcaccgcgcaggccgccgcgcttgctgctcccccgctccaggtccgcgggcccccgccgtcccaggatgccggcagctcccgcggcgctagctcagcctcggctatggatgtggagatgtccgatgaaggaaacaacaggtctaaaaccttcttgaagccacttggcatcattagcaagaagaagaaacttctcccaagctattcatcatcccttgagaaccatgctctcatcggcttgttcaagtttgaaactgatgtcgagcagttaggggcttag

SEQ ID NO: 35766 - DNA, 1464 bp, Zea mays
  Peptide Sequence Number=SeqID_79141
atggggatttctcggcattttgctgctgaaatcaaatgcatccttgacaggacatacagaagttggttacagagacatgaggaaattatgctggacacaatgacctgtgcgatggcatttcgtattctaaggttgaatggatacaatgtctcttctggatatctcaatgatacaagaaccttgttagaattacacaaggcctcgacagttagtatctctgaagatgagtctatcctggatagcataggctcaaggtcacgtaccttactgagggaacaactagagtctggtggtgctctacgaaaaccttcactctttaaagaggtggaacatgctctggacggtcccttctacaccacattggaccgtctacaccataggtggaacatcgaaaatttcaatattatagagcagcacatgctagagacaccatacttgtcaaatcaacataccagtagagatattctagcgttgagtattagagacttcagttcctctcagtttacttaccagcaagaacttcaacatcttgaaagctgggtgaaagagtgcaggttagaccagctacaatttgcgcgacagaagttggcatacttctacttgtctgctgctggcaccatgttctctcctgagctgtctgatgctcgaactttgtgggccaaaaatggtgtgctcacaactattgttgacgacttctttgatgttgcgggatcaaaagaagaacttgaaaaccttgtcatgttggttgagatgtgggacgagcatcacaaagttgagttctactcagaacaagtagagattatattttcttcaatttatgactcagttaaccaacttggtgaaaaggcttctttggtacaagaccgcagtattaccaaacacctagtagaaatatggttggatttgctaaagtctatgatgacagaggtagagtggcgtttgagcaaatatgtgccaacagagaaggaatacatgataaatgcatctttaacatttggactaggccccattgtattgccagcattatattttgttgggccaaagatctcagagtctattgttaaagatccagaatatgatgaattgttcaaactgatgagcacatgtggtcgcctcttgaatgatgttcagacttttgagagggagtacaacgagggcaagttgaatagtgtttctctcctcgttcttcatggtggctccatgtccatatcagacgccaaaaggaaattacagaagcccatagacacatgcagaagagacctcctaagtttagttcttcgtgaagaaagtgttgttcctaggccctgcaaggaattattttggaaaatgtgcaaggtgtgctacttcttctactcgacgacggatgggtttagctcacaagtggagagggctaaagaagtggatgcggtgatcaatgagccactaaagctacaaggaagtcatacgctggtgtctgatgtgtga

SEQ ID NO: 35767 - DNA, 1497 bp, Zea mays
  Peptide Sequence Number=SeqID_79142
atgaaggaggagatgatggtcggcctgtcggcgccggagccggtggggaggtggggcgccgcgccgccgcaggcgatgctggagaggatgaaggactacggccaggagggcgccttcgcgctctgggacgatctctcgcccgaggaccaggagctcctcgtccgggacatcgagctgggtatcctcagacagagttatgtggtgttcatcccaatcacaggcatcccattgcctgctgtcgagcccgtgccggaatctagtgtctccaaggtggagggcaggtctgcagaggacaaagaaagatggtggaagaaggggttgaaagccatctcggaggggaagctggccgttgtccttttggccggtggtcagggtactcgactgggaagctcagatcctaagggatgtttcaatatcggacttccatcaggaaagtcacttttccagctccaagctgaaaggattctgtgcgttcaaaagctggctgctcaatctagcgaaagcccgagtaacactgtgccgatccactggtacataatgacaagcccctttacagatgctgccaccgccaaattctttgaaacccgtagatattttggcttagaccctgaccaagtgacatttttccaacaaggcacacttccatgcgtttctgccgatggtagatttattatggagacaccatatagggtagcaaaggctcctgatggcaacggtggagtttatgctgcactgaagtccaagaagttgatggaagatatggccgcgcggggtgtgaaatacgtagattgctacggagttgacaacgcgctggttcgagttgcagatcctacgttcttagggtacttcattgacaagggcgcatcttctgccgccaaagtggttaggaagccgattgaacactcaacacaacaggcttatccgcaagagaacgttggggtgttcgttcaacgaggccgtggtggaccgctctcggtggttgagtacagcgaaatggatgcggctatggctaccgaaatgaatcagtcgacagggcgactccgttactgttggagcaacatctgcctgcacatgttcactctggacttcttgaaccaagtggcaaacagccttgagaaggacagtgtataccatctagctgagaagaagatcccttccatccatgggttcacgacgggcctgaagcttgaacagtttatattcgacgccttcacatactccccgtccacggcacttttcgaggtcatgcgggaggaggaattcgcgccggtaaagaacgccagcggcgcaacgtatgacacccctgatagcgcgaagctcatgctgctccgcctccacagcagatgggtagtcgctgctggcggcttcttgacgcactctgtgcccttgtatatgacaggcgtcgaagtttctccgctctcctcctacgccggagagaacctggaagccatctgccgtgggcgaacgttccatgcgccgagcgagatctcgttttag

SEQ ID NO: 35768 - DNA, 831 bp, Zea mays
  Peptide Sequence Number=SeqID_79143
atggcgggtggcggccgccaaagccagaggccggacgtccaaacaatggcagagccgcaaagcgacgaagggagagcagaactgggcgggggcgcaaggcagtgtgcgtggacttgcgtgaaccctagagccttcgagcgggttccagcagcgtgggtggaagtggaataccccaatggcggcccgattcctccatctgcagactctgtgaagatggccaggaaaaaggggggttctgttgagctgaccatggagcacggatggcggaagtttgttggggaagagaaaaactcggctgacaaatcggctccacaagtcaaccacccacaacaacccgcacagccagcgaagaggctgacacagagggcccacgtgtcggtgacccaagcacggatcgcgggccacgcaggaatctcattgatgcagctaatatcgttgcattggcagcttttatctactttctggaggcctgaatgcacggttggtggggacgatggtcagcaagttacagtgcatgatcctgaggttagggatccacttcctcttacgatacaccatatgcccatagctgtaacatttgcatattttggtgaaggtaacatcgtggttcttgatcccacatacaaggaagaagcagtaatgggagggaggatgactgctatagttaactcaaatggggatgtttgtgccattcagaaagctggtggagagggtctcatgtcaagtgttaccatgcagtgtttaagaattgctccagtaaaggttgctgatataacaagcaaaataaagaaagcgctggaaaatgttcaccgatattacataagcatctga

SEQ ID NO: 35769 - DNA, 345 bp, Zea mays
  Peptide Sequence Number=SeqID_79144
atggcacccaagagagctaacccgaaggctgacgaggctgcgaaggcagcactgctcgccgcaagaaagggcaaggccctcgccctcacccaatccacccaccaagaggccactgaagacgacgttcctcgcacctgcgaagacgacactctccgcacctgcggccctgagggacaaccgcagccaccctcaggcttcgcaccaccggagggcgcggacctcaccgaggacggtgaagtcctcggcgtctcagcagaagaacagctacagctgagagcacctagaggggggggtggaagtctttcatggtccaagtccaccttttccctttcaaacctcctttga

SEQ ID NO: 35770 - DNA, 1713 bp, Zea mays
  Peptide Sequence Number=SeqID_79145
atgcccgacgttatggccgcagccctaaccggcttctcgcctcgcggggtgattccgagcagaggcagagcatctcttcccggggtcgctagagcgtatgccgagaggcggttggttgcagaaaacacaagcctgccaaacatgcataaagaacaacttgagactataataaggaatcagctccggaagccccagttgccaccttcttcatacgacacagcgtgggtttctatggtgccagtgcggggctctcatcagactccccgcttcccacagtgtgttgagtggatactgcagaaccagcaggatgatggatcttggggtgtcagccaatctgactcatcggtcagcaaggatgttctcctatccacgttggcatgtgttcttgcgttgaagagatggaatgttggcagagagaacatttggagaggactgcatttcatcgggaggaatttctctgttgctatggacgagcagttcacttctcctataggtttcaacttcacctttcctggtttgcttagcctcggcattgatatgggtttagaatttcctgtaagacaaattgatgtctgtggcattcttcaccgccgggagatggaattgaaaaggctggctgtggatagttcttttggaagaaaagcatatatggcttttatcccagaaggattcggaaatatgctggactgggatcaagttatgaagtttcagaggaagaatggatcattgttcagcactccttccacaactgctgttgcattaatccacaaatacaacgaccaagcccttcaatacctaaatttgcttgtcaatgaatttggcagtgcagtaccagcaatgtatccttcaagggtacattgtcagctttcaatggtggacgcgcttgaaaaaatgggaatttctcagcgctttgtcagtgaaatagaaagcatcctggacatggcatacaattgctggttacagaatgatgaggaactcatgatggacatagcaacatttgcaatggcatttcgccttttgaggatgaatggttacgatgtttcctcagatgagctgtctcacgttgctggagcttccactttccatgattcactacaaggatatttaaatgatacaaaatccctactggaattgtacaagacctcaaaagtcaccttatcagaaaacgatctgatcttagatcgcataggatcctggtctggcaacttattgaaggataagatgtgctgtagtagggtgcaaaaagactcgatttttggagagatcgagtatgctgttaattttcccttgtattccacactggagcgtctagaacacaagagaaacatcgaacattttgatgcttggggttctctgatgctaacaacaaaatcctcatcttttcgtatcaatcaagaattcctagctttggcagtcgaagatttcagtttctctcaacgtgtttaccgggatgaacttcggcatcttgatagttgggtgaaggagaacaagctggaccagctacaatttgctcggcagaaactgacatattgctatctgtctgctgctgctaccgtattttcttctgaattgtctgacgctcgcatttcatgggccaaaaatggtgtcctcacaactgtggttgatgacttcttcgatgttggtggatcaaaagaagaattagaaaacctgatagcactagttgagaagtatgtctactcttttatgaagtaa

SEQ ID NO: 35771 - DNA, 951 bp, Zea mays
  Peptide Sequence Number=SeqID_79146
atgctgggcgtgttgggagtcggagaagtgcgcccacttggcgcggttgcatgccgcctgcatggctgcccgccctttcgcccgctggtctgggcaaaagtgaagagccgcttcccggctgcacccctccgccggcggtcacccaaggcggtgaccaccagcctctcggtggggaggagcaagccgggctacgatcttggtcccaccctcagcttcaaggatgctcatcatccccgctggggtggaggctgggttgagccggagctctacctcccgcgcgggttcgtgggtcggcctctcctttggcgttcgagggagagggcgctcactggccctgcgggcgggtcggacttcgacaacgtgggtccggtcgacggcgggtgtcgtcagcctcagcgcgtcggctcgtcggcttggctcctggcgccccctcctgccggaaggcagctgccgcaccgtgtacacgggaggaccgcccaagatatcgcgcgctgccagggcggtgttcgtgttctggggcggttctccctttgcaccggtacggcgcctccacgcggaggtcggtgcctcactcgcccgggaggatttgagtggggatctgctggagggctgatggcccctgtcgtcggtgccgaggtggaggcggctcgagaagtcctcgttgccgacgggatcaccgccaccatccgcgcttcgggcctccgactctttgtacttgtcctcgcccttcgagcagcggtcgacggcgagctgcccgtcgggcttctgttgctccgcaggcccctcccccatcgagtggggttgttcgtacctgcggagagcggagacccttggaccgcgtcaccgtccgaggctaggtcggacctcgccaaaggtgttgtcgatgccgagggtgctgccgctccctttagccgtcaaggtccgagcctgcaggatcagattatcttgtag

SEQ ID NO: 35772 - DNA, 144 bp, Zea mays
  Peptide Sequence Number=SeqID_79147
atggcaaaaagcatgtcaaatgagctcgtggtaccttcggacatggatcctttgaacttggatcaagtccacggtgtgaagaggtacaaggaatacgaaggatggcgcagagccgaagctatgcgcaggggagcttccgcatga

SEQ ID NO: 35773 - DNA, 480 bp, Zea mays
  Peptide Sequence Number=SeqID_79148
atggccgccgttcccgagtaccccgccaccgcagcgggcaggattcgggtcggcggtgtgcaacatgactcgcggcagcacgtacctggcggtggcggcgtggaggcgacgacgacgaggtccacgtcgttcgaggatgcggtgccgccggggagtttctctgtgtcggccggacactcgccgctgccagccctgtcgcgcgtcggcaacggggtggcctactgctgcgcctggatcgccatgtgcttggatcgacgatggagattgagtaggtgcgaaggcggctgtcgtcgctgcatcaaagattcacgagcatcggagttcaaggttatggatgagaggcagaacacggcggagattgtctggagcgcggggggcgaggggggggacgcgagaaccgcagaggtgggggacgacggtgcaggatgggtgagggggcggttgctacgcacgcgggcgccgtcgaaggtggtaggttga

SEQ ID NO: 35774 - DNA, 228 bp, Zea mays
  Peptide Sequence Number=SeqID_79149
atgaagaccccggacgtcggtggcggcctgagcacctacactgtcaattcacgcttggtggagctggtggtggtggtggaggttgttgttgttgttgtctctccaaccgcgcttgccttatttcttggcggacctgacgtatttcctcgcgttcttgtcttatctgattttgcatctcggtcacgagattggggtaaccagtcgtataaggtgaatatccaagggtaa

SEQ ID NO: 35775 - DNA, 216 bp, Zea mays
  Peptide Sequence Number=SeqID_79150
atggcgagagtagcatgtaccctccgtggcaagaggctagatggtgagacaggcgatcaagccaaggatgaaggcaagaagagcttcgaggtatcgagtgcacgggagaaggtcaaggagaccaggaacccaaagccaggggtgaagaagaagacttgcaaagtcaaggttgatcgagttaagaagagttatggtgcatcaaggatcactacataa

SEQ ID NO: 35776 - DNA, 117 bp, Zea mays
  Peptide Sequence Number=SeqID_79151
atggtaccttcgaacatggatccttcggacttggatcaagtccacggtgtgaagaggtacaaggaatacgaaggatggcgcagagccgaagctatgcgcaggggagcttcggcatga

SEQ ID NO: 35777 - DNA, 162 bp, Zea mays
  Peptide Sequence Number=SeqID_79152
atggtgggtacaagtgcggtcactgcacggcggcagccggggtcagtggagcattgtaccatgcaggatttggttgatggcgtgacttggcctaccaccctgccaccgggttggacggtcaagtgggatgtggctccggcaggagaggagcatgaggagtag

SEQ ID NO: 35778 - DNA, 256 bp, Zea mays
  Peptide Sequence Number=SeqID_79153
atgaatgcacatggctacagatgcaataatgacttctgcctccatatctctaaggatatgaagctgcatcataccccttctcgggcaacatatgatgctcaatgtaccgagacaaccgatcaagccaaggatggaggcaagaagagcttcgaggtaccgagtgcatgggagaaggtcaaggagaccaggaacccaaagtcaggggtgaagaagaagacttgcaaagtcaaggttgatcgagttaagaagagttatg

SEQ ID NO: 35779 - DNA, 84 bp, Zea mays
  Peptide Sequence Number=SeqID_79154
atggcgaagtctttcatcatcgccctagagggcccagctctcacctggttcaccagattgcctcctgtgatacccggctcctga

SEQ ID NO: 35780 - DNA, 261 bp, Zea mays
  Peptide Sequence Number=SeqID_79155
atgaagatcacaaggaagatcaacaaggaccttcagcctcagaatgaagttgtacacgatatggaaagcgtggtctgggagaaggatgaacagttccgaagctacgcatggagaagctttggcttagcggtggaaaatgaaaccgacttaaagatgaaaaggctatttagaccccgatggattgctatagagttattagcaaatgtaaagggcatgggtgtaattttacatgggctgcgtcccatgcctataaatacatga

SEQ ID NO: 35781 - DNA, 315 bp, Zea mays
  Peptide Sequence Number=SeqID_79156
atgatgatgaagataatcaaccttcaacatcatcctctgaggacgaagaaaatgtccgacgtgtcggaaaggttgaggatcttctctttaacattgatagaaaaaagcaaagaaagagaggatgcttcgcatgaggggagaagggccacttcagggacagctgtccaactatggtcgaacccacaaaggggaggagcaaaggcaaggcgcttacaagtgtcaaaatttgggatgactcttcaagcgaagataaacctccaaggacgtgaagccaccgatcctcatcacgctcatcatgctcatcacgtttgctag

SEQ ID NO: 35782 - DNA, 177 bp, Zea mays
  Peptide Sequence Number=SeqID_79157
atggcggtcagacgggggattcttgcaagtgctcttcccataaactgtagcgggttttcggaagctagtggaactttgttaaggcctcgtagtgttgccctgcctcgcttccttggtagaggagaagaacaagtggttcaggaggagccacaaagcgaggagtttgatctgatctag

SEQ ID NO: 35783 - DNA, 177 bp, Zea mays
  Peptide Sequence Number=SeqID_79158
atggcacccaagaaagctaacccgaaggctgacgaggctgcgaaggcttcgctcactggagggcgcggacctcaccgaggacgtgagtcctcggcgtctcagcggaagagcagctacagctgcgcgtccctgcgcctcaagaaccgcaatctccagaggcagaaaagagaaaattag

SEQ ID NO: 35784 - DNA, 574 bp, Zea mays
  Peptide Sequence Number=SeqID_79159
atgactccaatccaacttaggcacgccgcatgcctcgcccgcaaccctagccctagccgcacaacgccgcactggtccgccgccgctctgccgcctctgcgtgtgagcgcgtcgatcatccaccgccctgctgcgtctacggctctacgcgtctgccgcgcgaagcaccagccctacaggcctccactctgtatcggtctccgcggtctcggcaactcgactctgcactggcgactccacaccggcgactcggcccgcgtcgattcaccgcaccgcgttctgcacttctgctccaactccggcttcggcgtcctgctcctcggtgcccacgacctcactcagaccgacccagcacgcaaggtgactattgaagaccatcctcacttattagctgggaagcatgcatcagtgcacccatgcaaacatgcagctgtgatgaaaaagatcatcgacgttccaatgtcggggggagtggaaccagaagttgacaacgatagtcataccgactatcgagtacgattatacaatggacgtcgaccgtggcagtacaagctgattattggttggcttgaag

SEQ ID NO: 35785 - DNA, 606 bp, Zea mays
  Peptide Sequence Number=SeqID_79160
atgagcgatgtggtgttactcggtagaaatgctcgcaaaggtcgactagaaattggtcatgagctttctttgaacattgctctgaaagcgggaacgctttctcataaaagagtaacagaacgaccgtgtagtgcgactgaagctcgcaataccataagtcgtttttgctcacgaatatcagaccagtcaacaagtacaatgggcatcgtattgcccgaacagataaagctagcatgccaacggttacggccaagttcgccttatgctattgctcaactacaatcaatgaacatgatgagattatctatgatacgatgttttcccatctcttattatcatgttatacttgtggccatcaagggggctcgagtggtttctcgagtgcctctccgtcgcaatgagactgatggttttagttatgactatggtgctgctagtccactacagccaaacaagatgcttgatgagtatgttgatgtgtactcacccttgctctacacaccaaaccccccatccccaggttgtcagcattgcaaccattgctcaggagaagatgaagccgtggaaggagacttccaggagttccaagactacgacgagttctag

SEQ ID NO: 35786 - DNA, 390 bp, Zea mays
  Peptide Sequence Number=SeqID_79161
atgaaggattgtccctctcgcctaatgactggtttgtcatcactccttacctatactcttataaagtacaaccactcgagactgtgtgggcagtcgcttgatctgaacttgcacggtccgaaccctaggattatgacggctggggagcaccgggaggataaggaaggggaatgttttgtccggtttggacatggtggtggccttgttcctcctggtataatcgctaaggtaaggacgtgcaaggaaggagagagtttcagcattcggatctcacgacgagaaggagtcgctgatcgggtaagagttacgcctgttcccaaccttgcctatggctgttggaccgctgatttgcttcgctctgtatatcgggctgcttcagccccactctga

SEQ ID NO: 35787 - DNA, 279 bp, Zea mays
  Peptide Sequence Number=SeqID_79162
atggatctcccgctcctgtcgagactcagcacccgtaccgctcacctcagcctggacaccatgcttatgatgtcagacaacaggcgtagaggaggaaggcgtgctcagcaggagcaagtagcaccgcaggatgaggcaccccagcaacagcaactggcacccccacccccaatgtccatcgagaagatgttcctaatgcagactcaggcagttcaagccatcggtcagactctggccgccattcagcagcagcagcagcaaccaccacctcagccttag

SEQ ID NO: 35788 - DNA, 222 bp, Zea mays
  Peptide Sequence Number=SeqID_79163
atgttcagattacaggtggcaatgagactgatggttcttggttttgactctggtaatgccactgctcaggagaagatgaagccgtggaaggagacttctaggagttccaagactacgacgagttctaggcgtgggttagcggcaacccccagtcggctgcctgtgaaggccacgtttatctacgtttctgttggggacttgttctcaaatgcttcgaattaa

SEQ ID NO: 35789 - DNA, 144 bp, Zea mays
  Peptide Sequence Number=SeqID_79164
atgttcagattacaggtggcaatgagactgatggttcttggttttgactctggtaatggttgtccgcattgcagccactgctcaggagaagatgaagccgtggaaggagacttccaggagttccaagactacgacgagttctag

SEQ ID NO: 35790 - DNA, 767 bp, Zea mays
  Peptide Sequence Number=SeqID_79165
gagcgtcgacgacaggagcaggagcagcagggctcttctttctcgctccagtaggagataaagtctatgaggagctgctcccccgtgcttccactggacgcgccccccctacaccaccactgagcgccccagcccctggagtagctgctggaggagacccagatgacggaggtggcgacgacagctcgagctttcgcatcgacctttccgccagccaggagctggaaggatgggttgctcgacccatcacttgcaacgctgctcgcgggtgtcacttccacgatgcgctcgacaccctgctacgtcgggcacttgaccggcatacttggtctatcgagtatcgttgtgtggtcttccagcacagtcgcggggtctacctggaccgctgggaggcgacctgcttggtgcgtcgtccggagaacagtctctggggtgcgaagatctgctcagagcatggtgtggcggccatgcaagatgtcgcacggtgtgcgctttcgcactactgctcagtgctcggtggggtagtcgacggtctcaacctgaagtattacccccgccgcccatctggcatcacaggaggcgtggttgtctcacctgttggtgaggacaatcctaggttgagcagcacagttgtcacacccggttttagaaggcaaaccgaatgcaaaccatgcagccgactgggggttgccgctaacccacgcctagaactcgtcgtagtcttggaactcctggaagtctccttccacggcttcatcttctcctga

SEQ ID NO: 35791 - DNA, 300 bp, Zea mays
  Peptide Sequence Number=SeqID_79166
atggagaggaccattaaggacttgggaaaggccaaggtgttgacgaggagtagcaagggcgtccacaacaggaaggagatcaactccgactcggctgcgacttcatctcaggttttaggaccagataaaccttcgtggcgaggtcactcgtgtgtcacgggtgataaccaatggagttgtgttgtagtgattgcgaggagccgttcacttggagacttggatcatcaacgtcaaggtctccactcaatcaagttatcgtacctcacggaagaacgagcctcatactctatcaccatttag

SEQ ID NO: 35792 - DNA, 786 bp, Zea mays
  Peptide Sequence Number=SeqID_79167
atggcggagcgggcggcgattgatcagaggatggcagatatgttccagtacatgcagagccttagcgcgtcacagggtttcgctcctccacctccatcgttccctgcagttgaccctgttgtattccatactcctggaaaacaaataaaaaaggtgcctactggtcactttgccgagtgtgatactcggcaaagaggtgctttgtcgagtgtcaagaccatagcactcggcaaagaaccaagacctgggcaccggtataggttctttgccgagtgtaatgtctctaacactcggcaaagaagcacgttttgccgagtgccgcacctagcactcggcaaagaacctgacatggggaccctccctcgcgggatctttgccgagtgccaccagggacactcggcaaagatggattcgttgtcgagtgttgtcggtcagacactcagcaaagatggatcttttgccgagtgccaccggggacactcagcaaagatgccgtctccgtcacccggcgccgtaacggcagcttttctttgccgagtgctatctggcactcggcaaacctctttgccgagtgcccgagaaaaagtactcggcaaagaaggctttgtcgagtgcgacattcggcaaaggcttggccgagtgtttttaagtctttgccgagtccttcgggcactcggcaaagcctgcgattccggtagtgatataccgggtccagggaggctcaccacgttggcgctcttgttccttggatatcccacccggagctgcacggtcacgggtggctag

SEQ ID NO: 35793 - DNA, 393 bp, Zea mays
  Peptide Sequence Number=SeqID_79168
atgcttgcggttatgagcggccaagggagctccattgattacagatacttgatcagagatgtatggtttacaggtggtgatgaggatgatgattttggttatgactatggtaacggagctcgtcgtggcaacacctgggcgggattgtactccgggccacctgaatcactcattggacctcttcctacaccgtcgtccgcttcctaccatggtcgagctccttcgacgccttcaccatcgatgatagtgctccgggcgcctggcacgctctacgccgacgagcatcgccgtcgtggccctgttgcgccaccgttggctggcgtcgcattgggggagaaacgaccctggccgttggtccagcattgggcagccaagattaggctaggggtataa

SEQ ID NO: 35794 - DNA, 861 bp, Zea mays
  Peptide Sequence Number=SeqID_79169
atggagccgtccagctcccatctcctccctgttgttcacgtgcaggaggcaaggttgaagaaggcgccttgtctcaatgacgtgtgggcccaaggcaggccggtaacccccatcagcacaaagctgcaaaggcctgatgggcgcgattccggtcaaggctccgtccacccgagagacacgatctcgtcacgcccgagcccagcctcgggcaggaacagtagaccaaggcagatttacgcctcgcccgagggtctcctcaagcagtgggcgcaccctcgactcgcccgaggcccagctcgggcaggcttcgcggagaagcaaccttggccggatcgctacgccaaccgaccgtatcgcaggagcattcaatgcaaggatcgcctgacacctgatcctgacgcgcgctcctcagtcgacagagccaaagaaaacagcgtcgcctgccccgctccgactgctgtgccactcgacagagtgaggctgacagcagctaagtccagcctcgagcgccataggaagctccgcctcgcccgacccccagggctcgggctcaacctcaacgccagaagacggactccgccgcgcccgaccctagggctcggactcagcctcgacctcggaagacggactccgcctcgcctgaccccagggctcggactcagcctcgacctcggaagacggactccgcctcgcccgaccccagggctcggactcagcctcgacctcggacggcggtctccgcctcgcccgatccccgggctcggactcaacctcgacctcggaggagtcaccgcctcgcccgacctcgggctcggaccgaccacgtcacaggggggccatcattaccctacccctagctag

SEQ ID NO: 35795 - DNA, 702 bp, Zea mays
  Peptide Sequence Number=SeqID_79170
atgcgcagggttgcctcgagtcgcgacactggttccgtagtcgagaaggcgcggtactggcgcaagtggaggccagcttgcgtgatgcgtgggacccagcccccgtttcgtagggggaagaccttggagcgtgttggtgaagcctccgtccgcgacggctcaggacgcaagtggggagagtcgcctttaaaaggagggaacacaacttcgcggaagttggtacctttcagccatcgctcggcttcaaggattttcatcaggcagcccggctgcatcccctcgccggtggtcgcccaagacggtgaccaccagtttgatggtggggagaagcatgccgggctgcggcctctgccccgccctcagcttcaaggatgttcatcatcagtgctggggaggggagtgcgccgagttggggcctgtctccgcgtgggcagcggcccgctccttccctcaatgattagggggaaggacgttcgccgttcgtggcgctggcaactgccgcgtgtctggctctccggcctgagcggcttcggcgctgcttccggtgccacctcccaccgaggcagccagaagaggtttctctgccgacgagatagttggtgccacccgcggactgacctccgactctacggccttctgctcgtcctcgcccctcgagtggggacgtgggcgagggccttatcgcagcagcgtctgccctga

SEQ ID NO: 35796 - DNA, 1206 bp, Zea mays
  Peptide Sequence Number=SeqID_79171
atggcggcggcaggcgagcggaagcagcagtcaaggactgggaaaggggatgccccgaaagggatccttctccgcgaaggaagcgggccccgagccctcctactgatcagaggttcgaaggctggcccctcggaagggttcgacagccgcctcagagcactcgggctccgcgccctcctactgatcagaggttcgaaggctggcccctcagaagggttcgacagccgcctcagagcactcgggctccgtgccctcctactgatcagaggttcgaaggctggcccctcggaagggttcgacagccgcctcagagcactcgggctacgcgcccactactggtcagaggttcgaaggctggcccctcggaggggttcgacagccgcctcagaccactcgggctccgcgcccactactgatcaggggttcgtaggcttgcccccgaagggttcgacagccgcctcagagcacgcagagcgagggatgactctaggtacgtccgatacatggtcgaggctcgggctacgctcccgaggcttgggggctactctcgcgaacccggctccggccaaaccgttgacagcgtcaacataccagcccgagaacttggaacctgactatgcacccgggctacagccactggtaacccccatcaacacaaagctgcaaaggcctgatgggcacgattctggtcaaggctccgtccacccgagagacacgatctcgtcacgcccgagcccagcctcggataggaacagtagaccaaggcagatttacgcctcgcccgagggtctcctcaagcagtggcgcaccctcgactcgcccgaggcccagctcgggcaggcttcgcggagaagcaaccttggccggattgctacgccaaccgaccggctcgggctcaacctcgacgccggaagacggactccgccgcgcccgacaccaggactcagacttagcctcgacctcggaagacggactccgcctcgcccgaccccatggctcggactcagcctcgacctcggaagacggactccgcctcgcccgaccccagggctcggactcagcctcgacctcgaacgacggtctccgcctcgcccgaccctcgggctcggactcaacctcgaccttggaggagtcaccgcctcgcccgacctcgggctcggaccgaccacgtcacaggggggccatcattaccctacccctagctag

SEQ ID NO: 35797 - DNA, 258 bp, Zea mays
  Peptide Sequence Number=SeqID_79172
atggcggcaacagaggaggggcgagctggagtaggggggctcggcggctggaggatggagacagccggcgcgcgaggaggcaggctgagggactcctccgactcgtccgaggaggggagcggtggtgacggcgacgacgagggcgacagtggcgatggtggcgacgacggcggtggcggcgatggcgacgacatgggcgacggcggcaagggcgacgacggcagtgacagggccaatggcaaagcgccactggcttaa

SEQ ID NO: 35798 - DNA, 441 bp, Zea mays
  Peptide Sequence Number=SeqID_79173
atgggcaagatcaagaagggcggaagttcgtcgcaccactccggcgacaagcggaagcgcgagccgagtcccccctctgaggacttcggtgattccgagtactcggaggaggagttctcctccgagtccgaggggtcgccgaacagggctcaccgccttggcatacaatgcctcactgaccccgactgccgtcgtgcagtgaccgcacttgtacccaccataaccgaaatgggagaccacgtcttaggttgcgtgaggagtaaagtctgcggacaggttcactcagtacattcaaacgcttggcacatggtaccacaccttaatccttattccaatttccgtctcatagacaacgcatccccatggatcgttgtccacagaccatcatcattacgatataaaaatggatacaaccaattcctaacctcgcgcgagtgctag

SEQ ID NO: 35799 - DNA, 339 bp, Zea mays
  Peptide Sequence Number=SeqID_79174
atggcattgttggctattagtgaaaatggtcaaggcgatgacaacacaattcctaaatcaaagcatggaccaactgtgaaagttcctgaagttggaatgtcttttgaattcggagaaaatgcatatcagatccttagcgcctcccaaaagattccttctcgtccccgctccagtggatgccccatccctccattcaaggttggtggcggtcgcagtgcagctgttcccacactacaccccgtcagtctcggccactgcatagtctcaagaagcagaaatggagttgccaagatccatggccgttcttgtgctcgtgttcgtcgtcttgtgccgaggtaa

SEQ ID NO: 35800 - DNA, 447 bp, Zea mays
  Peptide Sequence Number=SeqID_79175
atgggcaagagtaacaaacgcaagcgcgagccgtctcctccattggaggacttcggtgactcggaatactcggaggaggagttctcctccgagtccgaggggtctccggctcccgtctctcccccggcgtcgtctgacgattcagacgactcccaggggattgccgcggacgtctggacttatatccgggccgtcgagcgctccgggctcgagggctcggatgagtcggagtactcctcggacgaggaggactcttcggactcgttcgaggagggcggcgacggtgatggcggtgatggcgaagacgacgacgacgacggaggcgacggtgacgacggcgacagcagcaggggcggtgacggcggcagcaagggcagcaacggtggcggtagcaggggcggcaacggcggcggcagcagcaagggcagcaacaaggccagtggctag

SEQ ID NO: 35801 - DNA, 333 bp, Zea mays
  Peptide Sequence Number=SeqID_79176
atggccacatgtcccgtcgaacttaaggttaagaacgtcgacggtacccacgttcttaatcttaagttcgatggtacccacgttcttaaccttaagttcgacggggccgtcgaacttacttctctaagttcgtccaaaaatcgccgtcggctatattcgtcggtaaacccacgttcttacggtgccaaaggtttacaacaagccaataaaaagacaaagaaaagggttcaacaaaaagagaaagggataactgaagtgtgccctggtctggcgcaccggactgtccggtgggccaccggacagtgttcggtgcaccaggggactccaagctaa

SEQ ID NO: 35802 - DNA, 342 bp, Zea mays
  Peptide Sequence Number=SeqID_79177
atgaacaaaaaaacactggcattcgagatgccactaccaacggaactccggttcccacctccgcaggaggagcgcgcgacgcttcaccttcgccgtaataatcgcgtcagaaaagggaccgggaaagggggataccccgaaagggatccttctccgcgaaggaaccgggctccgagccccccactactgatcaggggttcgaaggctggccctccgaagggttcaacagccgcctcagatcgcgtgggcccgacacccactactggtcaggggttcgaaggccagccccccgaagggttccatggccgcctcaggctactcgggctccgcgcccattactga

SEQ ID NO: 35803 - DNA, 219 bp, Zea mays
  Peptide Sequence Number=SeqID_79178
atggtggagaaaggccacgggtcgtgcggcgaaacagtggtcacccggtcggccatcaccaagcagaagaggaaccgggaaaggggatactccgaaagggatccttctccgcaaaggaagcgggccccgagccccctactgatcagaggtgcgaaggctggcccctcggaagggttcaacagccgcctcagagcactcgggctccgcacccactactga

SEQ ID NO: 35804 - DNA, 837 bp, Zea mays
  Peptide Sequence Number=SeqID_79179
atgggcgcgattaaggtcaaggctcagtccactcaagggacacgatctcgcctcacccgagcccagcctctggcaaaggcagccgaccccggaggattcacatctcgcccgagggccccctcaagcaacggacacaccttcggctcacccaaggcccagtcttcgcagagaagcaaccttggtcagatcgccatgccaaccaaccatatcccaagtccggcctcgggcgccataggaagctccacctcgcccgacccccagggctcggcccccgtctcggcctcggaagatggacttcgcctcgcccgaccccagggctcggactcaacctcgacctcggacgacgaactccgcctcgcccgaccccagggctcgggctcagccttggctccggaagacgacgaactccgcctcgcccggccccagggctcggactcaacctcggctccggaagacgacgaactccgcctcgcccgaccccagggctcggactcagcctcggctccggaagacgacgaactccgcctcgcccgaccccagggctcggactcagcctcggctccggaagacgacgaactccgcctcgcccgaccccagggctcagactcagcctcggctccggaagacaacgaactccgcctcgcccgaccccagggctcggactcagcattggcctcggacgacagtctccgcctcgcccgacccggggctcggactcgacctcgacctcggaagatagactcgacctcgacctcgaaggagcctccgcctcacccgacccagggctcagaccgaccacgtcacagggggggccatcattaccctacccctagctag

SEQ ID NO: 35805 - DNA, 111 bp, Zea mays
  Peptide Sequence Number=SeqID_79180
atggggtccaggcacagtgcttgctctgccgaggctgagtgccgaggtaaagaagaagtcgtcgaggcggatctccaggagttccaggacttcgacgagtccgaggattag

SEQ ID NO: 35806 - DNA, 321 bp, Zea mays
  Peptide Sequence Number=SeqID_79181
atgggcaaaacaaaaacagaaaacgataaggattcgatgcaacgcgaatgtgcaggcgaccaaaatcaagctattgccatgatatcatattacgcctcgtcaacagagccagcacaggtaagagggaaaaatgtataccttcagtactcaaatagacaggagattgtcaacaacaaggcaactggggaaggttcaggcaacgttttgcttgtgggaatggagggtgttgcaccagattctgtcagcattgatgttctacacgtggaatactttgatgtggcaggactgtcttttagtgatgctaacaaaagtatagaataa

SEQ ID NO: 35807 - DNA, 282 bp, Zea mays
  Peptide Sequence Number=SeqID_79182
atgtggagtgcccacactgctgccggatgttatgtgcccagtgtaaggttccatggcacgctggtgtcacttgcgcagagttcaagttccaatgaccgaggaaggatgagcagggcagagaggacctactgccgaggaaggtcgaacaagagagcaagtggcagaggtgcgggcattgcttctgctacctttgtgcatccccaatgtctagggacaaccgttgttgcaaaacctgcaatcaaacctggggaatgccttgaaatcgccaagctctctacttga

SEQ ID NO: 35808 - DNA, 1620 bp, Zea mays
  Peptide Sequence Number=SeqID_79183
atggcaagaaggactcgtttcgtggccgtcgccgccctcctcgcaagcttcctctccgtcgctgccgggcacccccggccactgcccgccgccggcctcccgggcgatcttttcggcctgggcatcgcgtccaggatccgcacggacagcaactcgacggcgaaggcggcgacggacttcggccagatggtgagggccgcgccggaggccgtgttccaccccgccacgccggccgacatcgccgcgctcgtccggttctccgccacgtcggcggcgccgttccccgttgcgccgcgcgggcagggccactcctggcgcggccaggcgctcgccccgggcggcgtcgtcgtggacatgggctcgctggggcgcggcccccgcatcaacgtgtctgcggcgaccggcgcggagccgttcgtcgacgccggcggggagcagttgtgggtcgacgtcctccgcgccacgctgcgacacggcctggcgccccgcgtgtggaccgactacctccggctcaccgtcggcggcacgctctccaacgcgggaatcggcgggcaggcgttccggcacggtccgcagatcgccaacgtgcatgaactcgatgtcgtcacaggcacaggtgagatggtgacatgctccatggacgtgaactcggacctgttcatggcagctctaggcgggttaggccaattcggggtcataaccagggcacggatccggcttgagccggcgcccaagagggtgcgctgggttcgacttgcctacaccgacgtcgctactttcaccaaggatcaggagtttctcatatcgaaccggactagccaagtcgggttcgactacgtcgaaggccaggtccagctcaaccggtccttggtcgaaggtcccaaatcaacacccttcttctccggcgccgatcttgctagacttgctggactcgcgtcgaggaccggacctactgcaatatactacatcgaaggcgccatgtactacaccgaggacaccgccatatctgtggacaagaaaatgaaggcactcctggatcagctgagcttcgagccagggtttccgttcaccaaggacgtgacgttcgtgcagttcctcgaccgggtgcgcgaggaggagagggtgctccggtcagccggcgcgtgggaggtaccacacccatggctgaatctcttcgtcccgcggtcgcgcatcctcgacttcgacgacggcgtgttcaaggctctgctcaaggacgccaacccagccgggatcatcctcatgtaccccatgaacaaggacaggtgggacgaccggatgacagcgatgaccccagccacggacgacgacgacaacgtgttctatgccgtcagcttcctctggtcagcactgtccgcagacgacgtgccccagctcgagagatggaacaaggcagtgctggacttctgtgatcggtcaggaatagaatgcaagcagtacctgccacactacacatctcaagacgggtggcgacggcatttcggcgcgaaatggagcaggatcgctgagctgaaggccagatatgaccctcgggcattgttgtcgccgggccagaggattttcccggtgccagtagagtcatctggcattgcttctgcctga

SEQ ID NO: 35809 - DNA, 183 bp, Zea mays
  Peptide Sequence Number=SeqID_79184
atggctggctggctgctggtcttgggtgcagatctgatgtggggtgatgataattcgactattgctgctatgatgacatgtttgaatgataaagaagaaccaatggtatcttcggactcgaatcggtaccacagtgggagaagcccaaagaatacgaaggtcgacacagcaccgaagctgtga

SEQ ID NO: 35810 - DNA, 1386 bp, Zea mays
  Peptide Sequence Number=SeqID_79185
atggctccgttagggttgtttttgctactctgcttctgctctcacctgtttcgctgctcgcccgatctcgcgctgccggtactgcatgctaacagtggtaacaaaaatgcattcaaaacactaattgccgcagaatacagcggtgtcaaggttgagttggtgaaggactttcaaatgggtgtctccaacaaaactccagagttcctcaagatgaaccctattgggaagattcctgtcctggagactcctgatggtcctgtttttgagagcaatgcaattgcaagatatgttactcgcttgaaggctgataacccactttatggatcttcactgattgattatgcccatattgagcaatggattgactttgctgcaacagagattgatgcaaacattggaaagtggttgtacccacggatggggttttatccccatgctggtgtggtagaagaatcaactattgctgccttgaagagagcattgggttctctgagcacccatcttgcatcaaacacattccttgttgggcattcagtgactctcgcggatatcgtgatgacatgcaatctctgtatgggatttagccgtatcttgactaagagttttacctcagagttccctcatgttgagaggtatttctggaccatggttaaccaaccaaacttcaaaaaggtcattggtgacgttaagcaggcagaagctgtgccacttgttccacagaaggctgctccagccaaagtgcagaagcctaaggaaaccaaaaaggaggctccgaagcccaaggtaactgagaaatcagcagaagaagaggaggcaccaaagcctaagccaaagaaccctcttgatttgcttcctcctagcaagatgattcttgatgattggaagaggctgtactctaacacgaaaaccaacttccgtgaggttgctattaaaggtttctgggatatgtacgacccagagggctactccctgtggttctgtgactacaagtacaatgatgagaacacagtgtcgtttgtgaccatgaacaaggttggtggcttcctgcagcggatggacctgtgccgcaaatacgcctttggcaagatgcttgtggtaggctctgagccccctttcaaggtcaaggggctctggctcttcaggggctcagaaattcccaagtttgtcatggacgaagtctatgacatggagctttatgagtggaccaaggttgacctctctgatgaggcacagaaggagcgggtcaatgccatgattgaggaccaggagccattcgaggggcgaggccttgctggatgcaaaatgcttcaagtgaggaaagagtttttgggtccaattctaaaacagccatggatgatagcttttgatatggcgtgctggttatga

SEQ ID NO: 35811 - DNA, 822 bp, Zea mays
  Peptide Sequence Number=SeqID_79186
atgggcagagatgaaggatttggtgagaaagccaaggctgttgtgaagatctcatcgtttcagatcattttggctcagggtgtcacaggctcgtttccatggtctgccctgccctttgccccaatgtggctggagttgatggggtttacgcacaacagaactgggctcctgatgataacgtttgcactggcaagctcacttggagggctgctaggtggaaatatgggggatcactttgctacttgcttcccgaattctggccgaatagtcctgtcgcagataagctcagcttctgctattccgttggctgctctgttgcttttggggctccctgataactcttctggttccttgcatggacttgtcatgtttatcatgggtctgagcatctcctggaatggtcctgcaactaacaagcaactattggagatgcttctgaataattgcggagagcctgtccataggcaggtcattgataatggccttcttccaatacttgtgaagatagtgaagaaaaagaaaagaaggttaataactcatgcaaatgcgaagagcaagagtgaaaagttccctccgccgcatcaggatggcgcacttggatttcccttgggctgttcgaaccacatggaaccttcatttgaacccccaaacccttctcccttcagcactgtatttccttacgaaaaaagcaccgtgccaacctggtccggaccattggcgaactctacagctggcaaccagaagcggaaacacaagtctggccgctcctcgaaacaaccagcaaccgcccatgccagattatacacatcattccatgcttag

SEQ ID NO: 35812 - DNA, 177 bp, Zea mays
  Peptide Sequence Number=SeqID_79187
atggcctcgcggtcgcggaccaccatggttgccccttccccctcgccagtggaggcggctccgcgcttgaggctgcggccgccgccgaggaagatgactgcggaattactcgagactgtgtgcaaagcatgcccgttgtctaggaaacaagttgcgtttatagcttcagagttttag

SEQ ID NO: 35813 - DNA, 972 bp, Zea mays
  Peptide Sequence Number=SeqID_79188
atggcttccgtcgtcggcgctgaggtggtggcggctgaagaagtcctcgtcgccgacgggatcatcgccaccatccgcgctccgggcctccggctcgttggctttggtagcttgtcctcgcccctcgagtggggatgtgagcgaggggctcgttgcagcagcgtctgccctgaggtcatcgctgctgctgtttggccacccagagcggaggtcgttatcgctgctgccggagcgagcgtcggtgagccacctagggtttcgtcgcctcgcaggccctccaatgtggggggttgttcgtacctgcgggggtggaaccggagttccgtttgtaatggcacattgagtgtcggtgtctgttcgttgtggctgtcggggcctgaacatgagcctagccgggccgtccactggcgggaccgacgccggagttgggttgccgaggccccgagccgggctgatgtcctcgggggacagctggctgaggctacggagcggccggtcgagccgtctgttcgggccgggttcccggaggagaccctagcggtgatggcccatgcgtggtgccaacaggttccttcgaggtggagatcttccgaccgtgttgtcgtccgaggccaggtcggattccgccgaaggtgtcaaaggttcatctacaacgatactaattcgactgtccggaataccgtagattattccggacaggagaagctttttggaaaaacaggccaagcgcggaccgtccgggcccctgccgcggaccgtccgcgacacatgaatgaccctcggacagaaccaatgcaaaaacacaagtttccactacagactgtccgaaggaaaagcaaagaccgtctgagccctcgtgcggaccgtccggcctcaggggcggaccgtccggtcgccgttgatctacaggggcggaccgtccggacatggctcgcggaccgtccgcgctcagcagaaaggtgcaacggctag

SEQ ID NO: 35814 - DNA, 678 bp, Zea mays
  Peptide Sequence Number=SeqID_79189
atgcaggcggcatgcaaccgtaccaagggggcgcacccttttgactccgacgcgtccagcatgggggcccaggcccacacgtcatgtaaccagcgcgctggttactacgtgcgagaaactgcaccaccacttgcgctaataccgcgccttctcgactggagaaccagtgccgtgactcgaggcgaccctgcgcatggcccaacagtgccaaccgagcacatcgatcacgggtcagacagccgcgggagaaggcgcgacggtcaatatggccaaaagtgggccggcagtaattgcggcggcaggcgggcggaagcagcgcaagtcgtctgcaggctcacgtcccctcctgggacagcaagagagccctctcccacgggaccgagaaaggggatactccgaaagggatccttctccgcgaaggaagcgggccccgagccccctactgatcagaggttcgaaggctggccccttggaagggttcgacagccgcctcagagcactcgggctccgagccctcctattgatcagaggttcgaaggctggcccctcggaagggttcgacagccgcctcagagcactcaggctccgcgcccaccactggttagaggttcgaaggctggcccctcggaggggttcgacagccgcctcaagccactcgggctccacgcctactactga

SEQ ID NO: 35815 - DNA, 648 bp, Zea mays
  Peptide Sequence Number=SeqID_79190
atgcaggcggcatgcaaccgcgccaagtggacgcgcttctccgactcccaacgcgcccagcctagaggcccaggcccacacgtcacgcaaccggcgcgccggatgctgagaagcgggcgacgcttcgccttcgccgtaataaccgcaccaaaaaaggcttcgagcctccttactgatcagaggttcgaaggctggccccccgaagggttcaacagccgcctcagatcgcgtgggccctacacccactactggtcagaggctggcccccgaagggttcacagtcgcctcaggcgccgagcgagggatgaccaggggtacgttcgatacatagccgaggctcgggctgcgctcccgagctcaccggagacaccatgttcggtgcccatcgagggtaacatggcgctctcccccctcctccttgcggaaaggcgacgtaggggcgtatgtaaaaaagccgagtctgtccctgatcgccctcttgccctgtgcggaggctcgggggctgctcccgcaaacccggctccggccgaaccgttgacagcgtcaacataccagcccgagaacttgggccccgaccgtacacacgggctacggccagttcgcatgagggaacaaccagaccagccgaagcattacgcgaggcattaa

SEQ ID NO: 35816 - DNA, 705 bp, Zea mays
  Peptide Sequence Number=SeqID_79191
atggcgccccgcaagccctgtgacgacggtggctctcagctctcttacggaagcaggaggacgtacaagatatccctcaccgctgaagacgatactgacaccgccgagtttatcttctttggacgaatggcgcagcgcctcattaaaaaaaatgtggacgccctcatctcgactaatccacccggtttcattccaagagaaattacaaatctactggaaaagtctttcgagtggaatgtcttttcactgcgccctctccccatcaactgcaactcttctggctctaacctatttttttgtccgcctgctaactccgcaccaggacaaggattaggtgtcacacaaaacaagggggctgccttcatccgcgagccgtcgctgacaccagagagtcacaaagtttcgtctagcgccaagtgtaatttacagacagccacacatcagggagccaatctgctgctaggaacagaaattatcacttctccgcctaacgtgcagacgccatcaggagctgcttacagtgtgctagatgggtctacaaacaagactcataaaggtgttactggaaaaaaggagatgacgatgctgctggttccgcagacgttgatgctgagtaacgtgcttttggacacgagcaccaccagctatggaggcccgcttttgggaactgaggatcgcttttgggaactatcccagttcatctag

SEQ ID NO: 35817 - DNA, 210 bp, Zea mays
  Peptide Sequence Number=SeqID_79192
atggcgcttcctgttgacgtggctggcctgcgccctaggttgggcgacgtggaggctcctccgaagccgaggggcgctgcagtcggagtggcgcaggcggcgctgtccttctgccaggccggtcagtggagcggcgaagtgacggcggtcactttggctctgccggggggcgcgcgtcaggataaaggtgtcaggccacctttgcgttaa

SEQ ID NO: 35818 - DNA, 657 bp, Zea mays
  Peptide Sequence Number=SeqID_79193
atgaaggcagcccccttgttttgtgtgacacctaatccttgtcctggtgcggagttagcaggcggacaaaaaaataggttagagccagaagagttgcagttgatggggagagggcgcagtgaaaagacctgcactcaaaaagaaacatactcagttagaaggggggaatgcctgaccttgcggaagtatggtcgacgatggctatctgaattaaactacaagatatcagggcagatggacatgtcccgaatggagacgttgtatcatgctgacaaggagaagaccgaagcacttatcctggagctggtcgtgtggcttcatcatctaatcagcaaatcaggaaacaccagtggaggtgtaaggtctcctatcaaatctccagtcagctcaccaacacaaaagggtgctgcagtgacactgttgtcgggcaaaacaaacaatttgccaccgattctcacccaagaggaccaggatatgctaaggggtgttaagtataggaaatttgttctagaaataagcaaaagtcaagagtttgacacaaagtcaagtcacagcaaacagagtaggttgagcaagagcaacagccactctccggctagtggcagcagaaaagacttgttcccagcactaaacttcactaaagctaagatactataa

SEQ ID NO: 35819 - DNA, 462 bp, Zea mays
  Peptide Sequence Number=SeqID_79194
atggcgcttgctcggatagggcgtagaccaccagcgcgagatggcaaagggataaaagatgtctcaaaagcatgggtaggtttgggtaagaaggagtatgatgtaattgtggacattactccacaactcatcacactcaatcaaagatcagacaaatatcataagaacaaacattcaagcataccaatatctacaaaaatagttttgcttttgttcctaagattaggtctcctatttctaaaggtcactttaggtacaggatttcaaagtgtgaaatccacatttgtcttagaaagaaaaggaccgccatcgcagcaaaatcctcccgagggcctccctacactgaccactcccctactgcccttgcccctttcagaacatgagtgggtaaaggaagtgatcaagggcacaacttgcctggcacttgagattccagaggtactaagtggtagacaatattaa

SEQ ID NO: 35820 - DNA, 480 bp, Zea mays
  Peptide Sequence Number=SeqID_79195
atggaggaaaagacagcgaagaaggcggcaccggacaaatctgaagttcatcccttgaacgtgatcaaggtcacgatggaggaccttgcagaggcagaccggaaggagattgaagaagaaatcgcacgagagatggaggagaaatggaacgagagattggcttgctttcgaaaaaccaagaatggtgtgatcaaacagattggtggggcaagcacgtccagcaagaaggttcaaggagaattgcagggtaagcgtgtagaaaatctttcatatgcgcctagttataatggagcatctgcgcataatgatgtaaaccaaactgttaatgagaggagtggggattcagtaatgaactttaacctacaacagccatattatcagagtatggcatacgtgccatctattccacctatagggaacaagatcccacaaggatttgttccaaatgattacaggattggggagctgaaagggaattag

SEQ ID NO: 35821 - DNA, 279 bp, Zea mays
  Peptide Sequence Number=SeqID_79196
atgggcttcgtcgagggctaccgcgtcggcggcggcccgctcggggaagggcttgacaaggtgtaccccggcggcgccatcgacccgctgggcctcgccgacgacctggacaccaccgccaagctcaaggtgaaggagctcaagaacggccgcctcgccatgttctccatgttcaggttcttcgtgcagcactacaggaaacgaagtaacttccgacggcccaagccgtcagacttaagctatgtccgacggtatccgcttatgtccgacggtttctag

SEQ ID NO: 35822 - DNA, 1251 bp, Zea mays
  Peptide Sequence Number=SeqID_79197
atggggtttcgacggcaacacaccatgttctcacatgttcccccatccattagcagcagcacacacaacaacaggaatgccaaactaacaggtgtaaatcagggccctcacaggaaaggcacatgctatgggcaaaggcaccgcggagcacagcggcgtatgacgagatccacagaagagacacatgctgtgataagcaaggttgctctaccttgttgcgcgagggatgccaaattatatggcaacatgatttccaagttgagcaagcttgaagacacggaagataatggccaaatgagtcagacagtaaacaagaagcgtgggctcttatggccactgtcggaaatggttaggagattcttcactgccgatggtagcaagggtttcacgctgtggcctgcgctgaggctattgatcccggatgaatggagaactggcttgaaagctcttcgagctgacagtattagtaaactgaagaaagcatttccagaactggtccaggaggtttcaaggccatccaatttccaggatttctacatatatgcatttcgttattgcctcacagtattaggcttgcagttccaccctcaggttgacaagcttaataattacctcatggcaccgcggagcacgactgcgtacttcgagatccacataagaggcacagaagaggagagcactgacctggctaacggcgaagcgccggccgcaacccacgcgccgtccttggccggcgtcactccgtcgcagtctcacagacccggtcgcccgcgccgttcgtcgcagatcacggcaccacgcacgcccgacagccgacgaccgtcctcgcgcgcggacgccggcgcgctgccgttggcagccgcgtcgcagccgagatctgcatcgcggtctggggctgtgtcgcaatcgagctccacgcgaagcgccgggcgggcgcaacccacgcgccgtcacgcgctgtcgctggctgtcgtggctccgtcgcgagctgagaggagacgggcgctcgcgccgtccgtcgcagatccagccgcccgcgccgcccgtcgcgtcgtgctgttgccccacacccacgcaaggagacgggacaacctgagaggagacggacgcgtcgtgctgtcgtccccactgcgggcccacacccacgcgaggagacgggcgcgtcgtgctgtcgtcccactgcgggcccacacctacgccgaccaacagccaaacgggcccactgtaccgcacgcacgcgtcgcagcctaa

SEQ ID NO: 35823 - DNA, 435 bp, Zea mays
  Peptide Sequence Number=SeqID_79198
atggccacgtcggcgctgcaacagaccaccagcttcctagggcaggccctggtctcccgccccgccggcgtcgatgccggcagccgcatcaccatgcgccgcaccgtcaagagtgctccccagagcatctggtacgaccctgaccgccccaagtaccttgccccgttctccgagcagacgtcgtcgtacctgacgggcgagttccccggcgactacgggtgggacaccgcggggctctccgcggaccatgagacgttcgcgcgcaaccgggagctggaggtgatccactcctggtgggcgatgctaggcgcgctggggtgcgtgttcccggaggtcctggcgaagaacgacgtcaagttcggtgaggtcgtgtggttcaaggccggcgcgcagatcttctcggagggcggactagactacctggtgttgctatga

SEQ ID NO: 35824 - DNA, 1143 bp, Zea mays
  Peptide Sequence Number=SeqID_79199
atggaacatgttgtagcagtactctacccatggaagtcagtccacccagatgcagcgtcgatctccaacgcaggtttaattgactatatgattggaaatgggcagcatcccgaagtttttcatttggtacaaaattttaatttggaggacaagtatcctccattttctcttctgaagggatacattcagaaggccaagcagacttttgtggagatgtttaaaaagagtcaaacacacgagtccttggaattatatggctgcatggcgccctgggtagcacgaacactggacatccaggccacattatgctgtagacagaaatttgaggccgctattcttctgttgacagatttttttagggtgggaatgcatacctcttccaggatgctgagaggtatggctaggggttgcagggaggtcaccggcttagtggtgggtggaatcgtgagatggtggtggagtggttgggcaggcatggaggcaggggcattgtacttggaggtggagggcagtggagtaggtggggagcaggatccatggtggaactgggctataccaaaggaactatggattgcacattatctagctgagcagaaactcactgattctaagcaacgcagtgctatcatggcagaaattaaatatttgatgagtggatatgaaaagaaacaaaggtcagaaaatctctcaacatgggcttcacagcatccgccaacggaatctaaaaggaggaacaggaagcgcaaggaggaggagcaggagcaccatgaagcacaatacaaccagcagcagcaggaacagaatgaaaacaagttaattcaaggaaagcggcatcagctgcatcaagaaaatatggcgcaagtgacacagcagcagcagcagcatatgcaaccgacaacaaggccagctactcttaagcttccgacgcctgctattcctctggttctgaatgcagctcagatccaaaactttgcgcgtccagcttacgccgctgtgcctggagttcacaattaccctgcccagccaggttggtctgcagctcaaggaagtccattcgtaccacagttcatgtcaccgcagtatatgggcctgccatttaatccctttggccttcatcctacttgctatcccagacgcagatag

SEQ ID NO: 35825 - DNA, 1119 bp, Zea mays
  Peptide Sequence Number=SeqID_79200
atgaacaaatcatccggagaaatcccatggcgccggtatggggattgttaccgagttcgcgcgttctgtttgaggacgaacgacctggcagagagggccccaccggcagtgaggggttccgagtgtgaggctgagctgcggtgggcgcgcgaaattgggctggcggctagggtttttgggggaaacagcatacatgcccagatctatcctccgttgtgccaacagttcagtgcgctgctcgatgagggaaggatatacaacttgaagtatttcttagtcaggaaagctaacagattctacaaaccggtagaaaattgcaacatgatcagctttacaaagtggactacggttgaggttatcctccagatcccccctgcttttctggtttgcacatataacctcactcccatagaccagctccaaccgcgcgtggactacaaggaatatttcactgatgtgctcggtgttgtcagcgtgatctcccaggtttcatcagtacgcacaaggggacgacaggctgaggttatgaagagaacagtcactataagcaatgcaagggataccggtccaaccgttgatgttgtgctttggggcgagcgggccacaactttcccagctgaacaggtccacagggacagtggatcctcaccacagatcataatatttgttggcactctcgtgaggagctacgctgataatgtgtctttgtcgggaggatcgtcatgcaagtggtacataaacgaaccggtcccggaagtaaacgctctcagagctagtgctgaaaccaaccaccaccctgtcatctgggatcagggcaaagcagctgctgagagtacagtaattgcagttcctgaacataagaagctcaaggatattaagtacctccatccttttgaaaataagaagaaggaatggcttgtcatcgtaaaggtgctcaagattgatagctcatggtggtacaacgcatgcaaaaaatgccttaggacaaccaaaccgcacggtgacacatacaagtgcaccaatatttcctgtgacaacataggatcgcctaccccaaggtgctgcatgaatgctgccgtagcagagaaagccaaatatgagaagcctggtaaagcataa

SEQ ID NO: 35826 - DNA, 642 bp, Zea mays
  Peptide Sequence Number=SeqID_79201
atgaaggcagcccccttgttttgtgtgacacctaatccttgtcctggtgcggagttagcaggcggacaaaaaaataggttagagccagaagagttgcagttgatggggagagggcgcagtgaaaagacctgcactcaaaaagaaacatactcagttagaaggggggaatgcctgaccttgcggaagtatggtcgacgatggctatctgaattaaactacaagatatcagggcagatggacatgtcccgaatggagacgttgtatcatgctgacaaggagaagaccgaagcacttatcctggagctggtcgtgtggcttcatcatctaatcagcaaatcaggaaacaccagtggaggtgtaaggtctcctatcaaatctccagtcagctcaccaacacaaaagggtgctgcagtgacactgttgtcgggcaaaacaaacaatttgccaccgattctcacccaagaggaccaggatatgctaaggggtgttaagtataggaaatttgttctagaaataagcaaaagtcaagagtttgacacaaagtcaagtcacagcaaacagagtaggttgagcaagagcaacagccactctccggctagtggcagcagaaaaagacttgttcccagcactaaacttcactaa

SEQ ID NO: 35827 - DNA, 507 bp, Zea mays
  Peptide Sequence Number=SeqID_79202
atgggtcgagcgcgaagggcgagcgcgaaggggggaagcgaggtggccggagacgggcgtgagagaggtggaaatcccgcggccttcgtgttcgtcccgcgcccaggtcgggttgggcgacgtggaggctcctccgaagccgaggtcgagtctgtcttccatggccgagggccgagtccgagcccctgggtcgggcgaggcggaggtcgttcggcagaggccagggcggagtccgagccctggggttgggcggagcggagttcgtcgtcttctggggctgagcccgagtccgagccctgggtcgggcagagcggagttcgccgtcttctggggctgagcccgagtccgagccctgggtcgggcggagcggagttcgccgtcttccgggactttagcccgagtccgagccctgggtcaggcggagcggagttcgccgtcttccgggacttagcccgagtccgagccctgggtcgggcggagcggagttcgccgtcttccgggacttag

SEQ ID NO: 35828 - DNA, 279 bp, Zea mays
  Peptide Sequence Number=SeqID_79203
atggggaagcatgtcccatcactcctcatgctcctcctcagccgagtgaccgcacttgtacccaccataaccggaatgggagacctcgtctcaggtcgcgtgaggagggcaatctgctgccaggttatgcataaaccggggcttgccttccaaggctgtggcaggcagatcctctggtgcaggctctggtgctggatccggggctacctcctgagcagctccttgctccggcacgaggacgtactctccgtcagcgaggatttaataacattatgctaa

SEQ ID NO: 35829 - DNA, 744 bp, Zea mays
  Peptide Sequence Number=SeqID_79204
atggatgccaaaaggttcctgcatctggtcgaggagaagaaaagaagggtcctcgagaagaaagaagccccactaaagtgggagcagaagctagaaacagcagctaaggccaaggttgatgcagaagcaaaggtgaagaagctaaattcaagaaagcacaggaggagaggagatttgtcctcagactctgatagtgactatggcagcgatgttgatcgaaaacacttgaagaggaagaaccgcagaaggaacaagaagcatgagcattctgactctgatgatgccaggagacgcaatcgtagatctagaaggagcaccgactcaagtgatgagagcaacagtgaatacgagaccaggtctgaagaagaacgtccaaggaagaagcgctcgcacagaagaaggcatcaccggcactcttcaaagtcagactctgaaaactacagcagtgatgaggaacaacggagacctgccaaggaccattctcagagccgcaggcggcaccatcggtcatctgatgatgactcagacaaggacaaggtcaagtcaagacatgggaagggtctgagatctcgtgacgaggatgcaagagcagatttcaacagcaataagcatctcaggagccaatccttggaggagtcatcagatgatagagatgctgatgaatctgagaagatgaggaatggcaaaaggaggcaagtactgaaagatggccagagggcccttgaaggtgacagcgcatactga

SEQ ID NO: 35830 - DNA, 102 bp, Zea mays
  Peptide Sequence Number=SeqID_79205
atggaaggcacaatgagaaatgaaacgggaaaaagtgcagtacgtgaggtgacagaagctagatacttcgagaggaggatgggcgggagtattaaggtttga

SEQ ID NO: 35831 - DNA, 924 bp, Zea mays
  Peptide Sequence Number=SeqID_79206
atgggtgctaatattgataatgttgtaaatgatggtagtggtccacccctcttcaaaatatgtggccagaaatttcgaatggcaagggacagattatctgattatgaagatgaagacttcattataaggattgtaggagcacgtgaagttctgtatactattgaattccaaaagcgtggtttgcctcatgttcacatcatcttttgggtatccactgatacttcacaaccaacacccacacttattgactctgttataaccgcagaaattccggatccacaacaagatcatttaggctacacattggtcgctgagcacatgatccatggtccatgtggtcctaacaatatgaatgctccatgtatgaagaatggaatatgctcaaaaggttatccaaaagattttcgagaagaaacaacaattgatgcaaatggcttcacaatttatagaagaagaaacactggtcgttttattaccaaaggaggtgttagatttgacaacagatcagttgtaccaaataaccttttattgctaaaaagatttcaggctcatataaatgttgaatggtgcaataaaagcattttcataaaatatcttttcaaatatgtcacaaagggaccagatcgtagcaaaatatttcttagaagggtacaagctggtgaagatgttccatataatgaacaaacggatgcaaaggatgaagtcaaagagtatcttgatagcagatacatttgtgacaaggatgcttgctggcgagtgtttggttttgaaatccataggcattttcctgttgtggaaagaatgtctgttcacttacctaaacaaaatcacattacatataactctacatcaaatatggcacaaatattgtcagaacctttccttcgtcgaacaatgttgactgaatggtttgcctgcaactaa

SEQ ID NO: 35832 - DNA, 594 bp, Zea mays
  Peptide Sequence Number=SeqID_79207
atggggaacacgccgtcgtgcataccgctggggggcggcggcggcggcgcctcgtcgtcgtcgtcggcgaccgacgccaccacggtgatccacgcggacggcaccgtcacccggctggcgcgccccgtgcgcgcgtcggagctcatgctggaccacccgggccggttcgtctgcgactccggccgcctcgcggtcggctgccgcgtccccggcgtggccgccgacgagctcctccggccgcgccacgcctacttcctcctgcccatggacatgctctactccgtgctcaccgacgacgagatggccgcgctctccgagtcccacgccgccacggccgccgccgcctcctggaagaggatcgccacgtccacccaccggagcgcgaccggggcccacgccaaggacgacgactgcagcagcgatggcgccagggtgtacccgatgctcgggctgctcgagaccgcaagtctcgccgcggataataatagtaaacatgaattacgcgccggccccgcaggcaagtcgagcggcgccgggttcaggcggcatcggtcgtggcagccggtgctggacaccatcgaggaggttccttga

SEQ ID NO: 35833 - DNA, 1539 bp, Zea mays
  Peptide Sequence Number=SeqID_79208
atggaggcggtggtcatcgaatctaggtggtggtccacggacatgagcctaggcgccgccgtggccccacgcacgctgctgcggttggtgtcgaacgacgcgcgcgacaccatccacggggtgccgatctcggatgggggcatggcggcagctcgagcaaggaaggggcgggccggcgagtggtcgagagtgagccgcgtcgagatcatggtggcggcccaacgaccgtgtccggcgcgatctggtgaagccgagagcgaagcaaaggagatgcttctcgaggagctgctccggtgccaaatccacgagtggtacccggccttccgtcgccactccatccccaccgtcatcatcccgctccccgccgccttcctccgctacctcgccggccagcgggcctaccccaacgccgacgccgacgctgaagatggcgctgatgaggagccactaccgttcctccttccggcgataacttccggccgccagcccttcgcgcccatccacgcgcaccaccccgaccccgactctctcctcaactccgacttgttcttcggctccagcagcgaagacgtcttcgaccccgacgccgaccacccgctccggccggaattcccggagctggaggtggccatcgacgccgccatcgccgagctaggcggcgccgcgctccccaagctcaactggagcgcgcccaaggatgccaccttcatgtctgccgatggcacgagtcggtgcacgtgcttcgccgaggttgccatgctgctccgctcctccgactgtgtagcccacgaccttgcctccgcgcgacaatcatgcaaggatttcgtgcgcccggagggtgctcgacggaatgcccaaaaagttagtgccggttctgaggaaggtgctcgaccaaatgccgatgggattcgtggctgcgaaggcaccaatggagcaccaagtaattcaagcaagacaggtgcggagggaggcaagacaaatgatggggactgtgatgttgaagatgcaaccgaagaagaacataacgagaatacttgggtggacgatgggttccaatactaccttgccctccgcaagtggtacccaggcctacgccctgagtcagagttccgatgcttcgttcgggagcagaagctggttgctgtgtcccagagagacccatcagcttactacccatcactgcctggatggagttccgaggtgcaaccgaaaattgaggctttcttcaacgaagtgattgagccacagtttgcttcaaacaattatacgtttgatgtgtatgtgaggacagatgggcgagtcaagctcatagatttcaatccatggggtggttataccttgccgctgctgtttacttgggaggagcttgaggagaaggggagagggtctgagctggagtttcgggtggtcatgcagcagggtgcagtgaggccaggattgatgacagctgtgccatatgatatgctggattggggtgaggggagtggctgggatgtttttctgaagaaggctgacgaggagcttgacagacagatatga

SEQ ID NO: 35834 - DNA, 1020 bp, Zea mays
  Peptide Sequence Number=SeqID_79209
atggcccgtcttaggtgcactgcacgtaagtctgtgatcccctttttgccttctcgcctggcagagcgtccactgcgtcgcacggtgccaggtcaatccagtcacctcgagagactgcatcgtcgcctgcacgaggagcaggagcgccgacgccaggagcaacaggactcttccccctcgcctcagcaggaggtggagtctgagaggccaccttcccctgcacctcagccagagatgccccctgcaccaccacagggcatcccggctattggaggagatcctgacggagacagagacgacgacgacgccggtggcactacaagccacgacatggagctctcggaggagctggagacggagggatggatcgctatacccatcactcgtcacttccacgaagctctcgacaccttactgcgtcgggccttcgaccaacacacttggtccatcgagtaccattgtgtagtctaccagcatcatcgtgggttatacctggaccagtgggaggctacttgcttggtgcgccgtctggacgatgatctccagggtgcagaggccttctcagagcactattctattactgagagggatactaccgaggcagccatgcaagatgcaacacgacgggcactttcttatgctagaggtgtgattgtctcaccagttggtgagggcaatcccaagctaaacaacatggtcaacctggccgccgtgttcaacacagagctggaccacgcccttgatgagttgggcaagatgcctgagaacaggcgcagaggtgcaaggcgtgctcagccagaacagcaggcaccccaggaggatgcagctcagcaacagcagtttccaccgccaccaccgatgaccattgagcaaatgttcttgatgcagacacaagcagtccaagcaattggacagactttagcagtgatgcagcaggtgcagcagcagccaccccgcctcagcctcaggtgcaagtccagatgccgcaggtgcccagggacaagcgggcagaattcatga

SEQ ID NO: 35835 - DNA, 422 bp, Zea mays
  Peptide Sequence Number=SeqID_79210
gccccgacagccacaatgaacagacaccggcactcaaggtgccattacaaacggaactccggttgcactcccgcgggtatgaacaacctccacatcggagagcctgcgggacgacaaactccgggcgactcgccggcgacctctgcagcagcagcgatggtcccagggcagatgctaccgctggaaggctctcgttcgcgtccccactcgagggacgagaaccagacattaaagccaaagagccggaggtagagacaaccgatcaagccaaggatggaggcaagaagagcttcgaggtatcgagtgcacgggagaaggtcaaggagaccaggaacccaaagccaggggtgaagaagaagacttgcaaagtcaaggttgatcgagttaagaagacttatggtgcatcaaggatcactacataa

SEQ ID NO: 35836 - DNA, 342 bp, Zea mays
  Peptide Sequence Number=SeqID_79211
atggcgcagtggcttacccggtctacgctcgccggcggtcggagggagtccggcgaccgtggactggcctctccggcgaagcagacttcgattcctcgctcggggagcttcaccgaggtgtgctcagtcctctctgagggtcgaacggggttgggaagggcttggttggccggtctacggtggcaggggttcgggtggccgcggacacgccgtgcatgggcaaacgccgctcgcccaagtcgcaagcgtgcgaatcttggcaaaaatccggtgcgagtcttttcctggcacctagggctgtctctcatccgtgagtcgccatggcagatatgccctaggtag

SEQ ID NO: 35837 - DNA, 482 bp, Zea mays
  Peptide Sequence Number=SeqID_79212
agccctgagctctatttaactacaggaagctctgaccaggcgcccgtgagcaggagagccccggccgccgcggcgctctccagccggcgaattggcggtcgtggagggggcgcgaggaggagcctcagcgtctgcggcggtacagcttcaggaggcaccggtcagggcgcggcggagtgggtggcggtggtgctgttcatggtgctggcggtcgtggtgctgctgggcgccgtggccgtccttgtggtggtgctgctgctgcagcccccgcatggcgccccgctgggcgacgccggcagcgccgccatggaggccgcgctccgcgacggcgtggtgccgttccgggtggatggggaggcccagacgcgatggaaggtcacggggatcatcggcgtcgaccagtggacgcgcctggcatgccagctctgcttattctggcccaacagcaccgtgctccccttcagatgcatctccaagtccaa

SEQ ID NO: 35838 - DNA, 410 bp, Zea mays
  Peptide Sequence Number=SeqID_79213
atgctctgcgtcgtcgtggatcgtccgagccccaggcgcggaccgtccggacgtacacagaggaaagaggaggagacgttcctgcgcccagatcacgaatcgctcagccctgttgcgaggaccgtctgcgcctccgtagaaagcatcgtcaggcggttcgttctagtgtttggcgtccagatcggcgccaacacactttttggcaactccgctggagaccagatgtctagatctactaaaaatcaggccctcaaatgggccggttctaaagatcacaccgatatcttcccactgaatttgaacgactggcataagggcatggtgcaaggatccttcggatcaagtgctgatgaactcaagtcaactgagtctaggcgatataaagcagtgatggaatctgaggaggacaa

SEQ ID NO: 35839 - DNA, 471 bp, Zea mays
  Peptide Sequence Number=SeqID_79214
atggagtgcaccgcgggctcgagcggtgggtggcctggcggtgtgcacctcatcacggggtcttttctcccagcgcctatctggctgctggttcgtgtcacgccgtggcgcgggtggtgtgagtttcatgcctccgatgaggtcctgggcccgttcatccgtggtgatgtagaggtctgcctcccggaacaattgttcggaggtggccgacgctttctggagtatggctcggacgaaggccgggtcattggatccccggtagaagtcttcaatcaccgtcgcctcggcgacttcggggaggcggttcttcatggtctgaaatctcttgaggtacgaccggagcgtttcatcgctctgacgcctgatggatttgaggtcccatggctgcaccgacttgtcaaagaaggactagaagttggcgatgaaacgccgactgaagtcgctccaatcgtcgatgcagtgtcggggtag

SEQ ID NO: 35840 - DNA, 525 bp, Zea mays
  Peptide Sequence Number=SeqID_79215
atggcgtcctgcatgctctgtgacgatggcagctctcagcccccttacggaagcaagaggacgaaggaccagggccctcttagagagggttggccgcgcggggacgaggacaagacaggcgctctcttggggccgctcgcttccctctcccgtgtggacgcttgtaaccccctactgcaagcgcacccgacctgggcgcgggacgaacacgaaggccgcgggattcccacctctctcacgccggtctccggccgcctcgcttctccccccttcgcgctcgccctcgcgctcgacccatctgggctggggcacgcggcgacactcactcgtcggcccgagggaccccccggtctcgaaacgccgacaaatagaaagagcacatcggggacttgccagttcttgggaagattgtcacacccggttttagatggcaaaccgaatgcgaaccatgtacgtgccaggatcagttattcacgtacacagcagttacataacatggacatcatcacacagtgctcaaaatag

SEQ ID NO: 35841 - DNA, 294 bp, Zea mays
  Peptide Sequence Number=SeqID_79216
atgaggctttcacaaaatacacttaatacaaagcaacccgctaaggtttctaaagacgatggtggtggccccctgggtgagattcataggctaaatcgcaaaacagtcatcttctacctctggccaactccggtgtgcagggagctcggcgagggagcggacgactgcaaaggggcagagacgcggcagtggagctcggctccagtgaagcgcggcagcgaacgtccggcggcttgggcgagctgcgcgggttcctgggcgccggtcggggcgcgcctgggcgcggcggcctag

SEQ ID NO: 35842 - DNA, 873 bp, Zea mays
  Peptide Sequence Number=SeqID_79217
atgaacaaaaacactgtcattcgaagtgccattacaaacggaactccggttccccctccgcaggtacgaacaaccccactccatggggaagggcctgcggagcaacagaagaccgacgaacggcacaccgtcacccgctccagcagcgacgacgatgacttctgctccggggggccgaacagcggcagcactgacctcagggcggatgctgctgccaggaggcccccgcccatgcccaaactcgtgaggcaaggacgggcagaaggccgtagagttggaggtcggtacgtggccggccctggctacctcgccggcggaggaacctcttccagctgccgtggcagacgccggcgccgcgagcggctccgaagccactcgcgtccgagagccgggcacggtgcagctgccggcgccacggacgacgaccgcccttccctccgatcactgagtgaaggagcgggccaccgcccacgcgggggccgaccccaactcggcacactcccctccccagccctagtgatgaaaatccttgaggctgagggaggggcagaggccgcagcccggctcgctttcccccaccatcaagctggaggtcaccatcttggctcaccggagacaccatgttcggcgcccatcgagggcaacatggcgcttccccccctcctccttgcgaaaaggcgacgcaggggcgtatgtaaagaagccgagtctgtccctgatcgccctctcgccctgtgcagaggctcgggggctgctctcgcaaacctggctccggccaaaccgttgacagcgtcaacataccagcccgagaacttgggacccgaccgtacacccgggctacggccagctcgcatgagggaacaaccagactag

SEQ ID NO: 35843 - DNA, 423 bp, Zea mays
  Peptide Sequence Number=SeqID_79218
atggcgcctcccgttgacgtggctggtctgcgccctaggctgggcgaggtggaagctcctccgaagctgaggtcgagtctgtcttccgtggccgaggccgagtccgagccccttgtcgggcgaggcggaggtcgtcgtctgaggccagggcggagtccgagccttggggtcgggcggagtggagttcaccgtcttccgggacttagcccgagtccgagccctgggtcgggcggagcggagttcgccgtcttccgggacttagcccgagtccgagccctgggtcgagcggagcggatcggcgcggcgcaggcggcgctgtccttctgtcaggctggtcagtggggcggcgaagtgacggcggtcacttcggctctgccggggggcacatgccaggataagggtgtcaggccacctttgcattaa

SEQ ID NO: 35844 - DNA, 285 bp, Zea mays
  Peptide Sequence Number=SeqID_79219
atgaggaaatgggcaaggcctagcccactactcctcatgctcctctcctgccggagcaacatcccactcgaccgtccaacccggtggcagggtggtaggccaagtcacaccatcaactacatcctgcatggtacctgcaaaaatggtgccacaagcaaggctgagtatactaatactcagctagacttaaccgtacaaggaatcaagcagtctcattatctgcgagaagcagacgattcgaatcgagttttaaaaccttgcaagtggcttgttactggtgtatga

SEQ ID NO: 35845 - DNA, 114 bp, Zea mays
  Peptide Sequence Number=SeqID_79220
atgccttggttggtcttgctcttctctattgctgcaagtactataatcgggatcctcgtgaacggactggactcgcagcttccgctgttctggcggttatcattacagctgtaa

SEQ ID NO: 35846 - DNA, 510 bp, Zea mays
  Peptide Sequence Number=SeqID_79221
atgagcacttctcgtctgcgcgcccaagcagggagctatgggcgtgtttggttcgtttcgcagtggagcctgcccgctccaaacaggctagccagggcctggctcccgagatacagaaatgaaactcgtttctccacagcctggctcacagcgagatgttgcatcccgcagtgcagcctggccggcccatatgcagcctaccaaacacgtcctatgtgtgggcgtgaagggcatcagcgcgaaggaaattcacggctggaaactatacgtcgacgtggtgccgcgctgtaccgtggaccaagcaccttcattgcaatgaacgctggaaagccagcgatcggtattggcccccggggagcgtggacgcgggtaccggcatggcgccgccgcgcggtgctgtcgcgccgccgtctccgggcttctgttagagaagaacggttcagtgccgttgattgtgtagcggacgtctcagatcagatcggggataacgttggtgataggataaggtga

SEQ ID NO: 35847 - DNA, 576 bp, Zea mays
  Peptide Sequence Number=SeqID_79222
atggctgccccgcgaaccacttgccccgtcgcattaactctgcggcgggacaggcggcgcctctggcaggagaagcgagcgacgcttcgccttcgccataatgaccgcatcaaaaaaggctcagccccggaagacgacgaactccgcttcgcccgaccccagggctcggactcgggctcagccccggaagacgacgaactccgcttcgcccgaccccagggctcggactcgggctcagccccggaagacgacgaactccgcttcgcccgaccccagggctcggactcgggctcagccccggaagacgacgaactccgcttcgcccgaccccagggctcggactcagccctggcatcagccgacggtctccgcctcgcccgacctaggggctcggattcgacctcggccttggaagacagactcgacctcgacctcggaggagcctccacctcacccaacccagggcacggaccgaccacgtcaacaggaggcgccatcattaccctgccccaagctgactcaggctacggggaacaagaccggcgtcccatctggctcgctccactatacgagtaa

SEQ ID NO: 35848 - DNA, 345 bp, Zea mays
  Peptide Sequence Number=SeqID_79223
atgaacaggacatgtccggtgtgcaccggacatccaggcgggcccagaagtcagaagctccaacggtcagaatccaacggcattggtgacgtggctggggcaccggacatgttcggtgtgcaccagactgtccggcaagaggcaccaattgtgtggtggcccttgcggggaagttttgttcccggctttgatttgagaagagaagctcactcgtttcgccctattcaccccccctctaggcgactatcacaaaggcttgacgcggctgtcgagggcccaagcgcggcgctggcttcctcctttgaggtggagatccttccgcctagacatgtgaaagtcgcctag

SEQ ID NO: 35849 - DNA, 117 bp, Zea mays
  Peptide Sequence Number=SeqID_79224
atggccaccaccacgacggaggaggcgcatggtgaggtacaggccaaggtgggggagccttctttggatccggggaaggaatctgttcctcattcgacctgggcgcaaacagtatga

SEQ ID NO: 35850 - DNA, 255 bp, Zea mays
  Peptide Sequence Number=SeqID_79225
atggccaaggctcgggctacgctcctgaggtaccctaggacatttccgagaccagcgggaacgatttgtaatggaatcccaccggaggaaggcaccgagccctcggaccctatcgacatgggtccgggtccagcaaatcccctacagcgtcaacaaaccagctcaaaaaactcagagcctgaccatgcacccgggctacggccaggccgcatgagggaacaaccaggccgaccgaggcatcacagcaagaattaa

SEQ ID NO: 35851 - DNA, 495 bp, Zea mays
  Peptide Sequence Number=SeqID_79226
atggcccagctgtacaatgtgggtgtagctgtgtgctacgtggccagcggggaagtgtctggtagctatgcacgtgttaacgtgtccgttggagaagtgcatgagccctgtagaagcacagctgttgccgctgcatggatcctgctgatgtctccttgcttccgtagggggcttgagaaccaccgacgtcatggacgcatgcggggaaccatcattgcctgttaccggggtgttaaccagtcgtgttcaggagagttgggggtacccctaattacgttttgctcgcagccgggtgcgagggcagcccccgagcctttgtacggagcgataggacgatcaaggactatctcgacttttattatacgccccttcattgccttttcgcaaggaggaaggggggagagcgccatgttaccctcggagggcaccgatcatggtgtttccagtgagttgctaacgggtgatccgagtggacgctcgtgccccattcgttaa

SEQ ID NO: 35852 - DNA, 1230 bp, Zea mays
  Peptide Sequence Number=SeqID_79227
atggaggacgagaaccagccattaaagccaaagagccggaggcctggagcgcaggtggcgctgacggtcttgtcggtggagacaaccgcttgtgcaagaggaagcctcacctatggcgaccaccacctcagcaccgacgacagcggccacctgcccaccaacaccgcgccggcgaatggcggccaccccaaagcgcaccggcaggtcctcactcccgtcctcgccgaggccgtcccagaacacgaccgacggcgcaaggaggacctggacgtggccgacccgcgtgcggcacgactgtcgcctgggtggaggacggacagctgcaccctggctaggcagcagcagttcgctttctcccgcatggctggaggacgcctccgcagggctggaggatgcccttctcccccgaatgttggaggaagaagcgggtcaccggcccacgcaggaggcaggacccccctcggcgcgccctcctcctcagcccggattatgaacatccttgaagctgagggcggagcggaggctgcagcccagcttgcttctccccaccaccaagctaggacagggaaaggggatatttcgaaaaggatccgtctccgcgaaggacacgggcccccgagccctcctactgatcaggggttcgaaggttgtgccctgcgaggctgcgccctgcggggtccagcagccgcccccagagcactcgggcccccgagccctcctactgatcaagggttcgaaggttgcgccctgcagggtccagcagccgccctagggcactcgggcccccaagccctcctactgatcaggggttcgaaggttgcgccctgcggggtccagcaaccgccccagagcactcgggctccgcacccattactgatcatgggttccaaggctggcccctcggaagggttcgacaaccgccccagagcatgcagagtgagggatgaccctgggtacgtccgttacatggccgaggctcgggctacgctcccgaggtaccctaggacatttccgagaccagcattaacgatttgtaatggaatcccaccggagggagacaccgagccctcagaccctatcgaaatgggtccgggtccagcaaatcccctgcagaggctcgggggctgccctcgcacccgtctgcggccaaaactgttgacagcgtcaacaaaccagctcaaaaaaactcggagcctgaccatgcacctgggctgcggccaggccgcatga

SEQ ID NO: 35853 - DNA, 600 bp, Zea mays
  Peptide Sequence Number=SeqID_79228
atgagacccactggatcccgcaccaacggtgtggattttaagtgcatacaatctgctttcacccacacgatcccggatcaacggttaaggccaaccgagcacgacgagcgacggaatgctttccggaactccgacgaggaattgggtagtcgccggccggtcgatggcgaggcagtccacaccgacgcgtaccccggtgacccgcgtacccccgaagccagccgcagcaacccgaacggtgcagaccagcggcaatcgcaggcgaaggtgcggcggccgggcgcatgcaaaatcgtggcgccgcaactactccgcggggatggcggaggtgctgttaccgtcgagctcgcggatagggaagccccgggggcaacaggaagctccgcctcgtccgacctcaggcctcagcctcgggaggagatctccgcctcgcccgaccccagggctcggcctcagcctcggcctcgggaagagtcacgtcctcacccgaccctgggcctcggcctcaacctcggcctcggaggagccgccgcctcgcccgacctcgggctcagatcgaccacgccacaagggatacatcattaccctactcctagctag

SEQ ID NO: 35854 - DNA, 513 bp, Zea mays
  Peptide Sequence Number=SeqID_79229
atgcgggagaaagcgaactgctgctgcctagccagggtgcagctgtccgtcctccacccaggcgacagtcgtgccgcacgcgggtcggccacgtccaggtcctccttgcgccgtcggctgcaccgggggtcgcacaacacgtcgtacgccgcgagggcggtactcgtgttctgggacggcctcggcgaggacgggagtgaggacctgccggtgaggcttcctcttgcacaagcggttgtctccaccgacaagaccgtcagcgccacctgcgctccaggcctccggctctttggctttaatggctggttctcgtcctccatgagggatgtgaacgaaggcctttcagcagtagcgtttgccctaaggccatcgctgctgctgtctagccgcccgagacggaggtcgttgtcgcggtgccggtgcagtggtcgccgacgagctggtcggagctcgtcatctcgcagcccctctggtgtggaggtcgggaaagctgccgacatctatgtagcgtag

SEQ ID NO: 35855 - DNA, 342 bp, Zea mays
  Peptide Sequence Number=SeqID_79230
atggacgcacgcggggagccatcattgcctattaccgggggcgcaaccttcgaacccctgatcagtaggagggctcgggggcccgagtgctttggggcggctactggaccccgcagggcgcaaccttcacggaaggtgacgagtgagaaccttcggccgctctgcgatgagctgaagctggaggcagcggtggcatggacagaggcagtgtcggctcgaacagaggctttcttggcgcgggagcaggctgccgaagccgtgagccgggctgagatcctcgggggacagctggctgaggctacggagcggctagccgaggcatctgctcgtgttgccgtctga

SEQ ID NO: 35856 - DNA, 168 bp, Zea mays
  Peptide Sequence Number=SeqID_79231
atgggtttagtaatgcgaaagtttgttgttcctgatgtttgctttagattcgagaagcgtaatcattgtacgataattaatcgcgtgatgcggaagacaagccaagtcgaccccaagcgcgagctaatccgcaggatgaagctgatggacaaaccagaagatggataa

SEQ ID NO: 35857 - DNA, 366 bp, Zea mays
  Peptide Sequence Number=SeqID_79232
atgtcatgtaaccggcgcaccggttacgacgtgcgagaagttacaccgccactcgcgccaatgttgtgcctcctcgactgcggaactagtaccacgactcgaggtagccctgcgcatgacccaacagtgccggttaaagggaccgggaaaggggacgttgtggaaaggatccttctcggcgaaggaagcgggccccgagccctcctactgatcaggggttcgaaggctggcccctcggaagggtttcgacagccgccccagagcactcggacttcaagcccattactgatcaggggttcgaaggctggcccctcggaagggtttgacagccgccccagagcgctcgggctccgtgcccactactga

SEQ ID NO: 35858 - DNA, 825 bp, Zea mays
  Peptide Sequence Number=SeqID_79233
atggcgacgatgaggcagaaacatgtgaggtgtagcgagggcaagaggcggtggggccatggcccccttgcccacctcgtcttctttcttctcgggcctgtcctttcgttgctcgacgaggtcacgagcccgctcgtctgcggcgatgtatctgtcggcgtcgtggaagagctgctccgaggtagtcagagccttgtggaggatggcccttacgaaggcctcgtcacgggccttgtggaggatagcagtggtgttagatgcttgtgtcttattgtaatcagtctaagggttatggaccttggcccagaccatgaattggttcttttagtacttgacagaaataaatatattccaggcatggtggcgtctttagacaatgtgaggggcttgactttagccatgtcatctagtgcattcattggttctagctttgtgatcaagaaagttggattgaagaaggctggggataatggggtgcgtgcagcttctggaggcttctcatatctatatgagccgttatggtggttgggaatgataactattttgcatgccccaaaggagagaaaaattgattctatgaaggaaatatggcatcttgcaacacagccaggttatcagtgtaaaagcagttgctattgctttaaagctatcatttggtggatcaaatcaattcatctacgtccagacatggttcttcatagtagtagtcactatttgctgcttggtgcaattaaactacttaaacaaggtatcaaagtgttctgcgcaggagaactgcgcgtcatttcatttaaggaagaaaagaggtacaagggtcaagagtga

SEQ ID NO: 35859 - DNA, 1237 bp, Zea mays
  Peptide Sequence Number=SeqID_79234
atgtctgatgaacagaaaaacgagaaaaacaaaaagcgtcgagaagcacgtctacggaataaagagttgaataagaagcgtcctgaagcaagtcaacgaaatgattgccaaaatatgatgcccaacgcgccaagaggcagtgtgcacgaaaatgttggccacacacctaagcatactagacagaggaccacctactttagcgagcggtacaaaaacttaactcccgtcgagagggagtttaggcgtgaacgccttaggttgtataatagaacaccaaggcgaaaagaggcaaaggtagaccacaacaggagacgtagagttatgcaagccgacactttgaatcccacatccatcgccatggaggacccaacatatacccctgagttggtacaccctacaacagatgtaaagggatctgatggatccatattaactgtctgcgactgggttatccctgaattcgtcaacgcacctttcttgccatctccaacccagaccgaggatgtcgcttcgcccgatatgtctaccaatacactaaagcgtaaacatcatgttcctcgtggggaaagacaagctatattagctcgtcgaaaccagctatttgaatcagccatatcaaggaaggtgggtacttcgattgaggatactagcggtgacgctgttgaaggggacgattggacacagcgccatacgcctatgaagatcaccaacaatggtgatgacgatgagggtgtcatatttgaagacgacgatgatgagaacgagggatacctattcgctgcgcaatgtactatttttgattattattatcctagcaaggcttatgtaaatattcatgtcttactcattgttttcaaaaaaatatcagatgaggataccgatgaggatatcgagatcgatgttactcaagaagaatctactgccacttatgtttctgacccgtacgacaaggtgtacagcaacatccctgaagaaacacatatgctcaagcttgttcccaactgcggttattgcaccgcgaagaagtttgagtatgagccacctgggttttgttgtcgtggtgggaaggttgagctagctccagtggagacccctccccaactcaagaggttgtgggatagtgcagactctgatgctaggcactttcgtgataacattaggtttttcaatggccgtttctctttcacttccctatactgttgcctcgatagtatgacaactaatgtaaggggttctg

SEQ ID NO: 35860 - DNA, 216 bp, Zea mays
  Peptide Sequence Number=SeqID_79235
atgtcaaaggaaacgtctccttttcatatcgagcttttcaattgcagtttttggcatcagcttaacccagtcattcacacgaagcctgctaggacttacaggcactccaagatagttcatggggagatcactgatcttactgtcgaaaagtctgaacttttacatgacagaccagcagatattgtcatggctcaggatgaagctgtggctacctag

SEQ ID NO: 35861 - DNA, 405 bp, Zea mays
  Peptide Sequence Number=SeqID_79236
atgtcgcagagtttactgttcagtggtttggctttctcaccaaacttaccaattctgattgtgccatacagatttcttttgttatcattctttgttgggctttctcatcgcctgatttctaaactaatgattcaaatgttgcgcagggctgcttttatgtgtggaagggagccaaacttcgtgctttctgaggaagagaagcaggagctacggaggtacacctgggaggacttcttagcagtgactcgcaacacgataaccagcaaaaaacaaaggaaagtcggatcactaaggcgtagcaaggcagacctgttcatgggacagagtgacggcgacaccgagatggccaatggtggcggttcatcgaattccgacaatggcgacgcggggacgtcggcgtcatag

SEQ ID NO: 35862 - DNA, 375 bp, Zea mays
  Peptide Sequence Number=SeqID_79237
atgagcaccttttttattgaggagatccctgttgaagatgtcgcggacagaccaaaagaagacttggttgtcaaggtagctgagatcaaacttgtcgtcgttctttgcccttgcctccacagcctcgaacccctctgcctgcttcaccgcttcttcttccacgagcgcttattacatgcagtgccactatcttcctcctcacttttgctgtttggagtcgccgtacaaggtaggaggaggaacgggaggcgaggaaaaagatggagctggtttgatcccctacggatccctaggttcaagttttggacagagacaactaagaaagctctcagacgagacatgacaacaggtggattgggaggcgatatgaaatag

SEQ ID NO: 35863 - DNA, 765 bp, Zea mays
  Peptide Sequence Number=SeqID_79238
atggagaggagcgagaggagcaggagggcgaggcaggacaacaagtggcgctctcgacggggacgaagtcggtcatgtacacgcaggagctgctggacatggatgacgctgacggcgccccagactcagcggctcaactggatagacttcctagagcggctgcacggcaagcggatgctgctcatggacaactcgatgaactggaaccagttcgagtccatgctctatgcgaggctttacggaacaaggccagatgttcgagatgcactagcattgtcagtgtgtcgagggcttaaggagcttaggcttgttggctttccagcatctgttcaggcttatcacatggaacacattttatgtgacatatgtgacatcctgcactacaatgggatcagaaaggttgagctgcaatcctaccattttacagacacgcatgtttgcactgtagctcgttcatgccagggagctctgcaggaacttatattggatgagtgcccgaacgtcctgggcaactttgtggtgtgcctcagagagtcttggtccaacctaaccaagttgaccttgaatcgtattggaatcagtgatgtccaaatcaggatccttatgcttgtaggatttgaccaacttgaggagtttaatttaacgtggtgctggtgccccttgatcactgacaggttactggctatcttacatgcatcaacattgcctaatgtcacccaggagtctgttgactactaccagcatcactgtgaagtcgagtactaa

SEQ ID NO: 35864 - DNA, 1092 bp, Zea mays
  Peptide Sequence Number=SeqID_79239
atgaccagaggactcacctcggagaccaacacagactggaactcgatgaactcgagggagaactcctccgtgtctagtgtatgccttgttcgcgtagtccgtgtcgcaaggttgacactggcgaggccgtcgtcgtactccttcagcaccaccagcaggttcccgcgtgactttcgacagataatgactggaagcttgcattcaacagcaaccgacgacgagacggaccaatggtcggatggatggatttctgctccgctcgacccatcgaggggcggcgggctacagtacacccctaaacccttcaccgcagccctcttcctcctcctctcccctcccgtttccttctctctcccgctacatggatggggacgctaccgcgctcgcctccccctcgaccggtaccttcccagacaagcacccgcggtcggaaaactccgtccagcgagctccaggcgattctatcgccacttcaacgccgccggagaaggaagccgtggatccgcgcacggccgcgattcctttctactggtatgtgcgaaggcgccgccgccggtcgtctctgtccgccggatcggcgtctgctgggcggaggtcaacgggggttcgtcgattcgccgacagatctacgctcacccgatctgcgtcattagagcttcaagtgccaagccaacgagcaactgcttgaggattcaaatcaagatgagcagccatgatgccaaagtgctgcaacacttgggcctcaatcttgcatcctcagtggaaagtcgtgcagtcaatattaggacctttttagaagaggctttccgtcatttgggtgacgagcattaccttctcaatgctctacttgctattcgaaaggaggtagacctgatggagcaggatgcacttgagaccaaagcaaggtctgacccaaagaaggagaggatggaggaacaaattaaccttgctgaggatgcgaagccagtgcctagacatttaactttcaccccccttcctcaccagaattgtatgaggccagtgacaatgactcctacgactcagacaggtccactaggtatagcatttggaacctgtagtagtgctacctag

SEQ ID NO: 35865 - DNA, 660 bp, Zea mays
  Peptide Sequence Number=SeqID_79240
atgtcgcgaatcgtgatgtcaatgcggtttggtggatttccttccatggttgggacaggatcactgaagatcgctgccatcaaagcccctggttttggagagcgcaagactcagtacttggatgatattgccatccttactggagcaactgtaatcagagatgaagttgggctgtcacttgacaaggccgacaaatcagttcttggaacagctgcaaaggttgtccttacgaaagagtcgacaacaattgttggtgatggcagcacccaggaagaagttactaagagggttgcacagattaaaaatctcattgaggctgcagaacaagaatacgaaaaggaaaagctcaatgagaggatagtgaagcttgctggtggtgttgctgtcattcagctggtgctcggcgacgcgatgggcggtggtcaagcctcagtcgagcagtgctcaggcctcaggaggccagtgggcggctcttcggcctcaagcgcacggtgggagcagcattttcagaagctggtgctcggcggcgcgatgggcggtggtcaagcctcagtcgagcagtgctcaggcctcaggaggccagtgggcggctcttcggccttaagcgcacggtgggagcagcattttcagaagtgtgcgagcctacctgtcagaaattag

SEQ ID NO: 35866 - DNA, 1953 bp, Zea mays
  Peptide Sequence Number=SeqID_79241
atggaatttctatctgtaggcttgtgtcataacaagccaaaaaaatcggtggcaaccgcaatagttccggaagactatatttgcacgcagggcgaccttgcactcatcgattttattaaggaaatcccttgtgaaccaagggtggaagtcgtgcttattgatgatgcctttgttgaaagaaagtcgatggaatgtttatttcagccgaatgcatatctaggtgacgaggttatagactgttatataaatttgataaaagctcaaaagcatctaaagtgccgatctggaggtcgcgttcacatagaaaatgctttccagtttaatttcttgaagcgagatggcgatgttgacattaaaacagaggagctatatccaattgaagacatgacacaaatatgtagcgctgaacgaagggtgttactttacctagaccatgacatggtgtttattccgataaacatccgagagacgcactggtatcttgccgtgatccatgcaagaaatatggagatacaagtgctcgattcacttggtacttcacaagatcataaagacctcgctgactctattaaaggactccaaagacaaattgatatgatatctcaacgtaaggagttaaaagaccacaggtggccaaacctccaagttgcttcttggccgctcagagaaatagacatgggatatgcaaagcagacagatagctcttcatgtggtctctttcttttgaactatatcgaatactggacaggggatgaactgtctaacagttttacccaggatgacatgtcacactttagaaagaaaatggctgctatattactatcttcagaactgaataagagaagggggtgtctgttatacaaaaatgataaagaagttgactctggaagcccatcggatgttgagatattagaaaacccaacagattctaagaagaggaagctactccacgtgcttgatgataacgaagtagtgtatgaagatgaggaaggccctattactcaagcagacttgcaaaagtggtttgttgatgattgggataaaagaactcctgtaaaagtatctaacgatgggtgcaccaatgactttttaatggttggtctttccacaaaggacatgccagtgaccaaagccgattcaatagatgttttatgtgattatatcatggcaatagaagacgatacgacactagagatgacatgggtgcgaagtttcaatccttttaagatagaaatatctgttaaagacctacaaaatatattaacgataaataaagatatgactctaagatgttttgacatggctgttcggctgcttgccaataaagagtcatgtaggccgaaaggagaaatcataaataatagaaagcattatatggacatgcgtttctggagaatggttggttttggtaaacttccaaagtaccatcaggatcctacagcagaagagttagccaaaacactcgattgttggccatcaatgaattattatatcacgggttgtagatatgttcttatgccatggaaattcaacggatgtcacgcccttttcgtaatagatcatgttaaaaagcatgtgacttttatcgactttacaccgactcaagattggtgtaaacacatgccatacacgaggtttgcggaagcgattatcatggcctcaaagaaatataagattgcttacagcaaaaaacgttctggatgggcggaggatatctttaagtgggaacatacaattcagactggtgttccaattgacttaagagggtttaatacgagctacctcgttctacaagctatggccatgtgggggaatgacagacgaatgaaatttgttgggattgttcgaaggagctttgtgattgatctgttaagttatgaggataatttgtgccgatatgccatccctgcaaacatacaacagagacttatcgatatcgctaaaaaggattag

SEQ ID NO: 35867 - DNA, 672 bp, Zea mays
  Peptide Sequence Number=SeqID_79242
atggtggggagaagcaagccgggctgcggcctctgccccgccctcagcttcaaggatcttcatcatccttgctggggaggagggcgaggcgagccggggcctgccttcgcatgggctggcgtcccgcttcttcctccggcatctgggggtggaaaccatcctccagctctgcagaggaggcgtcctccagccatgccggggaaggcgaactgctgctgcccagccagggtgcagcattccgtcctctgtcctcgttttcgtggcgaggacgggagtgaggacctgccagtgcgctttggggcggccggcgcttgctggtacggtgttggtgggcaggtggacgccgccgtcggtgctgaggcagccggagaaggcttctccgccgacgagaccgtcagcgccacccgtggaccgacccccgtctctttggctttgatagcttgtcctcacccctcgagtggggacgtgggcgagggccttgtcgcagcagcgtctgccctgaggtcatcgctgctgctgtttggccgcccggagcggaggtcgttgtcgctgctgcaggagtgggcggtggcaaaccacctggaagttgtcgtcccgcaggccctcccgatgtggggggttgttcgtacctgtgggagtggaaccggagtttcgtttgtaatggcaccttga

SEQ ID NO: 35868 - DNA, 924 bp, Zea mays
  Peptide Sequence Number=SeqID_79243
atgcaggcggcatgcaaccgcaccacggggatgcaccctttcgacttcaatgcatccagcatggaggcccaggcccacacgtcatgtaaccggcgcgccggttacaacgtgcgaaaaactgcaccgccacttgcgccagtgtcgcgcctcttcgaccgcggaaccggtgccgcgactcaaggaaaccccgcgcatagcccaacagtgccaaccaggcgcatcggccacgggtcagtcagccgcgggagaagggaccgagaaaggggatactccgaaagggatccttctctgcgaaggaagcgggccccgagccctcctactgatcaggggttcgaaggctggcccctcggaagggttcgacagccaccccagagcactcaggctccgtgcccactactgatcagaggttcgaaggctggcccctcggaagggttcgacagccgcctcagagcactcgggctccgcgcccactactggtcagagtttcgaaggctggcccctcggaagggttcgacagccgcctcaggccactcgggctccgcgcccactactggtcagaggttcgaaggctggcccctcggaagggttcgacagccgcctcaggccactcgggctccgcgcccactactgatcaggggttcgaaggctggccccccgaagggatcgacagccgccttagaacacgcagagcgagggatgactctgggtacgtccgatacatggccgaggctcgggctacgctcccgaggtaccctaggacatttccgagaccagcaggagcgattctgtaacggaatcccatcagagggaggcatcgagccctcggaccctatcaaacgggaccgggtccggcaaatcacctgcaggaaaaatataataagtgtggatgaatataacttcacccataggtgcgcgggaggttag

SEQ ID NO: 35869 - DNA, 474 bp, Zea mays
  Peptide Sequence Number=SeqID_79244
atggagtcaactgtagaagggaaggggactgattcagaaagtaattcattagacaagagggatgacatgtctgaagatgaactgacagtgctaggtggaaaaattggtgatgcggacaatgtcacaattgatgaatctgatgatagcaaaagtaaaaagggggtcaaaagaaggcgcaagaaggtgaagactgctgaaatgggcaaaaggggaaaatctaaagtttgggatgtctttactaagtcattcttgtcttcaactcaatctaacccatcaaagagcgagttgctaatctatttagaggagactaatgtactgtcgtctgtcgacatgatagtcactcgctgcttggagccttggatggttgtcggcctgtcgcatggtgctctagagtctagagtctggacgtctggtcaggagaggactcaggacagtggagtagtggactactcactactggacttagtctcttag

SEQ ID NO: 35870 - DNA, 360 bp, Zea mays
  Peptide Sequence Number=SeqID_79245
atggacgggagacgtgccgcggtgggcactggcgcgctgctggacactgctggatgggagaagggaggaccggacgtctggaccggaggacgacggaggaccgctggtggctgctggctgctgccgcggtgggcggctgggcgctgctggacgcctggactggaccgctgggcgctggtggccaatggcgccgctgtggcggcgtgcagaagcaggaatgcaggcgacgaggcgtcgaccgagcgagtagcgcagcgactcagccaagtaggcttcctcctggactcgggacgtctagggtttgctctccttgggcctctggttatcttggtgatgaagagtccatgtctgagatattag

SEQ ID NO: 35871 - DNA, 243 bp, Zea mays
  Peptide Sequence Number=SeqID_79246
atgcagcgcgacgtccaacaggcacggagaggtgtaacgactaacgagacggtgaagagggtacataccggcggtgccggccggtcggccggcggcggcgggtggtgcgaggctgcggagcgggcgcgagacgggcgcggcgcgttggctgctggtgcctggtgggctggtggttgtggtggcgcgttggctgaggatggatggacgggtttgccccgactgcccgggggcctcgttcggtag

SEQ ID NO: 35872 - DNA, 375 bp, Zea mays
  Peptide Sequence Number=SeqID_79247
atggggggcagtcaagagggatgggatataccccgagccccagccaaggaccataactttcttccctctccagcaatgctttttatttcagggaaagactcattgccagttgatcttcctaagccgattgaaaatgaaaaaactgtggaagttgcacactccaatgtgaagccattcagtgtgcatccactacccttggcaaagacttctgatgtgctcataaaatcctcaaatggttctgatgattcaaaggaagagaaaacccagtactatccaggttacttgtggttatggtacttaaatagaagtttatattttagaattctgtattcgaaatctcagagaacttgtgctttcttcattgtcacaatctga

SEQ ID NO: 35873 - DNA, 1176 bp, Zea mays
  Peptide Sequence Number=SeqID_79248
atggcgcacgttctgcccccagccgcgccatcgctcgatgcctgcaagcatgctcttgcccctccaccgcaatcaccgcggtggctttaccatgtccccgcaatcacggcagcggccagatcccacctcggctactcccgccccggctcctcgccgcaatcaccgcagcggccagatccgacctcgcccggcccgtggcacgcgcccgagctacccgcgtcccccaaaatccgccccaaatcctccatcgtcgacggagcgtgcagcctcaatcttcaccacgcccccgcctccgcctcgcgcccactgcgtacatcaagccgagtagccgacaccgcaccccccgcgtgcgtccctgcccccgtgcagtccggaggttctcaaaacgaatggtgcttcatgtgtgaatttgaaaaactcattgtggagggcaaacggtgcaagactgccttgtcaccgactggaatactctctcgtttgaatgacattggcagtagctttggtcctgaaactactggaattgtggattatagaaattatgacgttaagaaatatgcagtgggtttagtgtacggtttactcatttcttttaatgtgaactcaaaaccattttttgctgttgaagagcagaggcaactgttggactgcagcaggccaatttatgctgggaatacactttgtactgtgaaatataccggcgaggatccttgcatgatgagtattagatcaacttcattttcccctactgctgatgctatgtctgaaacaaaggttgcacctatcacccaggttgatctctctttcctcaatgaagggaaatctacatgggtgaatctgacatcccaagacacagagtggcctgatcttgcaaatgcacgtgtagtagtcacaggaggcagaggtttaagaagttctgaaaattttaagttgttggagcagcttgcggagaaacttggtgcagcagtgggcgcgactagggatgctgttgaagcaggttatgttccaaatgaccttcaggttggtcagatggggaaaattgtggcgccagagctttatatggcttttggagtatctggagcgatacagcacttggcaggaatgagagactcgaaggttattgtggctgttaataaagatgtcgatgcccccatatttcaggttgcttctctcatttaa

SEQ ID NO: 35874 - DNA, 264 bp, Zea mays
  Peptide Sequence Number=SeqID_79249
atgtacaatggatcaaacagtctcattagctgcgagaagcagacgattcgaatcgagttttttatccttgcaagtgaccgcacctgtacccaccataaccggaatgggagaccacgtctcaggtcacgtgaggggcaaagtctactgtcaggttcaatcaggctgtcctataaatttgaggtggatactgattcagatactacttgtgcaaaattaacaaaaataagttttaaaaaggcattttacactatagctgtgatttaa

SEQ ID NO: 35875 - DNA, 714 bp, Zea mays
  Peptide Sequence Number=SeqID_79250
atgacttctcacggatccttggacgaagggaatgcacagtcccacactgacggacttgcacgagagggtttcccccgtattttgtgggaggtacttcagggagctggtcacacgacgcctccccagtacgcggtgcagttgttcgagaagcaccgagtgccccgctgtagggtgaggatgaccctggagcctcatcccctacagccgggctggcgttcgctggactctgagtcttttggatacagggctgaggatactatcgaggcgattcctcttcacggactgaccaccttctgtggattccaccccttggagatgtccactcaccccattggcttgttccccgtggagaaggaggacgacccaatgtggaaggaccgagtggagcatgccaaggatatctgggctatctacccaggtcagactgctcacttgacggtggaacaattgtcaaatgagatccaagagcttgaggagctagtgggaacgagggagaacaccatcgaggttctcgaggatcagcttatcaacactcagcagcaacttgcggaggctaaccagcatctggatatgcatcaccaggagatccaggacatggaggccaacgaggatgtcgatatcgagggaggagaggagcctgcctccagcttggacactgctggctcagggagaccaccttcccccgagtcgagcgttgcctcgtttgctcactag

SEQ ID NO: 35876 - DNA, 303 bp, Zea mays
  Peptide Sequence Number=SeqID_79251
atggggctcccacggggtgtgcatatgcaggcacacatgctggacggtgtaggcgatgtcaggcctggagaagggcttgcagtcggacatgcctgcccactccaggatgtcgatggtatactagcactggtggaggaagagaccctaaggctggcgctcggcggtgatgccaaggaagtggtggaggggccccaagtccttcatcgcgcactcccgctgaagggcgacaaggtcaagacaacgataccccttgtggttaggggagtaaccgaggaagaggcagcgagtggagcgaggagatag

SEQ ID NO: 35877 - DNA, 242 bp, Zea mays
  Peptide Sequence Number=SeqID_79252
gtaccttcggacttatgtcaaagagggagaacctcaaaagatacgaaggtgaacagtacccccgtactgttcacgctgacttggcatttgcttttgcgtcacgcttgtactttttatcttctctcaggaccgaaggtaccattcaggaaatggttgatggtgtgacttggcctaccaccctgccaccgggttggacggtcgagtgggatgttgctccggcaggagaggagcacgaggagtag

SEQ ID NO: 35878 - DNA, 333 bp, Zea mays
  Peptide Sequence Number=SeqID_79253
atgtgcgggttgccgtcggggatggtcggagtcggccggtccacgtgcgcaggcggagatgctcgtcggcggcttccggtgaagttctgccgggtccgagggcttggaaagcttcacgggccactggcggatctagtcgaagcactggctcgacttgggggtggccggagtgggctggccatggtggccgaggctctggcggcagtggcgggcagaaaagagctcgccggagctaaggaggggtggctggccggtgatgagatatggagcccggaaatccggtttgtctccctgctcaaacccgaggcaaatccagggttttgtcgtgtctag

SEQ ID NO: 35879 - DNA, 309 bp, Zea mays
  Peptide Sequence Number=SeqID_79254
atgaccacgggcggcggcgcctcaaccatcctgacgtcggcggcgacgggcggctccacgggcgaaccagggatggccccggcaggagtcgatgctggtgccgacaacatgtcaggcaggctcgggaccgcggtcgtgttagcggtctcccctggcatgatggccgccccaacatggggtcagtcagggaggcttgccccatggcaactcgtgccgcctgagccccccgctggagggcgccttgggcagaggccaaccaaccggcatggcgcgccgcagcaccggccgccgaagccggcttcgtcttaa

SEQ ID NO: 35880 - DNA, 429 bp, Zea mays
  Peptide Sequence Number=SeqID_79255
atgacgtcgatggctctcagctccttacggaagcaaggaaacgtcagcagggtccatgtcgcaccgccagctatgcttccacatggctcaaggcacttctccgacggccacgttagcacacagatcacgcgcgaggcgcgacgcaacatagggagggcggggatcgtcggccagggtggagactcatcgacggcgcggctgcctaggcatgcagcggcaacgttggctggggcacagcacgacggtggtagcggcttgcctagcacgggctacagcagccagggacggacgcaggctgcaactgcaatggcctgggagggaggcgcgggctctcgctggagcggctcgctgacggcggcgctcagccagggagcgggccacgacgcggatcgccgggggcaacatgtaggaaggggcggctgcgcttag

SEQ ID NO: 35881 - DNA, 363 bp, Zea mays
  Peptide Sequence Number=SeqID_79256
atggccgaggctcgggctacgctcccgaggtactctaggacatttctgagaccaacgggaacgatttgtaatggaatcccaccggagggaggcatcgagccctcggaccctatcgaatgggtccgggtccagcaaatcacctgcagggtaaagctgagtcacgacctcccccgagttcagcctcgggcgcaacagggagctctgcctcgcccgaccctgggcctcggcctcagcctcggcctcgggaggagtcacgtcctcgcccgaccccaggcctcggcctcaggagaagtctccgccccgcccgacctcggcctcggaccgactacgctacaggggaatacatcattaccctaccgctag

SEQ ID NO: 35882 - DNA, 189 bp, Zea mays
  Peptide Sequence Number=SeqID_79257
atggtgggtacaagtgcggtcactgcacggcggcagccggggtcagtggagcattgtaccttcggacttatgtcaaagagggagaacctcaaaagatacgaaggttggcagtgccgaagctgtgaagcaggaaagcttcggcatgttcgcagaaaagggaaccgacttaaagatgaaaaggccatttag

SEQ ID NO: 35883 - DNA, 2496 bp, Zea mays
  Peptide Sequence Number=SeqID_79258
atgaggaactgcttcgagtctgaatttctgccatacatgggaagcggcgcaagggcagcccctggcgctactgcttttgtcagcggcatggcgaaggtagttgttcgagttcttattgtcaaaggaccttcgtcctccgaagcattatctcctttcgggtataatgatcctcggacgaagggcatgaagaacaaaaatgaatatggaattggacatcacaagctaagtgaaggaggtacattgcttgtggaactcggtgaacataacttagagaaaattggtaaagccaaggatggaggcaaaaaaagcttcgagataccaagtgcacaggagaaggtcaaggaggtcaagagaaagtgccatttcgggctctctttgaggagaaatagaaaagttgagaaaagaatgggaaaaagcaaccgaatgtctcccgacgccgacgccgccgccgggggaggaggaggtggagaggcgagcgccggcgccggcgccggcgcgtcgtcgcctcccgcgtccgcgtccgcggcggcgaacggccgggcgctggtgcggtgggaccagatcctgccgcgccgctccctgcgggtgcttctcgtcgagcacgacgactccacgcgccagatcgtcaccgcgctcctccgcaagtgcggctaccgcgtggccgcggtcgcggacgggatgaaggcgtgggaggtcatgcgggagcgtgcctacgacttcgacctcgtcctcaccgaggtcgccatgccctccctctccggcatccagctgctctccaggatcgccgccgccgccgagtgcaagaacatccccgtcatcatgatgtcatcccaagattctattggcacggtgctcaagtgtatgcagaagggtgcggtggacttccttgtgaaaccagtaagaaagaatgagctgggcattaagaattcaatgcagatgaattgccagacaaatggatcagaaaataatgcagccagcaatcatgtaagtaccaatgttgctaatgggtcaaagacaggagaaaacaatgatgaggaaagtgatgcccaaagctttggtaacaaaagggagactgaaattaagagtgctgagacgttaccagatattcgtagagatgaaatggctggctcatccaaaaaaattgaactacaaaataagtctaatgatggagtaaacacaaaagtggatgcgtcaaaagatagcgatggtgctccaagtgaaagtgagaagaatgtgcgttccaaatgccttaatggtattacttctgcaaaggtggctgagcaaataatggataatgccttgaggatcacggatgcaagttcacgtcgtccaaccaatcttggcaaagatttggctatgactgaaccagcagctgatagaaaatgccaatctttagtgatggaaaataatgctgtcaaagaaaagaaccctggtgaaaagtcgaagagtgctgtaataggtcatgctgattcttacccctcccaatttctcgagaccaacttgggaaaacaacagtatcgtaatggttacaagaatcaagaattcagggaaaaagatatctttaatcactcgaattcttctgccttctcgagatatggcaatagaaggatagaatcatcaggtgagatacagtttcttccttctcgttgcattgttgggcaagagcagcatgttcatggcaaggacccagttttccaacccaatggggtcttgctgcctcccaatgaccataatacaggtgagagtacaaggcaagctcgaattactctggacagtagcatggagggtgctgacatcatttgctccagtagtgctagggaagatgctggtgcaagtagttcttcccatagaaaggacagtatgagccatccctcatatgggtttgtacctgttccaattcctgtcggtgccatgatgccctatcattgtggtgcaattctgcagccagtatactacccacagggtccacttatgcactgtaattcatctgcaatcaacaaggcaacaattcatcaaacctctggccaatctaactaccgtgaagattgtggtagtggtagaccatctcaggttgatgaacacaaacagtcagaggaaaagcaccagttgcatcattcaagacaaattcatcgggaatcaggacaaccagttgacatggttagagctcacatggatcatgctaaccagagtgcaagctgcagccgggatatctgtaaaggaagcggatgcacgggtagcggtgaagccgataccaatgcgaacacgacggttgccctagagagtggcaacgagagtggcatccaaaatagtgacaggtctcaccgagaagctgctttgatgaagttccgcatgaaaaggaaagacagatgcttcgataaaaaggtcaggtatcatagcaggaagaagcttgcggagcagaggccaagagttaaggggcagtttgtaagccagaagctgaaagcagctatggcaacggaagccgaaactgactcgtga

SEQ ID NO: 35884 - DNA, 417 bp, Zea mays
  Peptide Sequence Number=SeqID_79259
atgggcaagagtaacaaacgcaagcgcgagccgaatcctccatcgaaggacttcggcgactcggaatactcggaggaggagttctcctccgagtccgaggggtccccggctcccgtctctcccccggcgtcgtctgacgattcagacgactcccaggggattgccacggaggtctggacttatatccgggccgtcgagcgctccgggctcgagggcttggatgagtcggagtactcctcggatgaggaggactcttcggactcgtccgaggagggcggtggcggcgatggcagagacgacgacgatgacgacgacggaggcgacggtgacgacggcgacgatggcggtgacggcggcagcagcaggggcagcaacggcggcggcagcagcaagggcagcaacaaggccagtggctag

SEQ ID NO: 35885 - DNA, 483 bp, Zea mays
  Peptide Sequence Number=SeqID_79260
atggctcctatattctcgctcagagatctaggtccgggcatcgtcccacgactttttcctgagggcggaggtataggttttggtacatcagatggtctctatgacaatggtggcatctgttatggctcctataatccttctcagggatctagaggaatgaaattgatatatcagtcgtgctcacagttaagagtggccttgggtttctctttgattagagatactgatggttcgagattcaatggttctattgatggttttgattacgatgatgataatgatgttcctcgaggaggaaaggattcacaggttgcctttggtgcaatctatgctcaggtaaagaaggagaagaatgcatcgaggcagatctccaggagttccaggacttcgatgagttcgaagattaggctagcgacctcccccagtcagctgcctgtggtggatttgtttacgttggctacgtttcgattctgtgtactttga

SEQ ID NO: 35886 - DNA, 384 bp, Zea mays
  Peptide Sequence Number=SeqID_79261
atggcgaggtgtatggggtctgatcaactccgtggcaaatgggtaacacgacttatgggtaaagatgcgcaacctctgcagagtgtaaaactgggctcggactcgggctcagcaccggaagacgacaaactccgcttcgcccgaccccagggctcgaactcagccctggcctcagccgacggtctccgcctcacccgacccaggggctcggactcgacctcggccttggaagacagactcgacctcgacctcggaggagcctccacctcgcctaacccagggctcggaccgaccacgtcacaggaggcgccatcattaccctaccccaagctaactcaggctacggggaacaagaccggcgtcccatctagctcgccccggtaa

SEQ ID NO: 35887 - DNA, 276 bp, Zea mays
  Peptide Sequence Number=SeqID_79262
atgtcgagtagtcagaaccgggccaggagcttctccggggcgcttgagtacttgggcgaccaccaatttggcgtgggtggccacaagctttcggggaattgctcgccaacgcctgctagcactgcaatgccgccctccgccgtggatagaacttctgctcacgtaacgcgtgatcgatctggaccattgaagcgtcaacgcacggataggattagggcgcgcataccccttcgcgcgatcggatctggacctccagattttgatcggatggcttag

SEQ ID NO: 35888 - DNA, 306 bp, Zea mays
  Peptide Sequence Number=SeqID_79263
atggcaaaagtgggtgggatgttttcgaaaataaaacttgatggtgaatctgtcaaaggccttgatggattcaacatcggaaaagatgtacctctgccaggcctgctgaccgaggaccctttaactggtcacatgcctcgtcatgggatccactttagtaagcatttatgcaaaacagagtctttgattattgaaaagccttaccttgactcccatataaccagcatacccttgagagtcttttctttagtcggatgggggattcgttctggtaaggtaaggaaagataccgaacttgtcaagtag

SEQ ID NO: 35889 - DNA, 192 bp, Zea mays
  Peptide Sequence Number=SeqID_79264
atggggctcggtgtatgcgactcgatctgcccgagggtggattgccccttggggaggagtgccgtacatttaggaaacctaacgggtggtgatgaggatgaaggttttggttatgacaatggtaatggtaaagaagaaggtgtcgaggtggatctccaggagttccaggacttcgacgagttcgcggattag

SEQ ID NO: 35890 - DNA, 468 bp, Zea mays
  Peptide Sequence Number=SeqID_79265
atggccaaacgaccatgggaggggcctgcgtgctcgcggaagggagcgaggcaggggccagacgcgcgaccgcggttggctagccactgcgctgcagtgccctggaggcgcgccaccgcgcaggccggccaaccgccgcgcaggctggctgccgcgccgtgggctcagcgagtgcgcaggataggggacgcgtgcgagggacggacggagccatgggagggtgctcaagctcaactgctcacgatgagcggcctcgtcgaagcagaaaaaagagagaagaaaagcagatgcttgagattgattgatgaaattcttgaggatctcttggacctatgggttaggacccacacacgcttccgctgtgccgctttgatcttgctggctgatattgatcgcattgtcttcattggggagttggaggttgccaaatggacaggtgcaagaggaaagaatagcgagaaaaggtaa

SEQ ID NO: 35891 - DNA, 465 bp, Zea mays
  Peptide Sequence Number=SeqID_79266
atggcgcctcctgttgacgtggctggcctgcgccctaggttgggcgatgcggaggctcctccgaagccgaggtcgagtttgtcttccgtggccgaggccgagtccgagcccctgggtcaggcgaggcggagcccgagtccgagccctgggtcgggcggagcggagttcgccgtcttccgggacttagcccgagtccgagccctgggtcggcggagcggagttcaccgtcttctgggacttagcccgagtccgagccctgggtcgggcggagcggagttcgccgtcttccgggacttagcccgagtccgagccctgggttgggcggagcggagttcgccgtcttccggggctgagcccgagtccgagccctgggtcgggcgaagcggagcttcctatggccggtcagtggagcggcgaagtgacggcggtcacttcggctctgccggggggcgcgcgtcaggataa

SEQ ID NO: 35892 - DNA, 153 bp, Zea mays
  Peptide Sequence Number=SeqID_79267
atggcccaagaaattatacgaaaaagcgagaaagccgcactttctccttcctcagagcctgccgagccatcggcggacccccacgtgaagggggacgacgaaattaaaaaatggccgaagccatcatggataaagttgttgatcagctactaa

SEQ ID NO: 35893 - DNA, 1023 bp, Zea mays
  Peptide Sequence Number=SeqID_79268
atggctcagaaggatctctatctaccgttcctggctctttccatcattgcctgctgcttgatgaacctgcaaactgttctcagctcaagcagcaggatgcggaattctacagacgatattagtgatgacaaatgccccccacaacctcatcccttaggtatgtgcaggtcccgagtagcagcttacggctatccatgtgaggaataccatgtgacaacggaggatggctacatccttagcttaaagaggatcccctatggtctctctggtgccaccgagatgacgaggacaccagtactactgttccatgggctactggtggccttttgggactggacatgggaccagcttgctgactatgatcttcctgctgtgcttgagttcgtctataacagaacaggaggcatgaaagtccactacgttggtcactccctggggaccttgattattcttgcggccttctcggagaacaggttaacagacattgtgcgatcagccgcgttgctctgcccaatcgcttatctcaacagcatggaatcgaggctcatcctgctcgccactcgcatcttcctcgcagaaacgattcacatgctaggttatcacgagttcaaccctgttgggccagtggcaaaggaagtgttgggaaaagtctgcgtcgacccagaggtcgattgctatgatttgttttcagctgtagcagtggtcaggaaagagacgatcaggaagtacgactacggaagcgagaaggagaacacgaagcgctacaaccagacgcggcccccaacctacaacctctcgtccatcccaagccacgtccccctcttcctcacccacggcggccaggacttcctcggcgacgtcgccgacaccaggcacctcctgcggacgctgctcagccagcacgacagcgacgacatcgaggtgctgtacatgcctgactacgcgcacggcgacttcatcatgggctacaacgccccgcagctcatatacaagcccatggtggagtttttcaagcgccactga

SEQ ID NO: 35894 - DNA, 2196 bp, Zea mays
  Peptide Sequence Number=SeqID_79269
atgtgcatggtaacatggaaacttggattgttcactcactcactcgacgtgtacttgcagaaacgacccacggtgcccaagttcggcacctgggacagcggcgatgccgggtacacggcctacttcgacaaggtgcgcgagaacaagggcgccacggcgccgccgctgcgccggccgcgcagccccaacgaccccgaccccgaccgcgagcccgagccagaggaggggccaatgaggagagtccccccgccgtcgtcgtcgaggccggcgaccgcaggaggccaccgcgagccgccgccgccggggcggcgccacgggcagagccaccggcgaacggagagcagcggcagcgcgccgtccgaccgccagagcaagttcgcgccgccgccgcagtactaccagcaacagcaacgcgcgagcccgcagcagcagccccgtcatcaccacggcggcggcggcggccaccagcagcagcaccccccgtccgcgcacgggcacggccacggccacggccaccgagctccgcacgcgcacaggcagcaccacgcggcgccggggccacgggcgcggtccgcctcgccgcagagcaacgccccgcgggcgtcggccgtgcccaggttcggcgtgtgggacgagcagaccgcttcgtcggccgcgcaggggttcacggtgcagttcgagaacgtgaagcggaaccgggaggtggccaggtccggggtgccggctgtgccgcgcgtgccgtcgccgccggagggcgccgcgctgaggcgcgcccatcagaagacccctttcgtgtccaaggatggcctggtcggcgcctgccagtggagtggacagggcacaataaatgctgaggcggcacatcgcctgtcagtggaatggacagggcacattaaatgccgaggcgacacatcgcctgtcaggcggcgcgtcttatccgcaataaatgcagaggacgcgcggcccagaagccttacgtcaggctctgcctgttggcttacgtcaggggcagtcggccacgtggcagcatcaggtctccgcctgagcggggagcggaagcgggtccgacactttcctatgggggtccgacacactgctgatatcttggaggatatcgtcttctctagccacatggcagccccggagccgtccgcgtggtggggtcgggcgctgtttgccacgcgactagagatagccgcatggactccgcgccttcatactgtagtaaggggtacccctgttttagggtaccgacagtggcccacggtcccacctcaggggaggatacgggcctgcaggtggggccaaagcttgattggtgattggcgtgctgcttctgtgcgcttgctgatagactgggctgttggtttcggtggaggtgaagaggcgtactaccgcgggcggtggcttgctcctctcgttgcggttcgccttcttcgcactcggagaccgacgcccaaggagcatgactcatgggcccaggcccccatgttagaggctggtccgctgctttcggcggagatgaagaggtgcggcggttcgctccttgcatggcggtttgccttcttcgcacacggagaccgacgcccaaggagtatgactcgtgggcctgggccccgtgtcagaggctggtccgctgctttcgtcggagatgaagaggcacgatgtcgccatggccttgctagaccctcccgagtgcttccagtccgaggtggcactcaacttggtgcgcaacctgcttggatggggttcgccggaaggatccgtgtcggcgcctctccccacggcgatctcgccgtcggggagttcgtgctcttcgtctccaacctcccctgcgggttggcgctatcgatctcgtctttcttcgtgctgctgctggaggagcgcggcctccaacctaagcacttcacgccccgcttcatctctcaggcggccatcttcgcctacctctgtgagatgtccgtgggggcgatgcttcttcctccagcatacggacgaaagggcgttgcgcagcgacctttcggaggcggaaagcgagctgagctgcggctccatctttcgcctttgatggcttcggtgccgcctccaacggtgaacgctggcccggctgctgaagacgtcgcccgggaggtcgtacaagatgccgtggagacggcggccacgtgcttccagcgcgaccctactgatgtcgagtag

SEQ ID NO: 35895 - DNA, 903 bp, Zea mays
  Peptide Sequence Number=SeqID_79270
atggtcatccatagggatgatcaccagcctggtggtgggggagaagcaagccgggctgcgacctccgccccgccctcagcttcaaggatcttcgtcatccaggctgaggcggaggagcgcaccgagtggggggtcgcctccacctttccgtcctccacccgggcggcggtcgtgccgcgcgcgggccagccacgtccaggtcctcctcgcaccgtcagctgcgcccgggggtcgctcagcacgtcgtacgacgcgagggcggtactcgtgttctgggacggcctcgacgaggatgggagtgaggacctaccggtgcgctttggggcggccgttgttcaccggcgcggtgttggtgggcaggtggccgctgtcgtcggtgctgaggtggtgatcgccatagaggtcgttgtcgctgctgccgcagaggtcgccggcgagtcgcttggagtttgttatcccgtgggtcccctgaaccttcggctactctgcgatgagctgaagctgaaggcagcggtggcgtggacagaggcgatgtcggctcagacagaggctttctcggcacgggagcaggtggcttcccaggccgggaagagcggccggccgaggcgcctgctcgcttcgccgtctaaggctaggccagattccgccgagggtggaaacaacgccgagggtgccgctcctccccctgctgatgacttgttcgtcggcagcagaatcgcattatctgagcgagagttacttttcgcggaaggtgacgagatcgcttatccgagcgagagttacttttcgcggaaggtgatgagtgaggaccctgctatcgatatagtcaaaagcacgaaagttgtttcggtagaaaactttttcgaggaaaattttgacgcagagggggggtcccccttctag

SEQ ID NO: 35896 - DNA, 1119 bp, Zea mays
  Peptide Sequence Number=SeqID_79271
atggcgtccccgcgcggccatcgtcatcgccgggccaacgtgctgcagcgtgcggcggcggcggcggcgctcctgctcgctctatcctgctgctgcagcagcgctgatccgtggccgccgccgccgccgccgcccaaggtgccggcggtgatcgtgttcggggactcgacggtggacacgggcaacaacaacgcgatcggcaccgtgctgaagagcaacttcgcgccgtacgggcgcgacatggccggcggggcccggcccacggggcggttctgcaacgggcgcctgccgcccgacttcgtctccgaggcgctgggcctgccgccgctggtcccggcctacctcgacccggcctacggcatccaggacttcgcccgcggcgtctgcttcgcctccgccggcaccggactcgacaacaagaccgccggcgtgctgtcggtgatcccgctgtggaaggaggtggagcacttcagggagtacaagcggcggctgcggcggcacgtggggcgcggcagggcgcggggcatcgtctccgacgcgctctacgtggtgagcatcggcaccaacgacttcctggagaactacttcctgctggtgacggggcggttcgcggagctcacggtgggcgagtacgaggacttcctggtggcgcaggcggagcggttcctgggcgagatccaccggctgggcgcgcgccgggtcaccttcgccgggctcagccccatgggctgcctgccgctggagcgcacgctcaacgcgctccgcggcggctgcgtcgacgagtacaaccaggtggcccgcgactacaacgccaagctgctcgccatgctccgccgcctccaggcggcgcgcccggggctcagggtagcttacgtcgacgtgtaccagaacatgctcgacctcatcaccaacccttccacgctggggctggagaacgtggaggagggctgctgcgcgacggggaaggtggagatgtcttacctgtgcaacgacaagagcccccacacgtgcgccgacgccgacaagtacttcttctgggactccttccaccccacccagaaggtgaaccagttcttcgccaagaagacgctggacctgtgctacgagcagctcctgtga

SEQ ID NO: 35897 - DNA, 786 bp, Zea mays
  Peptide Sequence Number=SeqID_79272
atggcgccggggaggcgccggcggcggggcgggtgtgggagttcgagcgggatctggtggcccgccgcgctgatggggggcgccgtgcacaccgctccttgtttcgtatatgcgcttggttcagtttatgatatcagcctgtggggaagggtttggaaggatctgtacaggagcatactgaaagatgctggaacctcatcagacaataagttcacttctattgctcttagcaacttctttgctggtgctgctgccggatgtacaaccctggtcctcatctatccgctcgacattgctcacactcgtcttgcagctgatatcgggcgtacagacacccgccagttcagaggcatccgccacttcatccagaccatctacaagaaaaacggcatcagagacatatacaggggattaccagcatcgctccacgggatggtcgttcaccggggcctgtactttggcggcttcgacactgccaaggatgtcctggtccctttggagtcccccctgtggcagcgctgggttgcagcccaggcagtgacatccatggcagggctcatctcgtacccactggacaccgtgcgccggaggatgatgatgcagtcagggatggaggtgcagatgtacagcagcacactcgactgctggaggaagatatacaggctggaggggatccggtcattctaccgtggtgcattgtctaacatgtttaggagcactggtgcagccgccatacttgttttgtatgacgaggtcaagaagttcatggacaggggtaggttgtaa

SEQ ID NO: 35898 - DNA, 570 bp, Zea mays
  Peptide Sequence Number=SeqID_79273
atggcttctggtggaaccttccggaaccttctcctggtgctccccctctacctcgcgctcgcctcgttggtcggtggcgaggcctcgaggaggttctggatcgagaacgatacctttaggaaggatggagtaccgttccaaatcgtcggtggcgatgttcactatttccgcattgttcctgagtactggaaggatcgccttttaagagcaaaagcattaggcttgaacacaattcaaacatatgtaccttggaatttgcatgagccagaaccacagagctggaaattcaagggcttcacagacattgaatcatatctgagacttgctcaagaactagaaatgctggtcatgcttcgtgtagggccatacatttgtggaggcaagttgacattcgtattgaaacttcatatgttcggcatggcaaaggctaaagatatatctgtatatttataccgcattgaacaaatagaattagtactattgcagaggattgatagcgtcaaattgtcattagaaaatcagaagtcacttcttggttttcaactaaaaaatagatcattgaatcagtga

SEQ ID NO: 35899 - DNA, 537 bp, Zea mays
  Peptide Sequence Number=SeqID_79274
atggggagcagtattaataggcttagtaactgggccaggcccattacagtgaggggtgagacgccaaataaagaatttgcagttgagtggagcccaaggtttccaaatctgtttccatggcacacatttgatggagccaaaaaaagaggaaatgctgttcttctttatgcttccaagtaccatgatgtccctgccattgtgaacatttctggccgctttgcattagagcgaggggagttgcagtaccgggtgtcgaaagcgagtctggatgaccggctgagcactgataccctattctccagccgtgccataagcgaaggctgcagggttctcacgatccacggcgccaaagacgagatcgtcccggcggaggacgcccggcagttcgcggcgaacatccgcaaccacgagctgcgcatcgtcgcagatgccaaccaccgttacaccgggcacagggaggagctggcctcgctggtgctgggcttcctcagctcccatccctaccagatcacgtcgcgcttgcgtccgagactctag

SEQ ID NO: 35900 - DNA, 234 bp, Zea mays
  Peptide Sequence Number=SeqID_79275
atgtggattcctatgcacggggaacggctgtccgttacgacgacggacacggccgtggcggcgatgcccgggcacgacgcacgcgagatgctcgacgttagattgcctccaacaagacaatctgcgaaaaactatgttcatatggttccaaaattacatataatgagatatagaggaccgaatttagaggatgctactggagatgaagaagatatagatgataaaatcttttag

SEQ ID NO: 35901 - DNA, 753 bp, Zea mays
  Peptide Sequence Number=SeqID_79276
atggcagcttctttggaagctgaaagacaagaaaatgaagcaatcaagaggtcccttgttgaagctcaggagagaaacgatgcattatttaagaaagttagggatagcgaatacagggcccaccagcttcaagatactgtccaaaagttgagacaagatggtgatggtgtcaagaatgcacatactgaggttcatggaacaaatgaagatctaatgaggagaaatgaaaacctcctaaaaaggaatgatgacttggtgaagaagattgaagattctgctatacttgttactgagcttagagggaacttggaaaggttagaagggaaagctgctaatttagaggctgaaaatcaattgcttcgtcaacaagcaattgcaactcctccatcaacagcaaagtcttctcaagctgcatgctctaaaatcagtatgatccatggcagttcccttgatttgattaaccacaaggtttatgaaaatgggcaaagcttgtttaatgatgtatatcagttctcctgcaacgttcatttaaagccaccagggcaactgcctcaactccacatagacgaagaatttcctgtgaaaggatttttcaagccaatcaaacttcaagcagtggacttgcttgtctcagtgctcaatcagtggatggaggtaccgtgtttcaccaaattgaagcaaggtacctcatttcttgagcaaagcaatcatccactgtcaacttttcctgttgaaaatctggggaatttctaa

SEQ ID NO: 35902 - DNA, 984 bp, Zea mays
  Peptide Sequence Number=SeqID_79277
atgagcgacggtaaggactccctcgacctctccgccctcggcgccgccatccccaactcggccgagctcagcgcggaagacaaggctaaccttgtggcgtcgatcaagaacacgctcgagggattggcatcgcggcataccgacgtgctcgagaacctcgagcccaaggtcaggaagcgcgttgagaagctcagggagatccagggcgaacacgatgaacttgaggcgaagtttttcgaagagagagctgctctagaagctaagtatcagaagttgtatgaaccactttactcaaagcgttatgaaattgtcaatggtgtggtcgagattgagggtatcacaaaagaaagtgcagctgaaaccccagaggagcaaaaaagtggagatgagacctctgctgagcaaaaagaagaaaaaggtgtaccagctttctggcttaatgcaatgaagaatcatgaaattttagctgaggagatccaggagagggatgaggaagctctcaagtacctcaaggacatcaagtggtacaggatcagcgagccgaagggttttaagcttgaatttcactttggtacgaatatgttcttcaagaattcggtgcttacaaaaacatatcacatgatcgatgaggatgaaccaattctggagaaagccattggtactgaaattgaatggtaccctgggaagtgcttgacacaaaaagtgctaaaaaagaagccacggaaggggtcaaagaacacgaaacctatcacaaaaaccgaagattgtgagagcttcttcaacttcttcagtccacctcaagtccctgatgacgacgaggaaattgatgaggacacagctgaacagttgcagaaccaaatggagcaagattatgatattgggtatgtcatgggttctgtattatatgtagtggttgcagtcctgttacagattctgcttctgcgatcaggggatttgatcaatctgttgatgcaccaagattaa

SEQ ID NO: 35903 - DNA, 2250 bp, Zea mays
  Peptide Sequence Number=SeqID_79278
atggctagccaggctgcgcggcgaggaggagtgatgaggccaccgagcagcggcgtgcgcgcggcggccgcgcggtcgccggccgcctcgttcctgctggccgctgcggccgtggccgcgctcgtcggcgggttctacttctggctggtggtctcgtcgttccggctccccgactcgggcgacgccgggtgtcgccccgacggcgaggggtcgtgggcggtcgggatgttctacggcagcagtcccctcgcgctccgccccatcgagctggaagggagaagcaatggcaacagctcggcgtggccggtagcaaaccccgtgctgacatgcgcgaccgcgacggaggcggggtacccgagcaacttcgttgctgacccgttcctctacatcgaggaggtgatccaagacgacacctggagctaccgagggcggtgcgccagctgcgacagatgcccaggagggggcagcgcgctggacgggcacgctgaccatggtggtggcggcggcacggctctaaggagaacctatgaggcatggcatctgtcatatccttttgtgttcaagtatgagaatgagatttatatgatgccagagggaaacaaaaagaaggagctgcgcctttatcgtgctattaagtttccccttgaatggacattggagaaggttcttgtcaataagccactcattgatgcctcattaatccaatttgagggatattggtggctatttgcctctgattttacacggcatggcgttgagaagaacgcagagcttgagatttggtacagtaactctcctcttggtccttggactgagcacaagcaaaatcctatctacaaatcagacaaaagtctgggagctcgaaatggtgggaggctctttgtttttgaagggtcattatatcgccctggtcaggattgcagtggtacttatggtcggagggttaagttgtacaaagttgaaaagttaagcaaggaagaatacaaagaagtccccgtaaatcttgggatagatgaaccaaagaaagggagaaatgcatggaatggcatgaggttccatcacatggatgcgcaacgacttgcatctggtgcatggattgctgtgatggatggtgatcgagtcccttcaggcgattcaaccagacgttcgctcattggttacatagctttcctgctggccagtgcccttgtcatttttgtgggttttatgaaaggtgcaatcacttgctacattccttccagtttatgggttcctcttacaaggagaacagaattaccccgcatcttctctgtgcaccgcttcaaccagaaagtccgcagatattctaccagtatcagcagatatatctctgcggccaaaactaagctcggtgaaaagacctggtccaacatgcttttcttctgcgtagttgctctatttactattgtgaatgtctgcattgccgtgcatttcttatacggtggcaatggtgctgaagaggcatatacgtatcaagggcaacactctcagttcaccatggtcacaatgacatacgaagctcgactctggaatttgaaagtattcattgaacactactccagatgtgaatcagttagggagatagttgttgtctggaacaaaggtaaccctccaagcagtgacgcttttgactctactgtgcctgtgaggatacgagttgaggagatcaattctcttaacaacagattcagggtcgatcctctgataaagacccgtgctgtttttgaactggacgatgacatcatgatgacttgcactgacttagagaaagggtttagggtctggagagaacaccctgaacggatggcgggcttttacccccggatgatagatggcaaccctctgcaatacaggaacgagaggtatgctaggggtaagaacggctacaatctgatactcacaggtgctgccttcatggacagcgagttcgctttcaagacttactggagcgagaaagctcgtgaagggagggactatgtgcacaagaacttcaactgtgaggacttgctcatgaattttttgtatgcgaacgcaagctccacaaggactgtggagtatgtccaccctgcgtgggctatcgatacatccaagctttcttccgtggccattagccgggacacccagaaacactacgatatcagaacagattgcttggcaaagttctcctccatctatggccccctccctcagaaatgggagttcggcatgcgtgaagatcattgggacaaatag

SEQ ID NO: 35904 - DNA, 993 bp, Zea mays
  Peptide Sequence Number=SeqID_79279
atgggcatcaagggtttgacgaaactgctggcggacaatgcgcccaaggcgatgaaggagcagaagttcgagagctacttcggccgcaaaatcgccgtcgacgccagcatgagcatataccagttcctgagcgggacaggtttcttatacttccttgaacagattgtagttggaaggacaggcatggaaactctcacaaatgaagctggtgaagtcactagatactcaaaaagagatgatgcaaccaaagatctgactgaggcagtagaggtaggagataaagatgcgattgaaaaattgagcaagaggactgtaaaggcaccttctgaagcagaagcagaatgtgcagccctttgcataaacgataaggtgttcgctgttgcttcagaagatatggactcccttacttttggggctccacggttccttcgtcatttaatggatccaagttccaagaaaatacctgtgatggaatttgatgttgccaaggttttggaggagcttgaactcaccatggaccagttcattgatttgtgcatcctgtgtggatgtgactattgtgatagcatcaaaggtatcggggggcaaacagctctgaaacttattcgtcaacatgggtccatagaaagcatcttggagaatcttaataaagacagatatcaaattcctgaggactggccttaccaagaagctcgacgcttgttcaaggagcctaatgtcacattggatattcctgagctaaaatggactgcacctgatgaggagggtctcataagtttcctggtaaaagataatggtttcaacgaagatcgggtgacaaaggccatagagaagatcaaatctgccaagaataaatcgtcgcaaggaagactcgagtcctttttcaagccaactgccaccacatcagcaccgctaaaacggaaggagacttcggataaaacaagcaaggcagctgcgaacaagaaaacaaaggctggtggaaagaagaaataa

SEQ ID NO: 35905 - DNA, 303 bp, Zea mays
  Peptide Sequence Number=SeqID_79280
atgtcgagccggttctggaggtggtacgcggaccggcagttccacaggtgcgagaagacggtgctgtggggtatggtggagccccaccgcccggcgcgctccgtcgcgccactcgtcggcacctacgtcgccgccttctacaccggcgtcctcggggccgccgtcaccgagcagctctacaaggatcaccctggcgaggcggtgccgatcatgccgcccaagttctactggggcccatggagggtgatgaacggagaagtttcccgcttcatccagccgcccgacgaggccaagacagcgtag

SEQ ID NO: 35906 - DNA, 507 bp, Zea mays
  Peptide Sequence Number=SeqID_79281
atgtcgtcggccaccctcaccactgacaacctccttaagcgggtcaagggtgtggtgaggaaggctgattacagcatccttgcccaggtcctgatgcgccccgaccagggttatgtgtcactggtaagccgcagaacttgcttctgccttatccctgtttctgcgtctcaatctgattatttgggttttccatttgttctcaagggttgcggggttacaggagaaggagggattgccgctggagccctggaggcgtccctggattcgttcggtgacgacgacgatgatgatgaagggatgaagtttcggctcggcttatgccccgaggtgaggcctcagtttgagccaccttcggcgcccatgtctagtgggttggatgtgtcggcgcttggtctcgaggtgtcggtgtctcggcccgagacgcatacgtcgatcgagttggtgactgtccccgcggctgaggaggaggtggcgacgaagcgggttgtcgccgactccaaacgctga

SEQ ID NO: 35907 - DNA, 498 bp, Zea mays
  Peptide Sequence Number=SeqID_79282
atggagtggaggaaaatacttggagatatattgatggaatatttggacagtatttctggaaagaacttgaaggggattactcgggaaatatctgggcgggagtttgagaaaatttcaagatttaaatttttgggatgctacacggcacctgctccagtgattgatactcaggctgaggataccacttttcaccagttcgagactcagggtgcagcagtccctgacgacgacgacgacgacgatgatgatgacgactttggggttccacctccgcctcctatgcctccacacactcatgatcatgaggctgggagttccagtggttctgcccctgcttcccctcctgccattgacccagctcttgcggcgatcctccagactcttactcagcagcaggttcacttggcagcggtccagcagcagatgtccgagagaatggtctcgatgttccggatgattcaggatagacaggatactctgcagcagcagcttctctag

SEQ ID NO: 35908 - DNA, 240 bp, Zea mays
  Peptide Sequence Number=SeqID_79283
atggagttcaaatcgtgctcactgctgtggggagagagatcagaggtcagaggggtcagaaaccagctgaactgcccctcaggaccagttcaaccggtcttgaccactcagctgcagctgaagaagctcaactcagctgaagtcaagttcagctggaaagctcagctgcagttgaagagttcagctgcttttcagcaagaacactctaggtttctcaaccctaaccacggtcaaccatag

SEQ ID NO: 35909 - DNA, 384 bp, Zea mays
  Peptide Sequence Number=SeqID_79284
atgtccggtgcaccagaggactccgacttcaaactcttcaccttcgggaattctcggaagtcggcgcgctataattcaccggactgtccggtgtacaccggacagtgtccgcgggacaatggctacttcggcgccaacggtcacctgcagcgcattaaatgcgcgccagagcgcacagaagtcaggcacgcgcgagacggcgcaccggacactctacagtacatgtccggtgcgccaccggacatcaaggcgggcccagaagagagaaaaccccagctcaactgcccagagctgaagaagctcaactcagctgaagtcaagttcagctggaaagctcagctgcagttgaagaagttcagctgcttttcagcaagaacactctag

SEQ ID NO: 35910 - DNA, 803 bp, Zea mays
  Peptide Sequence Number=SeqID_79285
atgaccgctggccacggggtgaatccctttttagggaaggctctcccgctcgtgcccctggaaatctcgtccgatgcgcgcctagcgcccgctgcaaccagaccccaacacgcggacccgggttcgcatgtcatacacctggagtactggtctccgagtgcggagaagacggactgccgcacggggaactatccgccacacgatcgcacgccacttcggggctactacaagaagatatttttactaaccaaggcggcggtaatgaggcaccccgcgcatgacccgatggaaccgccagacgtggtggctcgtatcctccccagaggtgggcccaagggccactgtcggtaccctgaaataggggtaccccttactacagtaagaaggcacggtgcccgcgcggctatctctagtcgcgcggtaagcagtacccgaccccaccacgtggacgactctagggtcgccacgtggccagggaagacaatatcctccaaaataccaacggtgggtctggaccccccatgggagagtgatggacccctgcatatccggaccggacccccgagcagggtccaggacctccgcgggtacagaccagaccccgggacgggtcccagacctctttgtgtagggtccgggccaccctcagcagggtcccgggattctgggacaaagaatacccaggccttaaccaaggtcaggtgggggtctggagccaacacatgtccggatcataccatgtacacttccgctcctcgctcaggcggagacccgatgctgccacgtggcctactgcccatgac

SEQ ID NO: 35911 - DNA, 735 bp, Zea mays
  Peptide Sequence Number=SeqID_79286
atggttgccttccaagggggtcgccctccttttaaaggcaactctccccacttgcgtcctcagccgtcgcaagctgagtcttctccaacacgctccaaggtcctccccctacgacacgggggctgggtcccacgcatcgtgcaagctggcccaagacagaaggagccaaaaccgccgcgcgtgatgcgcgcaactgcccagcggttacgagcattcctccactttcgcccagaccagcgggtgaaagggcggaccgccatgcaggcggcatgcaaccgcaccaagggggcgcaccctttccacttcgacgcgtccagcatggaggcccaggcccacacatcatgtaaccggtgcgccggttactacgtgcgagaaactgcaccgccacttgcgccagtactgcgcctcctcgactgcggaaccagtgccgcgactcgaggcgaccctgcgcacggcccaacagtgccaaccgagcacatcggtcacgggtcagtcagccgcgggagaagggatcgggaaaggggataccccgaaagggatcctccttcgcgaaggaaacgggccccgagcccccctactaatcacaggttcgaaggctggccccttggaagggttcaacagccgcctcagagcacttgggctccgcgcccactactggtcagaggttcaaaggctggcccctcggaagggttcaacggccgcctcaggccactcgggctccgcgcccactactga

SEQ ID NO: 35912 - DNA, 1194 bp, Zea mays
  Peptide Sequence Number=SeqID_79287
atgagagcggtgtggcggtctgccgagacccccactgggggatccatattcccggtgtacagcccgaaggttcccagcccgccgatgcgggctctagagccccccccccccccccccccgcgtggcccccaactcctcggacaagggcaaaggggctacgagcagctcttcctctccgggagccaccgggaggtcggagggagagagaagacaccgactacaccgcgccgatgggtcttttgtctcggacccacccttaattcgggcttctcccaaaagcgtcagaggacgactggcgaaaccgtggaggccgtctcccaggcccagggcacgcagaggcgcgtcagtcctcctccaccaccatcatcagacccgccgcagccgccgccaccaccacccctggggcagcagcagcatcaacagcagcagcagcaggggcagcgaacgtcctgcttccagggtcgctggaaggttcagggccccaaggcctcctcctcctttgctcccaaagtcgctcccaccggtgaatccggctcccaacagcaggcgtccgctgggagaggtgccggcgacctgcctccacctaccattgctgaggcggcgccgtctggcccccaggttccgtctgccattgccgaggtagtgtcgtcgggcctccaggttccagctgggggtccggaggcagtagtgtcgctgacggctactgctgacccaacaacggtgatgttgtcgaatacaccatcgaaggagaagaaactggccaagaaggaggagcacctggaccagagggaggaggtcatcacggcgctgtcggaaaagctgaagtcctataatgtgatgctggagatacagcgggacgagcagaccgtggctgaggcgagtctgcaaaagctacagcgggagctcgatgatagggccagcaacatcgctctcaccgaggagaacctcaaggcgaaggatgcctccctggagaagcaggcgacggatctcgactggcaggagaaggacctcgccttcagggaggagatgtgggaaaggtgggacaagttgttggcagatcatgagctcgaggcagaggagaaggagaagagactggaggagaacgagcggacactggaggagcgggtccgcaggttccaggcaacgcaggcagcgcaggtagccaaggcggcgcaggcggcttcggactcctag

SEQ ID NO: 35913 - DNA, 285 bp, Zea mays
  Peptide Sequence Number=SeqID_79288
atgcaggaattcccttgcaggaccgccatcgcagcaaaatcctcccgagggtctccctacactgaccactcccctactgcccttgcccctttcgggtaccaggatgatcttcaagtgacacgtgtcctcactgctagacgtagccatacagacaaacatgagaatagttccactggacggcgggttgattcctacttaaatcaggggctcatgtgcaaaaaggcctgggtgaaggggtacaggaggatagcagccgtacgatccagaatcgagggctcagattag

SEQ ID NO: 35914 - DNA, 420 bp, Zea mays
  Peptide Sequence Number=SeqID_79289
atgggtcatcttgcaaaggcatgccccaataaaaggaagctcaagttgatgaaggaagaaaggaggctaaagcatgacaagtgcttcaagtgccacacttgggatcacctctcctcaatgtgcccaaccaagaaattggtgaagtcacaagtgatgtctcaaccaatgccacaagttgagcaaaagaaggatccccaaaagaaaattaagattaatcatgaatatgatggtgatgtggcgaagaaaaataaaacaagaagaggaagaaggcattcaacatataatcaagatgccaatatgatgagcacaaatcaaaataaggatgatttggctcaaatcaagtgctacaagtttgatggtatgggtcactttgcctcaaggtgtcccaacaatcttgaaaagaaggctcaagaaaaatga

SEQ ID NO: 35915 - DNA, 504 bp, Zea mays
  Peptide Sequence Number=SeqID_79290
atggggaagcctgtcccatcactcctcatgctcctcctcagccgaggcagggtcccactcaacagtccaacccggtggcaaggtggacggccaagttatcccagcaaccatctcctccagagaacctgtaaaaattatgccacaagcaaggctgagtatactaatactcagctagacttacccgggctcaccgccttggcgtacaatgccccactgaccccgactggccgtcgtgcagtgaccgcacttgtacccaccataaccggaatgggagacctcgtctcaggtcgcgtgaggggatatgtctacgggcagtacgttcaaacgcttgactcacggtaccacaccttaatccttattcaaattttatcccgtggacaaccaatccccatggattgttgtccacaaccaacatcagtacgatatgaaggtgggaacaatcaatggcctgacctcgcgcgagtgctagaaaaatcactcgtcttctaccgagatcctacttaa

SEQ ID NO: 35916 - DNA, 183 bp, Zea mays
  Peptide Sequence Number=SeqID_79291
atggagcagatcgacggtttcggcggtgtggacgagatgggcgcagggactaatcttcgtggcgacgatgacggtgttcggcgtgaagagctagacatagaggctctgtcgacgtcgaggcagcgaactccgatgaggttcgcgcagggaagactcgaggagttagacccatggcgccgatga

SEQ ID NO: 35917 - DNA, 771 bp, Zea mays
  Peptide Sequence Number=SeqID_79292
atggcacataggaggttgccaggaccagtgtgtgcacagatagcagacactggcacacagattgatcctggtagctccagagcacgtaagtctcatgtgaacgcatggcttggcagcagctgcgtttgcaaaacaaaaggttttgtgctgcagcatcaagttatactcttctgtcttggagaaactttcacagagctacctcctatttaccctctggttgatttgcctataaatactagggcaagcgctgcagattttggtggttcagttcctaaacctgggcttgaagtcaacttagtcgacgctgttccttgtcgaatagcatttgagaggggcaaagaacggcacttctgctttttagccatagctcatggaacttctggttggattcttcttctagaagaattacctctaaaacgggaacgaggaattgtccgtgtcatggcacctttggcaggatctgatccaagaatagatacaaagcatgggaagtggttacatctacgcattcgcccttcttcggtcccttttttggacactgagaagcataaagcgaagacaaagaagtatcttgttgatgggagatggacccttgcttttagggacgagcagtcctgtaaggttgcagagagtatggttattgaagagatgaaactccaacgaggtgctgttgcagagcaattgaagccattggttgaatttgacatgcctgaggatggaatgcagcacccccagacttcacatgaaaccccttctgatgatggatcatga

SEQ ID NO: 35918 - DNA, 1734 bp, Zea mays
  Peptide Sequence Number=SeqID_79293
atgaagctaataaggcaggaatttgtgattgaagcattgcgatcaattgcggaacttatgatatacggtgaccagcatgatgctttgttttttgaatattttatggagaaacagatcatgggtgagtttgctcgtgttctaaggatctcaaagctgtcaagagtgtcactccaattgctacagacaatgagtatcatgatccaaaatctgagaaatgaacattcaatttattacatttttagcaatgagcacatcaacttcttggttacgtacccattcgattttcgaattgatgagatgttatcgtactacatatcttttctgcgggcgataagtgggaagttgaacaagaatacaatttctttgctcgtgaagacgaaaaatgatgaggtcacttcctttcctctttatgttgaggccttaaagtttgcttttcacgaggatagcatgattcgagttgctatacgtaccttgacactcaatgtctatcacgttggagatgaatctgttaacagatttgtttcccgcacgcctttatcagattatttttcagacatggttcagcattttcagaagcagtgcattgacttggataagttggttgcacgctcctcacgaaagggaaattcttctgtgccaatatcttctattgaagatgcaattgtgcaaattgaagacacactgtattatttcagtgatgttatgtcttctggtattcctgatcttgaaaggttcatcactgaaaatatcttgcgagttctggtatttcgattcttactcccgtcactgcagaggcagagcacagatttggacttaagtgtcactacatccatgtatctactttgttgtatactacacatttttaagaataaggatatggcaagtactgtagctgctgccctttttcatcaacctgatggccctgatgataggaagcaaaggacacctaatggatatacatctgagcatgatagttgcaaatctgagaatcattgcaccactgcctctggtatcgagcaatcaagtgaggagccaaattctttgtcttctgttagttggaaacacttgcccaacaattcatcgcgaagtgattgctgccaaggaaacacaccaagggaacacttgctgtcctatatcacagaaggagatgattcacaagctttgggttcattgtgcttattcgctacattattgcagacgaaagaacttgatgaatcaatgctggatgcccttggaatcctccctcaaagaaagcagcataagaaacttctattacaagctttagtaggtgaagaccttgctgaaacacaattattttcgtcaagcagcagtctaactgatgacagcatttgtagtgattttgatatttatgtaaggaagcttcagagatgcgaatatgttgtcctacaaactgcactaaacactacacaaaagatgctgtcctctagtcaaaagaactacaacaatgcactgctgttctttacccaagatgctgtccttaaagcagtcaaaactgcagtaaggaaaggtgctgccctgcctgctgttgtgttgctctgcctgctgtcctatgcctccacaaaagcagatgctgtcctcgagcaaagaccaaaaaggactgctgctgtccactgcagcaaagaccaacaaggacttctgctgtccttcccacagaccatgagacttattccaataattctcccccaaagtcttgtgcgtcgttttgttggatag

SEQ ID NO: 35919 - DNA, 234 bp, Zea mays
  Peptide Sequence Number=SeqID_79294
atgacttccaaagctcacagatatcaggattatcttgtgctcgatgctttagtcgaccttttctgcaggtcaaaggtttctgcagatgttcgtttggttggtggctggcttttccggcaactgctgccccatggagaggaagagttcactgcttttcatctaagacgactaaagcaaatgcaaggggagaactacgattctattcctatttattattaccaaatttcgctgtga

SEQ ID NO: 35920 - DNA, 312 bp, Zea mays
  Peptide Sequence Number=SeqID_79295
atgggagaggggggtggtgtccaagagaaaggtgaatgttttccacaaattccaaattcccaaagcgcatcacccgaacggaaaaagaacaaaaagaacaacctccacttctcctctttgcaaaccgggtatcacactttccctctctcaaacggtcacctagaccgagtgagcttttctcctcaatcaaatgggtcacttagaccccgcaaggaccaccacacaattggtgtctcttgctttgattacaagttgcttgagaacaagaatggtaaagaagaaaagcgatccaagcgacaagaactcaaatga

SEQ ID NO: 35921 - DNA, 513 bp, Zea mays
  Peptide Sequence Number=SeqID_79296
atggcactatggtgcaactttctcgtcttctctctaaagtttggagtgtggatttcaacttcaagtcatgttatgctagctgagctagtgcattccattgcagactttgctaaccagatgttaatcctggctttcttttttgcagctatggttattcgaaggaaagatttgtatggtctctcatatctgcagttggaatattttgcttgggttcagcctccagagaatattcactgggctgcattagtgattggtgggtccttcctaattgaaggtgcttcactgcttgttgctataaacgctgttaggaaaggtgcagaagcagagggaatgggtatttgggactatatctggcgtggtcatgatccaacttctgttgctgttatgactgaagatggtgcggctgttacaggccttgctattgctgcaacatctttggtagctgttcaaatgacaggaaatgctatgtatgatcccattggctcaatctttgctggcaatttactagggctg

SEQ ID NO: 35922 - DNA, 471 bp, Zea mays
  Peptide Sequence Number=SeqID_79297
atgcatcctcccctcgcctccgcggccctccgcctcctctccttcacctcccgtacccgcctcctctcgcactgcccatttttcctatcccgccgtgacgacgacggcggccgcgagggcccctcgtcgccgctgcccccgctctcgccttctggctcgactttctggccccgctcgctcctcttgtctgcgtcagatgccgcgggcctcttcagcctccgtggcgggtggcggagacgggctcttcctcccgcggcgtcacggccccccggcgccgtcactgacgcagctcccgtccggctcaccgtctcccgcaaatattctctgcgtgtggccaaggggaagaagaaggcgcattttgacgatgaacacagaagtcagaacattgcgtatccagtaaaacagatttctgaagttgtcttctcgtcatggattattaatattcctagttttcatgcaaaatctaaatag

SEQ ID NO: 35923 - DNA, 438 bp, Zea mays
  Peptide Sequence Number=SeqID_79298
atggatcccaagaaagtgaccaccagagctagctgctccctagacgaggctatgaagacaaccctcattgataagaaagacaaagcaaccctcgcagaagacaccccgctcaccacatttgagaacaacgaaactgaggcagtcaacaacaagcaccctcagaccgaagacctgcctaccctggaaggcaacgtccacacaagcagcttcaaatacctcccacacgacgaccccccgtcgaggtttgctcccattggatacctcccaaccgaaggagacggagacatccttcaagagggcaaagacctaagaattttagcagaagaccagcttaaactgcgagccctacgcatcaaaactaaccatctccagaagcaaagggaggtcctcacagctaaaaggcagagaccaatatgcaggaaaggattagacaactga

SEQ ID NO: 35924 - DNA, 378 bp, Zea mays
  Peptide Sequence Number=SeqID_79299
atgacgggcgttgatggcggatcggcgttgatggcggggagcactcggcagaaccgtgcaccaaggaataggcatgctttaattggccgggccattgatgatcatgacatgcagcgagtccttgaatttcttaagtctgatcaggtcgtagatgctctttatgattgcaaaagcgagttcagggaagctgcaatgtccaaggatgatacggaattactaagggtcatggctaactacggtgaggatgtagttgaagctctgggatatgaagtggatcggctggagtctgagatcaaaaagcttgtgcctgggattaaacatgttgacatcgaggcacacaatccagaaggacttactcttagagcagaagttttgtag

SEQ ID NO: 35925 - DNA, 240 bp, Zea mays
  Peptide Sequence Number=SeqID_79300
atggcctgttcagccaaagccagctctgtctgggtgcaccggactgtccggtggtgcaccggacagtgtccgtgtccggtgagccaacggtcggccaggccaacagtcggccgcgcgatccgcgcgggacacgtggccgagccaacggctagtagggggcaccagattgtccggtgtgcaccggacagtgtccggtgcgccaacggctccaaggcgccaatggtcggcttcgccaaataa

SEQ ID NO: 35926 - DNA, 897 bp, Zea mays
  Peptide Sequence Number=SeqID_79301
atgacacgtaccacttctgtggaaacaggagggccgccttcgtccatgataggagaacggaaatggtggaacaggagaatttgttgtaggaacgctactttcgggacagtggacacactgcctgtgagctgcgtcagagatcagaaatgtccggtccctgaacccagccgcccggcgctgtccgcgtgcgaacccaggacagctcaaagccagtcacagagtcacagtgcgacgacagcttaccccgcagatccagccacgcgccccgagggggcatgcagatgcagatgcagtgcgcagccgcacgccgcgccgcggtccgcagtccgcctcgcggccgtgtctcccgcctcgcgcgcggacgcggagcgtgcaagttgcgcagcttggccgaaagggcaaagcaaggggggagccaagccaggaggagaagcggacgggaaggcttccgccgcggccgcgggggtcaactcgggcgagcgggtacaacgagtaacagcggcgcacggctcgaggcgcggggctgcttgctgcagccagcagccagccagggccggccgcttccggcttcgcttcattattggggcccggactttctcagcacagcaggcactgcagcgcggcggccttgggatcctgttcccaactttttcctcgcccccggtcccgaacccccttgcccttttctcgctgcagtacctgtggcctgtgggtggcagtaaaaaccgctgcgtgcctgccggtggagctttgtcgagcagacggtcccggccgcgcccgagtaaaaatcctggtcgtgcatgctgccgctgcgctggacggatcgaggagatgggagtgacacgccaccagcaaccagcagagcatcttgaccttgaaagttcaccgcagcagtag

SEQ ID NO: 35927 - DNA, 1485 bp, Zea mays
  Peptide Sequence Number=SeqID_79302
atgggcgtcatatgctcccactgttacgtggcattaccaccgtttgaggtggcggaggacgatgaggacgaaggggccctccgggtcagggaccctagtcgtgaggtcaagaaggcacggggagtcgtgaagtccaccacccccaacggcagcaagccaccgccggctgcgaagccagccgtccctgaccctagcaaaccttcgtcgggtgcgagggctgccgctcccggctcgagcaagccgccttcggctgagcccacgcgggagcgagggccaccgtctccgctgcgcactgccgaggtggcagcaggtggggccgacctctccatggacatctgcgtggatgactaccgcgtgggtggtgtcatgatgttccatgcccacacaggccagggacttgttgtttgttgtgtttatgtggttgcgaatttgatggacttttcatggcaggcgactgccttcgccgatcatgttgcgtcgggcgccctgaccttggagttcgctgtcgagaggcaacgactcgagagcaggattgagcgcctctgggcgcagcatacggaagctgtgcgggacaagtcagctgcgaaaaacaagagccgcaggctgatggagaagttggcggctgcgaaggccgagaaggaggacctcagccgtcagctggcggcgtataggaaagatgcaaacagggcctgcgctaaggcgcaggctgcacaagccaaggccaaacttgcgcgtgcggaggccagtctcgcttgccaacacgctgaggaggcggaaatgagccacaacagcctgcgcgaccgcctggacaaagcggaggcctctactcatgcagaggtcgaccgaacgcatgcacagctcgtggacgcgtaccgggagcttggtgcgcggaccgctccctttgatgcgtttggtaaggaggtggtcctccacttccttggatggctgcaagaggagttggaggtgctcccaatgattgtgacgggcctcatgtccttcgcctcactcatcacctgcgaaggggcctcgaatgccttgtcccgcgagggatgcaggcacttcgaagtctttgaccgatcggacgaagacttcgagcgtggaatcttccaggttgaggacacagtactgaagcggtcggctggggcactttatgataggatttggggccctcacggtcgtgagactgcctgggagaggtccgaccgggcgatggagcagatggcgcatggtgaggaggtcgaagacctcggggacctggatagcacactgcccgaggcgtcgggtgcgaaggaggggactgggggggagctggcgccgccgtccgatgttggcgaaggccccttggtgacccccgcgctgacttgtgctggcgaggaccctgtgccggacgctgcgccgactggtggggacacttcggtggtggcgggcgaaccagctgccgaagaccctacggcgtcggccggcccttcgcaggtggcggggtag

SEQ ID NO: 35928 - DNA, 555 bp, Zea mays
  Peptide Sequence Number=SeqID_79303
atgccggtgctgatccagatccggatcggacccaatccgacccgccagcggcggggcggtcgccggagggcagtgcgcgtagcgtacgcttcgcttccgtgggggagtggggatcgatatttctccatcaactcggattattcgtctgaggatccaagatccaattcagccaagatggattcagcagactccatagccgacaaggcaattggaaggatgcaagagatttcggacaagatattttccgtagcgagggaaacaatccgtcctggacgcgggttgacctcatttgatgctaccaaacttcgtgtagctttggaggagatagcttgcatgctggagcaagactctctggtgttgcaagagcatttggacatcgtgaacaacgtaaacatcccggttgacagcagctatgaaccttctaccttgtcgtcaccacccccttctgacgacgacctaactccacactgggactttgcggagcacttccaaaacttctggggtgttgaatatgactccaatcagatgccttcgtttagtgacaacgatgtttaa

SEQ ID NO: 35929 - DNA, 1974 bp, Zea mays
  Peptide Sequence Number=SeqID_79304
atgctgccccccgtggtggtcctcgtgttcctcttcgtggtcgcgccttcgctcttcttcgtcgtgcgcaatgacggtcgcgcccacgcccacgtccacgtagcctccgatcgcaagggtaagaatggcaatcaggaagcagcagcaatgaagaacctcaaatctattttgcctaaggaggtgtttgatgctataactgctagtcaacaagaatcaggcacattgagtgttgatttttttaggaatcatgcatctccctcttggaaaactgatgatctagtcaccgagaagagcatggatgtcaatgacaatgctaaagctgaaaatagtttgctagaacattctgtgccaacaaatagatcacccaaagatccagatgaacatcaagttgacaaagcagcaaaagtagctcgaaggaaacttagggagaaaaggcgtgagaagagagcaatggatttggttcataaagatgatgaagcacgtattaagctggaaaatgctgccattgagcgatcaaaagctgtcgattctgctgtgcttggaaaatacagcatatggcgaaaagagaatgagaatgagaattcagactctacagttaggctgatgagggaccaaattattatggctcgtgtctattctacgcttgctaaatcaaagaacaagaacgatctatatcaaaaactgcagactcgaatcagagaaagccagcgggctgttggagaggctaatgctgatgctgacctgcatcacagcgcaccagaaaaaatcagagcaatgggtcaagttttatcaaaggctagagaagaactttatgattgtacggcaatcactcagagaataagggctatgcttcagtcagctgatgaacaggtcaggagcttgaagaagcagagtacatttcttagccagttggctgcaaagacaattccaaacagcattcactgcttgtctatgcgtttaacaattgattactatatcctgccccttgaggaacggaaattcccaaggagtgaaaatttagaaaacccaaatctctatcactatgcacttttctctgataatgttttggcagcctctgttgttgtgaactcaaccataatgaatgctaaggaaccagagaaacatgttttccatcttgtgactgacaagttaaactttggagccatgaacatgtggtttctgctgaacccacctggcaaggccaccatccatgttgagaatgtggacgaatttaagtggttgaactcatcatactgtcctgtgttgcggcaacttgagtctgctgccatgaaagagtactatttcaaagctgatcgtcccaccactctctcagcaggttcttcgaacctaaagtatcggaaccccaagtacctctctatgctgaaccacttgaggttctatctcccagaggtctatccaaagttggataagatactcttcctcgacgatgacatagttgtgcagaaagatttaacagggctgtgggatgttgatcttaatggaaaggtcaatggtgctgtggaaacctgtggggagagttttcaccgttttgacaaatatcttaatttttcaaatccacacattgctcggaactttgatccaaatgcatgtggctgggcttatgggatgaacatctttgatctgagggagtggaagaagaaagatattactgggatctaccacaaatggcaaaatatgaatgaagacagggtcctttggaagcttgggacacttccgcctggcctcttgaccttctataagttgacgcacccactggacaagtcatggcatgttcttggattaggatacaacccaagcattgaccgttcagagatagacaatgctgctgtggttcattacaatgggaacatgaagccatggctggagctagcaatgaccaagtaccgaccatattggaccaagtatatcaagtatgatcacccttacatccgtggatgcaacttgagtgagtag

SEQ ID NO: 35930 - DNA, 1011 bp, Zea mays
  Peptide Sequence Number=SeqID_79305
atggctggtctcccttcttcccaccggtgggcgcttgccggcaagtcgcagcgatcggcgggccgccaccatcggcgcgccatccccaaccacggcgcctgcctctccatgcgcgacgttcccaaccgtggcgactcccccacggcgccgcctctccactctacgcgaccaaggctgcgctcttccccacgcatgccgacaaccttgcgccccccttcttccccatgggatctccttctacggcgactggtgttcctccccccttccccacagccactggcgacctctcccccacggtcggcgccgccacccaatgccgccctcttcaaaccgaccgacgccgccgccctatcctctactccagcaagcggactgccgccacctagggctagcctcccctgccacagtcggtgccaccctgtccactgctctggcgagcgtgccatcttcctgctcccttcatgcgccaccatggttccagagcccacccgtcgccacccctgcgtcggcgcgtgcctcgctaccgccgccaacgtcaacttcacccatgcatcttccgctcgcttggtcgatggccacgtgggccgaacacgcttgggccctcaccgtcacagtcgtatccagtctgcatccccttgcaccgacgcgcatgtgcccgtctccgtcgtcaccggtgcttatctccacgcatcatccacgcctgttcccatcacaccgaccttgtctctccttgcgctcgtcgcgcctgcccctacaccaccggccttcaatgtctccacctcacttgccactgtcaaggccgacatggccgctgcccaggactacaagcgtgtggcggcccttgcttgggagcacgagcgtaacgtggctgatgctcttgccactcagctggccaagacgaagtgtcaccttttcggctcctccgtcctcaagcctcctctggcggccccagtgccacctcctcctgcggagtacgaggccacggtcatcagccacctccacgctcagtag

SEQ ID NO: 35931 - DNA, 2851 bp, Zea mays
  Peptide Sequence Number=SeqID_79306
gaaggtggggtggggaagcgaatgggatataaggggctggagctgtcgcatcaagcaaccacaacatgagtgccacaaggatgttgttgaggtacaaaggactatgaaggactgtgtcatcaacggaggagtggtgtggaacgaggcgccgttgtcggcaacccagtcggtgggaggaaggggcgacaaagatatggaaaaggatgagagagtcattgggggcacccccacagaggcacagagccaccgcaaagggccagacaccggcgcaagaaagaggggaggtgcagccacatcgtcgaaggagaccgaggtgctggcgggcgcaaggaaggaggccgcgtcggacatgagggtggggcaagggccgacgcctacaagcagggcggcggagtggaggcccgtgcccgcgctgaggggagggaaggcgacgacacccgcggtcagcgaggcggctgtacccgcggagggaagaggaagggttgcagcggcaaagccagggtggaggcggccatcggacatgggagaagaggcggtggcggccctggccggaggaggggacgaggttgcggcgctggccggacggggggcggtggtgctggctggaagaaggccgacaaggatcctgtctagcgtcggctcgctcacgaggtcgaatccggaggtggctggggacgccagctgctgcagcggcacctcctcatctttgcgtgtgctccaacagcattgcggcggcggtgtacggagcgtcggggttgggagcgccacttgggggaggaggtggcctgccaggggaggagcagcgctcggggaggaggtgaccaaccaggggaagggccactctagggaggagatggccggccaaaggaggagccgctcggggaggagaaaggtttcttctggtggccggacaataaagctacgcgcaacaagctcttctagggttaaggactgggttactgcaataaatgctgctcgacaacctccagaaggctggtgctatcctcatcgttttggctcatttgcaccaccgaggggtttgttggaagatgggagtatggtacaatggtttgtagatgggcaagctgcattcaaagctattgcatcctccattgaggaagccaaatcggagatatttattactggctggtggctctgcccagagttgtatcttcgacgcccattccaacatcatggatcatctagacttgatgctctactggaagcaagagctaagcagggtgtacagatttacattctcttgtacaaggaagttgctcttgctttgaaaattaacagcttatacagtaaacagaggctacttaacattcatgaaaatgttaaagttctgcgttaccctgatcacttctcaagtggtgtatacttgtggtcacaccatgagaagattgtgattgttgataatcaagtatgttatattggaggtcttgatctgtgctttggtcgctacgatagtcctgagcacaaagtcgctgattctcctccagagatgtggccaggaaaggactactacaatcccagggaatctgaacccaattcctgggaggacaccatgaaagatgagctggaccgtgataaatatccccgcatgccttggcatgatgttcagtgtgctctctatggcccaccttgccgtgataggaacaaagctctaaatgagcaagcaattcccttactgatgcctcattaccacatggtaattccacactacaagggtagaagcaaagaaacaaatgatgaggctgagggtaaacaatacaatgataaggatgttgatattggaaagccagtcttgacatcacgcacatcatgtcaggatgttccattgctcttacctcaagagcttgaacctcgtgaattatccagttcagatttaagggtgaatgatttagatattaaccattcagatcgtttaaacaagaagaactttaatcagcctttgctcaaccgaaaggcaaaactggattcttctcatcaggatttacctatgagaagttttgtagacaatctcagttcccttgagccatcatctgttagacgttttgattcgtcaaaagatgataggaatcacattgacaaaaaatggtgggaaatgcaggagcgaggcaaccaagttgcttcattacttgatattggacaagttggtccaagggttgttaggagtgtcggtcaatggtcagctgggaccactcaaattgaaggaagcatccacaatgcctacttttctctgattgagaaggcagaacacttcgtatacattgagaatcaatttttcatatcgggtctgtcaggagatgatacgattaaaaaccgcgtactggaagcattgtatcggcgcatacttagagctgaaagagagaaaaagcgctttaaggccatcatcatcatacctcttttacctggttttcagaatctatttgatgttattggacctaaagcacatgattacatctccttttatgggcttagagcacatggtaaactccatgatgggggtcccttggttactagtcaggataccattctaacaatgtcccatttccagatttatgtacatagcaagttaatgatagttgatgaccgcatcacattgattggctcagctaatattaatgatagaagcttgcttggatcaagagactccgagattgctgtggtcatcgaagataaagaggttgttaattcaaaaatggatggaagaccttgggaagctgggaagtcctctttaagcctacgcctctcgctgtgggtggaacaccttggccttcatccaggagagccagacgaccaactatggcctggggatagcagtccacaggtggagctcctgtag

SEQ ID NO: 35932 - DNA, 534 bp, Zea mays
  Peptide Sequence Number=SeqID_79307
atgtacagacctgcatcacatgccgctcaaaccctcgtcttcctatcctccaaacagaaaacatattactacatatgtacgtacatatacatatcgcaaacagcattacaggaaaatagaagggggcaacaacaagaatcaagatcgacaactaatccaggcgacgggggaggaggagcaaggaagagaagagatttaccggcacttacgcacagacagatctgtcaggtaggcagttacctgttgagggcgagggtggcgacgatgtggctagggcgcactccacgatcggcgaggccggtggcaaggctctgcacgctgccagcaatctccgcgctgggttttgataagggctgctgggctgaggcggtgcggggcaaggagcctgctcgtcgcgcctcgagagggcagcggcggggaccgggatctggggttgtgatgggagaagaaatcgaggagaggctagaagcggacggggcgagaaggttggtgtgggagggagaggaggaagcagactgtagaggcgttgcctag

SEQ ID NO: 35933 - DNA, 642 bp, Zea mays
  Peptide Sequence Number=SeqID_79308
atgaggtggcgtaggcggagtcggcggggtggcgcaagtaaaggtgacggggtcgcgcatggcccagacggggtcgacggggctgcgtgtggcgcagacggggtcgatggggccacgcgtcatgcaggcgaaggcgacggggtcgtgggtggcatgaaagagggcaacaaaataggaacatcgacacaatcagcatcaaggagagaatcgagatcgacaagttgggagtcagaaggggaaaacattctcatcaaagataacatgacgagagatgatgatgcgatgggtgagaagattgagacaccggtaccccttgtgatcaggggaatatacgaggaaaagacaacgggaggatcgaggggcaagtttgtgaggagcggtggcagaggtgttgcgatagcaagcgcacccgaagactcgaaggtgctcataggaggaggtggtgccgaagagggcgaaaaacggagtgggatggggcgccttggagggaagacaattgaggaggtaggtgactgtgttcagcgcctcagcccagtagcgggtgggaagagaagcctgaaaaaggaggcaacacaacatgctggtggtggtgtgaatcatacgctcgacacaaccattctgagcggaggtgtgagggcatga

SEQ ID NO: 35934 - DNA, 324 bp, Zea mays
  Peptide Sequence Number=SeqID_79309
atgacgtcaacgaagtggggcacgaagccagggcctaggctggcggcaccaaggctagaaggggccgcaacagggcgttgtgctggggtcgacatggctgacacaagcgggtggggcccaggagttgtggtcgtcgtgtgtgcccacgcggcgatggggacgaatgccgaggtgggtgcgggcacgagcgcatctgacgcaacatgcgcggaggaccgaggacgtggccagcagcttgtcgtcgtcgtcggtgggagtggccagcatagcccgcgtggaggcaattgcagccgacgcagtgactgggggcttaggcacatctag

SEQ ID NO: 35935 - DNA, 186 bp, Zea mays
  Peptide Sequence Number=SeqID_79310
atgacctcccacaactggcaactccccttctacctcatgactttggcaggactaggagggtgcatgggaggctcacatgctatgcataaacgacctccaagagggtattcggctgctttgaagctcatgcttgccaattcaagggcatctaccgccatgaaagagcctagcgaaaacctttattag

SEQ ID NO: 35936 - DNA, 1017 bp, Zea mays
  Peptide Sequence Number=SeqID_79311
atggccgccgcgtcgtccgccacctccgtccatgacttcatcgtcaaggggtgttccggccggcgggagaggcggctcacgctggtcctggggtggtctccgggactgtcaaggggcgacggaggtgagtcaggtgagtgctctgttcacgatagtgaggaggacgaggtggaggagttttggaagtccttgtctgaggacgggatctccagctcgaggaagccttcggcctctttgggtcgcttctgggtgaccagcgccgaggagggcgtggtgtcggacgctgtgtccgacgatgggctgggaaccatggggagttcggcggaaggcgggttgccggttagagagatgtcgggcgagttctctagcgtggcatccaactcaccgaacatggttagcagccagagtgtgaataagaattctgagtggcggcggaaggcgtcggtgcagaatcctcgcgatggtcagaacgccgacgatggtagaaaccaacgtgcatggcaaggacctttaccaaggccgagaagatctccgaatttttcgttcggtgtcgctcttcggaaggcacagtctgttccttttcattcacgtcgatcgtggcagggacctcgcaaggaggatagcatggggagctcgccgccgacggacagccctaggaagacgatgagtcatccgataccggtgggcccaacgcttttgggacctaggagctttgatgttgtgagggaggcgggaggtgatgagacgcttcctcgggtagtgcaacagtctggaggcccagtaattaatagtgaagcagggttccggcgagttacgaatcaaattgtgccctacaagatgccgctaggccttgtggctctctttgaaaacgctcactcgtcgcaacaacttcgtagggctctagtaaccagacacaaacacccaggtcacgcctcatacgcagcggccgccatggataggagacctcctccacaacagccgcagccggctcagggggggttcctctggagttggtag

SEQ ID NO: 35937 - DNA, 495 bp, Zea mays
  Peptide Sequence Number=SeqID_79312
atgtctctagccgctcgtagggttcaaaatcccgcaacaaggagagattcgtcaaatgatgatctggtgttccctccataccttgttaggcgctctggaaggaacaaagcacccaaacggcaacttactaggcaaatatatgatgaccatctaccgaggaagtgccaagcagtgggcaaaaagataaaggctgctactggaaaacaacagtatggacacggatgctatataacaatgaggtgctctccagctgctgtgaacaacacaacgcttataatgtcgttgtcggacatggtaaaggaaatgttaaaggatttgggttttggttcgttgctgataatgaatatagaaggccttgaggatagggtgcttggggcatacttgctttcaagtgtacaagataatcctctgcgcattaaagttggtgggcgctcaatgtcaataacagctcaagttgtccacctcgtcactggtttgccaatgggtaatcaataa

SEQ ID NO: 35938 - DNA, 306 bp, Zea mays
  Peptide Sequence Number=SeqID_79313
atggagaacaacgcgaggccgcttcaggagaaacacaacagtgatcggtcacttatatctgtcattcgcatcaggacaaagtttgatacgtattgtgaaggaatgatggaccaggtgcagctcgtagaggacggtgatcaccgtggccttgttctcggcgctctcgtgcacaggtgcagctccatgtcgtaccggctgcctcaggagctcggcgctaggatcatggcgctaagctcggccacgttagcactaacgtcggcgtcgtgtcagtcttcatcgccaacggagcacatatctcagcgttaa

SEQ ID NO: 35939 - DNA, 324 bp, Zea mays
  Peptide Sequence Number=SeqID_79314
atggcggcagcgcaccgtaggaccggtggcaacgtcggttgtcccgtccgtctctgcgatggccaccaccgctccagcgtctgtggcgtcgtcccctgcgcccaaggccaacgacagcaggaaggcggtggtgctcgtggacgcgtcggagctggagaacaggtgctggaggtggacgacaactccgtggaccgcgcagtgatcaccaggatcctgcgcggctctaggatcagggtgaccgccgtggagttggcgacgcgcgcgctggagttgctcgcgctgggcctgctccccgacgtcagcatgatcatcaaagactactag

SEQ ID NO: 35940 - DNA, 264 bp, Zea mays
  Peptide Sequence Number=SeqID_79315
atgcgcacgctccaggcagatctggccacattcacatccgaccctgaggatgtcgactctgcatcgtcgctgaggacagtgccaggggttctcctctacttaacctctcacagagagaagctgaaggagaagggccgcatgcggcacgccaggagacgggcagctgaaggacaaaggtcccgcatgcagctgacgaagagacaggcaactgaaaggtttaacccggagttgaaactccagcggttagtgggtgctaaaaattaa

SEQ ID NO: 35941 - DNA, 831 bp, Zea mays
  Peptide Sequence Number=SeqID_79316
atgcgatggggatccgcactgtttccccatgtcctgctgaagaatgttatcgtggagatgcagttcagtagggaggatgggctgctgcctgttgatggttatgaaccctgggcctcagctttttctcaaaggaattcagaatttggcccttcgtttgagcaaaataaatgtgaggtcatgatgatggtcggtcttccggccactggcaagtcaacatgggcagagaaatgggtcaaggagcatcaggagaaacgttatatccttctcggaactaaccttgtattggagcaaatgaaggtgccaggattattgcgtaagaataactatggtgagcgttttgaacgactgatggattgtgctacatggattttcaacaaactgctgactagggctgcaaatacccctcgcaacttcattatcgatcaaacgaatgtttacaagaatgctcgcattcgcaagttgaggccatttgctaactaccgcaagactgatgtggtcatgttcccaactccaagtgaactgaaatccagggcagcgaagcgtttcaatgagatgggaaaggaaataccagctgaagcagttaacgaaatgacagccaattttgtcctaccactctcgaaggatatgcctcattcgaaggagccttttgatgaggtaatcttcacagagctttctagggatgaggctcagagaaccctagatgatatgcagcgtgtgttgccaagaaatgtgaccccaagctatggaaactctggcaaccaaaaacattttgagctcctgaagtttgagctcctgaaaaactcttggaacgacaagatgtctacgtcataa

SEQ ID NO: 35942 - DNA, 141 bp, Zea mays
  Peptide Sequence Number=SeqID_79317
atgactgacgatgagggggctctggagctcgctctcgcctaccggccggcagcgtgcagagagaggccgccgcctctaagggatctggccaaccgggtgtacgcgaccgacgaggcgaggagctacctacgccatctctaa

SEQ ID NO: 35943 - DNA, 318 bp, Zea mays
  Peptide Sequence Number=SeqID_79318
atgggactggccgactgggtcgtgggcttgatgaagatggggaagctggagtccagctcttgctccagatcctccgccttagagatggcagaggtggtggagctgcagctcctccagcttccgtttgttcgcctccacctgctgctcctcagctcgtacggcgtcgcttgcgccatctctcttctatctcccgtctcccttctgttccccacttcgatttctctgtgggtggttttcgaaggcgaacggaatggaggagcagaggaggagaggagaggagaggaggaggaggaggaggaggcggcggcggcgaaataa

SEQ ID NO: 35944 - DNA, 186 bp, Zea mays
  Peptide Sequence Number=SeqID_79319
atggggaagcctgtcccatcactcctcatgctcctcctcagccgagtgaccgcacttgtacccaccataaccggaatgggagaccacgtctcaggtcgtgtgaggggcaaaatctgcgggcaggttcactcaggtactaggcttaccgatttaccatatttctcggatttaataacattatgttaa

SEQ ID NO: 35945 - DNA, 495 bp, Zea mays
  Peptide Sequence Number=SeqID_79320
atgcagcccggccgcatccccttgccggcggtcacccaagacggtgaccgccagccctgggtggggagaagcaagccgagctgcgatcttggtcccgccctcagcttcaagctcagctggggcggaggccgagctgagccggagctctacctcccgcgcgggttcgtggatcaacctctccttcagcattcaagggagagggcgctcactggccctgcgagaggggcggacttcgacaacgcggggctggtcgacggcgggcgtcgtcagctccagcgcgttgggctcgccggcttggctcccggtgccccctcccgccggaagggcggttgtcgcgccacgtgcacgggaggaccgcccaagacgtcgcgcgctgctagggcggcgttcgtgttctggggctgtcctgcctttgctccggtagggcgcctccacgcgaaggtcggtgctccgctcgtctgggaggatccgagtggggatctgccggtgggctga

SEQ ID NO: 35946 - DNA, 183 bp, Zea mays
  Peptide Sequence Number=SeqID_79321
atgcaggcggcatgcaaccgcgtcaagtgggcgcacccctccgacttccaacgcacccagcatggaggcccaggcccacatgtcatgcaaccggcgcgtcggttgctacggaccgggaaagggggatacctcgaaaagggatccttccccgtgaaggaaacaggccccgagcctccctactga

SEQ ID NO: 35947 - DNA, 261 bp, Zea mays
  Peptide Sequence Number=SeqID_79322
atgacgcggcggcgccagcctgcaggtggtctttttattctctatggggcttctaggatacatcttctccagaagcaccataagtcttgtcttgggcattacaccagggctagccactctgctacttggcactctcagtctgaagttctggaggagcggcagatccagcttcctgcttatcttggctcaggcagaaatgcactcaagaaaaggcttttcaaaactcttagaatgtattccaagagcagtgcacatatttag

SEQ ID NO: 35948 - DNA, 513 bp, Zea mays
  Peptide Sequence Number=SeqID_79323
atgcatcctgtcgtgccgccggtggcatggcttggctttcgtcagcccacgaggtgcaggcggaccttcttggcggtggcggccctgggcggcgacctgcgcggcacgaacaccgcggagaggtcgtgcggcacggggaagaaggcgcgggcgcagcagcagcgcttcctcttgttgtcgggcggcggcgcggccggcctcgccggcttccgcggcgccggagggcacaccgtggccggccgcagcaggcaaggtgacgccgccggcgtgacgcaggcggcggcggcggcgtcggtactgtccagggcgccgcagccgccgtccaggcgcggcatcggcatcagccgggagctcgaggccgttggcgtgacgcagcccgtgtcggcggcgtccgggccgtcttcggcgtcgtcgcccggcggccgagccgctgccgctgtctggatcggccggagcacggccaattcggagaggtcgtcgagttggacgccgcccatcggacgaatagtctag

SEQ ID NO: 35949 - DNA, 117 bp, Zea mays
  Peptide Sequence Number=SeqID_79324
atggcgtcattcatccatatccgtcctcatccacctgcccgcccgtcgcggccccatggtaacaaggattcactgtgggctctgctctccgaccccatgggagcaaataatacataa

SEQ ID NO: 35950 - DNA, 285 bp, Zea mays
  Peptide Sequence Number=SeqID_79325
atggcgaggctgaaagggaaatgtgcccttgggccatttctaagtattttggtaattgagtgccaacgcaagtgcttttgtgctgatctatgcaatgtggcagacaaagtgcaaattatgtcaaaaggagaaaacaaactggagagagatagctttgtttccggtggtgcaccggactgtccgtgtaagggcgagaggctccaagttgtggagattcctcgcgaacgggataagaaaagaaaagcaaaacaccatggtattcaagatgatcattggatcacttga

SEQ ID NO: 35951 - DNA, 2832 bp, Zea mays
  Peptide Sequence Number=SeqID_79326
atgctggacgaggccgcacggtgggatgacctcatcgcaggtcttcgtctgatgttagttgctcgtgtcccggggacagaggaagtccccgcgccggaaggcgagttggttgtgttcgaggcgttcttcaccgccgcccgcaacaagtggggcaattggcatgagttttggttctacgtcgcggagggtaccgtcgaagaccatccggggctccccgtgtccgagatgtgctcgcatttttactcagcatacccgccttttgaagtggcggaggaggatgcggacgaaggggcccttcggtgcggcaccggtctgagcagtgggcgtgatttggttgaggaatttgtggcgtacggggtatggcctttggcgcatggctgggcgttgggcgaagtgtgccctcgccagatgccttcccatggtgggaagctggtgcgaagtcctgtcttcgcgctggatctgcaaagccgcgatccggccgcctttgtgcgtgaggcggaggatggggcggtgcggatcgttggtcgggtttttgaattgaatcgactaccgtatggcggttatcccggccaagacgatgtggatcgtcgcgggaagaagccggtggtagagtctggagacgaccccgcgccggtggccgccccgtcctctaagaagaggaaactaggtactgcgatgggaggacttggggtttccgatggttttgctagagaattgatgaggacatgcgcggccccgaggggaaggatgacttcgcccgagctccgagagtcttcggcgcggatgctgagggttaccgggggttggtggcctaggaatgttcctatccctcgcgcggccggcgaagacttttttacatctcacatggttcatgaatggaaagtgtttccttacgggcggaatattgctgctgttgtgtcggcagtgatggacaaggatcgccagggagctgcacagaagcgccaggcggtcgtcaggcttcatgaagccaggtcgaagaggcagtggggggctacgaaggctgctgcccccggtggaggccagccaccgctggcggcaaagtcggccgtccctgcatccagcagggcgtcggaggctgcggctgccgccggtggttccaagtctgcgaaggctgcactggcgtccagcagggtgccggaggccacgaaggcggcccgagggttgccgccgccgggcaagcgcgtcgccgacttcgccaccgacattagtgtggaagactatcttgttgtgccggcggcgaagggcggtgctgtgtcccgccggctgaaggagatgaaggaggcgctaagtcaggcggctgacttcgcagcccgcgcggcgtcgggggccctcacgacggttgtgtctgccgaagtcgagagacttcggacgcaatatgctgacgccatccgggagaagtcggccgccgacagtaagtgccgcaagctggcggacaaggtggccgcgctggagggggaaaagactgacctccggcgccaactggcggaggagaggagggaggccaatgaggccctcgccaaggcgcaggcggaggccaatttggcgcgggtggagggcagtcttgccagggagcgcgccgagcagttggaggggcggctcagcgccctgcagagccgtgtggagagggccgaagccgcgacgcgcacggaggctgagcggacacgcaaacagcttatggattcgtaccatgagctgggcgcgcggaccgctgacttcgaagtgccggaccgagagcccggacttcgctgcctggagtgggtacaggaggagctgcaggcgctccccaccatcgtggaggggttcatgtcttatgcctccctggtcacctgcgagggggcgatgaacgtgctttctcgcgaagggtgccgacactatgaagtcttcgaccaagctgatgaggatttcgagcgtgatatctacaaggtcgaggaccctatagtgaaggaatccgccggagccctttacgaccggatgtggggcccccacggtcgagaggtggtcagggaacgggccgagacggcgaggggtcaggcggcgcgtggtgagagggtggatgactttggggctttgaacagcacgctgcctgacccggagtcgaacccggcggaggccgccctggagccgctcccggagaccgccgaaggcgcccctgatgcccccgcagccgctgcggccggcggaggcccgcccccggagaccgccgaaggcgttcctgatgcccctgcagccgctgcggccggcgaaggcccgccgccaactgctgcgccgagggttgaggatcctgtgacggtggcggcggaggcgacagcggaggctcccgcgacggctgggtcttcgcaggttcaagattttgggcctgcgcacgcaaccgccactactaattttttggcggcttcgaccgtggatgatggtaataaatcggatgggtctgcgtctaagttttctgattttggtgactctgggagctcggttgagtggactgatgagtcgtcggatgaggacttggactattttgcggccttggatgtggcagcggcggaggcttcaccgcgtgctgcggatgcagaagatgtgcctggtccgagtactgggcgtaagcggcgaagggcgattgcgaagcgtagagtgagtggggcggacggcggtcgacttcgtgtgagcagggctggccgacaggaactgttgtccttgccggccgccgtgagtacaggtgagggggagttgcgaagtatttttgcgggtgaggagcttaggataatgttatttaactatagggagatgggaattattccgaaggctgagccgatgtag

SEQ ID NO: 35952 - DNA, 162 bp, Zea mays
  Peptide Sequence Number=SeqID_79327
atggggctcggtgtatgcggctcgctctgccaaggtggttatgagatcgatggttctggttatgactatggtgctggttgtcagcattgcaaccactactcaggagaagatgaagctgtggaaggagacttccaggagttccaagactacgacgagttctag

SEQ ID NO: 35953 - DNA, 99 bp, Zea mays
  Peptide Sequence Number=SeqID_79328
atggggttttcacataatacacttaatacgaagcaacctgctaaggtttctaagtcagtgtggaggccctctaggcgaggtaaggttgctaggtactaa

SEQ ID NO: 35954 - DNA, 267 bp, Zea mays
  Peptide Sequence Number=SeqID_79329
atggggaagcctgtcccatcactcctcatgctcctcctcagccgagtcatacatggtatcaaacatttagcaatcaacaacttttgccaagtcatcacatttccacttgttactcaatgtagcagcatggatcaagcagtctcattagctgcgagaagcagacgattcgaatcgagtttcaaccttgcaaggtttgaggtttttcttagaggcaaccatagtggattaaggcttgaattgcccttaaaggttctagtagattcatag

SEQ ID NO: 35955 - DNA, 1314 bp, Zea mays
  Peptide Sequence Number=SeqID_79330
atggtgagggccttgcggctcgatggccgcgcgaccgccgcagcgaggtggtgcacctgccggcgcgccgccgtcgccctctgcgtggccaacctcatcgccgcgctgctcgtggcccgcgcgctctacgctctcggctccttcgcatttgcacccaaacgtgaagaagctacaaaggcattcgcgagggaagagaagacacaaaaagggctgccactggagctgaaccagaaagtttcacttgagattctgcagagactgcacgatttgggggaaggttctaataccatggaacaacaagaagctatagaagcatggcgtgttgggaagcttaaggacatgggaagtacatcttctaagaatttatcaaattttggcctctccagtgaagattcaaatgaagagataataccaggtccacctttgccccctgaactgcatactgaactgcatactgattatggtggcactgcagttagatggggcttaacacatcacaaagaaagtgtcgcagattgctgtcaagcctgtatagatcaggctaagagggccagaccaggagccttaaagtgtaatatttgggtttactgtcggtctgagtacggatgctactcgccagacaaatatgaaaacaaacatcaagaatgctggttgaagcagcttatgatgtatatcagtcgaatttcatattttcttcggctgattgcacccgccaagcttgaagggctacttctgtctcatccagaaattctggatgctgttgttatcccaaatctgttttttgctgtaccttatgggaatatgtgcttgttcctaaggttactaggtgctgaagctggtgaagttcctattgcctacgtcgtaagtaaattccactttttggtgttacctgatttttggaagttttcatcgtgtaccttaggtgtacaagagaagggatgtttcagcaacattggtctcctgaaaaatcgtccgccgtctatagggaaacactcatgtaggttgtatcgatgggaatcaaaggaaggagagggaccacagaggttggctttggagccggaccaggatgctttagcagagttgaaagatgttggtttcaagttggtcgtatccttcagcggagaagcttcaatacttgcttttggtggtaaagatggacatttaagagttttcaactggcctaccatggggtctgttctcatagaaatcgatactaaaacatcgattaaggatcttactatcagattctctaacaaggctgacaacagtcatgtcttatttataactgtgatggaaggtgacattaaggtttaa

SEQ ID NO: 35956 - DNA, 543 bp, Zea mays
  Peptide Sequence Number=SeqID_79331
atgtggtatggggggaagaaggggaggggcagcgatcacgaatcgggatggggctggggcgctcatagacctacgcagggccgatggacgcgaggttcacgaaggcaggggcgtacaggcgaggctggcacggagggattggggacggggtgcgtgcatggggaaatgagtgggaggcagggcgtcaaggcgagaatggaggggcgcgggggcgagaatgacggcgcaaaggatgttggggaggatggggcgcgagcatccttgggctggcatctcgacggggatgacgggagcgggggcatggagttggggcggccatgggagatggctggaacagggaagtggaggttgggcaagaagaagtgcaggaacaagctcgaccaccaaggggaagcggccggtgcccagagcgccatgggatatggctggaaatggccgtgggagggagctagggactacgcgagcaccatggaaggggagttgcaggggaggagaggagaggcggaggtaccggctggacgcaagggaatggtgggcgggtag

SEQ ID NO: 35957 - DNA, 378 bp, Zea mays
  Peptide Sequence Number=SeqID_79332
atggctggaacagggaagtggaggttggacgagaagaagtgcaggaacaagctcgtccacagggggaagcggctggtgcccagagcgccatgggagatggctagaaacggccatgggagggagctggggactgcgagcaccatggacggggaggtgcaggggaggagaggagaggcggaggtaccggttggacacaagggaatggtgggcgggcagggagcagcatcagccaacattggtgcaggggcagcaaacggcacccacgacgagcaccggagggatcagagcaggaagggtgtccatggtggagctggaaggagtaccaaaagcgccgacagcttggtgccggataataagaaaccaagccccagaggctag

SEQ ID NO: 35958 - DNA, 288 bp, Zea mays
  Peptide Sequence Number=SeqID_79333
atggagaggactggactagtctgccgtggtgagcagccgagaggatacggtaggaggggaattttggtcatcttgggcgggagatgggaaagtgaatgcgatcaacagaaaggggtacggagagtcataggcagaatacgggacaagagtattttgggagttttctggaaaatgaaccatgctcaagggatgacatggttggatagggaaaaatttgataggaatatagaaacaagaattattggaatccgagtttggaagcctggttcgaaggaatctcaaagttaa

SEQ ID NO: 35959 - DNA, 135 bp, Zea mays
  Peptide Sequence Number=SeqID_79334
atggcgccattaatggacatcaatggtggcctctgtaatggggaggtaatggggaggaagaaagggaaacggccgccggttcgagtgctccaattacgcccgagccgaggagtcacggtcattgaagcaggttga

SEQ ID NO: 35960 - DNA, 684 bp, Zea mays
  Peptide Sequence Number=SeqID_79335
atgcaccctgcaccaccacggggcatcccggctgctggaggataccctgacagagacggagacgacgacgacgccagtggcagttcgagccatagcatggagctcttagaggagcaggagccggagggatggatcgctagacccatcactcgcaacgcgctcatgggtgtcacttccacaatgctctcgacaccttgctgcgtcaggccttcgaccgacccacttggtccattgagtaccattgccttctcagagcactattctatcactgagagggatactgtcgaggcagccatgcaagatgctgcacggcgtgcgctttcacagtactcctcgctgttcagcggggtagctgacggcctcgaccttaagtactaccctcgctgttcgaccggcagtgctggaggtgtgattgtctcgcccgttggtgagggcaatcccaggctgaatagcatggtcaacctagttgccgtgctcaacaccaagttggaccacgcccttgacgagttgggcaaggttcaggcagaggttgtggaattgcatgctgagcgcgcagcgtgccactctcaagatggtggttcccccgattctatcgggattcagcacccttaccactcgccacgccgtggtcactttgcttatggcaccccttactgcgggacccatatagatttggagccataa

SEQ ID NO: 35961 - DNA, 771 bp, Zea mays
  Peptide Sequence Number=SeqID_79336
atggcgtcgtcatctccgccgcagcacgccggggcgggctcgtccgcggacctcgcgcgattcaagagcagcggcgttagatcgatgaacatggacgacatcatccgtaacatctacgaccccgaggccgtcaacgctgccgccgccgaaagcgccggcgtcggcccggcggagccctccctggcagccccggaggctgcggctcggcggacgtcggaggaggtgtggaaggagatctccgtcgctggagggctccccacgcccgtcctccctatccctcccgccgccagctccggcggcagcggcgccgtggagatgacgctagaggatttccttgccagggattcctgcggtagggcggcggtgatggaggggaacatggcgctggggttccctgacggtgacagagatgcggcagggagagtggcggggggagtgggcggcgtgaggggaggcgggaagcgggcgcttctggaccacgcggactgcgccgtgatgcagcggcagaagcgcatgaagaagaaccaagagtccgcagcgaggtccagggacaagaaacaggaggaatccatgattagcatcgctgatgctttgtgtcagtctccaaacacggaggtttatgtttcgctttcatgtccaatggttctgtctttttttgatccattcatgtccgattcattagacaagttttgtttagtagggatgaccaagcgatgcacaggagctatgaacaacgatgactaccgacctgcagcacatacgagcccatga

SEQ ID NO: 35962 - DNA, 1119 bp, Zea mays
  Peptide Sequence Number=SeqID_79337
atggcggcgcaaggggcaggaagggcggtttcctcttctctagctaagtctctcgggttgcgaaaacctaagagggaggcaggaagcggagcaaagaaccgtaaccataccctctttcgggtatataatgaccaaggcgaggccggttccaacgttccgcccggatcggacgcgggattcaaaaacgcgaagcgaaacagccgttcctcgaacggctcgcgcacgcgcaacggccgccccgccaaccactcgccccgtcgcattaactccgcggcgggacaggcggcgcttctggcaggagaagcgggcgacgcttcgccttcgccggaccgggaaagggataccccgaaaaggatccttccccgtgaaggaaccaggctccgagcctccctactgatcagaggttcgaaggctagccccccgaagggttcgacagccgcctcaaatcgcgtgggccctacacccactactggtcagagccgcctcagacgccgagcgagggatgaccatgggtatgttcgatacataaccaaggctcaggctgcgctcccgaggctcgggggctgctctcgcaaacccggcttcggccaaaccgttgacagcgtcaacataccagcccgagaacttgggacccgaccgtacacccgggctacggccagctcgcatgagggaacaaccagaccagccgaagcattacgcgaggcattaagacctcgaaggagtgaaaccactcctccgaggcctcgggggctacacccggcgggtgcgctcgcgcgcactcaccggaacaaaatgcaaccgaggaaggctggtccccttgcaaaaacgtgcgacggaagcctccaagcgagtgctaacactcccttcgaggctcgggggctactatcggggaccataattaggggtaccctcaagactcctaattctcagctgggctcggactcgggctatgtcccagaagacggcgaactctgctccgcccgacccagggctcggactcgggctaagtcccggaagacggcgaacttcgctccgcccgacccagggctcggactcgggctaagtcccggaagacggcgaactccgctccgcccgacccagggctcagactcgggctaa

SEQ ID NO: 35963 - DNA, 366 bp, Zea mays
  Peptide Sequence Number=SeqID_79338
gttgttgggctttttgatatgggtgatggaagtagtgagcctgctgctgaggacaacaatcaaatgcatcaggtccatcataggttttattctgcatatgataatacaactctgctatatgagatcctgaagtctattaaatgggcaagaaaaacatatggaaatctacctgtaaatgttgtgggacactccattggaggggatctagcttcattttgtgtgcttggtctatttgtcatggaattaccactagtcgcgcagagcagcggaagacgtctcgatgtagacgaacgcgtcgagcagtgccgtgcagtcgccggcgtccttcacgtcctcgcacggttcgtccaagtgctccagatgtag

SEQ ID NO: 35964 - DNA, 876 bp, Zea mays
  Peptide Sequence Number=SeqID_79339
atggcgcactcccccccctcctccttgcggaaaggcgacgtaggggcgtatgtaaaaaagtcgagtctgtccctgatcgtcctctcgccctgtgcagaggctcgggggctgctctcgcaaaaaccggctccggccaaaccgttgacagcgtcaacataccagcccgagagcttgggccccgaccgtgcacccgggctacgaccagttcgcatgagggaacgaccagaccagccgaagcgttacgcgagagtgagtctgacaggcagtcaggccttgccaaaggcgccacggcgaactccgctccgcccgaccccagggctcggactcgggctaagacccggaagacggcgaactccgctccgcccgaccccagggctcggactcgggctaagacccggaagacggcgaactccgctccgcccgaccccagggctcggactcgggctaagacccggaagacgacgaaactctgcctcgcccgaccccagggctcggactcgggctaagacccggaagacaacgaaactccgcctcgcccgaccccagggctcggactccgccttggcctcggccgaacgacttccgcctcgcccgaccccatggctcgggctcgggctcggcctcggcaatagaggacagactcaacctcggcttcggaggagcccccacgtcaccctgcctagggcacagacccgccacgtcaacaggaagcgccatcatcatcctaccccgaatcgactcgggtcacgaagaacaagaccggcgtcccatccggccagctccgccggaggggcaatgatggcgccccacaagctctgtgacgacggcggcccccagctctcttacggaagcaggacgacgtcagcagggacttga

SEQ ID NO: 35965 - DNA, 171 bp, Zea mays
  Peptide Sequence Number=SeqID_79340
atggcggtacttatcggcgaagaactcgatgacgaatgtggtgcagaccagcgacagatggtgtcgacgcagcatgcaggtgcagcgcaaatcgacgggtgtgccgacgcagctcacagctcctatgatcccttggctgctgatgttcataatcccactcatattgaataa

SEQ ID NO: 35966 - DNA, 1674 bp, Zea mays
  Peptide Sequence Number=SeqID_79341
atggcgatcttggcttggaagcagctttgtattattttgttatatgggcacttgtatgattgggttcttgttaagttttatgaagtggccagtcatggtcgctgttatggtgtttcacctattgtgactgctagagttcctgtactgaaggttattgataagggaactggtgtagagtgtgatatttcagtagaaaacaaagacggcatgtcaagatcagccatatttaaatttatttcatcaattgataaaagattccggatactttgttatctgattgagatgctaagtaacatgaatctcctcatacatgatctgacaactcttagtgttattctacagatgaagttctgggctaagactcggtgtcctccaatattacctgcattttctgccgtattgaaagatggtacagattttgcaagtattgagaagaatgtatcactattccagggttttgggcacagcaataaagagtctattgctgaactttttgtatcactaatgagtaaactagtgtcagtggagggtttatgggagcaagggctctgtgctagcaattttgaagggacatggatatcgaagacctgggcgaagggtgttggcaacttgaatgttgaggacttcttggaccgatctcagaattttgccagatcggtaggggtgaaggagatgcagaaaatatgtgaatgcctaagggctagcgtttctgatttgagcaagttttctaagggtgaaattgctgcgcccaagctaaaggccctgttgtttaagcctttgaaccaggttaacccagtcattaaaccccatcagaaaactattaagaggaagcgtactaatccaaataagaccagaactaaccctattcagaaaaatgctaagaaaaagaaggcccttgagcaggataaattagccatttctcctggtcagaaagatggtaagaagacccttgatcaagagaagtcagttagttctcccattcagaaaggtgctaagaagaccaaaccccttaaccaggataagttagtcatttctcccggccaggaagatgacaagaagccccttgtgcaggatgagccaatagtagtgtctcccatccagaagaataacaataagtatgttgatcaggagaagtcccttcagcaggagaagcaaatcatctctcccggacagaaagatgataagaagagcagcaaggtgggacctgactcagcatgtaatcatgtgcaacagaagaaagtgaaggctactgtatctaccggccgtgctgctaatactcatgtttctagttccaggcctcgctctgtttttatcccccaagcacattggcccagccagccaattgttgatcggtttgcgcatatacctgagcacctgatcagcccttctgcttttagttatgggttgccacaaccacttatgcatccagcctatcctcatcctcattctcatcagggattggtaggtcaaggacagggtaatttccttcatttcaatcctggtattgagctgcagcatcaaggccaggctttcttcggtcctccagctgtctaccaccccatggtgaatgggtttcacccattcggtatcaatggtgctcagcaagtgcagtacatcgacaataggatggtgcagaggccaccatatggttttggcccaggtttctggggatga

SEQ ID NO: 35967 - DNA, 420 bp, Zea mays
  Peptide Sequence Number=SeqID_79342
atgcacctacgtgtaggtaagaagcaaaatgaggactcgttctggaaaagatcatggtgttggtgcttcccagaggaatgtcaatgcgccaatccatctccgacatcaactttggatgatgttgtggctcagcttgcgaattatggtcgtcgtgattttgttgttgcaatactttataaagggtttctcatcacgcaaccaccagtgttctccaaagcagaagacccgttggaggcaaaagattggcttcgtaccattgagcagaagttgggacttattcgttgtgatgatgttcagaaaattcactcacctcagtcacgtgaaaaacaggccatcgttcctttcattcaacatgagcgggatgtcccagacattcattctaaagatatctcagacaccaccctcattgcgccgcggtga

SEQ ID NO: 35968 - DNA, 315 bp, Zea mays
  Peptide Sequence Number=SeqID_79343
atggcggaagcagacgggagagaagagaaggatgcagtaaagaacaacgaagagatgtcgggggctacacccattgggtgcacctccggtgcaccccatggattatcattccaagccgagatagtgccgacttctaaggcgtgggacaagattaaaagaccaaccctcaaccaagatgcaggagcacaaatggagataatttctggggaagaccttcgagtagattattttctaaaatctactcaaagctcgggggctacacccattgggtgcacctccggtgcacccaatgaagttcagaatcctacaaattga

SEQ ID NO: 35969 - DNA, 942 bp, Zea mays
  Peptide Sequence Number=SeqID_79344
atggctaaaggtggacggaaggtacaacctgaaaatgatattgttgatgattgtgatagtgatagtgatgacgagtatgcttctcctaccaatgatgaattagctgacttacttaaagaatatactcaaatcattagaaagtcaaaagctaaatgtgacaagttaaaggatgaaaatgagttcttaactaccaagtatgacataactgttaaaactagtgaagaaatgaaggaagaaaataaaactatgtcatccaccaaaaatgagctcaaaacctcccttaaagatgccaaagataaatgtgaaaaattaagtgaagcaaatagggagctaaaagatagacttgtcaaacttttatcttgtaatacacatgaggctattaaccccgttgttaagcttgatgtagcaacctcatgtgatgatttgagccaagttgatcaatctagtcttcatgatgaattgattgaaaaggttgaagtcatgacactagagaaccagaaactgaagaagtacttgacagatgcaaccactagaggaaaagttgccatagaaagcaatgatattaataatgagttggcagtggacaatggaaggcttagagatgaagtcaagaaactaaagattcagaaagaacatcttgccacaagtgtacaaaagttcaacaaaggccaataccttcaaaatgagttactcatgaacactgttatgaaaaataataagagtggtgttgaatacaattcttttgtgcaaaagaaagcaacaagtcaatacaaggcaaaacagactcctaagccaatcaagtgttttgagtgtggaaaagaaggacattttgcccaaaactgcaaagccaaaccaccaactcccttgccaaagcactcaaaaccatttgctttcaatgctcattatgtactaagaaaagtagcaaatggaaagtcaaagtaa

SEQ ID NO: 35970 - DNA, 501 bp, Zea mays
  Peptide Sequence Number=SeqID_79345
atgggcgcaccagacagtccggaaggcaggaagatccaaaagtcggtgtgctcacagggcaatctgagcagacaacgatgccctgaagaaggactcctgggtcctggtgctaaagagtggcgtagctgctgggtccctctgagctggcaaccaagaatccacgggtacatgtttgaactgacgtacccggacagctgtggctcgctgaagatcaagcaggcaaggatcaacagcaagcggtctcacctcggtctcgtcacgctctcagaattgaggtggaggaataggtggagtggaagcgggagtgggagcagtggaagcaagagtagtggcggtggtggaaacaacgagagtggtggacgactcgagagcggcaggagttggcgaagtgggaggtggagtggagactgggtcagatggagtggagcgagcagtggaggagcgagtctgagacgtgaggcgacaaactcgataagcgatctgatcaaaggaaatctgtaa

SEQ ID NO: 35971 - DNA, 474 bp, Zea mays
  Peptide Sequence Number=SeqID_79346
atggccctcgcctcagttgtcgccacctcattcgccatactacttcttttctctctcccctcatgcctccgcctccgcaccaccccattctcggtagagggcgtgggagcaggcgcctcctccccgtattcgttcgacactagccctgacaccgacccacgtagtggctattgcacgtccatgaggaagtttcacagcatgcgtgcaccatcgttttcatcgtcgtcagacgccccgtttgtcttctcggtcttcaccctattcttcctccccaacctactgcctccgtcaacgacacgttcgatggctcagcgtcgcctatatacatggcctttcccttaccacggtgtcgactcggatttggagacctatgcaggcactaccacaaggtgctcatcccttgtgttcttagctcttgcatacaataggtcgtttcagagatcacattggcgcaatggactacaaggtgtttga

SEQ ID NO: 35972 - DNA, 87 bp, Zea mays
  Peptide Sequence Number=SeqID_79347
atggcgagctcttccgaccccgacaagctcatgagcaaagccgacaaactggaattcctagatctagtcttggcgtcttgctgttag

SEQ ID NO: 35973 - DNA, 534 bp, Zea mays
  Peptide Sequence Number=SeqID_79348
atgggtgcgattaagtcaaggctcggccccctcaagcaacggacacaccttcggctcgctcgaggcccagccttcgccaagaagcaaccttggccaaatcgccacaccgaccgaccagtgaggctgacagcagccaagtctggcctcgggcgccataggaagctctgcctcgcccgaccccagggctcggactcggcctcggccccggaagatgacgaactccgcctcgcccgaccccagggctcggactcgggcttggccccggaagacgacgaactccgcctcgcccgaccccagggctcggactcggcctcggccccggaagacgacgaactccgcctcgcccgacctcagggctcggactcggccttggcctcagccgacggtctccgccttgcccgacccaagggctcggactcgacctcgacctcggaagacagactcgacctcgacctcggaggagcctccgcctcgcccgacccagggctcggaccgaccacgtcacaggaggggccatcattaccctacccctag

SEQ ID NO: 35974 - DNA, 414 bp, Zea mays
  Peptide Sequence Number=SeqID_79349
atggcccaaggcacatttccctttcaccgagcccaaggtcgggcgaggcggagactcctcctgaggccgaggccggggtcgggcgaggacgtaattcctcccgaggtcgaggttgaggccgagccccggggtcaggcgaggcggagaccaccttctgaggtcgaggttgacgccgagccctggggtcgggcgaggcggagacctcctcctgaggctgaggcccagggtcgggcgaggcggagcttcctgttgcgcctgaggctagacttagctgttgtcagcctcaccctgtcgggtggcacagcagtcagagaggggcgagtggcgttgttttcctgtcaggtcagtcagtggaagggcgaagtgactgcggtcacttcgaccttgccgactgaggcgcgtgtgtcaggataa

SEQ ID NO: 35975 - DNA, 231 bp, Zea mays
  Peptide Sequence Number=SeqID_79350
atgtccgtctcgcccgagcccataccaggcgagaaggacgaagcttgtggcaagcctcccaaaggccaccgggagatagctgcattcaatgcgagtacctaccctgcgcagggttgcaggagtggcgagaagaagaagaaaatgaagaaggtggtctactacgagaccgactcttcatcgccctctacatccggatccgacgccgcgtctctgacggaacctcccaagtaa

SEQ ID NO: 35976 - DNA, 402 bp, Zea mays
  Peptide Sequence Number=SeqID_79351
atgagtctcggtgtagtgtctctgtctaagtcgattaaggaccgtgtcgatgtaggcttgatgaccgaggaccctttaactggtcacatgcttcgtcatgggatccactttagtaagcatttctgcaaaacagagtctttgattattgagaagccttaccttgactcccttaaccagcatacccttgagagtcttttctttagtcgggtgaggaagcgacaaacttttgttgcttctgttctaaggtggtaccaaaggaagaacgcaaggaatgaagtgcgggaggaaaggatcctccatttagaacttttatgtaagaacttatcgggaggagtttttgcctcccttggtgaaacgctcttgggaaaggtgagaaaagcagataccgaacttgttaagtga

SEQ ID NO: 35977 - DNA, 690 bp, Zea mays
  Peptide Sequence Number=SeqID_79352
atggccccccctgtgacgtggtcggtccgagccctaggtcgggcgaggcggaggctcctccgaggtcgaggtcgagtctgtcttccgaggtcgaggtcgagtctgagccccaggtcgggcgaggcggagttcgtcgtcttctggggccgaggccgagtccgagccctggggtcgggcgaggcggagtccgtcgtcttccggagccgaggccgagtccgagccctggggtcaggtgaggcggagttcgtcgtcttccggagccgaggccgagtccgagccctgggtcgggcgaggcggagtttgtcgtccgaggccgagacgggggccgagccctggggtcgggcgaggcggagcttcctatggcgcccgaagccggacttggctgctgtcagcctcactctatcgagcggcacagcagtcggagcgacgcaggcggcgctgtcctcttgtcaggccggggcgcgcatcaggataaggtgtcaggccatctttgcattaaatgcttctgcgatacggtcggttggtgtggcgacctggccaaggttgcttcttggcgaagactgggcctcgggcgagccgaagctttgtgctgatgggggttaccagctgagattaggagtcttgggggtacccctaattatggtcctcgacacttttcaaagtcttttgcaaatagtcaaaggtatatga

SEQ ID NO: 35978 - DNA, 999 bp, Zea mays
  Peptide Sequence Number=SeqID_79353
atgtcggggaaggcgaactattgctgcccagctaggatgcaacattccatcctctgtcctcgctttcgcggcaagggcggaagtgaggacctgctggtgcgctttggagcggcctgcgctcgctggtgcggcgttggtggacaggcggacgctgccgttggtgctgacgtggtggcggctggagaaagcttctccgccgtcgaggccgtcagcgccgcctacggatcgacctccggctctttggctttaatgtctggttcgcgtcccttgagtggggacgcgaacgagagccttccggtggctgcgtccgtcctaggaccatggctgctgctgcagacgtcactggcgagtcgcccggagcttgtcgccccgcaggctctccggtgtggagggaaccctcggccgctcttcgatgagccgaagccagaggcagcggtgttagcatggacagaggcagagttggctcgaaaagaagacttcttcggccggagcctggccgggccgtccactggcgggaccagcgccggagtcgagttgccgaagccacgagccgggccggtgtcctcgaaggacagctggctgaggcttcggggcgaccggccgagccgtctgctcgggccggattcctggaggagaccctggcggcgatggcccgggcgtggtgctgacgtcgtccttcggagtggagatcctccgatcgcgttgccgtccgaggcacggtcggacttcgccgaaggtggagttgacgccgagggtgctgctgctccccctccgtcgacgtctgagcctgcaggatcggttcatcttgtagagtccctcggctcggtcggccttgccgcttacgtgtactcttactcgtccgtaggattctgctaccgatatagtcgagaaggcacgaaaaatcgtttcgacagaagagttttcgagcgtgaagatgtgtttggtccgtggaatcgcttatccgagcgtgagttacttatcacagaaggtgatgagtga

SEQ ID NO: 35979 - DNA, 1437 bp, Zea mays
  Peptide Sequence Number=SeqID_79354
atgcatgaggggagcgcgaagacatggttgcctttcaagggggtcaccctccttttaaaggcaactctccccacttgcgtcctcagccgtcgcgggctgagtcttctccaacacgctccaaggtcctccccctacgacacgggggctggccccacgcgccatgcaagctggcccaaggcggaagaagccaaaccgcctcgcgcggtgcgcgtaactgcccagcagttacaagcgcttctccactttcgcccagaccagcgggtgaaagaacggaccgccatgcaggcggcatgcaaccgcaccaagggggtgcaccctttcgacttcgacgcgtccagcatggaggcccaggcccacacgtcatgtaaccggcgcgccggttactacgtgcaagaaactgcaccgccactcgtgccactaccgtgcctcctcgactgcggaaccagtaccacgactcgaggcaaccctgcgcatgacccaacagtgccaaccaggcacatcggtcacgggtcagccagccgtgggagaaggcgcgacggtcgatacggccagaaatgggccggcagtaatggcggtggcaagcaggcggaagcagcggtcaagtcatcagccaagcttgcgtcccctcctgggacagacaggcggcacgtgtggcaggtgaagcaggcgacacttcgcttccgccgtaatgaccgcgtcaaaaaagggaccgggaaaggggataccccgaaagggatccttctccgcgaaggaaacgagccccgagcccccctactgatcagaggttcgaaggctggcccctcggaagggttcaacagccgcctcagagcactccggctccgcgcccactactggtcagaggttcgaagactggcccctcagaagggttcaacggccgcctcagggtactcgggctccacgcccactactgatcaggggttcgtaggctggcccccgaagggttcgacagccgcctcagacgcagagcgagggatgaccctgggaagctccgcctcgcccgaccccagggctcggcccccgtctcggcctcggacgatgaactccgcctcgcctgacctagggctcggactcggcctcggctccgaaagacgacgaactccgcctcacccgaccccagggctcgaactcggcctcggctccagaagacgacggactccgcctcgcccaaccccagggctcggactcagcctcggccccggaagacgacgaactctgcctcgcccgaccctagggctcggacttggcctcggcctcggaagacgacgaactccgcctcgcccgacccggggctcggactcgacctcgacctcggaagacagactcgacctcgacctcggaggagcctctgcctcgcccgacccagggctcggaccgaccacatcacaggggggccatcattaccctacccctagctag

SEQ ID NO: 35980 - DNA, 420 bp, Zea mays
  Peptide Sequence Number=SeqID_79355
atggggatgttcattcacgtgctctccactccttcaaagtgcttagccttccaagaccatattgtacattcacctttgggcatcttaaaagtgtgccaaaggtgtggagcacatgaacgatggttgatggctgaggtgaaggtcatgcgggctcgtgctgatggaccgggagcggtgaagggcgagtgctgggtcttgactgacatatcagagcagccaggtgaccatccatggtggctgacatctgggacaatcacttgcacgaggacgtggtggagtggaccgtgttgccggcgtggtcgaggactagcgggacacgcgtctgatcgtggaggacgtgcacgaggtgtggtgctcactacaggtttggtggtttgggcctcaaaaccacctagcgctacagatggcgggttttgctga

SEQ ID NO: 35981 - DNA, 699 bp, Zea mays
  Peptide Sequence Number=SeqID_79356
atgaaactagccaaagtgaaagggaaatgtgcccttgggccatttctaagtattttggtgattgagtgccaacgcaagtgcttttgtgttaatctatgcaaagtggtggacaaagtgcaaatcatgtcaaaaggaaaaattgaattgaaaatgagatggctaagttctgccaaagtcagagcagtctgggtgcaccggactgtccggtggtgcaccggacagtgtccggtgcgccaggctggctcgagcgaactggccgctctcgggaattcatcggcgacgtacggctataattcaccggactgtccggtgagccaacggtcggccgggccaacggtcggctgcgcgatctgtgcaagacacgtggccgagccaacggtcgggagggggcaccggactgtccggtgtgcaccggacagtgtccggtgcgccaacggctcccaggcgccaacggtcggcttcgccaggaaaggaaagaaatccgcaccagacagtgtccagtgtgcaccggactatccggtgcgccaggcgacagaaggcaagatttgccttcctggaatgctctcaacggctcctagctgccttggggctataaaagggacccctaggcgcatggaggaggacatcaagcatcctctaagcattcctaagcaccaagacatcgattccgcgcctttgattctttgcaatagcaattag

SEQ ID NO: 35982 - DNA, 729 bp, Zea mays
  Peptide Sequence Number=SeqID_79357
atggggggcaagaagatccccagcaccacatcgtgttcaccactaccctccactgattctgatcaccggggcatcagtgacgggcacgtcttgctcctgccatacccgggagcgcaagggcacaccaacccgctgctccagtttggccgccgcctcgcctaccacggcctccaccccacgctcgtcactacgcggtacgtgctctccaccacgccgcctcctggtgaaccattcagggtggccaacatctcggacggtttcgacgattgcggcgcggccgcgtgcccggacctctccgagtactggcgccagcttcaggccatcggctcggtgacgctagcagagcttatccggtcggaggcctccgagggtcggcccgtgcgcgtgctggtttacgaccctttcctgccatggtcacggcgggtggcgcaggaggctggggtggcggcggtggcgttcctgtcgcaatcatgcgccgtcgacgtcgtgtacggggaggtgttgtcggggcggctgccgctgccagtggtaaatgggaaggagctctttgcgcgcgggctgctcggtgtcgagctcgggcccgacgacgtgccgccgttcgtggcaaagcctgactggtgccctttgttccttcgggcatcgctgcagcaattcgaggggctggaggacgccgacgacgtgctcgtcaactcattccacgatattgaacccaaggtgaggtcacagtga

SEQ ID NO: 35983 - DNA, 636 bp, Zea mays
  Peptide Sequence Number=SeqID_79358
atgcaggtggcgtgcaaccgcaccatgagggcgcaccccctcggcttcgacgcatccagcatggaggcccaggcccacacgtcatgggctgatgggcgtaattcaggtcaaggcttcgtctactcaagggacgcgatctcgcctcgcccgagcccagcctcgggcgggaacaatagtcccaggcgaattcacgcctcgcccgagggcctcctcaagcaacgggcgcaccctcgtctcgcccgaaccccagctcgggcaggcttcattgtgaagcaaccttggccaaatcgcctcaccaaccgaccgtatcgcaggcgcattcaatgcgaggatcgcctgacaccttatcctgacacacgcgcctcagtcggcaaggtcgaagaagctccgcctcgcccgaccctgggcctcggcctcaggaggaggtctccgcctcgcccgaccctagggctcggcctcaacctcgacctcagaaggctacgggggaacaagaccggcgtcccatccaggctcgccccggtaacaagtaatgatggctccccacatgcgtccatgacgacggtggttctcagccccctacggaagcaaggagacgtcggcaaggtcccagcagccccgacagctgtgcttctatag

SEQ ID NO: 35984 - DNA, 339 bp, Zea mays
  Peptide Sequence Number=SeqID_79359
atgcatgcggcatgcgaccgcaccaagggggcgcaccctttcgacttcgacgcgtccagcatggaggcccaggcccacacgtcatgcaaccagttcgtcggttgctacgtgcaagaaactgcaccgccactcgcgccactaccgtgcctcctcgactgcggaaccagtaccgcggctcgaggcaaccctgcgcatgacccaacagtgccaactaggcacatcggtcatgggtcagtcagtcgcgggagaaggcgcaacggtcgatacgggaccgggaaaggggataccccgaaagggatccttctccgcgaaggaaacgggccccgagccccctactga

SEQ ID NO: 35985 - DNA, 936 bp, Zea mays
  Peptide Sequence Number=SeqID_79360
atggaggtccgctgccaaaccagcttttgccagaatgaagatggtttccctaagttgctgagagcatgcacagtccgcctcggaatcaggagccaaccagagtatgatggtcgtgaattcatcgagcatggcacgaagaagtgtgtcgtaattgtatacattggatccagtccgcaccatgtggaatggagtgtcactgctgtcgggcacagattcaaagacacttgccaagtcgtcgctcgcaaggcattgaggaccctatgtcagatctatgaagaagaagtggccgacaccccgctcagattcttcccgccctttcagagaaaccgtcctgtttggatggccaggatgcgtgcattgaaaggacaacagctgcttgaggatgaccccacagtcgtgtacctcactgcatacctgctcatcctagatgcacagtatgatttcttggctcggcaccaccgtcagatgattgcccgagcagaagatgcagagaagctcaaccccctgcggatccaagagcccgcttcatccaaccccgttcaacccatcagagctgaagacccccagattctcgaaggtcacccgatctctatcagaggagagaagaagacttgggaactaccggaaggagccatagtcttggaaggaattccagtcttccctcaggctatgagtaagcaagagcaccccgagtcctcccaagatcccccgccggagttgtttgagcccctcaccatgaagaagattccagcaccatcccttgaagtcaaagaagaagctgcaagcaccccaccagcaccaccgccctctgaggagctacaagagccagtccaacttgaagaagagttcgaccccgtgctgccatctcagtggccgccagaagaagtcatcaacatcagctccctcttgacccatccaggagatgtctcagactaa

SEQ ID NO: 35986 - DNA, 144 bp, Zea mays
  Peptide Sequence Number=SeqID_79361
atggctaaggaatcgtcgtactataaagggggatccaaaaagaagctgaacttcaacttcaactggggtccagataggttcaaccggggtccagggcaagttcaaccggggtccagagaggttcaaccggtgtccagggtgtaa

SEQ ID NO: 35987 - DNA, 1095 bp, Zea mays
  Peptide Sequence Number=SeqID_79362
atggcagccgaggagatgagacgggcctccgcctcaacggccacggcggagatgccggcgtcgccggcgccggcgcaagcggggtcgaggtgggcgcgggtgtggccgcgcgcgctccggtggatccccacctccacggaccgcatcatcgccgccgagaagcgactcctcacgatagtcaaaactggatatgtccaggaacgagtcaacattggctctgctccacctgggtcaaaagtaagatggtttaggtcagcaagtgatgaaccaaggttcattaatactgtaacatttgatagcaaggagaatgcccccaccctggttatggtccatggctatggagcttcacaggggttcttctttcgaaactttgatgcccttgcaagccgttttagggtgattgccattgatcagcttggctggggtggttcaagcagacctgacttcacatgtaaaagtaccgaagaaactgaggcatggttcatagattctttcgaggagtggcgcaaggccaagaacctcagtaattttatattgcttggtcactcttttggaggatatgttgctgcaaaatatgcgctaaagtcacatatgcgactgctggctgctgcaaataatggccacttggccaggggattgggtccttggggtccaggtctagtacagagatataccagtgccaggtttggtacaagttctactggtgaattactaacagatgaagaatcggcattgatgacagattatatgtaccatacgttagctgccaaagctagtggagagctgtgcttgaaatatatattttccttcggggcatttgcaaggaaacctcttctgcagtgcgcgtccgattggaaagtgccgactactttcatatatgggcagcaagattggatgaactaccaaggcgctcagcaagcacggaaggacatgaaagttccttgtgaaataatcagggtgccgcagggtggacattttgtgttcatagacaacccttcagggttccactcggctgtcttctatgcgtgccgtaatcttctatcagtaaatggagaggagggattcacatttcctgatggcctaatatctgcgtga

SEQ ID NO: 35988 - DNA, 318 bp, Zea mays
  Peptide Sequence Number=SeqID_79363
atggcgggcgggcatatccacaaggaccccgtgaaacttcctatttggatttctccgagacacatcctccgttatttgtcaaggctgaagatcctctggaagcggatgagtggatctgagttattgaacagaagttcgggcttctccgatgcacagagactcaaaagcccttatttgtggcacagcagttgcaaggccctgccagtacctggtgaggaaattatgtggctatccaacctgttggtcatcaaattacctgggacgaattcaagctggctttccgggagcactatattcctgaaggggtgctccatatga

SEQ ID NO: 35989 - DNA, 501 bp, Zea mays
  Peptide Sequence Number=SeqID_79364
atggcctcagctaatgttggagcttcactgtcgggtgtaggagaccattcatcaaccaacttcatagagggaggaggcctaaaaggtccagttcaacaccaagtgcttctcccactactccagaaggtccggctcccattccgacaggatccgcagagttgctccgctataattcaccggactgtccggtgtacaccggacagtgtccggtgctccaggaatgaagcgactctgaactcgccagcttcgggaattcgcaacggctactccgctataattcaccggacatgtccggtgtacaccggactgtccggtgtaactgcggagcaatggctacttcggcgccaacggtcacctgccggcgcattaaatgcgcgccagagcgcgcagaagtcaggcacgcgcgaagtggcgcaccagacactctacagtgcatgtctggtgcgccaccggacatctaggctggcccagcagtcagagctccaacggtcggaaccctaa

SEQ ID NO: 35990 - DNA, 1881 bp, Zea mays
  Peptide Sequence Number=SeqID_79365
atggcgccggggggtggcacttcggcggccggcctcgtcgccgccacctcccggattgcctccctcggccgcgcgggcgacgcggcctccgcgcgcgccatgttcgacgccatgccgcggcgcgacgccgtagcctggaacgccatgctcaccgcctacgtgcgcgccgggcagccgcgcgacgcactcacgctcttctcccgcgcgcccgcgcccgacgcgttctcgctcaccgccgcgctctccgcggccgcggcactccgaagccccgtcgccggagcgcagttgcacgcccgcctcatccgagctggcctgcgggcgctactccccagtgggcaacacgctcgtcgacatgaactgtttgatcaaatgcccaacagaaataatgtcgcctggaacacgttgcttatggggtattcgcgcagtggcaatgctaaccagtgcttgcttctcttcaacaagatgcgggcggaggggatggcctgtgatggggcaacactctgcattctcgctgatgcttgcaccgagctggcccatccatctgctggttctgcaattcacaaggttgcagtgcagagtggatggagtgcaatggccgaggtcagtaactccctgatttccctgtatagtaaattcagtttgcttgacgatgccgtgcggatctttgagtccatggaggtgcggacgattgtatcgtggaattcactgattgattcttacatgaagcttggctgtgtagaaaaagccacttctctattcagacgtgtacctgagactaatgtcatctcctggactgcgatgatcggaggcctcgcaaggaacggctgtgctgatgaagcactcgcgctatttattgtgatgctggcacacgaacacatccatccagatgacttcacatttgggagtgtgctgcatgcttgtgctactgcggcatctctagcaagtggaaggatggtccactgtagggcgttccgaagtgggtttgcggcctacttgtacgtggccaacagcttgatggacatgtatgccaagtgcggggatgtggagggtggtactaatgtgttcggtgccatcgtcaacaaggatctggtctcatggaacacgatgttgtttggatttgcaataaatggatgggccaacgaagcactggtggtgtacgacagcatgaaatcccatgaagtctgccccgatgaggtgacatttgcaggtttactcacagcctgtaaccactctggtcttctggagcatggggaaagcttcttcgagtcaatggtgtctgttcatggaattcagccaaagccagagcatctgtcttgcattcttgacatgtatgcaagatcagggaacattacaaaggctatggagatgttggatctttattcagaaacgattcgggcacataacagtgacatacgtgaagctctgcttagcgcatgctctttggaacacctgaatttcagggttgcgaggaaggcgatggaagacatggtagcgaccaagtctgcgggagacgtgggctatgtcatgctgtccaacttattctgtgccgctgggcagtggaaccaggctgagcaagtgcgaatagcaatggctgagcacggcatcaagaagacacctggttgtagctggatcgaagtccaaggtgctgttaaggtttttgcatcagcgggaaccaaggacaccactagggtcgacctcgtcgactttccactgctggtccatcgcacagatccccgctacctcctgttctccgacggcaccttggacctcgcgttctcggatgacccctcggccacctccgcacgtaatgaggagtggaggactgaggaggacaatccaatctatgaccgcctctatcgtgcgctcgccgatggtgattaa

SEQ ID NO: 35991 - DNA, 210 bp, Zea mays
  Peptide Sequence Number=SeqID_79366
atggcgagagtagcgtgtaccctccgtggcaagaggctagatggtggtgaatctgtgctctcggtgaggaagcggcaaacttttgctgcttttattcaaaggtggtgccgaaagaaaaccaggagtgaagcgtcaggaggaaagggtcctccgttaaaaacttttgttgatgtttatcgggaggggtttttgcctcccaaaatgatgtaa

SEQ ID NO: 35992 - DNA, 693 bp, Zea mays
  Peptide Sequence Number=SeqID_79367
atggacgacctgctctccccgtgctcctccttttccccgccctcgccaccacccttcttctcccacgccggcaacccagtgatcgagttcgcatcctgcgaggtccccgagcaatggctgctcgacgacgtcgtcttggacaagaacgagggccgctacgacgacgtggacgacctgtggcccgtggcggggaggtcgctctccccggactccgagctctccgagcagccgcttcctactcagccggtgccgctgccaccgccgcagcagcagcagcaggagttgacgagcgtcacggccgcccctgcgcagcagcagcgcccgggcgggaagcggcgggggcggaagcccgggcccccgcccggacggcgggccgccgccgcgaggtgggtcgaccccgtagcagccgcagcctcatgcggcgccgacgaggctgtggaggtgcgcatgctggggccagacgtggccgcggtgcgcgcgacgagcgcggctccgcacgctcccgcgcggctgatgagcgcgctccggtctctggagctgcacgtgcagcacgcctgcgtaacccgcgtgaacggcatgacggttcaggacgtcgtggttgacgtggcgagcccgctgcaagtgcaagacgacgaccacgacggcctccgcgccgcgctgctgcagaggatgcaggacagcgcggctacctag

SEQ ID NO: 35993 - DNA, 147 bp, Zea mays
  Peptide Sequence Number=SeqID_79368
atggaaccatgcctcatcgtggtcgggatcctctgcaccatcaccggtggtaagaatctcgtcccctgttccgccatcgtgttagcttcgtggtgtgctatccagaccgtagatctggcgggagctattcgatctggtcattactaa

SEQ ID NO: 35994 - DNA, 147 bp, Zea mays
  Peptide Sequence Number=SeqID_79369
atggaaccatgcctcatcgtagtcgggatcctctgcaccatcaccagtggtaagaatctcgtcccctgttccgccatcgtgttagcttcgtggtgtgctatccagaccgtagatctggcgggagctattcgatctggtcattactaa

SEQ ID NO: 35995 - DNA, 237 bp, Zea mays
  Peptide Sequence Number=SeqID_79370
atggggatggtggcgggctcgcacaaccgcaacgagttcgtcatgattcgccatgacggcgatgcgccgggcccggctaagcccacaaagagtgcgaatgggcaggtctgccagatttgtggtgactctataggggactacaaggacaaggatggtgtcaagggcctgtgcgtcgtgggcgccattgacaactgtacctcccagctccccacctatgggagatcttctcccccataa

SEQ ID NO: 35996 - DNA, 696 bp, Zea mays
  Peptide Sequence Number=SeqID_79371
atgtcttcgcgctcccttatgcatcatgtctttccaccttccgatcccccggacgggggatgcccgcagtccttccgccttgtcgttggaggaacgcaactccgcgggagttggtacctttcagccatcgttcggcttcaaggattttcatcagtcagcccggctgctcccttccgacggcggtcacccgagacggtgaccaccagcccctgggtggggagaagcaagccgggctgcgatcttggtcccaccctcagcttcaaggatgttcatcatccttgctggggtggaggccgggctgagccggagctctacctcccgcgcgggttcgtgggtcggcctctccttcggcgttcgagggagagggcgctcactggccctgcgggcgggtcggactttgacaatgcggggctggtcgacggcgggcgtcgtcagcctcagcgcgtcgggctcgtcagcttggctcccggtgccccctcctaccggaaggcggttgccgcgccgtgcgcacgggaggaccgcccaagatatcgcgcgctgccagggcggcgttcgtgttctggggcggtcctgcctttgcaccggtacagcgcctcacgcggaggtcggtgccccactcatccgggaggatctgagtggggatctgccggagggctgacggcccctgttgtcggtgccgaggtggaggcggcttga

SEQ ID NO: 35997 - DNA, 1278 bp, Zea mays
  Peptide Sequence Number=SeqID_79372
atggagaagagccgggtgctggtggtgggcggcactgggtacatcgggcggcggctcgtgcgggcgagcctggcgcaagggcacccgacgctggtcctgctgcgggcggagatcggcctagacatcgacaagttccagatgttgctctccttcaaggcccagggcgcgcggctggtggaggcgtcactggaggaccacgcgggcctcctcgccgccgtggcgcatgccaacgtggtggtctcggccatgtccggggcgcacatccgcagccacaactcaccaaaaggcgacacgggcagggtcagaactttgggtggcgcgtggggttcgacgcaattaagagggcagcaaggcggatggggcagatcaacgacgccgagttcatgggagtatataagatctcttgaggaccctcgcgttcatcaccaggaacttgcagatgccctcgcaagggtggccttccaggagcgagtcggtgtaaaaggtgacgttcgccaggtggatttccagaaggacatagttagagcagctgaaggtttggtgtctattggaaacaaacatattgaagtgggaacaaaattttctgaggactgctatagatatggaagcgaaaataatgcaagcgacgaagcccttagaaaagcagcatcactatacggaggtgctttgagaaatattgagaaagagtatgaagatttcaacagaattttatcttctcagactatagacccattgagagcaatggctataggtggtcccctggaagatgctcgtggtcttgcacagcgctatagcaggatgagacatgaagctgagatcctctctactgaaattgctagaagaaaggcacgggtaagagaagctccaattgctgagcacactacaaagcttcagcaatcagaagctagaatgatagagcacaaagcaagcatggccgtgttaggaaaggaagcagcagctgcgcttgcagctgtcgagtctcaacaacaacgggtgacccttcagcggctggttggcgcgatgtcctctgaaaagcaaaggagagaatcagcaccacctatcatatcttcacataagcgtgctgagaaagcccagtacttccttgctgaggtaatgcataatttcaatggaaccacagagaaggaactgagcttaattgttggcgattatgttgttgttcgtcaggaaacaggacagaatggaaggcatcagctgtataggaagacccacaatgattctgagatccttgaggttgggagagctgttcagcaagcatga

SEQ ID NO: 35998 - DNA, 369 bp, Zea mays
  Peptide Sequence Number=SeqID_79373
atgggtaaaagtaagaagggtagcgggtcttctcctcgctctggcgacaaacgcaaacgcgagccgactcctccttcggaggacttcggcaactcggagtactcgaaggaggagttctcctctgagtctgagggatccccggctcccgtctctcccccggtgtcgtctgatggttcagacgactcccaagggattgccgcagaggactcctcagactcgtccgaggaggacagcggcggcgacggtggtgatggcggcgacgacgggggcgacggtgacggtggcggcgacagcggcaagggcagcgacggcggcagcaagggcgaccatggcggcagcagcaagggcagcaacaagaccagtggctag

SEQ ID NO: 35999 - DNA, 198 bp, Zea mays
  Peptide Sequence Number=SeqID_79374
atggaatacaacgctacccttcccctagctagccgcctcaggctacgaaggaacaagaccggtgtcacatcaaattactccagtaacagcggtatactgcctatgtcgcctccaaatgtccatgtctttgtcgtgtccttcttcggcaacgaacagttaaaaacggtacaggaggcggggttcgaacccacgccctga

SEQ ID NO: 36000 - DNA, 723 bp, Zea mays
  Peptide Sequence Number=SeqID_79375
atggcggtggcagatgggcggaagcagcagtcaagtcgtcagcaagctcatgtcccctcatggggcagcaggagaaccctctcccacggcgtgaagacgacgcgcccgtgttccgttcctcgaacggctcgcgcacgcacaacggctgccccgcgaaccactcgtcccgtcgcattaactccgcggcagggcaggtggcaccattggcaggcaaagcaggcgacgcttcacctccgccatgatgaccgcgtcaaaaaagggaccgggaaaggggatactccgaaaaggatccttctccatgaaggaagcgggccccgagcccccctactgatcagaggttcaatggctggcccctcggaagggttcaacagccgcctcagagcactcgggctccgcgcccactactggtcagaggttcgaaggccggcccctcggaagggttcaatggccacctcaggccactcgggctccgcgcccactactgatcaggggttcgtaggctggcccccgaagggttcgacagccgcctcagagcacgcagagcgagggatgaccctgggctcgggggctgctctcgcaaactcgcctccggccaaaccgttgacagcgtcaacataccagcccgagaatttgggacttgactatgcacccgggctacggccagggctactgtcggggaccataattaggggtacccccaagactcctaatctcagctggtaa

SEQ ID NO: 36001 - DNA, 609 bp, Zea mays
  Peptide Sequence Number=SeqID_79376
atgtctgtgatgctgagtgcagcgtcgtgtctggattgggccgcgaaattaaccggcctgagcaatgtcccagctttaatcgctgcagctcaacaggctgatgaaagtgccgagccagtttggtttctgccttatctttccggcgagcgtacgccacacaataatccccaggcgaagggggttttctttggtttgactcatcaacatggccccaatgaactggcgcgagcagtgctggaaggcgtgggttatgcgctggcagatggcatggatgtcgtgcatgcctgcggtattaaaccgcaaagtgttacgttgattgggggcggggcgcgtagtgagtactggcgtcagatgctggcggatatcagcggtcagcagctcgattaccgtacggggggggatgtggggccagcactgggcgcagcaaggctggcgcagatcgcggcgaatccagagaaatcgctcattgaattgttgccgcaactccccaccattcattgcatccaagttttccacttcccaactactacaagagctctagcattcaattctagacacaccaaagagatcaaatcctctccaaattccacaccacgccatagagactag

SEQ ID NO: 36002 - DNA, 531 bp, Zea mays
  Peptide Sequence Number=SeqID_79377
atgacgatcgacgacttgtttgaactttttgtcgagcacttggtgaatatcacgctgctagcttcatcttcacccgactcttatgatttcttgatgacgtacggaacgatgacgagatcgagtctggagcgagctggcgaggtgtggttgagcaggacaacggcggccggagaaatccgagctgggaaaacgacgcgcgcaggaaaactccggtcgggcgagctgagaacaccgacgagcacgcgggcagcagcaggaacagagcagaggctaagctgggcgactgcgcgcgaccacgggcaagcacagatcggcgccatggagagttccaggacacgcgcgggggagcagaggagatggccgtgcgccggaagctcgacggcgtccatgagaacgagcagaggaactcccggagtccatggcagggagggtttcaccatggccgagcagacagggagcgccgcgagcagagaagcttcgcgcgcccggctggacgcaggagaacgcgcgcgcagggacgagctcgactga

SEQ ID NO: 36003 - DNA, 864 bp, Zea mays
  Peptide Sequence Number=SeqID_79378
atggctagggatccactacgaggcctttacaaagttccactagcttccgaaaacccgctacagtttataggaagatccagtacagggttcctggctgacagccatcgcagcaaaatcaaccagggacctccccgcactgacctctcccctactgcccttgcccctttcggggccgcaccttctcggatccacggtcccgcaatcatctgccccaacgctggcgttggcagcaagcatggcagcctaactgcggcggcgccatggggcgccagcggtgatggctcaccggagacacgcgacccggcatcatgcaagggctcaggcagaggaaagaggagacgatgggataacctaaggagcggtagattaccggaggcaaagcaacaacgaggccgaccatggagcgaagcaacactggtagaagacctcaactccaggaaggaattcagggcgacccgatcacccgcagcctccaatttggcttcaacgactccaggcagtgccccccaacgccacaacgcagctgaatcgacagcgaatcgaggaagagcttgtgtcgatgtctccctccctcacagcggcgtttatccctcggtttgtggagtcacaggggtcttcaccattgggcgcaagcaggtcagggagggggagatgtcctccattttagggcgcggcaagatgacggctcgcccagctggcgtcgagtggatgccgcggcggtggttgcaaccacccgcccgagaaaatctccacagcgcccgcggaaatttcgctcagatccgcgcgcaagtgaggcgaggtccgccaaactcggccaggttcggtacgagcgcggggaagtgggggagttcgctcctatgctga

SEQ ID NO: 36004 - DNA, 789 bp, Zea mays
  Peptide Sequence Number=SeqID_79379
atgggaccagccgccgctggaccggacgttggccaggaactgcgcatttgcttcttggatcagctgctccttgtgctcctcgaactggagttgttcgtcagccggcaaggtttcccaagttggctctatgatattgctggggagacgtcagagttatcccttgaactggccattgaggaccgatctgataggtctatatgtgatctccccagtagagtcgccaaaaagtgtgttggcgccgatccgggcgccaatcactgcgttgagaaccgacgacggtgctctctgcacaggcgcggacggtccgcggccaaggaccagacgatccgcgacctggcgcagggctcgagttccctgcctgacgggccggatgggccgtgcctggaggccggacgaccctactcgtatcccgcaaagcttcttgattcttgtgtcaaaatcgacttcagtttctatggtcgaggcatccttgtttgtgaacatgtgcagctgcgagctgaatgctttgccgtggtgcatggagcagacataaatgctgtggatcacactggacaaacagcacttcactggagtgctgtacgtggtcatattcaagttgctgaactacttctgaaagaaggagctaaggtggatgctactgatttatacgggtatcaggccacgcatgttgcagcacagtatggtcagactgcattcatttaccacattgttgcaaaatggaatgctgatccagatatccctgataatgatggaaggagccctttacactggttattgttaaccgattag

SEQ ID NO: 36005 - DNA, 1011 bp, Zea mays
  Peptide Sequence Number=SeqID_79380
atggtgagagttgtcccaccgagtcaacaagtcacttgctcgaagcagtctcttcgcattttcgcatttgcgtcgggaaggcttgccttggttatcccttccccagacccagtcacgaaagatccaggttacatcaacataaatgcaaggggctcgcaaaatcaaagggatgatgaaccgttgctgaagatggagttagaaaatcctgcacttctttctggcaactggtcacaactttgtataacctgcaaaatagtcagacctgttcgttcaaaacattgttctacatgtgatcgctgcgtggagcagtttgaccaccactgcccttgggtatctaattgcataggaaagaagaacaaatgggaattcttcatgttcctcactctagaagtttttgcaatgatcattactggctctgctgccattataagaattgtaagagatccaaattctccatcatcctttggtgcttggattcattattctgcgtttcagcatcctggggtggtttcatttctcgcattggattgttttcttttctttggtgttgcagttcttacagttgttcaagcatcacagatagcaaggaacattacaacaaatgagatggcaaactccatgagatatgcatacctcagaggcccaggtggcagattcaggaatccgtatgatcatgggattcgcaagaactgctctgacttcttgttaaatggatacaatgaggacactgaacggctagagcagacattgcccactgatgaggaaatgggaatgatacagatgacaagtgcagtttcgcagcagaacggtgacaatcatttacatcatggtaatggcactgaccatagttgcgctgtttcacaagcaaactcaaaacctcatagccaagtgggttcgtctcagtgttgtgaccacagtaagaggactgataggacaccgttgggcctaggattgggccttggacgaaacagtgcgtcccggcagtatgttcggtctcttatcccattgtga

SEQ ID NO: 36006 - DNA, 1587 bp, Zea mays
  Peptide Sequence Number=SeqID_79381
atgaatacgaattactcggctctcccattgacttccccctccatcgagctccaacccaacggggccaaatctagcgccgccgccaatggcgtcctcaacggccacgctaaaatctccaggcaggattcgttcttgggcgaggtggaggacgacggcggcggggccggtgagcacgacgagctgccgctcatcggcgacggccctgccgggccgccagaggggtccgacgtgaccgccgccgtgttcaacctcgcgacatccatcatcggggccggcattatggcgctcccggctaccatgaaggtgctcggagtcgccgctgggctcgtctcgatcctggtcatgggggtcctgtccgagatcaccgtcgagctgctcgtgagattctcggcccactgccgcgcgctatcgtacggcgaggtcgtgcacagggcgatgggccgcccggcgagcatcgtggcgcagatgtgcgtcatcatcaacaacgcaggggtcctggtggtgtatctgatcatcatcggagacgtgatgtcagggtcactgaagcacatcggcgtcatggatcagctggttggccatggcgagtgggataaccggaagctgctgatcttggtggtccttgtcatcttcctcgcaccattgtgtgcgcttgagaagattgactcactgagcatgtcatctgccgcgtcggttgcccttgccgttgtgtttgtggtggtgtccagcatcattgctttgatcaagatcgccgagggcaagatcagtatgccgaggatgggtccagatttcagctcccgtgcagcaatgctggacctgctcgtcgtgatacccatcatgactaatgccttcatctgccatttcaatgtgcagccgatctacaacgagctcaaggagaagacaccacagaacatgtacaaggttggcaggatcagcaccgtgctatgcgtggcggtgtatgccctgactgccctctcggggtacctcttgttcggcgaggacaccgagtccgacgtgctcaccaacttcgacaaggatctcgggataagattcagctctctgctcaactacattgtcaggatagggtatgtcatccacctggtcctcgtcttcccagttgtccacttctcgctgaggcagacagtggaggcgctgatcttcggggagctggcaacccctagcaggaagagaacattcacattgacagtggtgcttctagcactcatctaccttggctcgacaatgatacccaacatctggatggccttcaagttcaccggagctaccacagggctggcgttgggtttcatgttcccggccctggtggcattgaggctggacaaggaagggagtcacttgggacatggggagaggctccttgcgcttggtttgctggggctatcaattcttgttagcgtcatcggagtcgttggaaatgtatacaccttgaagaaaatggtttcaccaaagttgcaaacagtgtacatagcacttgtcaaaattatattaaaaatggcatatgtgagagtttatgtacaaggttcacgcaaaagtcagatattgaagtatgaaattgagaatcgaaattag

SEQ ID NO: 36007 - DNA, 2523 bp, Zea mays
  Peptide Sequence Number=SeqID_79382
atggggatcttcgagccgttccgtgcgatcggctacatcacggcgagcggcgtgcccttctccgtgcagcgcctcagcaccgagaccttcgtcaccgtcagcgtcggcaaggctttccaagtctataactgtgctaagctgaatttggttcttgctggaccccaattgcccaagaagatccgtgctattgcatcctacaaggattatacatttgctgcttatggaagtgatattgcagttttcaaaaggactgaccaggtggctacttggagtagacatgaagaaaaggtcaacatgctatacctatttggagaatatgttctaagcgcagatgctaaaggtaatgtattcatgtgggccttcagaggagcagaaccaaacactgaaccagttggaagcatatcattgggagacaagttcaccccaacatgtatcatgcatcctgatacttatctgaataaggtaattgttggtagcgaagaaggctccttgcagctgtggaatatcagcacaaaaaagaaactgtatgatttcaatggttggaactcacctgttcggtgttgtgtctcttctcctgccctggatgtagttgctgtcggatgttctgatgggtcagttcatgttcataatatacatggtaaaagcaagaagggcgggcctggtgcagcggtagagcctaccgtctgtaaccggaaggtcccgggttcgagccccagcctctgcatattatgcgggccattatgcctcacattgagtagtagtttctttgatgtttgcaatatttcaattagggatgaaaacggtcggaaacgattctatggcaatggaaaatgcatattatctgctggccaagatcgtgcatttcgccttttctcagttatccaggatcaacaaagtagagagctttctcagaggcatgttgcaaaaagagcaaaaaagctaagagtaaaggaggaagagatcaagctaaaaccagttgttacatttgactgtgctgagatacgtgcacgtgactggtgtaatgttgtcacatgccacatggatactccacaggcatatgtatggcgtcttcagaactttgttattggtgaacatgttttgacaccatcatcaagcactgtgacaccaattaaggcttgtgtgataagtgcatgtggtaattttactatcttgggcactgaaggtggttggattgaaaaatttaaccttcaatcagggtttagtcgtggtagttacattgacacctcgttggcaatgcaatgtgcacatgatggtgaagttgttggattagcttgcgatgccagaaatggctttttgattagtgctggataccaaggtgatattaaggcatgggattttaaaacttgcaagctgaaatctagattggatgttggtaaatctgttactaaaatcgcatttcaccggccaaatggtcttcttgctacggtagcaggtgatatggtactcatattgtttgatacggtgtccatgaaaatggttcgtagatttgaaggacatacagaccgtatcactgatttgtgcttcagtgaggatggaaaatggctcatctcgtctagcatggatgggactcttaggatttgggacatcagtttagcaaggcagatagatgcaatgcatgttgatgtatctataacatctatctctatgtctcctaatatggatgtgttggcaaccactcatgttgatcaaaatggtgtctacctctgggttaatcaatctttattctcggtctcaacaaatactgaaaattatgccagtggtaaacatgtacggaatgtgtgtttgccagctgtttcatcaacagagagatctgaggaagaacaagttcagaatttaggagagtcatataagtccagtattaaaccttttgtcataacggatcatcaaataccgaatctagttaccctctccttacttccaaagagtcaatggcaaagtttgactaatcttgacattataaaggttcgcaataaaccaattgagccacctaagaaacctgagaaggcaccattcttcttgccttcagttccatccctttctggggagatattgtttgagcctcctgccagctcaaaagatacagacatcagtaccacgaagaatacaaatcataagatgtctgaactctcctctcatttcagtcagcagttgcaattttgtggtgaaacaaagaactattcggcttttactgactacctaaaaggcctgtcaccgtcgtctttagatatggaactgcgaatgctacaaatattagatgatgaagagtctgaagatctggagcaaagacctgagcttcagtccatttcttcgctgttggattatttcattcatgaactttccttcaggaataactttgagtttgtccaggctgttctgaaattgtttttgaagagtaaggtgaagaagcttcttgaggtccagagcttagtttggcagaagattgataagatctttcagggtgcacgatgcatggttacattcctcagtaactcacaattttag

SEQ ID NO: 36008 - DNA, 477 bp, Zea mays
  Peptide Sequence Number=SeqID_79383
atgggcggtggagctacagcctggcccttggcagccaacaggggcggaagtgaggtcgtgtggagccgggtccgtggagtggagaggaacaagaggattaacattgtgttttcaaatgtttattacaccagccatcctcttcgttttcggattgcagtacgtgctacaatattacatatctcgggtttatccgaagagattggtacattaatatatgctcgagtggtgaaaacaaataataccatgaatcctgatgtctcatgcatggatgctgaaaatggttacatgttcgacacatcaaggcgtgtgacaaatgtcataagaagtgatattctgaatttctgtgcagtggctgtagcacttcatgatttatggatgttttacacttataactaccatgtttacacgttaaaaccgagagtcgacattgaaggttccccttttgcagaaaggttggaggtcgaggccacttattga

SEQ ID NO: 36009 - DNA, 249 bp, Zea mays
  Peptide Sequence Number=SeqID_79384
atgccgctgcgggagatttgtgctaatggcaatggcgggtcttcggaaatggacccacgggcctcatcatgccgctcggaataccgtcgtggccttgtcgtgggcggagctcttggaattgcttgccatgggaacgtcgccgccgcggatccgcctcttgccgcagccctgcttctctgcttccccattactggtatggtgtacctcaatcagattgctgggtcctccggtttgcgtagcactagttaa

SEQ ID NO: 36010 - DNA, 219 bp, Zea mays
  Peptide Sequence Number=SeqID_79385
atggcgacgattggtgagctcgggaccacgaatagggtacttataccgacggccaagcctatattggcggcggattcacgggcagctgaagcagtctgggagctcatcgggcagaaggcaagtgcgcggggacgtgtgactggggagtggggcaagccggtcagtggcacaggcgaggagcagcgcgcccaccacggagttgggctgtgcgtgatgtaa

SEQ ID NO: 36011 - DNA, 327 bp, Zea mays
  Peptide Sequence Number=SeqID_79386
atgacgcccacccacgcgtccagctcccttcttagagccccgccagtgccccgcgtacacccctcacctcatttcacgcagcttcgccctttctcgcgctctgcccacgccgccagtcgccgccggagacccgtgcccgcgttcccggccatccggctcgccggagaccgctccaagcctcccaagctccgccccgagacaacgagcagctcgtggttcctcagtgtgttgccgaagatccctctgagcaacaacctggtgaaggcaagaggtgaagttggcaacatggatgacttcgaggagttcctggaatacgacgagttctag

SEQ ID NO: 36012 - DNA, 132 bp, Zea mays
  Peptide Sequence Number=SeqID_79387
atggagaacgccgacgagccgagccccggtgttctcgagcgtgaatcacaaatcgtcccgactctacacgatgcggagaaatacctacattttgggagaagtgacttcgaagtacgaatattctttaggtag

SEQ ID NO: 36013 - DNA, 719 bp, Zea mays
  Peptide Sequence Number=SeqID_79388
tcgtgccgggtcgcaggtcgcaccacgccaggccgccggggaccacactggccgccatgccgagccgcgctgggctacgcgttccacgccgggcaccgtgtgccgcgtcggccggctgcgaggccgcgcagggcatgggcagccgcaccgcgggccgagccaggctgcacgagcgtctttcgcgccagggaggaaggagaaaggggaaggggagaagggaggatggatgcgagctcaccacggtaacgaatggcgactccggtgaggcgagttggatgccggcgacgacgaggacgctgggcagcactgtcgtgcgggctgttcggcgtgggggaagagggagtgggcaagacgagactatgagggaggggtttcaagcgggctgggagggggcggttcggcgagagatcgtggtcgcggtagctgctgcgcgcgtcgtggtgaagcaggacgagtgggcggcggcgctgggggacgtggtggctgctctggctagcacacgcggaggggagggcgagctgggccggggggagcggcacgctgggtgggccgcggtggcgcgcgatgggccagggggaacgacgtggcctgggctgagcgaaactaaagttactgagcttcggcgttctgcattgttgcttcttttcgaggtcttcgtcttgagaaccttctacagaagtggggcggacctcttgtggcattataccgaaggtgtttaa

SEQ ID NO: 36014 - DNA, 495 bp, Zea mays
  Peptide Sequence Number=SeqID_79389
atgagaagctttttggaaaattcacctttgagcggaccattcgggcccttccggcggaccgtccgcgacaccaagccattgatgtggaggggtggaccatccggactaagggggcggatcgtccggactaagggtgcggaccgtccgcagttggtagaaaggaggcaacgactagaaagtggttccgcatggggtgtgacgaggcgaggagtgatgcaaatcacctccggtgtgaagcgagcttcagaaaagttttccgaggcccgtgatgctatgaaggcagccgaggaggtgagtaaggcggcggaggatgaagtgcataagctctcgcttgcgtgcaatggcaccatcgccgagcaggcattgctcggtcaagtgcagcgtgtggtcctcgaaggggcgtatcacgggagcagcatggccttagggtacatggtctcccacttcgatgagattgatgctgccgtgatcatagagggctatgctgccggctga

SEQ ID NO: 36015 - DNA, 381 bp, Zea mays
  Peptide Sequence Number=SeqID_79390
atgacgagtgtgcatggtttgggtgtttcaccaaacacccaatggcatcccgatgtgaagacagctgcacgtggaggaaggcacgaattgggttggctgggaagggacgccctgctggagagcttcctatcggctgttggtgcccctagccagcgtgtgcagaggagcggggtctcgcgaatggggaagaagatgggcgccattgaccggagctcggtagaggccgagatcgataaggactgggtgaaaccaacgaaactggtgaagagtgaagatttgtcgaaggccgaggcagccaagccttcatcgtcggagtcagatgaagagcagtcagaatcccattcctttccaaggtgcgcctcgcccttcgccttcctgtag

SEQ ID NO: 36016 - DNA, 345 bp, Zea mays
  Peptide Sequence Number=SeqID_79391
atgaagtttctcgggaggaattcaagactgccttcggaggacaccacattcccagctgggattcttggccttcaacgacatgtgccagtacgcgagcagcaacagcagttccaccagggaaatgggaacaagtgcttcacttgtggcaatgtgggccattatgccaagaattgcccaaggaatcagcagaggcagatgccaacaccaaatcaagacagagagaggaagcagaaggtgcaagtcaggcaagggaacctcaacttcactactctggaggagttacctgaaggagcccccatcatgactggtattgttgggtacttgttctcaaatactatgaattaa

SEQ ID NO: 36017 - DNA, 264 bp, Zea mays
  Peptide Sequence Number=SeqID_79392
atgaggaatagggcaaggcctagcccgctactcctcctgctcctctcctgcaggagcagcatcccactcgaccgtccaacacggtggcagggtggtaggccaagtcacaccatcaaccatatcctgaagcgtacctgtaaaaattatgccacaacaagggagatcctcgatggcaggctcgggagctggctcctgatcttcctcgtggacagttccttgctcaggaatgagcacgtactctctgtcagcgaggttgcaatctaa

SEQ ID NO: 36018 - DNA, 468 bp, Zea mays
  Peptide Sequence Number=SeqID_79393
atggtgatgcaccccttgggactcttccctgctgagaagagggatgaccccatgtggtgcagccgtgccctgcagagcgacgctatggcacatcttgctaacctcgctcagaccaccaagctcaccctcgacagtcgagaggacttcgtggtcgacctatcctcagagttggtggaaaaagacctacagcaggagcttgaggaagctaacgaccacctggacatgcaccacctggagatggaggccaatgaggccagaagtgagggagaggaggctcccaaggagttaggaccagcctcctggtaccaatgtgattgcctccgtgatgctccgttcgcccatatccagtgtcgcttccactactcagctaggaagtgtcgtgggcagaacaagcaagttccctcgccacctcctctagctcccacggtgcaggagctgatggctcagcagaacgaaattctgcgatag

SEQ ID NO: 36019 - DNA, 357 bp, Zea mays
  Peptide Sequence Number=SeqID_79394
atggcgggaggtgatgaagctgactacgagggcccaccagcaggtgtcacaaggagggagcagggtactttgctcagatttcttctaccaatcccaatttctgaatttgggtgttacacgaccgaagcaaccagaccagccgagaagactcactggaccagctggaagaggctcgggacatggccttactacactcggcacggtatcagcagtccctgcgacgctaccacgcccgaggggttcggtatcgagacctccaggtgggcgacttggtgcttcggctacgacaagacgcccgagggcgccacaagctcacgcctccctaggaagggtcgttcatcatcaccaagattttga

SEQ ID NO: 36020 - DNA, 249 bp, Zea mays
  Peptide Sequence Number=SeqID_79395
atgaagctggagaacgagacccggcacagcctgtatcccaagatgagatcttggaggtgggagaaactcctaatgaacgagtcttcagggaaaggaggaactctcgccgatgtgatcgccgggccattcaatggcccccaaactttaaggtttcaaacatcgacaaatacgagcctaagcaggacccgggaggttggttggttgtctatacaaccgctgtctgggccgctggggcaactgaagatgtga

SEQ ID NO: 36021 - DNA, 1713 bp, Zea mays
  Peptide Sequence Number=SeqID_79396
atggatggcggcgaccacccctgcggcggtaagccctccatctcgcagctcttgcaaggcctccataaggggctagagattcttctgtctgtcgtgcggggccccatagcgccagttgctgccggcggcggtcaccactcgttgagaaaacgacgggagcctcccatcgtcattccgaagccaccgacctgcaccgccatgcaaactctcctttcccccgtcgtcaaggcaaaaggctccacggagaagagatgggtccacagatcccagtggggaatcgcccacataaaacgacttgctggcactccgaacccccgctcatggaaagagacaaaactcatcacataccccgacggcggggacggggcggctccgctcggaggggccatccactccggctgcgggtcaccagagaggggacgaagcaagccatcggcaacaagggcctccagatcgtccaccgtgacggtggagaaaggccacgggtcgcgcggcggaacgacggttacccggtcggccatcaccaagcgaaggaggtggcagcggagcggacaaggtgcacgattttctttctctggctattccctcaggttgcggaaacctaagcgggaggcgagaagcagagtaaagaaccaccaccggtccctcttccgaatatataaaggcccgggtgagacccgttcaacacttcgcccgaacccaccgcgaaattcaaaactggaaggcgaaacgcccgttcctcgaacggctcgcgcaacggctgccccgcgaaccactcgtcccgtcgcattagctctgcggcagggctggcgacacctttggcaggcgaagcgggcgacgcttcacctccgccatgatgaccgcgtcaaaaaagggaccaagaaaggggatactccgaaagggatccttctctgcgaaggaagcgggccccgagccctcctactgatcagaggttcgaaggctggcccctcggaagggttcaacagccgcctcagagcacttgggctccgcgcccactactggggttcgaaggctggccccccgaagggttcgacagccgcctcagatcatgcaaagcgagggatgactctgggtatgtccgatacatggccgaggcttgggctacgctcccgaggcttcacggagaagcaaccttggccagatcgcctcaccaaccgaccatatcgcaggagcattcaatgcaaggatcatctgacaccttatcctgacgcacgctcctcagtcgacaaggccgaagaaaatagcgccgcctaccttgctccgactgctgtgccacccgccagggtgaggctaacagcagccaagtccagcctcgggcgccataggaagctccgcctcgcccgaccccagggctcggactcaaccccgactctggaagacggtctccgcctcgcccgaccccagggctcggactcaacctcagcctcggacgacggactccgcctcgcccgaccccagggctcggactcagcctcgacctcggacgatggtctccgcctcgcccgaccccagggctcggactcagcctcgacctcgaaggagtcaccgcctcgcccgacctcgggcccggaccgaccacgccgcagggggccccctacggaagcaaggagacgtcagcaaggacccgacagctccgacagttgtgctcctacagggctcaagcgctcctccgacggccacgacatcacatga

SEQ ID NO: 36022 - DNA, 231 bp, Zea mays
  Peptide Sequence Number=SeqID_79397
atgtgctcttggactaagtcccttgtgcctatggtagatcgcctcagaccgaggcacgaaactgtaacaaccaaagtagttgtgatactgctcgtttctggtagccttcgtctcataagacaactcatggatgttgcaaaagcatcttgcatctggttccagtccttggctcctcatggctcatataaagatcctcactttaatgatagcttcgggagtaagttgatgaag

SEQ ID NO: 36023 - DNA, 558 bp, Zea mays
  Peptide Sequence Number=SeqID_79398
atgtctactattcccacggatcctccactgcatgaccaggtccgcgccacccgagagtacaccacccctttgaggcgatccgttgccaggagggtagaagccatcctctcccgggttagatggaggacaacctctatccacaagatctacgcaaggctaagcatttttgtaaatcatattttgatacttcacagaagtatctataaagtccccgacggcgctcaagcacggccgcgctccggcgagcaactacgccggccgattgaggctaagactggtgctaatcttcggctgagcccaaattcgagttcctatgaacgttttccccaactaaattacactatcggtggactagggagctccggccatggtggccgtaagcacaacggcaacatgatcgtgttcccggcgactcatggcggtctagctcgattcaatgtttcggctccaaggacggtggccggtgaatttcaaggagatgcgcggcggtcggaggtgacgaaggttatcggcttcgcgactacgtgtctaccgccgtggcgggctcaccggccttga

SEQ ID NO: 36024 - DNA, 1044 bp, Zea mays
  Peptide Sequence Number=SeqID_79399
atggcggctgggaacaccttaacagaacgacagatgggaacagatgtaaatttggtcatagaaatgtatgaatctgtgactgaagtcaacagcgtcacgagaaaatcgtcactgatgatcacattcttactaatggcttgtcttagacacaccgcacggaagtccgtcatccccttcttgccttctcgtctcgctgagcgtccgcttcgccgtccgcagagagtggagtctgtgaggagctgctcccctgtgctcccgctggaggcgcccactgcaccaccacagagtgccccagccgctggagtatctgtcggaggagaccccaacgacagaggtggcgacaataactcgagcttcagcaccgacctttcagccgagcaggagccagaaggatgggttgctcgacccatcactcgcgacgccgctcgcgggtgtcacttccaagatgcgctcgacactctgctgcgccagacactcgaccgacgcacttggtccatcgagtatcgttgtgttgtcttccatcacagtcgtggggtttacccggaccgctgggaggcgactttcttggtgcgccgtccggagaatagtctccggggtgcggaggtctgcttagagcattactctatctctgagcgggactcagctgaggcggccatgcaagatgtcgcacggcgtgcgctttcgcattactgctcagtgttcggtggggtggctgatggtctcaacctgaagtattacccccgccgtccatctggcagcacaggaggcgtggttatctcacccattggtgaggacaatcctaggttgagcagcacagtcaacctagccgccgtgctaaacacggagttggaccatgcattagacgagctgagtagggctcgtgctgagatcgcccagctgcgggctgagcgcgtggagcatcgtcaccttgaggatggctcccccgctcgtgtcgggactcagcacccgtaccgctcaccaaggcgtggacaccaggcttatggcaaccacaactacaggactaggataaatttagaatcatag

SEQ ID NO: 36025 - DNA, 177 bp, Zea mays
  Peptide Sequence Number=SeqID_79400
atgaagagaaatcccaaagatgccagcacagcagggttaccattcatggccctggcatccacacctacattaacactgaacttccctgattctatgccctactgcccacctgaacccatcctgttcatgccccctttatttcgtcatttcatatggcaacagaccaatgcttcttaa

SEQ ID NO: 36026 - DNA, 525 bp, Zea mays
  Peptide Sequence Number=SeqID_79401
atggtgcgggcagaaacaacggcgcagttgatgctccggcgagcaattgatggctgcgcggtcgtcgattccacccataaactccacggatggtttcgcgctagctcggtgcaggccccggacccgatcccaaccttggacgacgaaagcggtccgagaactcggtgcggcgacgatctcctctctctatctctccgagtcctgcttgcaatatcggcgctgctgttcagcatttatgggggagagtcgaagggagagcagagcagggcaagggcgcgaggctgcggtgcttatacccgaggagtagcaggcgggcagtcccgggatccacgaccgttgcgcggcggtcggagtttgttagccaagcgcgagatgcgaagaggggataagcctccgagcgagactgggcgccagcatgcggaaggaaggctcgtccacgatatcctccacaagtgccccgaggaagagggggaggtcgcgccacgcccacaagatccgtgcggcagcttcggtctgggaggttga

SEQ ID NO: 36027 - DNA, 384 bp, Zea mays
  Peptide Sequence Number=SeqID_79402
atggcacgagctatggcttcagggggggtctcgcttgggtatatatgggtgaagaacgagcccaaggcgtgcttcgccctctctcgtgctctgcccacgctgccagccgccgcccgagacccgcgcccgcgttcccggccatccagctcaccgaagaccgctccaagcctccccgagctccgccccgagccaaggccttaccgcgccataagccccctccccgtggccagaatggctcaccggagttcctctggcccgcccgaggccttctcatcgccgttctcccctctctgtccgtggattcaaggtcccttccccgccattgagttcgccgtggcgccctcttcctctctgcccaattacggcgaccccggacccccctag

SEQ ID NO: 36028 - DNA, 753 bp, Zea mays
  Peptide Sequence Number=SeqID_79403
atggagccgagtgggtgtcgacaagaggagcaggcgcgcgtcggtagtagcagtaggggagtgtcacaaccagaggtaggaaattcggtggtcaccggagttgagcgcgaagaacagggagcgaagaacaggagaggaattcagaaggagaagaaagccgaggctaagcttacccatgacaaggcatatggccagttaaagggtcctagattagcaggccaacaatcgttgcggtccttaaacggcgacatatcctgcgcaacaaaaccccctaggctccggcctaaccaaggtggtatagttcaattgaacgggtcagagagcttcaccagaggtcaacgaagacatgtgcgcgaggaatttgagaatggctcaccggattgctcggtctacgcgcagctgtgggcgactgaagtctggcgagggcgattctgcttctccggtgaggcaatgcctcggctcaagctttggaaagctttaccgattcacggggaagcagtccagtggctagggcgaggcttggggttgtcgggaagggctagccacagtggtcgtgctcgggcagtgatggcggacggtggagagctcgccgaagttggagtttttgctcggggcgtgaggcagagtgaagagcagaccgttgcgcacccgatagtgttcctagggtattttggcgccactttgatatttggactttatggattcgagctttggaagacagggaacacatctgaacttgggaaagggttctga

SEQ ID NO: 36029 - DNA, 1065 bp, Zea mays
  Peptide Sequence Number=SeqID_79404
atggtgcaccggacttccatagccgatgtgcatgtgatgtgcatggatctaagcccaaagaaacccaacaaggccagcgccagcgacggcggagcctactacgactggtcccccgccgatctgcccatgctcggcgttgcctccattggtgccgccaagctctgcctcaccgccggaggcaaaggtatattcggcgtggttctcccggaggcgaccaaggagaaggtcatctccgtcaaggaaggcgacgcgctggcgctccccttcggcgtcgtcacctggtggcacaacaacgccgacgccgctatctccgacctcgtggtgctcttcctcggcgacacctccacgggccacaagccgggccagttcacaaacttccagctcaccggctccacgggcatcttcacgggcttctccacagagttcgttgcccgcgcatgggacctcacccaggacgacgccgccaagctcgtctccacccagcccggatccggcattgtcagggtcaaggacgggcacaagatgcccgaggcgcgcgacgaggacaggcagggcctggtcctcaactgcctagaggcgccgcttgacgtcgacatcaagaacggagggcgcgtcgtggtcctcaacacccagaacctgccgctcgtcaaggaggtcgggctcggtgctgaccttgtcaggatcgacgcccactccatgtgctcgcccggcttctcctgcgactccgcctaccaggtcacctacatcgtgcgcggcagtggccgcgtccaggttgttgggatcgacggcacgcgagtgctcgagacccgcgccgagggaggctgcctcttcatcgtgccaaggttcttcgttgtctcaaagatcgccgacgaaaccggcatggagtggttctccatcatcaccacccccaacccaatctttagccacttggcgggccggacatcggtgtggaaggcaatatctccggcggtcttgcagtcgtcgttcaacaccacgccggagatggagaagctgttccgtagcaagaggcttgactcggagatcttctttgcgccttcaaactga

SEQ ID NO: 36030 - DNA, 525 bp, Zea mays
  Peptide Sequence Number=SeqID_79405
atggaagatctgaggcctgcaaacattgaggctcctctatctcaaggtaaagagtctgggcgccattctgagatgacagagggtatggatgttgagaaaaatattgaagatgataaagggtatattgataatccgagtaatgatgaagatgacttaaatgaaaatgaagatgatctattgtgttcccaagatctagaggagtttgctaaagatgaagacttagttttatccacccttcaagagaaagaaaacatgaatctagttgaacttcaaactgaagatgcttctaaagatattggggacaagaaaggtgtaactatggaaggggaccatgttgaaggaatcagaaggagtagcaggctggaatctaatgacgagatgaagattgcagagaaggctacaacgagagcaatggctaaggatgcttttatcacaaagtcgggagcaggaagaagcatggagtccattgatctagtgatcaacggtggctataggaagatgaagtggatgaaccaggaccgttag

SEQ ID NO: 36031 - DNA, 213 bp, Zea mays
  Peptide Sequence Number=SeqID_79406
atgggcccggcgccggcggggcgcgtcgaggcgacggggcccgacggcgcgaatcggacggtgagggcgccggcggctgcgagggtgctgtgtgaaagagagtcactcgaaacttggaaaaccgtgcatgcaaaaatgatattcatgttacttagcataagttacgtccgattccaggagcggaccggaaacttcgagcaacatgctcactaa

SEQ ID NO: 36032 - DNA, 399 bp, Zea mays
  Peptide Sequence Number=SeqID_79407
atgccggcactggggtgctggctcatggctgtcggcaccttccgcttggccttcacctggtcgtgcttcttcggctccgggtcgctctgctcagccacctactccgagatacaggtgatcggcgtgcatgggcgcacggttgcggtgtggacgctgctgtcgtgcaccctctgcttcctgtgcgccttcaacctcaccagcaagccgctgtacgcggccaccttcctgtccttcgtctacgccttcgggtacctgagcaccgagtgcatggtgtaccacaccatgagtgcagctagtctcgtcccgttcaccttcatcgctggtacagtagatttcttagatgacagggtcgatgacgacatcgctactgctaatataacgaatcaagctgattcataa

SEQ ID NO: 36033 - DNA, 363 bp, Zea mays
  Peptide Sequence Number=SeqID_79408
atggcggacggcgttggcggcggcgggcagccggggtcgagcggcgcggcgggtgggcaggggcgggtggcactgggggccggcgggctgcgcggcggtggcggcggcggtggcgggagcgagcgagcggcgcgcgagaagatgagagaaatagagagaagagagaaggagtcgggctgtggtgttaaaagctttatttccggctgccagggcttgaccgccgaaaataagctgttattttttgcggctgtgtcagtggccgccgaaaataagcctggatattgtttttctgctctggctcacaagctaaacgagtcagtcaagattataaacgagccgagccgagccaactcgttagcttaa

SEQ ID NO: 36034 - DNA, 291 bp, Zea mays
  Peptide Sequence Number=SeqID_79409
atggagttgcgttctcgtggcggctcttcgtcgcatgcgggttgtggtagcagccgtagtcggcgctctgtatctagcatggaggacactatgagggagcatcaagaaaggtttcgtgaagagctgcggcaacaacaaatgacattcctccaacagcaatcagagtacatggctgcttacaacgcacaggcgcaacaagcaatgaacaatccaaacatgttacacgacttcgtcaacgagtttttcgcttctgaaggtagtggtcacaactccaacaaccccgatatgtga

SEQ ID NO: 36035 - DNA, 354 bp, Zea mays
  Peptide Sequence Number=SeqID_79410
atggatttgtgtagatcgtacctcggtcttcgaggatctggctcggtggagcgaatggaagaggaagacgacgacggcgatgagcttcgcttccttttgccggcaaccttggacgaagtcggtggacgacgaagccgtttgccgatggcgactctccaccgacgagctgggggaacctcgcttggaacttggattgcggtgggtcacgcctcgtcggttgcaagtgttgtgacctctacgccgccagacccgccaccgcacgtccgcttctcgcccacctgcctcgatgccagcggcgaagcacgccggatcgagggctcggccccgggagatgcagtcgccagcgcggggtag

SEQ ID NO: 36036 - DNA, 543 bp, Zea mays
  Peptide Sequence Number=SeqID_79411
gacgagggcaaacccacccaggtcgatgtcgaagcagctgatggactgatggaacttgtaacctggctcgcagcgttgcgtgaaggacctcgcgcgcgctctcctctactgcttggtcgtctcgttgccccggccgaacatccaagcctctccatgtctggcccttcgaagaagcagcgcggcatgccggcactggggtgctggctaatggctgtcggcaccttccgcttggccttcacctggtcgtgcttcttcggctccgggtcgctctgctcagccacctactccgagatacaggtgatcggcgtgcatgggcgcacggttgcggtgtggacgctgctgtcgtgcaccctctgcttcctgtgcgccttcaacctcaccagcaagccgctgtacgcggccaccttcctgtccttcgtctacgccttcggtcacatccatggtctggatgctgattcaatggaactcggatggtcacggcccccgtcttcttcatgggtctactgcttccaagcagccatgacttcgcaggctagtgaatga

SEQ ID NO: 36037 - DNA, 396 bp, Zea mays
  Peptide Sequence Number=SeqID_79412
atggtcctcgcctcagttgccaccacctcgttcgccattctacttcttttctctctccccctcatgcctccaccttcgcgccaccccattctcgacagacagggcgtaggagaaggtgcctcctccccgtattcgtctgacaccagccccgacaccgactcgcgtagtggctattgcacgtccacgaggacgtttcacatcatgcgcgcaccatcgttttcgccgtcgtcggacgtcctattcgttttccctgccttcgccctgttcttccaccccaacctgctgcccccgcccacagtcgcagccgcgagccgactgacgcttgtcgacgcgggtacggagcaagtcggtcatgctcctggcctttctccatgcgtgccgtcgaggaggacatga

SEQ ID NO: 36038 - DNA, 885 bp, Zea mays
  Peptide Sequence Number=SeqID_79413
atggacgacgtcggcggtgctgctgctggtggtggcgattcaaagcaggtcttggttgaagcagatgggaacacacgcacgcttattttgaacaggccgaaccagctgaatgtactctcctctgcaatgattaagggactcctgaactgtttcactgcttttgtgaaagatgatggagttaaattgttgattatgaaggaagttgtatgtcgatcttatgtttctcattgtattgagggttctggaagagcattttgtgctggaggtgatgttgttgctggtgtccagtcgataaataatggtacacaccctgcatccaaaaagaatgcaattctagtttctcttcttactggaattgtcatgggtggaggcgctggtgtttctttacatggaaaatttcgagttgccactaataacacggtttttgcaatgccagaaacatctcttggtctttttcccgatgttggggcctcatattttttggctcgacttcctgggttctatggagagtatgttgctcttgttggtgctagattggatggtgctgaaatgcttgcatgtggtctcgcaactcattttgtcccttcaaatagaatgcttttgctggaagaatcccttaaaaaggtggacacctcgaatagttttgttgaggaagtggcctcaaattcagcaagcaaatgggttgctcagacaattaagtatctgaaaaaggcttctcctactagtctgaaaatcacattgagatcgtggatgcctccaaggttggaacaagtgcatgatgatgcagttgaagagtatttctctagggttgatgatccagagtgggaagatttggacctacctgtcatgtattcaaatggaagaattatggagtccaagctttga

SEQ ID NO: 36039 - DNA, 921 bp, Zea mays
  Peptide Sequence Number=SeqID_79414
atggcgaaaacgatgccactgtgcgagtcgctatcggggctggtgtcagacgaatacggggaggaggcgccttctcctacgccctttctgtcgagaatggggtggcgcggaggtggaggcatgagggggagagagaaaagaagtagaatggtgaacgaggtggtggtaactgaggcgaggaccatcattatcgtgcggagcattgtccactctccgatcccacccaccggccccgcagatatcgtgctcccttcccccacgaaatccccttcacccaaactacccctctctgcacccctcgacatccacgctgcctcagccgagcacccgtcactccggttccctgaggtgcgggctgccacggcggtgctccaggcggtgggcggcctccgcccgccgcccttctcgccgtggcgcgccgaccagggcctcatggactggctcgacgccttcttcggcttccagcgcgacaacatcaggaacaagcgggagcacctcatgcgcctctcctccgctgacttctccgacacgctcgagccctgcatcgcacgccaaatccggaagaagctgctccgcaactacaccttctggtgcggcttcctcggccgtcgcccctccgtctatgtcctcgagggtgacccgcgcgccgatctgctctacacgggcctgcaccttctcgtctggggcgaggctgccaacctgcgtttcacgcccgagtgcctctgctacatctaccaccacatggcgaccgagctgcaccgcatcctcgagggcttcgtcgacgccaccacgggccgccccgccaaccccgccgtgcacgacgagaacgccttccttgtgcgcgtcgtcatgcccatctgcgacgtcattcatgccgagaccgagttcagccgcgacggcaaggcgccgcacgccgcctag

SEQ ID NO: 36040 - DNA, 339 bp, Zea mays
  Peptide Sequence Number=SeqID_79415
atggactggagctggttgtggctcattctgcttctgattatgtggattatcatcttgctgaagaataagggttacaatcaaatccacttcaatcgacaaaaatgcttcaaaaaatcgacggcaaactcgatgtatttcaagttggattacctggaacttcttgaatcgggctccaatgctcggagattgaaggagctatatccgcaagcattagccttcctgccacagatgggaaatcaggttatggttattggctgggagtctgtagaagatgatttgggagtttgggactgcaccacgaaagctaaaagctttgattgctatatcaggtctatgtaa

SEQ ID NO: 36041 - DNA, 1314 bp, Zea mays
  Peptide Sequence Number=SeqID_79416
atggcgcaccggactgtccgacggcttggtggtgttgggagctcggtgatcaccttggagatcttgttggcgactcggctcaagattgaagtaaatggcttggggcttacacaaatttcacaaccggatgttgtgaggaagattctcagtgtcctcccaattgacaaatatggacacattgtcacagtgctgcatcagatggatctttcagttgctactcctacacattgtcacatgcacatcaatgacaaggatgagtcatcttccaagagaaaggatttggctctcaaagccaatcaagaaaataaaggaaaagctaaagtacaaattgaggaggaatcctcaagtgatgatgatcttgatgctaacattgccttgatggtgaggaagaccaccaagatgttaaagaagctcaacagagaaggtatcaagtttgactcaagaaagaagaaattcttttctagtaaaagaaagcctatttctgaaatggattgctacaattgtggagagcttggtcatcttgctcatcaatgcaataagccaaagaagaacaagttcaagggcaagaaagaagatggcagtgatgacgagaaaaaggaaaagagattcttcaataggaaggatgggaagcacaaaaggttccacaaaaagaaaaatggaaagacattcattgttggtgactggctcactgacattgagtcatcaagtgggtcttcttcaagtgaagaagaaaatgatgaaaatgttgccgccatcgctggggacttctcttcaccaccaccatcaccttcatcgacttctcatctatgcctcatggttagaggtgaacggaaggtacaaaatgataatgatattattgatgatagtgatagtgatgatgaatttgcttcaccttcttatgatgaactagctgacttgcttaaggaatacactcaaatcattaggaagtcaaaggctaaatattataagttgaaagatgaaaatgaatttttaactgccaaatatgacatagttgtaaaagctagtgatgagatgaaagaagaaaacaaaactatgtcatccactagatatttgactgatgcaactactagaggaaaggttgccattgagaacaatgacttcaacaatgagttggcagtggataatgaaagacttaaaatgaggtcaagaaacttaagagtgaaaatgaacatcttgcaacaagtgaactacaagatcggtgggagtcattgggttattgatagtggatgcactcaacatatggctggcaacccacggatgttcacctcacttgatgaaaatgttgatggataa

SEQ ID NO: 36042 - DNA, 1248 bp, Zea mays
  Peptide Sequence Number=SeqID_79417
atggctttcctcttcaacaagttccaagaggcaatcagaacaattgccaagagccccatgtttgctcgtgatccaaggcatcttcaatttgaagctgatgtgaatcgtttgtttctctatacaaggtaccatttcctgaatttcttctgctatgcacttagctattatcgtctcggggagaatgctgacgagaaggacgctgaggagattattgacttggctagcaaagcttctattgctgatcagcagaaacaagtgcaggataatgttcattatgaacttacgcatatgtgccaagcaatggatagcattttatgtcctgatacaataaacgacccatcaaaaggaccttcagaagcacataatcattctcagcgtagtggcttaagttttgccgttggtggtgctgcatctgcaaacaagcaaagtgcaattatccctgctacacgacctttaactcgagcagaattgtcaaagaaattcagggatcattttgggtacacacttgacatcggaccatctggaattcctcataaagacgcaggtcaaggtttattcttatcaggacaagcaaatgccggtgctgtcctagccatctatcctggtgttatatattcacctgcttactatcgatatatacctggatacccaagaattgatgtttgcaacaactatctaatcacaagatatgatgggacaataattgatgcaaaaccatggtgttttggtggtgaaacaagagcattatgggatggttcagatttggtggattacaatgctatggcacctaaaggctcagagaacaactctgatcgggtgtggagaatgctaagcaagcctctagaaaaaggtgtaagggaaaattttggtgaagtgcttgaacgacgaaatccccttgcttttggtcattttgcaaatcatccacccaaaggttcaagtcctaatgtcatgatctgcccatacgattttcctttgacagagaaggacatgagagtatacatccctaacattacgtttggtggtcaagagaccattaggatgaagaggtttggctccttctatttcaagtctggaggttctgataatcaggctggtgattctctagtactgaagacgctagtgctggtgagcacaaggtccatatgtgatgaagagctctttcttaattaccgttacagtaactcaaaaagacgaccagagtggtacagccctgtcgatgaagaagaggataagaggagatggagctag

SEQ ID NO: 36043 - DNA, 267 bp, Zea mays
  Peptide Sequence Number=SeqID_79418
atggctggtggcggagggtcgtgggctggggatggagagagggccagaggagacgaacggcggaacgtagctaggaatgccatcggcaacggcaagaagccagaaagatcacaccaggccacccgccaccaccagcaggactgcgacatctaccgtcgccggcggcccagcgcggcaactgcaccggtcgcagaaaagtgccacatagcagcctcctgcgccacgaggagctcatccgcaccgaacaaaacagtagccccggcttag

SEQ ID NO: 36044 - DNA, 525 bp, Zea mays
  Peptide Sequence Number=SeqID_79419
atggcgctccacaagctctgtgacgacggcggctctcagctctcttacggaagcaaggcgacgtcagcaaggactcgaccgctcctacagctgtccctccgccaggctccgttgctcctccaacagccacgacatcacgccagcaagcaggagatagagtctgtgaagagctgttaccctgtgctcccgctggaggcaccccctgcaccaccactgagtgccctagccgcagaagtagctgctggaggagacccagacgacggaggtggcgatagcagctcgagccacgacaccgacctttcagaggagcaggagttggaaggatgggttgcccgacccatcactcatgacgctgctcgcggttgtcacttccacgatgcgctcgacaccctgctacgccaggcactcgaccagcgtatttggtctatcgagtatcgctgtgtggtcttccagcacagtcgcggggtttacccagaccattgggaggcgacctgcttggtgcgccgtccggagaacagtctctag

SEQ ID NO: 36045 - DNA, 993 bp, Zea mays
  Peptide Sequence Number=SeqID_79420
atggcgcttcctgttgacgtggcgggcctgtgccctaggtcgggcgacgtgggggctcctccgaagctggggtcgaatctgtcttccgttgccgaggccgagcccgagcccctaggtcggacgaggcggaagtcgttcggcagaggccagggcgaagtccgagccctggggtcgggcgaggcggagttcgtcgtcttccggggccgagcccgagtccgagccctggggtcgggcggagcggagttcgccgtcttccgggtcttagcccgagtccgagccctggggtcgggcggagcggagttcgccgtcttccgggtcttagctcgagtccgagccctggggtcgggcggagcggagttcgccgtcttccgggtcttagcccgagtccgagccctggggtcgggcggagcggagttcgccgtcttccggggccgagcccgagtccgagccctggggtcgggcggagcggagttcgccgtcttccgggtcttagcccgagtccgagccctggggtcgggcggagcggagttcgccgtcttccgggtcttagctcgagtccgagccctggggtcgggcggagcggagttcgccgtcttccgggtcttagcccgagtccgagccctggggtcgggcggagcggagttcgccgtcttccgggtcttagcccgagtccgagccctggggtcgggcggagcggagttcgccgtcttccgggtcttagcccgagtccgagccctggggtcgggcggagcggagttcgccgtcttccgggtcttagcccgagtccgagccctggggtcgggtggagcggagtttcctatggcgcctctggagaggtctgactgcctgtcagactcactctgtcgagtggcattgcagtcggagtggcgcaggcggcgctgtccttctgtcagaccgctttatgctgatgggggttaccagctgagaattaggcgtcttgagggtacccctaattatggtccccgacagtag

SEQ ID NO: 36046 - DNA, 433 bp, Zea mays
  Peptide Sequence Number=SeqID_79421
atgggcaagaacaacaagcgcaagcgtgagccaactcctccatcggaggattttggtgactcggagtactcagaggaggagttctcctctgagtctgaggggtctccggctcccattcccctgcgtgagtcgtctgacgactcagacgactcccaggggctcgcggcggaggtctggacgtacatccaggccgtcgagcgcttcgggctcgagggctcggatgagtcggagtactcctcagatgaggaggactcggacggcggcggcgaggacgaggacggcgacgacgacgacgacgaagacgaaggcggtggcgacgttgacggtgatggcagcggcaagggcggcggcggcgacagcaggggcagcaaccggggcagcagcaacaggggcagcaaccagggcggcagcggcggccgcagcaacagggcca

SEQ ID NO: 36047 - DNA, 141 bp, Zea mays
  Peptide Sequence Number=SeqID_79422
atggttggtttgcaggtggtgatgaggatgatggttttttattatgattatggtaccggttgtcagcgttgcaaccactgctctagtgaagatgaagtcgtggaggacttccaggagttccaagagtacgatgagttctaa

SEQ ID NO: 36048 - DNA, 588 bp, Zea mays
  Peptide Sequence Number=SeqID_79423
atgggccgttggattagaatcccacggatcagatcagacctacctgagattgaatcggggcgaggcgagaaccgcacgatccatgatctacggcaacgatcgaatcccaccgaatcgctggttgatccacactcgatcccagatgtcctacgaacacacccggtcacccacgggctgcccggcggcgacgtacgcgggaggcggatgcggcagcgagttgatcccgagcggatcgtggcggcgcaacggcggtataaatcacccgaggcaatacgtggattacggcagtcgttgcgcgacggactcggcctccctcgcgcgaagaccgtgaatcccagtagaaatcgcgtggagtttgttttggtcgcccgcgaggaagacggacctagtagatgggccccaccggcagcgtttagtgaagcggagctgattttgggctttacaaatcctaccccccttaaaaataatctcgccctcgagatttgtgtatatgcagatgtaattatggatattactccacaacccatcacactcaatcaaagatccaaatcagacaagtatcataagaacaaacattcaagttcatag

SEQ ID NO: 36049 - DNA, 807 bp, Zea mays
  Peptide Sequence Number=SeqID_79424
atggaccggccgattccggccaccaccgctgtcgagccgtacctcactgtgaccgccagaacctcccggagccaaccctgcccctcgccggacctctctcgccgccgtgtcagcgactcagagaaatggtggcgcaggggtataactgaagggattgatttagaaagaacccaggctagtgcttttggcaaacaaacccctcagccaaacagctgcatgtctagaggtagaggagtagactcctcacaccagatgacttctcacggatcctcggacgaagggaatgcacagtcccacacggacggacttgcacgagagggttttccccgtatcttgtgggaggtacttcagggagctggttacacgacgcctccccagtatgcggtgcagctgtttgagaagcaccgagtgccccgctgtagggtgaggatgaccctagagcctcatcccctacagccaggctggcgttcgctggattctgagtcttttggatacagggctgaggatactatcgaggcgattgctcttcacggactgaccaccttctgtggttttcaccccttagagctgcccactcaccccattggtttgttccccgcggagaaggaggacgacccaatgtggaaggaccgagtggagcatgccaaggatatatgggctatctacctaggtcagactgctcacttgacggtgcggtgcatgaatgccctgtatcgtctgcaagtgatgcgaggagaggcaatgtctcacctaatggcattgttggaggctactaagatcaccttggataacagggaggaacttgtg

SEQ ID NO: 36050 - DNA, 657 bp, Zea mays
  Peptide Sequence Number=SeqID_79425
atgggcagccgagaccatccgggagctttccacagaggcctcgagggtcatctcgtcgaggtagagtcgtcggtcggccagtggcagaacccgccgccggtggaaggccgcgacaactccggccgcggtgaaaccacgatcccgaagcttccgcagggcctccagcaacgactccaggtgggtctggagctcctaaagcagaccccacctccatcgctcctccgctccgaggatgacgtggtgcgtgaatgctggcagccacccgtcgtcgttgtggaggtagaaccatcgactctgccatcccttattgaacgaggtaagggtggcagctgcatcccaatcgaccgcccaacccggtggcagggtggtaggccaagtcacactgtcaaccatttcctgaagcgtacctgcaaaaattgtgccacaagcaaggctgggtatactaatactcagctagacttacccggttacaaggggtcaagcagtctcattagctgcgagaagcagacgattcgaatcgagttttatccttgcaaggtagagtttactcttgctacaaaagatttttgtggcatacttagcaattcagggtcaagtggcttcttactgatgtataatcctctgtttcaaaatttgggttttaacaatgggttctag

SEQ ID NO: 36051 - DNA, 1557 bp, Zea mays
  Peptide Sequence Number=SeqID_79426
atgtcttcgcactcccttcatgcatcgcgtccttccacctcccgagcccctgaatggggagcactcacgtcgctttgtcttgctgtcgttggaggaacgcaacttcgcggaagttggtacctttcagccatcgctcggcttcaaggattttcatcaggcagcccggctgcatcccctcgccggtggtcacccaagacggtgaccaccagttctatggtggggagaagcgagccgagctgtggcctctgccccgccctcagcttcaaggatcttcattatccttgctggggcggagggcgggctgagccggagctctaccttccgcacgggttcgtgggtcaccctctccttcagcattcaggggagagggtgctcactggcctagcggaaggggcggactccaacaacgcggagctggtcggccgcgagcgtcgtcagcttcagcgcgttgggctcgctggctcagctggctctagctcggctcccggtgccccctcccgccgtacgagcggtcgccgtgccacgcgctacgaagggccacccaagacgtcgtgcgctgctagggcggcgttcgtgttcttgggctatcctgcctttgctccggtacgacgcctcttgcgcggaggtcagtggtcccctgtccgagaggatccgagtggggatctgcgggtgggcagatggctgccgtcgttgacgttgaggtggtggcggctgaagaagtcctcgttgccgacgagatcgccgccaccatccgcgctccgggcctccggctctttggctttgatagcttgtcctcgcccctcgagtggggacgtgggcgaggagctcgtcgcagcagcgtctgccctaaggtcatcgctgctgctgtttggccactcggagcggaggtcgttgtcgctactgccggagtgggcgtcggcgagccaccaggggttttgtcgccccgcaggccctccaatgtggggggttgaatccctcggctcggtcggccttgccgcccgaggcttcacttgcttagtcgaagaaaccctcggccgctctgcggtgagccggggccgagggcagcggtgtcagcatggacagaggcggagttggctcgaaaaaggaagcttcgtcggccggggcttggccgggtcgtccactggcgggaccaacgccggagtcgagttgtcgaggccacgagccaggctggtgtcctcgggggacagctggctgaggcttcggggcggtcggccgagccgtctgctcgggccgggttcctggaggagaccctggcggcgatggcctgggcgtggtgctgacgtcgtctttcggagcggagatccttcgcccgtgttgccgtccgaggctcggtcggacttcgccgaaggtggagttgacgccgagggtgctgctgctccccctctatcgacgtctgagcctgcaggatcggttcgcctgtacaggatcgctcatccgaacgcgagttacttctcgcagaaggtgatgagtgagacttcatatgtaaacgaggtatatgaacggcttgaaaacatcttaagggtagaagcgacgtag

SEQ ID NO: 36052 - DNA, 540 bp, Zea mays
  Peptide Sequence Number=SeqID_79427
atgggcacgattcaggccaaggctccgctcaagggaaacgatcccgcctcgcccgagcccgacctcggtcaaagacagccgaccctggaagattcacgcctcgcccaaggcgccgcctgccctgctccgactgtcgtgccactcgccagagtgaggtcgacagcggctaagtccagcctcgggcgacataggaagctccgcctcgctcgaccccagggttcggccccccgtcttggcctcggaagatggacttcatctcgcccgaccccagggctcgaactcaaccacgactcggaagacgatggactccgcctcgcccgaccccagggctcggactcaaccacggctccggaagacgatggactccgcctcgcccgaccccagggctcggactcagcctcggccccggaagaatcgccacctcgcccaaactcgggctcggaccgaccacgtcgccagggggggccatcattaccctaccctgagctaactcaggctgcagggaacaagaccggcgtcccatctggctcgccccagtaa

SEQ ID NO: 36053 - DNA, 2041 bp, Zea mays
  Peptide Sequence Number=SeqID_79428
atggctccgttgcatggaggcttcagcgcgggaaagtcgggtctctgttgcgatttactcgctcgacgtcgtgggccatccgggtttgcaccaatccgtggacccgggggatatctatcccccacagtcgtcgaccgccgcgggaaaaaaccagcggctgtgactgaggacgaccccacgccggaggccaccctagccactaaaaagaggaagctaggtactgcggtgggagaactgggggtctccgatagctttgctatggagttgatggggacatgcgcggccctcgggggaaggatgtcttcgcccgagctccgggagccttcggcgcgaatgctagaggttaccgggggtcgatggcccaagaacgttcctatcccccgcgcggctggcgaagacttctttacgtctcgcatggctcgtgacttgagagtgtttccttacggacggaatattgttgttgttgtgtcggcagtgatgaacaaggaccgccagggtgctacgcagaagcgctgggcgatcatcaggctccccgatgctaggccgaagagggcgcgggggactgagaaggctaccatccccggcggtaaccagccgcccctggcggcgaagccgaccgcccctgggtccagcaagttgccggagagcgcgaaggtggtcggcgccggcggaaccaagtctgcctcggacggggctgcgaaggtccgagaattgccttcgctggggaaacgtgttgccgacttcggcacaaatattagcgtggacgactatctcgttgggtggcgctttcagcgttggcggcgagatttcggcggccactgccgtcaaggacgaagcgggcactttgtcccaccggctgagggaggcatcgcagtagctggcgcagcagctgagtcaaacgtggctgccgaagtcgagagacttcgggcgcagcacgcgaacgccgtccgggagaagtcggccgcggagagcaaaagccgcaggctggcggagaacgtggcttccctagagggagagaggacggacctccggcgccagctggtggaggaaaggagggaggccaaccaggccatcgccaaggcgcaggcggcgcaggcggaggccaagcccgcatggagagggcccaaggcctctatgcgctcggaagttgagcggacgcgcaaacagctcgtggactcataccgcgagctgggtgcgcggactgctgacttcgaggtgcccgaccgagaggcgggccttcgcttcctcgagtggctgcaagaggaattgctggcactcccgaccatcgtggagggcttcatgtcctttgcctccctcgtcacctgcgaaggggccatgaatgcgctgtcccgcgaggggtgcaatcactatgagggcttcgaccgatccgatgaagactttgggcgcgagatttttaaggtcgaagaccatgtggtgaaggactccgcgggggccctctttgaccggatgtggggccccacggtcgggaggcggttagggagcggtctgaccgagcaagggatcagcgcgcagcccgaagcggaggtcaacctggtggaggccgaggctgaggtcgacccggtaccacccccggaaactggtgaaggctccctcgctgcccctgcgtctactgtgtctggtggaggctcgtcgccagccactgtgccgatggcggaggatccctcgaagacggcgacggagttggcagcggaggatcccatggcggcggctaggtcttcgcaggattttgggcctgcgcacgcaaccgctactgctaattttgtggcggcttcgaccgtgggcgctggaaatgaatcggatgagtctacgtctaagttttctgagtttgatgactctgggagttcggttgtgtggacggaagagtcttcggatgaggacttggattactttgcggccttggatgtggctgtggcggaggcttctccgcgtgttacggatgctgaagttttgcctggtccgagtgctgggcgtaagcggcgaagggcggtggtgaagcgtagagtgagtgaagtggatggtg

SEQ ID NO: 36054 - DNA, 357 bp, Zea mays
  Peptide Sequence Number=SeqID_79429
atggacgaccaagtcactccagcaaccatgtcctccagggaaccttacaatggatcaagcagtctcattagctgcgagaagcagacgattcgaatcgagtttttatccttgcaagtgaccgcacttgtacccaccataaccggaatgggagactacgtctcaggtcgtgtgaggggcaaagtctactgccaggttcaatcaggagtaaacagggcggcgcggcttaccggctgcgagggaggtctggtgaagggcggggttggcttcgggaggttcttgcggtcacagcgaggcataggatctgctccatgccatcgaacttctcgtcacgctgggctcgtcctccaggtcttgtag

SEQ ID NO: 36055 - DNA, 432 bp, Zea mays
  Peptide Sequence Number=SeqID_79430
atgccgcacgcgccagccatcgcccccgcatgccacacgcgcaccaatctcgccgcacgcgccagccatcgcccgcgagccctcgcccccaccaacccagcccccgagctcgcccgcgcaccaatctcgccgccggtgatcccgcccccaccaacggcgtcacagagcctgcccacaccaaactacgccccctgccctcgcccttgcaaaggacagtggccggtggaggtggcgtgtgcggtggccgtcagagccgtggagaattgttgcgattgggtctcattgttgcgattggaggagcacggcggtgacggagtcctccttggggaagtcgaggaggtcgtcgatgtgtccctcagcggcgggggcggctgcgtgcagtcccttggtggcgatggcatgcctgggagtgtcgtttcaaatgaggtatag

SEQ ID NO: 36056 - DNA, 504 bp, Zea mays
  Peptide Sequence Number=SeqID_79431
atggcggccaggtggagagctcgcgccatgggaggaagagctccttctggttcccatgggagatgtaggggcgcgttggagagaggatggagcagcggcgttgcgccatggctgagggcgcgtggagcagagagctcgcagggggcgacgaccatggaagtcgcaggggcagagaggagcttgttcgtgcctagggaagggaaggggtggcgctgggtagaggaggtcggctgggagatgtggtgccatggaggagaggaggagctgagctccctgcttgctgctcgccatggacagcagagagggaggaaaatttacttgttgtgctgccgtgtgggagaagacaaggagagtgtgtgcgtcggctggaaggagaagagaggagcgacgtttaaaggatggctgcaacatggtgattggctgggaggaatggcatcacccattggcgcagggactcggcggtcacgcattggtcaaattgggcggcgcgggctattggcgtag

SEQ ID NO: 36057 - DNA, 453 bp, Zea mays
  Peptide Sequence Number=SeqID_79432
atggcgctgctgcccctatggtctacctgctgcgagattttgcctcgtcgcactcgtcgtcgggctcgtaccgggtgttcgcagcctgtccgtgacagcatcgacccccgcggcggccttgtactcgcgctgctccccgagccgagaccttgcacgcagcagcaaggcccagatcccctctgcatcgtgtgcttcgctcgatctgcgcagcgcctgcacgtcgtcgtcgaaacccttgggggtacatttattgatgtgacgagtagtttagaaaatgctagttgcgtggaggatgtattgttaagacatgattgtcaaagttcatatattagtggttacgctacgatgatcgaagtgtctcgagtgcacgccacaatatggttgtatgcgagacagggtaaaataaggtgctcatttgatgttgagttcacccttttggctgaaaatgcttag

SEQ ID NO: 36058 - DNA, 342 bp, Zea mays
  Peptide Sequence Number=SeqID_79433
atgagggtggtatgggacgcccttggccaagtaattatggaagtcttatgttgggtgctggttttggtcattggggacggaggcatctgttgtggctcctatattctcgctctgggatctagtgctcattcccatcagtcgcatagtgaggaccctagggaaaagccacgtagtgataccctgcccgaccacctaggaagtgatcaattgggagtagcgctcctcgggcagaaagggaatcatggctcatgggtaaagtgtgcaacctctacagagtgttatgaaaccgatatatcagtcgtgctcacggttatgagcggccttgggatcctctttgattag

SEQ ID NO: 36059 - DNA, 324 bp, Zea mays
  Peptide Sequence Number=SeqID_79434
atggtgactagctccggggccgatgggatcgtgcccgcaggttgcctgtccttatggcgagccttgtcatattggacagttggtttaaaaaggttggtcgcaaagacccctgaagggacggttatttgtcctgacactattttttgcgagagcattcgccatttcgttgtctcgccaagggatatggttcagttcaaggatgtcaaatcgttcctccagccggcgcacctcctgacaggtgtaggagatcacatatcccatcaactcgagagcccatttggcaatcctcccagaaatgtccggattgcggctcacatcgcctag

SEQ ID NO: 36060 - DNA, 204 bp, Zea mays
  Peptide Sequence Number=SeqID_79435
atgacgcgagatcacgcagtggtgttcttagccgttttgggggaaattccaaattcgggggctgtagtggctaatcggaggcgagaagtggtgctctggctttgtaacgagctaacagagcaggtcggggcatcaatttatagtgatcaacagcggtggcgcccaatttggggaagacatgctggcagccggagcaagctctag

SEQ ID NO: 36061 - DNA, 468 bp, Zea mays
  Peptide Sequence Number=SeqID_79436
atggcgcgggctgcggctggtggcaaagatcgtgatggtgttggcggcggtcggggaggtcttgttaagatcagaccttatcaaatcaagttccgaggagcgctccttgctaaaaacctaggcagttggttgggaaagttcaccattggtaggaatcaggcactaagggctaaggagattgatccaaaatctcttatagtggaggcatatgagaaaggattgatgattgcggtcataccattcacttcaaagatccttgaaccttgccagtcaagtatcgcatatcgacctccaaatccctggaccatgggaattctaagtctacttgctgaaatttataatcttccaaacctcaagatgaatctgaaatttgatattgaggtgctatttaagaaccttactgttgacattctaatggagttgtcagttttctggacatctgacaatgattactcaaagataaactaa

SEQ ID NO: 36062 - DNA, 354 bp, Zea mays
  Peptide Sequence Number=SeqID_79437
atggcgctcgaggctggacttggctgctgtccgcctcaccctggcgggtggcacagcagtcggagcagtgcaggcggcgctgttttcctatcaggtttcgagttctcgggctggtatgttgacgctgtcaatggtttggccgaagccgggttcgcgagagcaacccccgagcgtccgcaccgggcgagaggacggtcaaggactaactcggcttttttgatacgcccctttgtcgcctttccgcaaggaggaggggggcaaagcgccatgttgccctcagagggcgccgaacatggtgtctccagtgagttgctaacgggtgatccgagtggacgcccgtgccccgttcgataa

SEQ ID NO: 36063 - DNA, 321 bp, Zea mays
  Peptide Sequence Number=SeqID_79438
atggcgaggacctttttacggtggtggaaacccgattttggggaagtgagcaattcgggggctcaggtgaacaattggaggcatgagtgggtgtgctgggtgcttgaatacctagcaaagccgagggtgtgctcaatttattgggcccttgagcggtggctcgtgaatttgagctcgcgcggtggcggtcggagaggaagaggttttagtggcagtaacaccaggggtgttacagaacggggctacgacatcctaccagcggtggcaggcccactggcgagcggtggctgctgcgaggctatggatgagatgagtctttga

SEQ ID NO: 36064 - DNA, 726 bp, Zea mays
  Peptide Sequence Number=SeqID_79439
atgcaggcgacatgcaaccgcaccacggggatgcaccctttcgactttgacgcgtccagcatggagtcccaggcccacacgtcatatcagtcagccgcgggagaaggcgcgacgatcgatatggccaaaagtgggccaacaataatggtggcagcaggcgagcggaagcggcggtcaaatcgtctgcaggctcacgtcccctcctggggcagcaggagagccctctcccacggcgtgaagacgacgcgcccgtgttccgttcctcgaacggctcgcgcaacagctgccccgcgaaccactcgtcccgtcgcattaactccgcggcagggcaggcgacacctttggcaggcgaagcgggcgatgcttcacctccgccataatgaccttgtcaaaaaagggaccgggaaaggggatactccgaaagggatccttctctgcgaaggaagcgggccccgagcccccctactgatcagaggttcgaaggctggtccctcggaagggttcgacagccgcctcagagcactcgggctccgagccctcctactgatcagaggctggcccctcgaagggttcgacagccgcctcagaacatgcagagcgagggatgactctgggtacgtccgatacatggtcgaggctcaggctacgctctcgaggtcaaggctccgtccactcaagggacacgatctcgcctcgcctgagcccagcctcgggcaggaacagtag

SEQ ID NO: 36065 - DNA, 1077 bp, Zea mays
  Peptide Sequence Number=SeqID_79440
atgcaacaaattatagtgaagaggctcctcccgtccctgtcgcttggtggatcacccccacggaaccaccctagccaaagacagagttcattttcctctccaagattcaacctcatagcattgctgtcgtctggtgatagatatgcattaccgagcttcaacgaactgaactcgagctttgctgtttcatctatgatcgttatttccataaccgagtccgccaccgagaagaaggagaaggctctagtcgagaagaagaagtccattgagagccgcaagctcatcttcacccgcgcaaagcagtacgccgaggaatacgaagcccaggctggtaagcaagcacgaccggagaagtttgagatcccagctaaaatcaagctgacactgcagccatggacgtcgagcttaagaggtggtcatcaagaaggcatacgagatggaccttgcccagttgtacagccagtgacactattgctacagtttttcaaggataggggagatatgcacagccgatacattcctcagcaagattacttctcagagggactctacacgttcgatattgggcagaatgaccttgctggccccctcggctgcttgcctcaaaacatcgccctgttcggcaaagacccatcccaactggacgagctccactgtgtggcgaagcacaaccgtgccgcaaagcttttcaacttacagctgcacgcactttgcacgaagctgagggcagaattcgatggagccagcatcacttacgtggacatccacacgatcaaatacagcctgatcgccaactactctcgatacgggttcgagcacgccactcaggcatgctgtggatacggaggcccacccctgaactacgatggtaacgtaccatgtggacacacagtgtctctggatggtaagatggtcaccgcaaaagggtgcagcgacactactgaattcgtcaactgggatgggatacattacacggaagctacaaatttctatatcgcgtcgcagatcctgaccgtgaagtattctgatcctccgttcgtggataagatgtcgttcgtcataaaacctagattctga

SEQ ID NO: 36066 - DNA, 633 bp, Zea mays
  Peptide Sequence Number=SeqID_79441
atgaatcttatcttctggctcttgcatttgtctgaaggccttagcaaatatgatgtcagctgcactgcctgtgtcaaccaagacattgtggaccagaaatcctttgataacacaagagataaccatggcatcgttgtgtgggtaatctttgagctgaaggtcctcttgggagaagctggctctgaggacgagccacctgtgatcgggagcaccagcttcgggtccgaagcagctccagcttggtcgttgaacgaagccatcagctcaaaaagtggaaaaatagagacaatatcgaattataaatgtaccttcggcttggaaggagatgaaagtacaagtgtgacgcagaagcaaatgccaagtcaacgtgaacagtacgggggtactgttcacctatttataggcacggggtacaacccatacaaaattacatacatgccctttacatttggtgataattctatagcactctatcgaggtctaaatggccttttcatctttaagtcggttcccttttctgcgaacatgccgaagctttcctgcttcacagcttcggcgctgtgtcaacctttgtatcttttgagcttctccctttctgatacaagtccgaagatacctgctcacacattataa

SEQ ID NO: 36067 - DNA, 468 bp, Zea mays
  Peptide Sequence Number=SeqID_79442
atgggagacccagtctcaggacgcatgagggataaagtccacgcccgggagatcctcgatagcagcctcgggagcttgctcctggtcctcctcgtggacagttccttgctcggggatgagcacagttccttgctcggggatgagcacgcgggggagctcgtcggcggcgaggagtccggcctatccagggcacaattgaccaatcaaacgggtcagagagattcaccagggatcaaggaaggcgggcggccgaagtccggcgaggtcgatcttggctttccggtgaagttccgccgggtccgagggctgggaaagcttcacaagctaatggcgaagctaaccgagtggctagcacggcttggaagcaactggggtgggctggccacggtggccgaggctctggtggcaatggcgggcggaaaagagttaaggacgggcgtctggccggtgaaggtgagcatggggtga

SEQ ID NO: 36068 - DNA, 387 bp, Zea mays
  Peptide Sequence Number=SeqID_79443
atgtccgagggactccatgcaaatatctcagcatttgcgcggaggaagtcgacgatcacctcttcctatttgggctcgagttgggagctaatccgcaacgtcatctcaccggagctactggggtcgagagggacggtcttcgttgcttccgccggctcgaagcctactggggtcgagagggacggtcttcgttgcttccaccggctcgaagctaccgacatgcctcttagggtcgggaacctcccctacaaggttctccaagttgacaatcagcgcttcggactctacgagtgcgttggtgtactcaacgcactcgaggttgcactcatagacgcggcgatacatggggccgacggtgatgacgcctgctggtccaggcatctttag

SEQ ID NO: 36069 - DNA, 177 bp, Zea mays
  Peptide Sequence Number=SeqID_79444
atggcgaaactaaccgagcggctggcgcggcttggaagcaactggggtgggctggccacggtggccgaggctctggtggcaatggcgggcggaaaagagctcaccggagttaaggacgggcgtctggtcggtgaaggatttgagctagggatcaaggtgaacacgcctggtctttag

SEQ ID NO: 36070 - DNA, 297 bp, Zea mays
  Peptide Sequence Number=SeqID_79445
atgaataaactccatgaagaatgctatcgcttggtcggatttgatgctggcgagaggtcggacctcgatccactcggagaatttatcgatggcaaccaacaggcaccaaacctcttcgcaattggattccattcttgcattatggcagctcaagttctttatgacctggtcaatgacgagttgggagtccccttagacatcgaggcgcctgacactgagctctatggcgatgcgcaggccattgaccagggcttcgtactgggtcacgttgttggatacaacgaagtggagccgtag

SEQ ID NO: 36071 - DNA, 420 bp, Zea mays
  Peptide Sequence Number=SeqID_79446
atggctcagccaacgcctcgggaagacttctgcctcaaccaagtagggaatttgatctcgataagcacaacaggaaatcttgacattatcccgcgccaggggcgtcagcgcccctggaaccgagtgtttcttttacaaaaacaaccaatcgaaggggtatcgggctccctcggccgttggatctcggatcaacagtcaagattagaccgggatctaatggtcagcctgagcggggggttccctagccgccagcagtggcgccgatcgtgcccacggtggaggttcgccggagatgagggcgagggcacgcggggccccggggcaccgggaagggctcagggaggttcgggggaatatggtgaacgcgactatgggcaccgcaccagcactggggcactggagggtggtgttccatggtga

SEQ ID NO: 36072 - DNA, 1260 bp, Zea mays
  Peptide Sequence Number=SeqID_79447
atggggcagagcatccaaaacgtctgcttagctaataacgccaccttcctcagcgccctgcttctactcgccgttaccacttccggcggcccgtccttgcaatgttgcctcgcgagaagtgaaacccaccggcgtccaccaccgacgccaccggacggcccacaccatcctccggcagctccggccttcgccgacgcctggtcggcggcgtgcgcagccgaggcgtcgacggttctggtgccagcgagctacgtgtttctagtcggacccatcgcattcaccggcggtgattcttgcgagcccaacgtcgtctttcaggtagacggcacgatcctggcgaacacaggctccacggcatggcgctccggctacgcgacgcagtggcttgagttcaagagcgtcaggggcctcaccatccaaggctgcggcgtcatcgacgggcaaggaagccactggtggagccgcaatcctctcgtcgaccaaggccagacgacgacggcgttgagggtgtaccagggcgacaacgtgaccgtgacgggtataaccatcaggagcagcccaaagttccacctcactctggacacctgccgcgcggtggaggtgcacggcgtcaccatcgcgtcgcccggcgacagccccaacaccgacggcatccacctcgcctcctccgtcggcgtctccatccaccacaccaccatcgcctgcggtgacgactgcgtgtcgatacaggccggctgctccgacgtgtccatccgcaatgtgtactgcgggccgggtcacgggatcagcgtcggcgggctcggcaagggcggcgccacggccaccgtctccgacgtcaccgtacaggacgtcacgttcaaccacacgatgaccggcgtcagaataaagacctggcagggcgggtctgggtcggtgaagaacgtgcgcttctccggcgtgcgggtgtcggcggtgaagacgcccatcgtcatcgaccagtactactgcgaccacacggcctgcaccaaccagacgtcggcggtggccgtggtgggcgcggcataccagggcgtcgccggaacgtacacccagcgcccggtgtacctggcgtgcagcgacgccgcgccctgctcggggatccacctggccgacatccagctccagcccgtcaaggacagcggctaccgcgtccagggccccttttgctggaaggcgcacggcgacgagatgcgccccgtcgagccacccgtggactgcctaataaccgccggagctccatga

SEQ ID NO: 36073 - DNA, 2082 bp, Zea mays
  Peptide Sequence Number=SeqID_79448
atgcccgtgggtagccggcactggcacataatgctgcccgtggtgagtggtgggtgtgagcgcggatacacaattttactggcgggaggcgggtacagcttacagacagcatatttacctacacttgactatttatcacaggtggctgatgtccataacgatcttcgagatctgaaattcattgctgatccagcagaagaggatgctggaaaagtaattctggagatgcttcggcattctgaagtatccgaacaaacggagcttcagactttccttgaagcagcttccaaactgaacattacatcacctaaagctgtcctaattgaaagaagagcaatcaagaaactacttgccaagatcaatggcactgatcataaaaaggaaggaatccttaagtacctcctatatcttgttaggaaatatgggaagaatgtcaagccagagactgatgaaaagaatcaaaatctgaatgtggcaactgaagttttgagtttagactctgttgttaatgtcatcaatactgcagaaatatgcatttcagctacagagtctgccaatatgatatatgatggtcagagtagtttatctggagcaaccacaccacctcaagagctctgctgcccattgtctttgaagctgatgcgagatcctgtgataataacatctgggcaaacatatgaaagagaaaatatcgagagatggttcagtgagggatatgatacttgtcctaggacaaatatgaagttaaagaacttcacggtaactccaaatacatgcatgaaggctgttattcataactggctcaaagatcatgagcttgaatctactgatttgcctaagcaatttcagaattattattctgtatcaagtttgcacaatatctctgcacctctaattatagaaaagaatagagactacacagttgattatagcagctcatcttttggactatcaggtgctagttatatatcatcccccatgagggaaacagagcagtcaaagactagttttgaccagttttattctaatgccaatttccagttgtatttgtccttctgcaactttgacaaggcaatgttcttgggtttctttcatgagctatccgagcttccctttgaactgcaaagaaaagctgtcagagatttgaagacttctctgagcggtgaaaatgaaatttggcattctatggtctacaatgggttttttgaagcattccatgaattcctcaagaatgacagtggaattcacacactgcaagctcgaagggctgggattcagttttttcttgctttcctttctagtggcagggctcgaattccttcagtttgtgaagatgtggtacttctgattgcatcactacatgattccgagttcaaacaggaggctcttctgattgtacatgaactgcttcaggaaccaagctgtccaaaatctagtctcatggcctccattctttctccttcagtgtttggagctttggacagtggagaaaccaagtgcctggacctcgctctgcagatcatctgcaagatttcatctgataatgatataaaatcttaccttctttcgtccggaatagtgtcgaggttatctccgctccttggtgaaggaaagatgacagaatgctctttgaagattctacggaacttgagtgacgtgaaagagaccgcagggtttataatcagaacaggtaattgcgtcagctccatttcagatcatctggacactggaagccacagcgaacgtgaacatgcggtggtcatccttctaggggtatgctcccacagtcctgaggtttgttcactttccatgaaggaaggcgtcatcccagcccttgtagacttatcagtgagtggaaccaaggtggcaagggattgctcggtcaagttgcttcagcttctgaggaacttcaggcgatgtgaccagttcagcagttcatgctcaagagagcttgctgtcgatcatgtttcagagaacactcgcaatggttcaatttgcatgcagccgatatcaaagtcagcccggtatatttcaagaaagctcaaccttttctcaaaacctcggtcgctgaccctggcttga

SEQ ID NO: 36074 - DNA, 1977 bp, Zea mays
  Peptide Sequence Number=SeqID_79449
atgagctgctttgtctgctttgggtcggcggcgcaggacgaggagcccaagaagctcgccgtcgcaggcgcccgcaaggacgccacgccggatcgcgcagtggcccgcgtcggatcagcgggatacactgctaaggaaatctatttcaagcattgggacttgcaaggccctgttattgacagtagtgatgtacatagactcagaaatttcatcaagaatgtatatgttgaacggagatattcagaccaaagaattggcgaacatttagcgcaagcaaagggtaatcaggactcttatggaaatagcaatgcagattcatctccaggagttttaagaagtgcatatgtcgaaacttatgaagataatcacgatctaaagcgcaccaaagaaagtctctcagaaaatcaaaacaatttggatggacatccaactgctatattgtcaaaactataccttgactgcaggaggtattatatatattttggaaaggaagctgcaaatccttttgaatattgtgatgtggttaccacaaccacgcacaagtccctcagagggccaagggctggcatgatcttctacaggaaaggccctaagccccccaagaagggccagcctgagggtgctgtttatgattatgaagacaatatcaactttgtagtgttcccatctctccaaggtggccctcacaaccaccagattgctgcacttgctgttgctctacagcaaactatgtcgcctggcttcaaggcctatgcaaagcaagtgaaggccaatgctgttgcaattggaaactatctcatgagcaagggctacaagatggatctccgcccccttggcttgactggaaacaaggttgaaaagctatgtgatctttgcctcatcacattgaacaagaatgctgtcttcggtgacaacagtgcattgtctccgggtggtgtccgcattgtcagtaagagtgtgcaggatcaagccggtggtgaaccaacggtgggggtggtggccgaggtgaaaccggaaacggatcgaggggatcacgaggacggcaagagtgtcgtgtccgagagcgagagcgatgaggactccgatgggtcagggagcgaagattcggaggattccgaggaggagaggcggagggaggaggagaggacgcggcgctcaaaatcctacacatatttcattggttatggaactgcttcagagttgcagactagtatgattgaaacattggaagcagtggagatagagaaacagagacatcacaacactagaatggaagcccttgcacgtttggctagacttgaggttacaaacggtgagcttgcaaagtcacttgccagggaacaatgggagctggaagttcaagtagatcaagtggcgcagcttcgagaggaagttgaattgaagaaacttgctcaagataaatacagaagaaagctaacaaagatacaaaagacaagtgcccctccggttgatgaaatagaatctttgagaaggttcaagttggaggaagaaattgttgatgcagaatacactctgacatgtgacagaattgtgaaggacaaggattccggctatcatcaagtgactcctcccccttacattgactttgcggacagatgtctcaattctaatggtggagctacgaacaacatatatcaattccgcgcagacctctgcaggacacataagttcgacggccacgtgaccccgtcgaacttaaccgtaagaacgtgggtgccgtcgaacttatgggaaaaaattcgacggcccccgtcgaacttaaaaacgcacgttcttaatgttaagttcgacggtacccacgttcttaatgttaagttcgacggtacccacgttcttaaggttaagttcgacggggccgtcgaacttacttctctaagttcgtccaaaaatcgtcgtcggctatattcgtcggtaaacccacgttcttacggtaagttcgacggcctattacattaa

SEQ ID NO: 36075 - DNA, 273 bp, Zea mays
  Peptide Sequence Number=SeqID_79450
atggcggcggagtcccttgtcttttccctttccgacctctcttctctcccatggcggtggatgcccgttttggtggcaggagcgcccccaaagagttggggcaacagaggggggtctcggtctttatacccacgaggacacaggcatgcagctaccaaggagaggaaagcggatttggagttgcatggttttcggagaagtgggtgtggccacggagaagataggcctgacatgcagggcccaccgatgcaaaagagaaaagatgataattaa

SEQ ID NO: 36076 - DNA, 435 bp, Zea mays
  Peptide Sequence Number=SeqID_79451
atgtcttcacccacccctgccaatggaggagacaaccgcttcagctttgactacctttcccacgagggctttccctctatgttgtgggaggtgctctgctccactggataccccacacaccctctgtacatggtgcagctatacgaggagcatcggcctgggcggcgttcccttgattccgagactgtcgggttcagggtggacgacaccactgaggccgcagcactaaaggccttgacaaccttctgtggatatcatcccctggagatgatgatgcacccacttggactcttccccgccgagaaaagggatgacccaatgtggtgcagcaaagccttgcagagcgacgccatgacacatctcactgggctcgctcaggctacaaagatcaccctcaacaatcgagaggacttcgtagtcaacttgtcttcgtaa

SEQ ID NO: 36077 - DNA, 384 bp, Zea mays
  Peptide Sequence Number=SeqID_79452
atgggcaagggtaccaagcgcaagcgcgagccgactcctccgtcggatgatttcggtgactcggaatactcggaggaggagttctcctccgagtccgagggatctccggctccccgctccgggctcgagggctcggatgagtctgagttctcctcggacgaggaggactcggacggcggcgaggacgaagatgacgacgacgacgacgacgacgacgacgacggtggcgacggcgacggtgacggcagcaacagcggcgggggcagcggcggcaagggcagcaccagaggcggcagcagtacgggcagcaccagaggcggcagcagcaagggcagcaccaagggcggcggcggcaagggcagcggcagcaaggccagtggctaa

SEQ ID NO: 36078 - DNA, 768 bp, Zea mays
  Peptide Sequence Number=SeqID_79453
atggggggaggagcgggtgttgcccgtggtgctggcagctgcagcgtgcccggtcttcagacgcgagtggcttcggagccgctcgcggcgccggcgtccgccacggcagctggaagaggttcttccgccggcgcgatagccggggccggccacgggctgacctccaacttctcggccttctgcccgtccttgcctcacaagttttggcatgggcgggggcctcctggcagcggcatccaccctgaggtcagcgttgccgctgttcggccccccggagcagaagtcatcgacgtcgccgctgctggagcaggtgacagcgcgccgttcgtcggccttccgttgctccgcaggccttccccctcggagtggggttgttcgtacctgcggagggggaaccggagttccgtttgtaatggcacttcggatgccagtgtttttgttcattgcggctgtcgaggcctgaacatcttagttcaagagaccccttggccgctcttcgatgagccgaggccaggggtagcgatatcagtacgaacagaggcggagttggctcgaaaatgggaacctggttggccggagcctagccgggttgcccgtcagcggggccgacgccggagtcgatcagccgaggtcccgggtcgggctggcgcccttggaagatggttggccgaggccccgggggtaaccggccgagccgcctgctcgggccggattcccggagaagtccctgaccgcgccgccgtccgaggctgggtcggacctcgctga

SEQ ID NO: 36079 - DNA, 435 bp, Zea mays
  Peptide Sequence Number=SeqID_79454
atgggcaaggacaagaagggtaagggttcatcgcgtcgctccggcgacaaacggaagcgtgaaccgattccttcgtcggaggactttggtgactccgagtactcagaggaggagttctcctccgagtccgaggggtctctggtctacgcttcccccccggcgtcgtccgacgactcggacgactcccaggggatagccgccgagggttcggatgagtcgaagttctcctcggacgaggagaactcttctgactcgtccgaggaagggagcggcaatgacggtgacgacgagggtgacagcggcgatggcggtgacggcggcgatgacggcgacgatggtggcaagggtggcggaggtgtcggcagcggtaagggcggcgacgacaggaagggcggcagcagcaacaaggccagtggcaaagcgtcactggcttaa

SEQ ID NO: 36080 - DNA, 849 bp, Zea mays
  Peptide Sequence Number=SeqID_79455
atggctcaccttgaagtccggtccacgtgcggtggcgagcagccgaagtttggtgaggtcgatctcactgtttcggcggggcagggccttggctcaatcttggaaaggcttcacggcctctcggggaagctgtccaagggctcgggcaagattgggggtctacgggaatcgctggccacggcgatcggtcttcggtggacgaggcgggtcgtggggaggtcgctggagttgcgggctggctcgggaaagctaggcacgtgctcgagtggatttgatctcgggttggtgagttacgaggaggtgaagttgggtctgttgcccagctggaacccgagaccaaagcaaagccaaatcatgtcatacaattttggtttgatttcaaacttcgccagagtgtgcctagaaaattttggcgccattttgctatttggaccatgtggttttgagttttggaacaaggtgaacgtggttgatctttgctccattgctctaaagaaaaaggttgttatggttttggcatttcctttcttccttaagcttaatatggtcaagcatcgtatttcccgtgcatcgtggagtctagggcgctcatttccccatgcagaaccatggccggacgggctcagccaccgtcgcaaacgggcagcaccactggtggtcgtggccaggcctgctcaggccatttctggccaggccgggactgtcctcgggcgcggcgaacgccgcgggtgccgcggcccgcgctcctgcgctctcccccgccgccggcgagcccccttggccggccagttcttccttccgtcgtgctatctggaggttgaagaaaagggaccatcacgcattttctaa

SEQ ID NO: 36081 - DNA, 219 bp, Zea mays
  Peptide Sequence Number=SeqID_79456
atggccatgatgggttcaacatcggaaaagatgtacctctgccaggtaccaaactttgggtttgaaatgataaagctgagactgggcagactaataccagaatggacaacacacaatgggagtggagagatggcgagagtagtgtgtaccctccgtggcaagaggctggacggtggtgtatctgtgctctcggttggtgtgaacccgatctggtcttaa

SEQ ID NO: 36082 - DNA, 93 bp, Zea mays
  Peptide Sequence Number=SeqID_79457
atgccggtcgccgttgtctggggcctgattcaacagcgccgcccgcattgtgatttcttcgccccaaggtgccgtaatgtcttcaccgcctag

SEQ ID NO: 36083 - DNA, 798 bp, Zea mays
  Peptide Sequence Number=SeqID_79458
atggcgcaaaaagaacacccgcgctccacccccgctgcgcgttgccccatagacgaagacgacgacgacccctccgcctccacctccgctgccatactgcccccgcctaacaactgcccgcccgatcctgccgcgacccccgccctccgccaaccgcctgccgtgaccccagcagcagtcgtgcgcccccagcacccgccctccacccccgctgcgcgttgccccatagacgaagacgacgacgacccctccgcctccacctccgctgccacgtctgttacccccccacaccaccacggcaccgaacgccttggcgacctgctcgaccacggttgggcgcgggccgaccgccagttcacggcagccggattcgacgatgtcgtcctcctgtgggagagagacgacgagccggtgggcgcggtgagggtgaggaggatggggccaagaggaggacagaccggattgccggacccgacgccgcttccccctgcgcacatcacgcctactctcccgagcttgccccccccccccgacgcaccgacgcgcaatcgcgcggcccccaagaccgacgtttcgtggctacagaggtgggtgccctacgacctcgacccctcccatcctacagcagctctggcccccatcccgtccccgaccaagtccatcgaccacatcgtccatcgcctctgcaacctcgccctcgacgacgacgatccctcctcatcttcgacgagacacaaaccaaatgtggcgtgcatatcttcagctcaaggaattcatcatccataccgaccaacgtag

SEQ ID NO: 36084 - DNA, 636 bp, Zea mays
  Peptide Sequence Number=SeqID_79459
atgtcctctcgctcccttatgcattgcgtctttccaccttccaagcccccggatgggggatacccgccgtcttttcgcctcatcgttggaggaacgcaactccgtgggagttggtatctttcagccatcgttcggcttcaaggattttcatcagccagcccggctgtacccccccgtcggcggtcacccgagacggtgaccaccagctcctgggtggggagaagcaagccgggctgcgatcttggtcccaccctcagcttcaaggatgttcatcatcctcgctggggtgggtgccgggctgagccggagctctacctcccgcgcgggttcgtgggtcaccctctcttgcggcgttcaagggagagggcgctcgctggccccgtgggcggcccggacttcgacaacacggggctggtcaacggcgggcgtcgtcacccccagcgtgtcgagctcgtcggcctggttcccggtggccctttctgccggaaggcggctgccgcgccgtgtgcatggggggaccgcccaagatgtcgcgcgctgctagggcggcgttcgtgttctggggtggtcctgcctttgcaccgggacggcgccttcacgcggaggccggtgccccactcgtccgggaggatttga

SEQ ID NO: 36085 - DNA, 99 bp, Zea mays
  Peptide Sequence Number=SeqID_79460
atgggtgtgcccaatctgttgctgatcccaatgtgggtgctccatctgttgctgatcccaatgggaagaaaaacgtatccttactgcttctcgcgatag

SEQ ID NO: 36086 - DNA, 447 bp, Zea mays
  Peptide Sequence Number=SeqID_79461
atggcgtgtttgggcctcggcggccgcagaaaacacacgctacaagataatccaatcctgcaggctcggatctcgatagttgaagggagcagcagcaccctcagcgtcgactacacctttggcgagggtcttctccaagaatccggctcgagcaggcggctcggttggtcaccccgaggcctcggccagctgtccctcgaagacatcagcccggcccgaggcctcggcagatcaactccggcgtcggtcctgctaacggacgacccggccaggctccggccgaccaagtcttcttttcgagccaactctgcctctgtccgtgctgacaccgctacccctggcttcggctcatcgaagagcggccgaggggttcctttaactaagcaagagaatcctcggacaacaaggccgaccgagccaagggactcctacgcctccgggatatga

SEQ ID NO: 36087 - DNA, 1149 bp, Zea mays
  Peptide Sequence Number=SeqID_79462
atggcgggcggcacgaggtcacgttgtcccgtgctgctgctgttgctcctcggcgtgactgctcgactggcttcaggcgtcgtctccgacggcctattaccaaatggcaacttcgagctcgggccggcaaagtccgatctgaacggcaccagggtgatgaaccaaaactccgtaccgaactgggagatcttagggttcgtggagtacatcgggtccgggcagaagcaggacgacatgatcctaccggtgccggaaggcgcatgcgccgtgcgtcttggcaacgacgccaccatccggcagaacctaaacttgattcgggagacgacctactccatcaccttctgcgcggcgcgcacctgcgcccaggccgagaggctcaaggtgtccgtcgccgccgagtccggcgtcctcccgatccagaccgtgtacaccagcaacgggtgggactcctactcctacgccttcagagccaggcacagcaccgcgtggttcagcatccacaaccccggccacgaggacgacccggcgtgcggccccctcatcgactccgttgccatcaaggccctgaaccctccgcatcttaccaaggaaagccatacggccggtttaagccagcgcagcgaacatgcagataacatgctgaggaacggagacttcgaggagggcccggtcatcttcccggacacggcgtggggcgtgctggtgccgccgatgagcgaggacgacgtgtccccgctgccggggtggatggtcatgtcggacacgaaggtcgtcaagtatgtggacgcggcgcaccacgcggtgccgcgcggcgcgcgcgccgtggagctggtggccggcagggaggccgcgctggtgcaggaggtgcgcaccgtgcccggtcggcactatcgcctgtcgctcgcggtcggagacgccgcgaacgggtgcgagggccccatggccgtggaggcgtacgcggcgcgggcgacgctgaggacgacgtacgagtcccgggggaatggcgggagcaagcgcgccgtggtcgacttcacggcgatcgcgaacctcacgcgcgtggtgctccagagctacaaccaccacatgaagcccgacgggacgctctgcgggccggtggtggacgacgtctccctcgtcggcctgcgctag

SEQ ID NO: 36088 - DNA, 1128 bp, Zea mays
  Peptide Sequence Number=SeqID_79463
atggaggggcgcgcgagctcacgtcgcggcgtgctgctgttcttgctcgtcggcgtggcttcggccaatcctgacgggctactaccaaacggcaacttcgagcaaggtccagacaagtaccagatgaacgggacctgggtgattggccgcaaatccataccctgctgggagatctcagggttcgtggagtacatcgtgtccgggcagcagcaggacaacggcatggtcgtggcggtgcccgagggcgcacgggccgtgcggctgggcaacgacgcgagcatccggcagcggcttacagggatgacccggggcacgtcctactccgtcaccttcagcgcgtcgcgcacctgcgcccaggccgagcagctgaacgtgtcggtcgccccggagtccggcgtcctccccatccagaccgtgtacaccagcagcgggtgggactcctactcctacgccttcagggccaggcactccgccgcgtggctcgtcatccacaaccccggcgtcgaggaggacccggcgtgcggccccgtcatcgactccgttgccatcaaggcactccaccctcccagtcgcaccgccaaggacaatatgctgaaaaacggagacttcgaggagggcccgtacgtgttcccggacaccccgtggggcgtgctggtgccgccgatggacgaggacgacgtgtccccgctgccggggtggacggtcatgtccgacaccaaggccgtcaagtacctcgacgcggcgcacttcgccgtgccgcgcggctcgcgcgccgtggagctggtggccggcacggaggccgcgctggtgcaggaggtgcggacgacacccgggcggtcctacacgctgtccttctccgccggggacgcggccgacgggtgcgcgggcgccctgcgcgtggacgcgtacgcggcgcggggcaggctgccggtctcgtacgagtcccgcggcacgggcgggttcgtgcgcaacgagctggagttcgccgcggtggcgaacctcacccgcgtcgtcttccagagcatgggccactacatgaagcccgacgggacgctctgcgggccggtcgtcgacgatgtctccctagtcgccgtgcacaaacacgctgcccgccggttgttcatgtag

SEQ ID NO: 36089 - DNA, 573 bp, Zea mays
  Peptide Sequence Number=SeqID_79464
atggcatatcgcaggcagctgccgaacggcaacttcgaggacgcgccggcgagatcgcagctcaacggcacgcaggtactggggctctacgcgatccctcgctgggaagtctccgggttcgtggagtacatcgggtcaggccagaggcagggggacatcatccattcatcctcccggtgccggagggagcctacgccgtgcggctggggaacgaggcctccatccggcagcggctggccgtgtcgcggggcgcgcgctactccgtcgccttcagcgccgcgcgcacctgcgcccaggccgctcaacgtgacggtcgcccccgactccgacgtgctccccatccagacggtgtacgcgagcagcggctgggactcctactcctgggcgttcgaggctaggcacggcgccgtgacgctcatcgtccacaaccccggcgtctctgaagacccggcctgcggcccgctcctcgactcgttcgccatcaaggctctccggccgcctcctgtgcccaccaaaagtaaaagaccctggcgccatattgttgtcttggaacttggccgacgaaataactag

SEQ ID NO: 36090 - DNA, 516 bp, Zea mays
  Peptide Sequence Number=SeqID_79465
atgaacgaagaccggagggtggactcaacgcccgcatctctacagaaaaccgtaggcaccccccatgtgtctcttacccatgacgtaagaaaccctcagatcactggaacgtcgtcgggatacctctatgttcggtgggcagaagatccactcgacactgatgtttggctcagggtggtggaatccaaattcccactacttaatggagattgttcaaatgcagccaagccagttgaccacatagttgaatggggagagttcaaggcagcattcagagggcatcacataccagcaggcatcatggacccccgccaggcagagaagaagagaaagacccctattatggcaggaccatcagctcagcctcagcgcttctggattgtgtccgacactcggagcagaggacctcagcagcagcagggacgatgggtgatccgaccacagcagcagcagcagcaggcacccaaccgctctcaacccccagttcagaggaacaacaaccagccacagcagtag

SEQ ID NO: 36091 - DNA, 774 bp, Zea mays
  Peptide Sequence Number=SeqID_79466
atggagaaggatcgtcaagacgatgcgcagaagcaccaggcggtcgtcaggatcgcggatcctatgcgcgaggcgaagagggcgcgggtgagcgtgaaggctgctgccttcggcagtagcaaaccggtgccggctgcgaaaccggccgcccccggacacagcaaggcgtcggctagtgagaaggctaccgcctctagcgggagcaaggcacccccgggcgggcccgtgaaaggacgagggtcgggtgaggggcaactggctgttgtcccgcctctggtggcgaccacttcaccaacggcggtggttggggcgaaggcgactgagggaagcgtcgcagtagctgtcgcagcagctgaagcatgcggccgacttcgccgacctcgtcacgtcgggtgccttgactgcggacgttgctgtcgaggtcgagcgtctctgggcgcagcatgcggatgctgtgcgggagaagtcggctgcggaaagcaagaacgtaggctgtcggagaaggtggccgccatggaggccgagaaggtggatctccggtgccacctggcggaggagaggagggaggcgaacaaggccatcgctgatgcgcaggctgcgcaggccgaagccaaagtggcgcgggcggagggcagtctcgcccgccaacgcgccgaggagttggaggcaagattcaacgccctgcgcagccgcatggaaaaggccgaggcctcgacgcacgcggaggtcgagcggacgcactgtggcggaactgtccgaattattctgacttaa

SEQ ID NO: 36092 - DNA, 342 bp, Zea mays
  Peptide Sequence Number=SeqID_79467
atggcgcagtggcttacccggtctacgctcgccggcggtcggagggagtccggcgaccgtggactggcctctccggcgaagcagacttcgattcctcgctcggggagcttcaccgaggtgtgctcagtcttctccgagggtcggacggggttgggaaaggcttggctggccggtctacggcggcaggggctcgggtggccgcggacacgccgtgcacgggcaaacgacgctcgcccaagtcgcaaacgtgcgaatcttggcaaaaatccggtgcgagtcttttcctggcacctagggctgtctctcatccgtgagtcgccatggcagatatgccctaggtag

SEQ ID NO: 36093 - DNA, 597 bp, Zea mays
  Peptide Sequence Number=SeqID_79468
atggcgcagtggcttacccggtctacgctcgccgacagtcggagggagtccggcgaccgtggactggcctctcctgcgaagcagacttcgattcctcgatcggggagcttcaccgaggtgtgctcagtcttctccgagggtcggacagggttgggaaaggcttggctggccggtctacggcggcaggggctcgggtggccgcggacacgccgtgcacgggcaaacgatgcttccaaagcccttacacttttgctccttaagtttcttccacatgtgatcatagtcattagtgcaaagttcgtggacgcgtaccgcgagctgggtgcgcggactgcagacttcgaagtgcccggccaagaagcggttcttcgtttccttgcatggttgcagaaggagctgctagtgctcccgaccattgtgaccggtttcatgtccttcgcctccctcgtcacctgcgagggggctatgaatgctttgtcccgcgaagggtgcaggcattacgaggtcttcgaccaagcggacgaaaactttgaacgtgaaatcttcaaggtcgaagaccctgtggtgaagcagtcgggcaggggcactcttcgatag

SEQ ID NO: 36094 - DNA, 210 bp, Zea mays
  Peptide Sequence Number=SeqID_79469
atgacatacatgttcattgcattttcgatagactgtaaccttgctgacggagagtacgtcctcatgccggagcaaggagctgctcaggaggtattgttgacgcagggaagtgttatagaacctattgtggttgttcgaggaaatgagatggtgcttgttactcatcaagggaagtgggaagtagcagcacatccaccttcactcttataa

SEQ ID NO: 36095 - DNA, 81 bp, Zea mays
  Peptide Sequence Number=SeqID_79470
atgcggcttcatacccttagagatgatgtggttttatactctcagaggtgcttgttactcatcaagggaagtgggaagtag

SEQ ID NO: 36096 - DNA, 531 bp, Zea mays
  Peptide Sequence Number=SeqID_79471
atggaggaaagggtggaggggcttaccgacggcgagatagctccagtgaggtgtccagggaggtcagggaagtcacggcagtcatgtcgatgtgcgccgtcggagggcctcgatccttgcttggagaagcttcacagccccatggggacactgtccataggctcggtgaggctaggggtctctggaaatggctggtcgcgatggccggcgctcgggtggctcgggcgggcgacgcagagctcgcaagagctaaggacggggtcaggacagcggggggtgtgcgcgggggagcatcagtgcgcgctctggcgcctgggcacggagtcgagcatgaggcagcgcagagaatggtcaagttcaagcgtggattggctccaaatcttcgcgattatgaccatgatcccgttgagagatctcttcaccagaccttcctttgtcgtttatttgtggtggcttatgggttttgttgactggagcccaaagatatggggatttgagctagggatcaaggtgaacgtgctcgagttctag

SEQ ID NO: 36097 - DNA, 249 bp, Zea mays
  Peptide Sequence Number=SeqID_79472
atgccgaagcttcctcgcgcacagcttcggctctcttccatccttcgttctctttgtgttttttcatacaacaattttgacttgtccgaagggttcgtgtccgaagattgtaatctcactgacggagagtacgtcctcattctggagcaaggagttgctcaggaggtagtcccggagtcagcactagagccttctactgaggacctacctgccccagcttttgaaggcaagccccaattttatgcataa

SEQ ID NO: 36098 - DNA, 570 bp, Zea mays
  Peptide Sequence Number=SeqID_79473
atggtcgtgatgggttcaacatcggaaaagatgtacctctaccagctgttcgaggagcaccgggtaccccgctgtagggtgaggatgacattggagcctcaccccttgcagctaggctggcgttccttagactcagagtctttcgattttagggccaaggatactattcagtccatggctctgcatgtgctgacaatcttctgcggatttcaccccttggagttgtcaacccaccccattggcttgttccccgctgagaaggaggaagacccaatgtggaaggatcgggttgagcacgccaaggatgtgtgggctctctaccctggacatactgctcacctaccggttcggtgcatgagtgccctgtatcgtctgcaggccttgcgaggtgaggcgatgtcccagcttatgggcttagtggagtctaccaagatcaccctggataaccgggaggaccttgttgtcgacttgtccactgagctggtggagaaggatctccaagtggagcagatggactatcaaatccaagagctcgaagatcaggtggaggtcagggagaacactatcgag

SEQ ID NO: 36099 - DNA, 1863 bp, Zea mays
  Peptide Sequence Number=SeqID_79474
atgtctttcgtgctttttgactacttcgaaaagtggatcctgaaaacgacggagtacacgagacacacgctacaagacaatctgatcctgcaggctcgggtcttgacgctggaagggggcagcagcaccctcggcatcgacgacaccttcggcgaggcaatcgctgccagggtcttctccgggaatccggcccgagcaggtggctcgggccggtcgccccggggcctcgaccagccgtcctccgagggcgccataagggagcacgaagacatggtcaccttccaaggggaccaacgggcgaaaggggcgggcagccatgcaggcggcgtgcaaccgcgccaagtgggcgcgcttctccgactcccaacacgcccagcctggaggcccaggcccacgtgtcatgcaaccggcgcgccgaatgcttcgtgcatgcgactgcaccgccacttgcgccaccaccgcgcctcctcgattgcggaaccaataccgcgactcgaggccacccagcgcatgacccagcagcgccagcctggcgcggcggtcagtgcggccaaaaatgggccggcagtaatgacggtggcaggcgggcgggagcagcggtcacatcgtcagccaagctcacgtcccatccaggggcagcgagagaaccctctctcacggcgtgaagacaacgcgcccgtgttctgttcctcgaacggctcgcgcacgcgcaaccgccgccccgccaaccactcgccccgtcgcattaactccgcggcgggacaggcggcgcctctggcaggagaagcaggcgacgcttcgccttcgccgctccgagccaccctactgatcagaggttcgaaggctggccccccggaagggttcgacagccgcctcagatcgcgtgggccctacacccactactggtcagaggttcgaaggccagcccctcggaagggttccacagccgcctcaggctactcgggctccgcgcccattactgatcagggcgggaacgatcttgtaacggaatcccatcagagggaggcatcgagccctcggaccccgtcgctaggggaccgggtccggcagatcacccgcagctcaccggagacaccatgttcggcgcccatcgagggcaacatggcgcttcccccctcctccttgcggaaaggcgacacaggggccgtcaacataccagcccgagaacttgggacccgaccgtacacccgggctacggccagctcgcatgagggaacaaccagaccagccgaagcattacgcgaggcattaagacctcgaaggagtgaaaccactcctccgaggcctcaggggctacacccagagagtgctctcgagagcacccactggaacaaaacgcaaccgagaaaggctggtccccttgcaaaaaagtgcgacgaaagcctccaagcgagtgctaacactcccttcgaggctcgggggctactgtcggggaccataattaggggtaccctcaaggctcctaattctcagctggtaacccccatcagcataaagctgcagaggcctgatggccggcatagccaaagtgaccgcggtcatttcgccgctccactgaccgacctgacagaaggacagcgccgcctgcgccgctccgactgcggtgccactttacagagtgagactgacaggcagtcaggccctgccgaaggcaccatagggagctccgcttcgcccgacccggggctcggactcgggctaagtcctggaagacggcgaactccgctccgcccgacccagggctcggacttgggctcggccccagaagacgacgaactccgctccgcccgacccagggctcgtacttcgctccgcccgacccagggctcggactcgggctaa

SEQ ID NO: 36100 - DNA, 771 bp, Zea mays
  Peptide Sequence Number=SeqID_79475
atggcgcctcctgttgacgtggctggtctgcgccctaggttgggcgatgtggaagctcctccgaggccgaggtcgagtctgtcttccgtggccgagcccgagtccgagccctgggtcgggtggagcggagttcgccgtcttccgggatttagcccgagtccgagccctgggtcgggcggagcggagttcgccgtcttccgggacttagcccgagtccgagccctaggtcgggcggagcggagttcgtcgtcttctggggccgagcccaagtccgagccctgggtcgggtggagcggagttcgccgtcttccgggacttatcccgagtccgagccccgggtcgggcgaagcggagctccctatggtgccttcggcagggcctgactgcctgtcagtctcactctgtcaagtggcaccgcagtctgagcggcgcaggcggcgctgtccttctgtcaggttgctttatgctgatgggggttaccagctgagaattaggagccttgagggtacccctaattatggtccccgacacctagtcaattgtgtttcagagcttatgcttggggccatgaatgctttgatgattagaaaccttggggaggaccagcaaggacttggaaaaggcctaggtgttgaggaggagaagcaagggcgccacaacaggaaggagatcaagtccgactcggctgtgactccatcacgggttccaggaccagtctgcactaaaatggacgcccaagatgcatctgaactccgattgcgacggacttga

SEQ ID NO: 36101 - DNA, 309 bp, Zea mays
  Peptide Sequence Number=SeqID_79476
atggagcctggcggagggacagctatcggagcggttgagtccttgctgacgtcctcttgcttccagtatgcggggcgccatcatcgcctatctggcggagcgagccagatgggacaccggtcttgtttcctgcggcccgagtcagctcggggtagggcgatgatggcgcctcctgttgacgtggctggtctgcgccctaggttgggcgatgtggaagctcctccgaggccgaggtcgagtctgtctttcgtggccgagatcgagtccgagccccctgggtcgggcgaggcggagttcgtcgtcttctag

SEQ ID NO: 36102 - DNA, 150 bp, Zea mays
  Peptide Sequence Number=SeqID_79477
atggccgagaacctcccctctccacggcgccttctccctcctctccgcatctctagcgcagggaagcctttttttctccatggctgctctagtgctccaaatggattcaacattttacagccgactcttggtgtgatgcttggtgactga

SEQ ID NO: 36103 - DNA, 294 bp, Zea mays
  Peptide Sequence Number=SeqID_79478
atgtcaaccgtccccatcgattccccgttcgcggccaggcctcaccgccttgacatacaatgctccactgaccccgactgccgtcgtgcagtggccgcacttgtacccaccatatctagaatgggagacccagtctcaggtcgcatgagggataaagtccatgcccggcttcactcagagactcagacattcaaatccattgatcctagactttctggaaaggtatcttcggacttgtatcagaaagggagaagctcaaaagatacgaaggttgacacagtgccgaagctgtga

SEQ ID NO: 36104 - DNA, 273 bp, Zea mays
  Peptide Sequence Number=SeqID_79479
atggccgagaacctcccctctccacggcgccttctccctcctctccccctctctagcgcagggaagccttttttttctccatggctggtgcccgacgtagctctcatggcgacatccccttcaacttcgacagctgagccctccttggttattggtggtcacaagaaagttgtagataactttattaacttacttgtgttaaaagttgacagccataagtctgatcgtttagaagttatgcttttcatttcagaggtcgcattgtttgcttaa

SEQ ID NO: 36105 - DNA, 291 bp, Zea mays
  Peptide Sequence Number=SeqID_79480
atgagcaagaacacaagagacacaagatttatcccgagattcggtcacaccaccaaggtgccctacttcctcgttgaggcgcccacaaagagccgggtctctttcaaccctaatcctccctttgccgaccacaaaggtcaagcccacacaataatctttgctcaaacgagcggcagactggcaggaaaaagtgaacagtgcaaaaaccggttgaaccggtttccaccagacaaaaatcggttgagtgtccggttgagtgtccagctgaaccagtatttgaataccagctga

SEQ ID NO: 36106 - DNA, 186 bp, Zea mays
  Peptide Sequence Number=SeqID_79481
atggccggtgcttgggtggctcgggcgggcggcgcagagctcgctagagctaaggacagggttgggacagtgggggtgtggcggcttatgggttttgttgactggagccaaagatatggggtgatcaaatcggggggtttcggctttgggatgaaggtcttctctcatgactcggtgaagatgtag

SEQ ID NO: 36107 - DNA, 174 bp, Zea mays
  Peptide Sequence Number=SeqID_79482
atggagagtcatgatctccgggcagaatgggaatcacgacttgtgggtggttatgagatcgatgattctggttatgactatggtgctggttgtcagcattgcaaccactgctcaggagaagatgaagctgtggaaggagacttccaggagttccaagattacgacgagttctag

SEQ ID NO: 36108 - DNA, 681 bp, Zea mays
  Peptide Sequence Number=SeqID_79483
atggctgtcggaaagaacaagaggatctccaagggaaagaagggtggcaagaaaaagaccgtcgaccctttctctaagaaggattggtatgacatcaaggcaccgtcggtgttcagtgtgcgcaacatcgggaagactctcgtatccaggacacagggtaccaggattgcttctgagggtctgaagcacagagtctttgagggcatgaattttaccactgataaactcagatccctagtgaagaagtggcagacattaatcgaagcccatgttgatgtcaagacaaccgacaactacatgttgcgtttgttctgcatcggcttcaccaagaggcgcccaaaccaagtcaagagaacctgctatgctcaggcatcccagatccgtcagatccgccgtaagatggttgagattatgatcaaccaggcttctacatgtgacctgaaagaacttgtttcgaagttcattccagaagttattggtaaggagattgagaagtctacctccagcatcttcccacttcaaaacgtcttcatccgcaaggtgaagatactcaaggcccccaagttcgatcttgggaaactcatggaggttcatggcgactacaaagaggatgttggtgtgaagcttgagaggcctgtcgagggagatgaggctgggcaggaggttgctgctgccgagtag

SEQ ID NO: 36109 - DNA, 300 bp, Zea mays
  Peptide Sequence Number=SeqID_79484
atggatatgaagtttctgctgttgcttttgttggcattgttgcctactcagttttgcacaactggtcgtgtagctataacacagcactgtaattccatagataggttaatgttatcagtgagggtgacaccagatgcccatttcaagaatgatcttggcctagacagtttggatgcagtggaggttgtcatggccctggaagaggaattcagattcgagatacctgacaatgaagctgacaagattgactccgtcaaagttgcagttgacttcattgcctcacacccgcaagcgaaatga

SEQ ID NO: 36110 - DNA, 402 bp, Zea mays
  Peptide Sequence Number=SeqID_79485
atggccgtggggattgtagtagctcatcgtccccgccggagcgacggcgggattgggataggaatcgcaggggcgatggtggtgttggtggtgttcgcgttggatttcgagaagaatagagagggggaacgcgtgagggtgccgagggaacgacagaggaaggaggatcatgccagttttgtcgatcgtttttgtggacgcaagagccaacctatagctattcctggcaggcttcgacggctcgctgcgttgggcacttcatgcatcagcggacagcagcgggccgaaccctgggtccgttcagaccaggatcgacaggtgcagcctactaatcaccagacatgcacagtcaacgaggttaaccggctgattgataggcggacgagaagcgcctggctctag

SEQ ID NO: 36111 - DNA, 525 bp, Zea mays
  Peptide Sequence Number=SeqID_79486
atggacccgtacgcggagcgcgggatggagcaccaccaccaccaccagtacgggccgcctccgccgcagccgatgtacgcgtcgccgtacgggcagccgccgccgccgccgatgtaccagcagccgtacggacagccggtgtacgcgtcgccgtacggacagccgccgccgccaccggcgatgtacccgccgccgtacgcgcagccgccgccgccgccaccacggaagaccggcgcgtcgttcgcggaaggatgggtttgccgcaatctgttgctgctgcctcatggacgcatgcttctgatcgtgtggtcgaccacaagcccaagaaacgacgtcttcctcctggcctgggtcagggtgcccatcagcgaggagatcaaccaccgcgttgagcagctggtggtagcctggcgccgtttgcatctctgcaccgggaacgaagctggagttgcacgtaaagctgacaaaagaagcaaccatgatcgactaacggctgtttttctacatgaggtggtttatcgttag

SEQ ID NO: 36112 - DNA, 852 bp, Zea mays
  Peptide Sequence Number=SeqID_79487
atggctgtcggaaagaacaagaggatctccaagggaaagaagggtggcaagaaaaagaccgtcgaccctttctctaagaaggattggtatgacatcaaggcaccgtcggtgttcagtgtgcgcaacatcgggaagactctcgtatccaggacacagggtaccaggatacgctcgttcgcgcgtttgtttgtggggactactattcaggtttcattgcaagaattcgtaggggagattgcttctgagggtctgaagcacagagtctttgaggtttgcctagctgatcttcagggcgacgaggatcaagcttacaggaaaatcaggctccgtgctgaagatgtgcagggcaggaatgtgctcacaaacttttggggtatgaattttaccactgataaactgagatccctagtgaagaagtggcagacattaatcgaagcccatgttgatgtcaagacaaccgacaactacatgttgcgtttgttctgcatcggcttcacgaagaggcgcccaaaccaggtcaagagaacctgctatgctcaggcatcccagatccgtcagatccgccgtaagatggttgagattatgatcaaccaggcttctacatgtgacctgaaagaacttgtttcgaagttcattccagaagttattggtaaggagattgagaagtctacctccagcatcttcccacttcaaaacgtcttcatccgcaaggtgaagatactcaaggcccccaagttcgatcttgggaagctcatggaggttcatggcgactacaaagaggatgttggtgtgaagcttgagaggcctgtcgagggagatgaggctgtgcaggaggttgctgctgccgagtag

SEQ ID NO: 36113 - DNA, 834 bp, Zea mays
  Peptide Sequence Number=SeqID_79488
atgtgccttcatttgagtggtgagtgggagcaacaggaggaggacaagattggtgatgataccgctcatccagaatactcaaattgggacgaggaggatcatgttcaaaaaacgaatggtgatgaagaagctacctcaaaagatgaatgtgtcaaagattcaacaaaaaccaatagaaagaacaagacagggttcaaaacagaggagcaaaaagaaaccgaagtgctccctggtctggcacaccagactgtccggtgtggcaccggacagtgtccggcgcagcccactataattcaccggactgtccggtgcaccaccggacagtgtccggtgctccagagtgaagcggctctggactggccagcttcgggaaaatggaaggccgctccgctaaaattcaccggactgtccggtgtgcaccggactgtccggtgtgcaccggactgtccggtgcgccagcggagcaacgactacctcgcgccaacggtcgactctgacagtgaacagtgcgcaacagtacacgcggcagaagtcagagcagaggatcagaggggcaccggactgtccggtgtgcaccggactgtccggtgtgcaccggactgtccggtgccacatgaggacaaagcctccaacggtcgaccagctccaaccccaacggataggatgacgtggctggcgcaccggacactgtccggtgtgcaccggactgtccggtgcgcccatcgccagcagccttctccaacggctacattttggttggtggctataaataccaccccaaccggccacttcaaggtgtgggagttcaagcaacaatccaagtcatctagttga

SEQ ID NO: 36114 - DNA, 387 bp, Zea mays
  Peptide Sequence Number=SeqID_79489
atgaacaagaacacaagagacacaagatttatcccgaggttcggtcacaccaccaaggtgccctacttccttgttgaggcgcccacaaagagccgggtccctttcaaccctaatcctccctttgccgaccacaaaggtcaagctcacacactaatctttgctcaaacgagcggatcagaggtcagaggggtcagagaccagctgaactgcccctcaggaccagttcaaccggtcttgaccagtgagtttaggagagaaaaccccagctcaactgctcggaggcaagttcagctgctgaagaagctcaactcagctgaagtcaagttcagctggaaagctcagctgcagttgaagaagttcagctgcttttcagcaagaacactctag

SEQ ID NO: 36115 - DNA, 987 bp, Zea mays
  Peptide Sequence Number=SeqID_79490
atgcaagacgccacagaggacgtcggtgaggttggtgctgcggctggaggtggtggtgaggtggtggcggctggtgtagtggtggactgggaagaggatcgccgggatcgtgataccaggttgtcaagggcgttaagccctcgagcagctggaccgcggatacgtaactcgtatccgccgtccgtcttctccgggctctggcgagtgtctttctcatttctaaccactaacttcggcaaaccatttcccaggttgacatcattggaacccaaggtgatatacaatgatcggactggcaagtatgtgatgtggatgcacgtagatgatgctaactacaccaaagcttcagttggtgtggccatcagtgactctccgacaggcccattcacttacctctacagcaagcgtccgcatgactgtgagagtagagacatgaccatcttcaaggatgatgatgggaaggcctacctgatatactcttccgaggacaacagcgagctccacattggcccgctaaccgatgactaccttgacgtcactgatgccatgcgaaggcttctcatcgcgcagcatcgagaagctcctgcgctcttcaagcatgaaggcacctactatatggtgacctctggctgtacaagctgggctccaaatactgcgctggcccacgcagcgacatcagtgatgggaccttgggagacactggggaacccctgtgtgggagggaatgaggtcttcagatcaacgacattcttctcccagagcacatttgtcttgccagttccagggctgccgggctcattcatcttcatggctgatcggtggaacccgtctgatcttagagattcgcggtatgtttggctgcctctgacgatcgggggagtccctgatgaagccgcagactacagcttcatgttccctctctggtcccgggtgtccatttactggcacagacggtggcgtctccctgaggagtggagggattattga

SEQ ID NO: 36116 - DNA, 948 bp, Zea mays
  Peptide Sequence Number=SeqID_79491
atgcctcgaagcacacatatgggccacaccgcatcgtgtgcgtccatccgctcttgcgtgcctgctgaccgcatgatcgaacctggaaaccctcgaatcgtatatagtagtccgctctgcctccgaagtgctttctcccgcagagcagccgacaactctctaccgtccgagaccccaagcaccagcgcggcggcggcggcggcggcgaccatggctgtcgggaagaacaagaggatctccaagggaaagaagggtggcaagaaaaagaccgtcgaccctttctctaagaaggattggtatgacatcaaggcaccgtcggtgttcagtgtgcgcaacatcgggaagactctcgtatccaggacacagggtaccaggatacgctcgttcgcgcgtttgtttgtggggactattcaggtttcattgcaagaattcgtaggagagattgcttctgagggtctgaagcacagagtctttgaggtttgcctagctgatcttcagggcgacgaggatcaagcttacaggaaaatcaggctccgtgctgaagatgtgcagggcaggaatgtgctcacaaacttttggggtatgaattttaccactgataaattgaggtccctagtgaagaagtggcagacattaatcgaagcccatgttgatgtcaagacaaccgacaactacatgttgcgtttgttctgcatcggcttcaccaagaggcgcccaaaccaggtcaagagaacctgctatgctcaggcatcccagatccgtcagatccgcccatcttcccacttcaaaacgtcttcatccgcaagggtgaagatactcaaggcccccaagttcgatcttgggaaactcatggaggttcacggcgactacaaagaggatgttggtgtgaagcttgagaggcctgtcgagggagatgaggctgggcaggaggttgctgctgccgagtag

SEQ ID NO: 36117 - DNA, 246 bp, Zea mays
  Peptide Sequence Number=SeqID_79492
atggcggcggcgaggagcctgcttctgaggcacctccgcttggcggcggccccgtcagcggcgtccgtgaggccgacggcgtcgttgcatgaggccctgtgggggcagcggtggatgtcttcggaggatgccaagggctctttcctggacaagagcgaggtcactgaacgcatcatcaaggtcgtcaagagcttcccgaagatcgatgacccctccaagtgtgctatgcagtacggatacagatag

SEQ ID NO: 36118 - DNA, 212 bp, Zea mays
  Peptide Sequence Number=SeqID_79493
atctttatggtctcaaagtaggtgatgagtttggtgacgaatgggaatttggaggacctagtggtggtggagcatgtgatgttggagctagtggtgatggatcaagggatggtgttatgcatgagcaagcagctccaaatcctccacttcgtccaagatcaacgaggctaaagaaagtccatgtgaaggaactttataaggtgaaagtctga

SEQ ID NO: 36119 - DNA, 1167 bp, Zea mays
  Peptide Sequence Number=SeqID_79494
atgggcaccggaggtgtagggctggtagccgccgccctcaccgtggtggtggttacgatgctgtggacggtgctggtgcgcctggtgtggcgaccgtacgccgtcgcgagggcgttcgcgcggcagggcatccacgggccgccgtaccgggtcttcgtgggcagtagcaaggaggttcaggcgatgcgggcggcgacgagcggcgacacaatggaccggacctcccacgacttcatcccgcgcgtgatgccgcagtaccacgcgtggatgacactctacggcaaggtgttcctgatgtggtccggctcgactccgacgctggccgtgggcagctacgacatggtaaagcgggtcctcttcgacaagtccgggctgtacagcaagacggacccgggacccactatcctgtccttgatggggatgggtctcaccttcaccaacggcgaggactggtcgcgtcaccgccgcgtcgtgcacccggcgttcaccatggacaagctcaagtcgatgacgggggcgatggtggcgtgcgccgcggagctgatccgggcgtgggaagcgcgcgccgcggctagaggggagaaggtgacgacggtggaggtggggcagcagttcaaggagctcaccgccgacgtgatctcgcagacggcgttcggcagcagctacagacaggggaaggaggtgttcgtggcgcagtgggagctccagtacatcgccttcagcgtcttcaacaacgtgcgcgtgccgggcatgcagtacgtgcccaccaaggccaacatgcgccggtggcagctagagcgcacggtgcggggcacgctcatggccatcatcgacgagcgccttgccgctgcaaaggaggggtggggttacggcagcgacctgctcggcctcatgctggaggccaacaacgccggcgatgacggcaaggggcagcagaccatgagcatggacgagatcatcgacgagtgcaagaccttcttcttcgccggccatgacacgacctcacatctcctcacctgggccatgttcctcctcggcacgcacctcgagtggcagcagcggctcagggaggaggtcatccaggagtgcggcagcgccgaggtgccgctcgacggcgacgccctcaacaagctcaagctcgtgagcctcctcagtcctccaccttaa

SEQ ID NO: 36120 - DNA, 69 bp, Zea mays
  Peptide Sequence Number=SeqID_79495
atgtatgattcatggacaggtcctaccatgatgcgcattattaatttcatggcttcatgctatgactag

SEQ ID NO: 36121 - DNA, 1556 bp, Zea mays
  Peptide Sequence Number=SeqID_79496
atggcgcgggggctgggtcccacacgtcatgaaactggcccagagcagaagaagccaaaccgccgcgcgcggtgcatgcaaccgcccagcggttacgagcattcctccactttcgcccagaccagcgggcgaaagggcgggcagccatgcaggcggcatgcaaccacgccaagtgggcgcgcccctccgacttccaacgcacccagcatgggggcccacgcccacgcgtcacgcaaccggtgcgccggttgcaacatgcgagcaactgcatcgccgctcgcgccactgccacgcctccccgactgcggaaccagtaccgcgactcgaggcaaccctgcgtacgacccagcagtgccagccaggcgcgacggtcaatacggccaaaaatgggccggcagtgatggcggtggcaggcgggtgggagcagcggtcacgtcgtcagccaagcttgcgtcccatcccggggcagaaaggcggcgcctctggcaggggaagcgagtgacgcttcgccttcgccataatgaccgcgtcaaaaaaggaaacaggctccgagcctccctactgatcaggggttcgaaggctggcccctcggagggtttcgacagccgcctcagagcgcgtgggctccacacccactactggtcagaggttcgaaggccggcccctcggaagggttcaacggctgcctcaggccactcgggctccgcgcccactactgatcagagcgggaacgatcttgtaacggaatcccatcagagggaggcatcgagccctcggaccccgtcgacaggggaccgggtccggcagatcacccgcagcaactcaccggagacaccatgttcggcgccctccgagggcaacatggcgctctcccccccctcctccttgcggaaaggcgacgcaggggcggaccagtccattcgacggactcgatcacgcctcacccgagcccagcctcgtgcaagggcagccgaccccggaggatctccgtctcgcccgaggcccccctctagcgacgaacatacttccggctcgcccgaggcccagtcttcgccaagaagcaaccctggccgaatcgccacgccaaccgaccaaatcgcaggggcatttaatgcaaagggctcggactcgggctcggccccggaagacggcgaactccgctctgcccgacccagggctcgaactcgggctcagtcccggaagacggcgaactccgcttcgcccaacccagggctcggactcgggctcagtcccggaagacggcgaactccgctccgcccaacccagggctcggactcgggctcagccccggaagacgacgaactccgcttcgcccgaccccagggctcggactcagccctggcctcagccgacagtctccgcctcgcccgacccaggggctcggactcggcctcggaagacagactcgacctcgacctcggaggagcctccacatcgcccaacctagggcatggaccgaccacacaagcaatgatggtgccccgcacgctctatgacgacggcggttctcagcccccttacggaagcaaaaggat

SEQ ID NO: 36122 - DNA, 599 bp, Zea mays
  Peptide Sequence Number=SeqID_79497
atgcgcagctgggaaaacgccactgggcagtggggcccacttctcagcccttgttgcgcgcgcgccaaagacctctgccggtgggcccctgttgtcagccctatccccttcctctggtcagaacgctggggcgctaaaacagaagtcgcgccgtggccgtccgcgaatcctggccggctctgcgtccgcgcctttggggcgctggccggggaccccactcgccagtcgagcttctgcccacggaccgactgcactcgctatgtggtgggcccggctcgggtggccttcttcctcaccagaatcacgcgcgatgcccgcacaacagattctgccaagattttcaccggccgaatatttcttcttccgcagaaagggatgcgggtgctggagcaatcgtcgtcgagcacctccactaccgttgtggaggctaggctgggcggcggaaagagaactgggagggcgatagagtatattaagcatctcaagatccttggcgtgcgaggtctcctgccgaatgatgaatacttcctcgccggcgcacgctgcgccgccacgggccccaatgcgtggcggtcggcttcaccaacacccaaatcatg

SEQ ID NO: 36123 - DNA, 417 bp, Zea mays
  Peptide Sequence Number=SeqID_79498
ggctcggactcgggctcagccccggaagacgacgaactccgcatcgcccgaccccagggcttgaactcagccctggcctcaaccaacggtctccgcctcgcccgacccaggggctcggactcgaccttggcctcggaagacagactcgacctcgacctcagaggagcctccacctcgcccaacccagggctcagaccgaccacgtcacaggaggcgccatcattaccctaccccaagctaactcaggctacggggaacaagaccggcgtcccatctggctcgccccggctccagcgctcctccgacggccacgacaccacacgaaccgggtgccaaaacctctccggctgccacgatggcatggccctcttacagagggttggccgcgcggggaaggacgggacggcgctcgcgtaa

SEQ ID NO: 36124 - DNA, 996 bp, Zea mays
  Peptide Sequence Number=SeqID_79499
atgtactgtagagtgtccggtgcgccacttcgcgcgtgcctaacttctacgcgctctggtgcgcatttaatgcctctgaaggagaagcgggcggcgcttcacctctgccataatgaccgcgtcaaaaaggctggcccctcggaggggttcaacagccgcctcagagcgctcgggctccgcgcccactactggtcagaggttcaaaggccggcccctcggaagggttcaacgaccgcctcaggccacttgggctccacgcccactactgatcaggggaacgatcttgtaaaggaatcccatcagagggaggcatcgagccctcggaccccgtcaaaagaggaccagggctcggactcgggctcagcctcggaagacgacgaactccgcttcgcccgaccccagggctcggactcgggctcggccccagaagtcgacgaaatccgcttcgcccgaccccagggctcggaatcgggctcagccccggaagacgacgaactccgcttcgcccgaccccagggctcggactcagccctggcctcaaccgacggtctcagcctcgcccgatccaggggctcggactcgacctcggcctcggaagacagactcgacctcggaggagcctccacctcgcccaacccagggctcggaccgaccacgtcacaggaggcgccatcattaccctaccccaagctaactcaggctacggggaacaagaccggcgtcccatctggctcgccccggctccagcgctcctccgacggccacgacaccacacgaaccgggtgccaaaacctctccggctgccacgatggcattgccctcttacagggggttggccgcgcggggaaggacgggacggcgctcgcggaccccccgggttcgaaacgccgacatggctataattcaccggactgtctggtgtgtgagtcgcgcactcagccaacggtcgacagcgtgatcagcgggtgccacatatgcccagccaacggtcactag

SEQ ID NO: 36125 - DNA, 1173 bp, Zea mays
  Peptide Sequence Number=SeqID_79500
atgggcaccagaggtgtagcgctagtcgccgccgccctcggcgtggtggtggtcacgaggctatggacagtgctggtggtgcgcctggtgtggcggccgtacaccgtcgcaagagcgttcacgcggcagggcatccgcgggccgccgtatcggctcttcacgggcaacagcaaagaggccatggcgatgcgggcggcgacgagcggcgacacgctggacctgagctcccacgacttcatcccgctcgtgatgccgcagtaccgcgcgtggatgtcactctatggcaaggtgttcctgacgtggtccggcttgactactccggcgctgttcgtgggacgctatgacatggtgaagcgggtcctctttgacaagaccgggttgtacggcaagacggacccgggccccattatactgtctctgcttgggaggggcctcgtcttctccgacggcgagtactggtcgcgccaccgccgcgtcgtgcacccggcgttcgccatggacaagctcaagtcgatgacggggtcgatggtcgcgtgcgcggcggaggtgatccgggcgtgggaggcgctcgccgtggcgagaggggaggaggaggtgacagtggaggtggcgcagcagttcacggagctcaccgccgacgtgatctcgcacactgcattcggcagcagctaccgacaggggaaggcggcgttcctggcgcagcgggagctccagtccatcgccttcgcctccttgaacagcgcgcgtgtgccgggcatgcagtacctgcccaccaaggccaacgcgcgccggtggcagctcgagcgcacggtgcggggcacgctcatggccatcatcgacgagcgcctagctgccgcacaggaggcgaggggttacggtaccgacctgctcggcctcatgttggaggccaataatggcggcggcgacggcaagagtccgcagcaggccatgagcatggacgagatcatcgaagagtgcaagaccttctttttcgccggccacaacacgacctcgcagctcctcgcctgggccacgttcctcctcggcacgcaccctgagtggcagcagcggctcagggaggaggtgatccgggagtgcggcggcgccgaggtgctcctccacggcgatgccctcaacaagctcaagctcgtgagcctcctcgatacaccttaa

SEQ ID NO: 36126 - DNA, 561 bp, Zea mays
  Peptide Sequence Number=SeqID_79501
atgcaggcggcatgcaaccgtgccaagtgggcgcgcttctccgactcccaacacgcccagcatggaggcccaggcccacgcgtcatgcaaccggcgcgccgaatgcttcgtgcatgcgactgcaccgccacttgcgccaccaccgcgcctcctcgattgcggaaccaataccgcgactcgaggcgaccaggcgcacgacccagcagcgccagcctggcgcggcggagaagcgggcgacgcttcgccttcgccataatgaccgcgtcagtaaagggatcgggaaagggggaaaccccgaaagggatccttcctcgtgaaggaaccaggctccgagcctccctactgatcaaaggttcgaaggttggcccctcggaagggttcgacagccgcctcagatcacgtgggccctacacccaatggtcagaggttcgaaggccggcccctcggaagggttcaacgaccgcctcaggctacacgggctccgcgcccattactgatcaggggttcgaaggctggcccccgaagggttcacagccgcctcagacgccgagcgagggatga

SEQ ID NO: 36127 - DNA, 576 bp, Zea mays
  Peptide Sequence Number=SeqID_79502
atgtcttcgtgctccctcatgcatcgtgtctttccaccttccaagcccccggatgggggatacccgccgtctttctgccttgtcgtcgggggaacccagcccggctgtaccccccgccggcggtcacccaaggcggcgaccaccagcccctgggtggggagaagcaagccgggctgcgatcttggtcccaccctcagcttcaaggatgttcatcatcctcgctggggtggaggccgggctgagccggagctctacctcccgcgcgggttcgtgggtcaccctctcctgcggtgttcgagggagagggcgctcgctggccctgcgggcgggtcggacttcgacaacgcggggctggtcgacagcgggcgtcgtcagccccagcgtgtcgagctcgtcggcttggctcccggtggcccctcctgccggaaggcggctgccgcgccgtgtgcacgggaggaccgcccaagatgtcgcgcgctgctagggcggcgttcgtgttctggggcggtcctgcctttgcaccggtatggcgcctccgcgcggaggtcggtgccccactcgtccgggaggatctga

SEQ ID NO: 36128 - DNA, 666 bp, Zea mays
  misc_feature (658)..(658): n is a, c, g, or t
  Peptide Sequence Number=SeqID_79503
atgcgactatattacctagcccagcaccaagtccatcaaaagcccctgaagcgagatcgtttggacctcgaatttccccttcacatcctccgagtgcactacctccaggatctcctgagtggtgtttactttcttctaattcttgaaggcgttgatgcgcgccatcattcacacaagcacccgcaccacagagagtcaaatcagggcccttcaccatcctcagcacccacacctgaaggttgttctagttatatctgcaccgagccactgactgcaacaccaattggttccccttgtggctgtgtcgagcctattagtgttatcgttgatctggacttagctccttatctactgttcatgagcatagctgagttagaagttgaggttgcagctgggacatttcttaaacaaagccaggtgaagatcatggctgcagttgcaagtatccaggatgaccagaagacacgggtgaccatttatttggtgccgctaagagaacagttcgatacttatacggcatccctaatatctgataggttcatggagaaaaaggttcagataaattcatctatatttggagattataaagttatcaatatcagctatcatggattgcaatccccgccatcatctctgcctggaggatcggatccttcangaaactga

SEQ ID NO: 36129 - DNA, 1227 bp, Zea mays
  Peptide Sequence Number=SeqID_79504
atgcagccatacatcaaccatgaatcggattcacagtggaagagttccccatgcctttcatcagctataacaccagtaccagcgttctcagaggcaacatttcctatttttacagaacagagatcatcttttgctgaaaggaaattacctgttagttctgtcgcctcaattggtacttctatggctgcttatgataccatgtcaacccatatgttagcttccaacttcaccaatgaatcacctaataggcagctttgttctggatcatatgttactgagccatctgatcctgatactccattgctagcaacacattcatcattaatggctgattcaacgcccttattcgtggacttttcagaagtatctgaacatatatgtttgaaccaaggccaacttctaggtttatttgattatccagcaagtgttgatttttacaaatcaaaaaatatgaccatctttggtcaacaaattcaagacaccattacagtcgatcctaacactcaccttacaccgcaaaatgagttgttctctgggagttcaatgcagcttcagaaaactgtaggttctgctgaatctgtgctgaagacagttgatgcaagaagtgcaacacctcaaagttatttatactgccatactgagagtgagaggagtgtaccagaacctttcaactgtgataaacttggcgccgacagcctccctttttcaaacactgctccaaagccaaggatgcgctggacacctgagcttcatgagtgtttcgttgatgctgttaacaagctcgaagcaactccaaaagcagtccagaaggttatgaaggtcgatggattaactatataccatgtaaaaagccatctgcagaaacaccgtatagttcaacatcgttctgaaacatcgggtggtgtgcctggaaggagaggcagccataccgaagtagatgatgactccatcccgcaatcaaaaggcgaagggggcgttgaaggaggactagtgtcgcagattggcttgcagaaacaacttcatgaacaacttgagatccaaagaaggctgcagctgcaagtcgaggaacacaacaagtaccttgaaacggtaatcgcgaagcaaaacgagagccttaaaaagcttagagcgctacgtggttttcgagaccgagtgcggcgtgttttgcaagacagtgaagcacccggagtgcgggcacattgtgcacaagcacaacagagatcgtga

SEQ ID NO: 36130 - DNA, 441 bp, Zea mays
  Peptide Sequence Number=SeqID_79505
atggccgcggcggcgatgggcctcgtgcgtgagctcctgcagccacagggaaccacgagcacccgccggctctgcagcacaggtgtgggcgtgggcgtggcggcgggcttcctcagcgccgggaccgtcgcgtcggcatccagcgcatgcccggcttacccgtggtcacaggacggggcgcggggcgggcacaaggtgttcatgcagcacgactgcgcggcgtgccactcgggcctgccgtacgctggcctcgccgacgaggccctggcggccggaggcgaggtggaagccaaggcggccgagatcgtggttgtccatgaccacgaggaggaggcagcgctgacgacggcgacgacgctccacggcggcgcctgcccgccggacctctccgccgtcaccaaatttcttcagtcgtacgtgaggattccccaggcaccctga

SEQ ID NO: 36131 - DNA, 1008 bp, Zea mays
  Peptide Sequence Number=SeqID_79506
atggggattggatggagggggttgaacaggatgatggagaggtttaaggataacatggagttcaccaagttgaagccgaagatggcagggattgaccctgatgatgtttactctgaagtgccctatgagaaaggtttccagttcctttggagaattgagcgtgagattggcaggcctactttcgacgagtttttaaagaagtacattgcaaccttcaagttccaatcaatagatacagagacatttcttgaattcctcaaaaccaatgtacctgggatagaaaacaaaattgaccttcacctgtgggttgaggggactggtatccctcccgatgccatggaaccagattcagctacttacaaaaagatctgctccttagctgcagaattcaaatctggaaaacttccaagtgaatatgaggtggcaaagtggagtgggcaagaatgggaactttacatagaaaatctaccagcagatgttgaagcctcacagatatcatctgtcctgcttcatatgactattgtgattgataaaatcttggagaaaggtaccgttgagtacttaatagtgcacacggccatattggagtactttacaattgcagataagacaagggaaggattaaaactaggaattagttgcctcaagtatggcagtgcaaagatgatcgcaaagattgttgtggtttgtaatgatgcaatcattggccactctgagcatcaatatgttgctacagggatgcccacaaaagctgctctgaagcacaatgcttccaccagcgcggccgtagaggcggaagcaaggggttgggcttctgtcggtgttggacagcgcgatgccaaacagacggtaatggaggaggcctcgcccgagacggtggaggagccactgctggtgagcgcaatcagagggaaaaaggttgagagggcaccaatctggctcatgaggcaagccgagagatatcatactgtacccagaagttgccttcacatgagatacaaagtctga

SEQ ID NO: 36132 - DNA, 696 bp, Zea mays
  Peptide Sequence Number=SeqID_79507
atggcggccaccgcgatggaccatgacggcggcgacgacgtggtcacaccaggggagcttctcggaaactcattaaccctcgcggccggacgtggcgcctacgccgacggtcgctctgtgcgcgcgtcggtcaccgggcgccgccgcatcgtgccgcccgcacctggctccgacgaccagagatccacggtggaggtggtggggcacaaggcccatggagctgtgccgcagccgggaagcgtcgtcatcgcccgagtaacaaaggttatggctagaatggcctctgcagatatcatgtgtgttgactcaaaggctatcagagaaaagttcactggcatgataaggcagcaagatgttcgtgcaactgaaattgacaaggtggatatgtaccaatcatatcgtcctggggacattgttaaagctatgctttctcttggtgatgcaagggcatattacctttccactgcgaaaaatgaacttggagtcgtttcagcacaaagcatagctggtggtacattggttccaatcagttggactgagatgcaatgtgatttgaccggtcaaattgagcaaaggaaagttgcaaaggtggtggcggtatacaaattgtggaccagtgacaccaggtccttgggcggactacccaattctgcgacgcccaacttcattacagctgcattgagcatgggtttttaa

SEQ ID NO: 36133 - DNA, 1641 bp, Zea mays
  Peptide Sequence Number=SeqID_79508
atggtctggcccacacacgcgtcgcgtcgcgtggccgttgcccagccacccagcccgcccggaaaagtgcagcctcgtcagagtggtgggccagacagcttggccgcccaatccagcgtcgccatcccatcgtcgtcgtcttccatagctgagcttgtggtgtctccgcagtccgcacttggcaattccgtggccattatctactcctcggctcctctcctcgcagaagaattcgttcccccaatttggagttggaaaagcgtcgaccccagaaaacgggaggcctcgacctcgctagtctccgttccattcgaaaagccatcgcctggtcgcagtcgtatcgatttgggaacccctgccccacccaccactgcgggctgcagcctgccgtttcgctcgaacgaagcaatgctccaggagatccaccgagtgtttggcgagtggaccgtccgtttccagattgacgcggccaataaggagaatgctgtcccgttactcttcactgatggtcactttgcacggcaacctcagccggtgctacaaggccatgagcgcgctgcggccagatggggtatccaggcacttcatgtccgctggtggtttcgaacgcgtcgttttaggggtggtgctcgtcatgtccatctcgggagcttcttatacagcaccgtcatgaagtctggtacgcaaggcgcactcacgggtgtaggtttatcgattggttacccaatggcaattaatggatcaccttcaggagttgctgtcatgacagccacccctggtggtcctgcagaaaaggctggcattcttcctggagacaccattttggcaattgacaacagaagcactgaagatatggatatatatgatgccgcagaacgcttacagggccctgaaggaagttcagtagatttgtctattcgtagtgggaccaataccaggcatgtcgttctaaagagacaaacagtcaatttaaaccccgtgaggtcaaggatgtgtgagattccaggttcaaaagatagctcaaagatcggttacatcaaattgacaacatttaaccaaaatgctgcagaatctgttaaggaagccattaagacattgagggacaacaatgttaaatcctttgtgctggatctgcggaataacaggtttgagcctgcagaaattgggattggtggcctttttcctgaaggaattcaaattgcaaagatttggatggacaagggtgttattgtatatatatgcgatagccaaggtgttcgtgacatttatgaggctgatggcgctgatacaattgctgcatcagaaccgttggttgtgctggtaaacaaaggaactgcaagtgcaagtgagatccttgctggagcgctgaaagacaataagagggcagtcgtatatggggaaccaacatatggaaaagggaagattcagtcggttttcggattatctgatggatctggcttggctgttaccgtagcacgctatgaaactcctgcacataccgacattgacaaggttggtgtgattccagaccgaccactgccagcttcatttcctaccgatgaagatgccttctgcagctgccttagggattcaacggctgcttgcaatctgaatgctgctcagctgtttgcaaaatcatga

SEQ ID NO: 36134 - DNA, 1521 bp, Zea mays
  Peptide Sequence Number=SeqID_79509
atggacgccggcgacgcctccaccgcgcttgccctcacggcggcggaaccatcaccgccgagccccaacaggaggggcaagaggccgaccaacccgcccaagcgcttcgtgcacaccccgatcccgccttcaatcctctcggacccgaccctggccgccgccgccacctccctcctcccggccaactacaactttgagctccacaagacggcgcaccgcatacggtccgcggccgctcgccgcgtggcgctgcagctccccgagggcctgctcctcttcgcgctcccactgtcgcacctcctcgcgccctacctcgagcccggcgccgacaacgacgtcctcgtcctcgccgacgccacctacggggcctgctgcctcgctgaccgccccgccagggcgctcgccgccgacctcctcgtccactacggccactcctgcctcgtccccgtcacggcctcactcctcccggtgctctacgtcttcgtcgagatccgcgtggacgccgcccgcctcgccgccgccgtcagagccgccttcccggacccagcggccgcgccccgcctcgccatcgccgggaccgtgcagttcatcgccgcggtccacgccgcgcgcgagatgctcacggtagagggctaccacgacatcgtcgtgccgcaggcgaagccgctgtccgccggcgagatcctgggttgcaccgccccgacgctcaagaagtcggaggaggtgggcgccgtggtgttcgtcgccgacgggaggttccacctcgaggcgtttatgatcgccaatcccggggtgaaggcctaccgtttcgacccattcctcggggttctcgtgctggaggagtatgaccatgttggcatgaagcaggcgaggaaagcggcggtgctggcggccaggaaggccaagagctggggagtcgtacttggcaccctggggaggcaggggagcaccaaggttcttgacagggtggtggagcatttggaggagaaagagttggaacacacagtggtgctcatgtcggagctttccccggcgaggatggagctatttggagattccattgatgcctgggtgcaaattgcttgtccacgcttgtcgatcgactggggggagggtttcaagaagccagtgctgacaacgttcgagtttgatgtcgcactgggctatgtccctgggtggtgggagaaggggagcaggggttgcggtagtgaatgtggtgttgggtgttgttcaggatcaggaactcgtggaaactgcaactgcagtgatggggattatggtggtgactacccgatggattattattcgcaagatggaggtgattggaatagctgctacatgaagaagaagccatctactggcgagaggaaactgcgggttcggattggtaagtgctcaacatttctacaaactctgccatcactgaaccataattacatgacccaatatttggttaggcttaatattaagaaacaattatataagttagattatggtggaaaggtaggagggaacacttag

SEQ ID NO: 36135 - DNA, 1674 bp, Zea mays
  Peptide Sequence Number=SeqID_79510
atggcttcccccacccagggccaggtcatcacctgcaaagcggcggtggcgtacgagccgaacaagccactcgtgatcgaggacgtgcaggtggcgccgccgcaggccggcgaggtccgcgtcaagatcctattcaccgcgctctgccacaccgaccactacacctggagcggcaaggatttgatggcgcactgtaagactttttcctactttccctcactaacaggggatggtgccatcagctgtaacgatcctgagggtcttttcccttgcattcttggccacgaagctgccggaattgtggaaagtgtcggtgaaggagtaactgatgtgcagcctggggatcatgtcattccttgctaccaagcagaatgcaaagaatgcaagttttgcaagagcggaaagaccaacctctgtggtaaggtccggagtgccacaggcgtaggtgtcatgatgaatgatatgaagagcaggttctctgtaaatggaaagcccatttaccatttcatggggacatcaacattcagccagtacactgtggtgcatgatgtcagtgttgcaaagatcaacccacaggcacccttagataaagtctgcctgctcggttgtggtgttcctactggtcttggagcggtgtggaatactgcaaaggttgaatctggctcagttgttgctgtttttggccttggaacagttggacttgcagttgctgagggagcaaaagctgctggtgcttctcgagttattggcattgacatcgacaataaaaagtttgatgttggtatggtttacgtcctccgcaattatgttcttcgactcttattcttctcttatgttgtttatcagctggtgaaatgggaaaattctaatttcctttgtttccaatgcactgaacgtgtccattttcttgtgcaagttgtggaacctgttaataaattgggaccactaacttctgttgcttttgtttctattaaaaaaggacagaccgaagtggggtctaggaaaggaataaccgaggcaagccccacccctgcaatttttgtggagaggctgcattttttatctaacgtggaacagaaaatctccaaagttatattctgtagggctaactctattaatttctacaatgaaaacttggatgcaacaactgtagttaccgaatctgagtggcttgatagttctgaatttcctgaacctgatttttatttcctcgttaatatattcccagtggtcaaagcaaagaactttggagttacagaatttgttaacccaaaagagcatgacaaaccgatacagcaggtcctggtcgatcttacagatggcggcgtggattacagctttgagtgcattggaaatgtttcggttatgagggctgcactggaatgctgccacaagggctggggaacctccgtcatcgtcggcgtcgccgcctctggccaggagatcgccacacgaccattccagctcgtgactgggcgtgtctggaagggaaccgctttcggtggcttcaagagccggacccaggtcccatggcttgttgacaagtacatgaaaaaggaaattaaggtggacgagtacattacgcacaacatgaacctggctgacatcaacgacgccttccacctgctgcacgaaggtggctgtctgcgttgtgtgctggcaatgcagatttga

SEQ ID NO: 36136 - DNA, 891 bp, Zea mays
  Peptide Sequence Number=SeqID_79511
atggccacggccgtgctccgccgcccattcctcgccgcgctcctcctccccgccgccggaggggcgtccgggacctcctcctggttccgtccccggagacgtaggtcctctccttccgtgcgcgcggtgtcttccgactcccccaagcccgtcgcctccacttcctcccccaccggcggtgacagccccgacgaggaaccaccggtcctaccgctcctccaggagcttgcggattgcttgattcttccgcccaagctcctcgctcagctcccgagcgaccttcgtctcgacctcaatgacgctgcgtttgatctctccaacgggccagttctcgacgaggtaccaaagaactcagcattcagcaactggatacatgctagaggtttcagcacaaccaagcacgcttacaatgctcatttctttgctgagacatatgtagcgtttggcaagcggctggtgtcagctggaaggaggtttcagtcaatgggacagtacaaccagggagaactcaaaaagattgctgaaacaatgatcaagaatggtaagctgctatcgaaacacccagtggttcaatctgatgttcaggctatgaaagaaaaaaggagactaaagtttggagaacttgagttcggagtgactgctcaaagtgccactatcggttctgcagtagcggcaatttttggattaatctcatggcaactagcacgaggcgtgcaaagtattcctgacaatacaacgcaatacacaaatgacaatgcactgcagttggccaagtcgctcaagaccgcactgcttgttcttggctacacatctaccggcctatccttattcgcggcttttgggctgctgttgctagcccagcagattaactctgagaacaaatcggagtaa

SEQ ID NO: 36137 - DNA, 486 bp, Zea mays
  Peptide Sequence Number=SeqID_79512
atgtcgaagcgagggcgtggaggttcggctggtaacaagttccggatgtcactgggtctaccagtggcagctactgtgaactgtgccgataacactggagccaagaacctgtacatcatttctgtgaagggaatcaagggtcgccttaacaggcttccttctgcctgtgttggtgacatggttatggcaaccgtgaagaagggaaagcctgaccttagaaagaaggtgatgccagctgttattgtgaggcagcgcaagccatggcgccgaaaggatggtgtctacatgtactttgaaggaagcttgttctatgtaaacagtgttgcttctattctttacacaataaggagtgaccatcccaacaatgctggagtgattgtgaacccaaagggagagatgaaaggttctgccatcactgggcccatcggaaaggagtgcgctgatctctggcccaggattgctagcgcggcaaatgcgatcgtctaa

SEQ ID NO: 36138 - DNA, 474 bp, Zea mays
  Peptide Sequence Number=SeqID_79513
atgggcggcgtcggcgccggctctctcgccctgctgcggctgctcctcctcctgctcctccgcgccgaggcctccgctctccacggtacaaagccttcgacacttccctttaccgtccccgtcggtctgtcctgtcccgtcccgtcccgctcgatccttccctgtgtccgctcccccctccgcattccgcggggttgctcgccgtggggcggtgcgcccgcgcttcgcgcttcgggcgggcggggattccgcgccccgttccgcatttcaccgaaacctccccgaccttgccgggcgcgctgctcctgctcctgctcctgccgccgtgcctcgctgccgtcccaagcgcgctcgcgcccgctgctggagctgccatttctgattacagcgcagcgcatggttttcgcattgtgcgaggatctgacgactggcgagaggcgcaaggtctacgaatactgtcgtgggttcagttag

SEQ ID NO: 36139 - DNA, 2964 bp, Zea mays
  Peptide Sequence Number=SeqID_79514
atggccaaggcggagaagctggtggtggaggtggtggcggcgcacaacctcatgcccaaagacggccagggctcctcgtcgccgtacgtggaggtggagttcgagcaccagaagcgccgcacgcgggccaggcccaaggagctcaaccccgtctggaacgagcgcctcgtctttcccgtctccgaccccgacgacctgccctaccgcgccatcgacgttggggtatacaacgaccgcggcgccgccgtcggcggaggcggcgctccgcacgggcggaacttcctcggcaaggtgcgcgtcccgtccgccggcgtgccggcgcccggcgaggaggcagtaccgcagctcttcaccctcgagaagcgcagcctcttctcccacatccgcggcgagatcaccctcaagatttaccgcgtcaactccggcgacgtcgtcgtcaagtccaagcaggagaagccggcgaaggcggtggtggttgggccggaggtggtggcggcgccgacggtgactgggcccaagaagcagccgcactcgcacccacacccaccgccgccgcagcagcagcaccagcgccatcctctggcggccgtgcagccgccgccggagccgcccatggatgtcatgccgcaaccgccggtcccgatggctatgaagccggtggcgatgcacgcggacccttaccccgtcccgcccatgttctccggccctgcggacttctcgctgaaggagacgcggccccgcctcggcagcggcgtcgtcgccgacaaggcgagcgcgacctacgacctggtggagcaggtggagtacctctacgtgcgcgtggtgcgcgcgcgcggcgtgcccatggcgaccgaggccgtcgccgaggtcaagcttggcaactaccgcggcgtgacgccggccgtcccttcgcacaactgggaccaggtgttcgccttctccagggagaccatccagtcgtcgttcgtggaggtgttcgtgcgcgcgcggggcagcgacgaccacgtcggccgcgtctggttcgacctatccgaggttccgcgccgcgcgccgcccgacagcacgctcgccccgcagtggtacagcatggaggaccgcaagggacagcgcggcggcgcggaggtgatgctcgccgtctggttcggcacccaggccgacgagtcgttcgcggaggcctggcactccaaggccgccggcgtccacggcaacggggcgcttggctccatcaggtccaaggtgtacgtcgcgcccaagctctggtatcttcgtgtctccgtgattgaagggcaggacctgttccccatggacaagggcccgttggcgatcggtcgattcccggagctcttcgtgcgtgcgcaggtggggagccagatcatgcgcacacggccggcgccggtggtgtcgacacggggacctgcgagtccattctggaatgaagacctgatgttcgtggtggctgagccatttgaggagttccttgttctgtccgtggaagatcgtgtgtcgccaggccgtgatgagttgcttggccggctcgtcgtgccggtgtctgccattgagaggcggtgggattggaagccagtggtttccaggtggttcgggctggactgtggtactggtggtgggggcaatgttgctggcaacagtgtgcacaggttcgggagccgccgtgtgcatctccggctaagtcttgatggcggttaccatgttctggatgaggctacagcttacagcagcgacctccagcctacagcaaaacagctatggaagccacatgttggagtgctcgagcttggtgttcttggtgccactggcctgatgccaatgaagtcacgtgatggtggtaggggcgcgacgacggatgcttattgcgttgcaaagtacggccagaagtggatccgcacacgcaccattgttgactcgttgtgcccccggtggaacgagcagtacacatgggacgtgttcgacccctgcaccgtcatcactgtagttgcattggcaaggtccgtatccggctctcgacattggagactgatagggtgtataccccatgcctaccctctgctgatgctgcatccaacgggggtgaagaagatgggggagcttcacctagccgtgcgcttcgcctgtggcaacgccggcaacatgttccatgcctatgcacacccattgcttccgaagatgcactatgcagagccactcctcgtgcgccaggtcgagacccttcggtgtcaggccaccaacgtggttgcggcccggcttggacgtgccgagccacccctcggcaaggaggttgtcgagtacatgcttgaccatcgctcaagcctgtggagcatgcggcgcagcaaggcaaacttcttccgcctcatcaatgtgctctctggccctgttgctatcgggaggtggttcgagctcgtccgctcttggcagcgcccggtgcactcatgcctggccgtgttcacgttcctggtgttcctcgcaacgccggagctggttcttccgacagcctttctggccatggcgttcgctgggctctggaggtacagaggccgcccaaggcacccgcctcacatggagatgaggctgtctcacgcggacggagccaccgcagacgagctggacgaggagttcgacacgttcccttcgacccgcggcgacgtcgtgcgtttccggtacgaccgcctccgcagcgtggccgggagggtccagacggtggtgggcgacatcgcgacgcagggcgagaggatgcaggccgtcctgagctggcgtgacccgagggcgacgctgctcttcgccgtcgcctgcgtcgctgccgcggtgatcgcgtattgcgttcccacgaaggtgatggttgggatgtggggcctctacgccatgcgtccgccgaggttcaggagcaggatgccttccccgctgatgaacttcttccgaaggcttccttccagggctgatatcctgctctga

SEQ ID NO: 36140 - DNA, 186 bp, Zea mays
  Peptide Sequence Number=SeqID_79515
atggcgcctgccatgcagctcgcgtcgcctgtcttccagtgtctccctgcctgccgcctacagcaacaggacagcggacgcgaggaagaggccgggccacccgtcgtctcgtgccccgtgctgcctgcctctgcccttgttcttcccctacgccccgccgaccctgcaggctgcagcctgcactag

SEQ ID NO: 36141 - DNA, 732 bp, Zea mays
  Peptide Sequence Number=SeqID_79516
atggccgaaaggtaccaactcccgcggagttgcattcccccgacgacaaggcagaaagacggcgggtatcccccatccgggggcttggaaggtggaaagacacgatgcataaggaagcacgaagacatggtcgccttccaagggggtcaccctccttttaaaggcggctctccctacttgcgtccccagccgtcgtgggctgagtcttctccaacacactccaaggtcctccttctacggcgtgggggctgggtcccacacgccatgcaagccggctcagagcagaagaagccaaaccgccacgcgtggcccacgcgtcatgcaaccggcgcgctgaatgcttcgtgcatgcaactgcaccgccacttgcgccactaccgcgcctcctcgactgcggaaccaataccgcgactcgaggcgacccagcgcgcgacccagcagcgccagcctggcacgacggtcaatacggccaaatatgggccggcagtaatggcggtggcaggcgggcaggagcagcggtcacgtcgtcaggcaagcctacgtcccatccaggggcgacgagagaaccctctctcgcggcgtgaagacaacgcgcccgtgttccgttcctcgaacggctcgcgcacgcgcaacggccgccccgccaaccactcaccccgtcgcattaactccgcggcgggacaggcggcgcctctggcaggagaagcgggcgacgcttcgccttcgccataa

SEQ ID NO: 36142 - DNA, 75 bp, Zea mays
  Peptide Sequence Number=SeqID_79517
atgtcctccgccatgggagccgcgggcgccgtcgtgctgatgcagtcaatgggaaggaagctgaatcttgtataa

SEQ ID NO: 36143 - DNA, 507 bp, Zea mays
  Peptide Sequence Number=SeqID_79518
atggcacccaaaagagctaactcgaaggcagccccatccgtcgacgaagcagcgaaggcagccctgctagctgagaaaaagggcaaggccctcgccgacaacacccgccaaggagctggtgaagatgaagcacacagcaagagacatcgcaatgaccaacacactctagaaggcaccctttgcacctgcagctccgaagggcagccacaagtgccacccccaggcttcgcaccaccagcgggcgaggacgcagcagaggacggcgaggtcctcggcgtatccacagaagagcagctacagctacgggccctacgcctcataaaccgcaatcttcagaagcagaaggaaatcctcgaggtcaaacgccaacacgtcactgtgcaggccaagctgcgccaaatgatacgagatgaagagcagagggcccaggagcttgagcaagagattgcgctcttgcagcgcgaaggccaacacgatctgcagcagcacggcccgcccctccagtag

SEQ ID NO: 36144 - DNA, 207 bp, Zea mays
  Peptide Sequence Number=SeqID_79519
atggcgagagtggcgcgtaccctcctggcaaaggaccgcctaaaaggggtgaaattccactgcaaaaatgttggtcacgctgttgcagagcctgacaatgtccttctggctgttggttgtgaaccaaggcaagcaccagtggtggcggtggtgacaactaagcctaggaggcttgggagtgacatgctgaagcaacagaagtcgtag

SEQ ID NO: 36145 - DNA, 300 bp, Zea mays
  Peptide Sequence Number=SeqID_79520
atgaggatagcgaatgatgcacacacggcatggcgtgctacagcgattgagtgtcgaggcgaggctagagaagtggcgtcaacaccgggcgaggcccaagctgcaaaccgggcaagggagaaggagcttgcaggggcgccaagacgagggagcagcacgctggggaggccgagtagggagcatgtgctgcgacgtccggcgagcagaggccctgggcatgagctgaagctggaggccgagcagagagaagcaggcttgaagacggcgcgcgcatggtgctacagatggcccggttcctga

SEQ ID NO: 36146 - DNA, 183 bp, Zea mays
  Peptide Sequence Number=SeqID_79521
atgggagaggacaggagcagagacggggtgggcgcgtccacggctgctctaggctctcgcgaggccccaattgtgccagacttcagcgcggccagggagatgagcagtctgcggcttgggggattagatttagacgaattccgttcgctactcgaacactcaactagagaacaattcgagtaa

SEQ ID NO: 36147 - DNA, 402 bp, Zea mays
  Peptide Sequence Number=SeqID_79522
atgccccctgcaccacagggcatcccggctgctggaggagaccctgacggagacgacgacaacgacgctggtggcagttcgagccacaacatggagctctccgaggagcaggagtcggagggatggatcgctagatccatcactcgcgacgctactcgcgggtgtcacttccacgacgctctcgacaccttgctgcgtcgggccttcgaccgacacacttggtctatcaagtactgttgtgtagtctaccagcatcatcgtgggttatacccggaccagtgggaggctacatgcttagtgcaccgtccggacaatgatctctggggtgtagaggccttcttagagcactattctatcactgagagggatactgccgaggcagccatgcaagatgcagcatga

SEQ ID NO: 36148 - DNA, 403 bp, Zea mays
  Peptide Sequence Number=SeqID_79523
atgccaaattggctacgggtaggcgtgaataaggaaaaccaaacacgagaatggacgtcagagctcgggcgtcttagcgcttcttctagtgggctgggtgaccaggacggcgggcgcaggtctccgatgaggtcgagcagcgagggcagagcgcgaaagagggtgagcttgcgcgaaatggggcaggggagcgagtgcgggtgcgggtggggctcaaaagagagctgggtgcgtgggaaggcgacgtttcttgggatctcggcatgcgtgcgcgctggtccacgacggttcgtgggggaaggcggagctgactgggcagtcccacggcgcagcgagggagagagcgggcgcgcggcaaaacgtttcagcgtgctggataggacgggcctgcgagggttgctag

SEQ ID NO: 36149 - DNA, 276 bp, Zea mays
  Peptide Sequence Number=SeqID_79524
atggaattaccactagacgcgcagagcagcggaagacgtctcgatgtagacgaacgcgtcgagcagtgccgtgcagtcgccggtgttcttcacgtcctcgcacggttcgtccaagtgctccagatgcagcacctccgagcggccgacgtccttcacgtcctcacgtggttcgtcctagtgttacagatgcagctgaaggaccgggagcttcagttcatgatggaagttttcacctctgttgaaggtcttcaagatgaaggtatagctcgagaatga

SEQ ID NO: 36150 - DNA, 798 bp, Zea mays
  Peptide Sequence Number=SeqID_79525
atggtccgtcgcgagcccatgttgtctgcccctcgctggtggctcggctcctccacggcggtcgacagcatcaccaactccgacttccacaggtcatccacgaagccacccactgttctagacggcaatctcagtccagaaccacgattgatatcaaaaccagagaatgaagaggacaaaaacattaagatcattttattgttgatcaagttatcgttgatcccgatcttcgcatgccaattaagtaaatcgatgcaatgtcaatgtgtaggtttaaattcacgtgctgatgtttatgaagctattagaggcgaggaaaccagatcatctttaattagtgggatattggttgaacgattggtagagatgaagaggtttatcagcggtagagatttttttagtgggggatgtttggacgatcctccagcgaatcaatttcaaacgtcttcaaaacgtaaacgtgtatatgttgagccacaaaatcaagaattcaagatggataatgaaaaaacttactctcagaagattaaggcggtggatgctagacaaggcaaattacaacgaactaatagactagctactacccataaggcaaggcaatttgagttggaaagagacattaccttcgataatactaagtccgctaattcatcgaagagtatgaccaaggaagcaacttataattctttaaacgaagaagcatctaagcaacaggtaaaactgaaagagaaatctacaactacctttgataaaaccaagtgtgctaccacatcaaagattgaagacgacaaaaactga

SEQ ID NO: 36151 - DNA, 141 bp, Zea mays
  Peptide Sequence Number=SeqID_79526
atggaaattggaataaggattaaggtgtggtaccgttctctggaggacatggttgctggagtgacttggccgtccatcttgccactgggttggatagtcgagtgggaccctacctcggctgaggaggagcatgaggagtga

SEQ ID NO: 36152 - DNA, 759 bp, Zea mays
  Peptide Sequence Number=SeqID_79527
atgagcgaatctgacggttgcgccttgcggcggccgccgacggcagcggaggtggtggggcggctcaaggatgacggcgacttcgatgctctccgccgcgccatcgtccggaaggtcaaggacaacatggaggaagttttagctttcaagggattacctctatcagatatgtgtagaggttctccaaaggtttctctctatccgacacatgtagagattcaccaaaggttctctgataggaaggagatactacggaacaaaatcatctcagaggtaaagcagtcagtggttctacaagaagatggatctgagaggatgaaattaaaagacctatctgatgcaatttttcaagatattgggagcaaaataatgggtcaaatctcagatgaggtatggaatgtcatccagtcaaatgaaactgatatacagggaactgtgaaagccgtctacaataggatactgaaccctgaaaaggtctctgagccttctcccaagaagctgaagcagagaggcaaagaggaacaagttctgcccacaaagacagcaactagcgttgcagtcgaggcggaagatgatgatccagaggagccaccaggatttggtttcaacaatacacagcgtaatgatattggagcaacaaagccacagatgagtttggaaaatggtaatgaagggaagccaaatggaggcgagccagctactatcagcaatccaggggatgaggaggaagatcctgaagtgccccctggatttggttaa

SEQ ID NO: 36153 - DNA, 594 bp, Zea mays
  Peptide Sequence Number=SeqID_79528
atgacttctcatggatcctcggacgaagggaatgcacagtcccacacggacggacttgtacgagagggtttcccccgtatcttatgggaggtacttcagggagctggttacacgacgcctccccagtacgcggtgcagctgtttgagaagcaccgagtgcctcactataggaaggaggacaacccaatgtggaaggaccgagtggagcatgtcaaggatatatgggctatctacccaggtcagaccgctcacttgacgatgcggtgcatgaatgccctgtatcgtctacaagtgatgcgaggagaggcaatgtcccatctgatggcattgttggaggctaccaagatcaccttggataacaaagaggaacttgtggtagacttgtccactgagatggtggaaaaagacttacaagtggaacaattgtcaaatgagatccaagagcttgaggagttagtgggaaccagagagaacaccatcgaggttctcgaggatcagcttatcaacactcagcagcagcttgcggaggctaaccagcatctggatatgcatcatcaggagatccaggacatggaggccaacgaggatgtctga

SEQ ID NO: 36154 - DNA, 183 bp, Zea mays
  Peptide Sequence Number=SeqID_79529
atggacggtgggttgttttctaaaaagtcgggtgttggggacttgttctcaaatgctatgggtcaagaacaaggcaacatagaaaatgttaatcggaataatgttgaattacaaatgtaccttcaacttgaaggagatgaaagtacaagcgtgacgcaaaaagcgaatgccaaatcagcgtga

SEQ ID NO: 36155 - DNA, 387 bp, Zea mays
  Peptide Sequence Number=SeqID_79530
atgagtcagtcggacacggcggccggggttgaacagtggcttaagttcatcctcaaggcgatattttctaccccgagcagctatcagtactccattgagcacgaatcgcagcgcctggcgcgaatccgagcgcgtggtcgccagcggcgagcatttaaatcaacatttgatctcttaaggctagaaatagactcatggcaagaaaacaattcagaagacgatatttcatttttcttagtctctaaagcaactgctcctggacttgaagcaaagcttggaaatctagcaccagcatattcagctgctggccgaattgctccttattttgtagaaaggtttcagtttgatattggagtctctcacccttacacaattaatctcaagtaa

SEQ ID NO: 36156 - DNA, 321 bp, Zea mays
  Peptide Sequence Number=SeqID_79531
atggtgtccttcgagcacgagtatggtagggctcacggaaaggagataaagggaggtccacgctgcgcttttatggggccaagtggcggctggcgtgcagaatccgactgggggactatcaggtgggccatggttgtcggcgccagcgacgacgaggaagcaaggatccccacagacttcgatgaatgtgttagccgccaagatcttgaggcaaacaacaagctcctgaaggagcaaatggaggagacggtccacaagtcagtgcatgatgccttcattaacatggaccttggcaggacttacgagagactggatcgatga

SEQ ID NO: 36157 - DNA, 744 bp, Zea mays
  Peptide Sequence Number=SeqID_79532
atgtccctctcgaactacccgcatgcacgatccgcgcgtcaccgtggactccacgcccacgacacacaccgaggctgtgcctgtccccactccagcccttttctagatgcccagtgccccactcggtctccttccccctcactcgcgcactcgcaacccccagcactcgccttgccctgcgtgcacacccagggagctctgccaccgttcgccgttgtctcgtgcccgttctacggtcgctgtcgagccctcgccgtgtatgttgcctcgatgagcttcgcctcatcacccgcgacccgggacacccctcggtttgctccctccccctctatttctctcggtccacgctcaccgatccactctctgcccagtcacagctccaccgccgtcgacccgtgcccacaccgtgccccggacgcggttcgtgagtcctcgagccttctctcaagaccaatccctagcgctctaggagccccagtctgcctcgcctccggcgactgcgtcgccgagtccgcgtttggcgccgcccctggccggccggagaagttcgtggaaccagagccgtcgatctgcgatccagtggccagcacgccccgcgccctcggcacatcactgacccatgggccccgcgtagatcagacggtcggtacaagcccgtaccccttcgcatggtatcttcggactcaagtcggcatcacagcagaccagaataatacgaaggttgataaagcgccgaaggtgtga

SEQ ID NO: 36158 - DNA, 69 bp, Zea mays
  Peptide Sequence Number=SeqID_79533
atggctcgtagaagatcccaaaagaacaagaagacccaggagaacaaggagggtgataaatgcttttag

SEQ ID NO: 36159 - DNA, 66 bp, Zea mays
  Peptide Sequence Number=SeqID_79534
atggctggaaaacagcgccgctcgctccgctccgactgccgtgtcagccaccccggcaacgactga

SEQ ID NO: 36160 - DNA, 471 bp, Zea mays
  Peptide Sequence Number=SeqID_79535
atgtccggcagtggagtgcctaagccctgtgtacatgccaacgtggccgttgggggagagcttgggccctgtacatgtgatggtgtggccaccggaggagcgcctgagtcctgtaggagcacagctagcagcgcggcgaggatcctgctgacgtctccttgctgtcgtaaggggctgagagccacctgcgtcatggtgcacgtggggcaccatcattacccgtcgctgggtccgagcccagggtcggtcgaggcggagacttctcttgaggccgaggccgaggtcgggcgaggacgcgattcctcccgagaccggggtcgaggccgagtccgggggtcgggcgaggcagagacctcctcccgaggccggagcctaaggtcgggcgaggcggagacctcctcccgaggctggagcatgaggtcgggcgaggcggagcttcctattgcgcccgaggctaaactcgatggttga

SEQ ID NO: 36161 - DNA, 135 bp, Zea mays
  Peptide Sequence Number=SeqID_79536
atgcccttgagagtcttttccttagtcgggcttattgtaatactctacatgaagaagttcatgtattgtactcacaactacaccccagtgtacctgtggatcctgtcgggacagaagtcggaccttctcaagtag

SEQ ID NO: 36162 - DNA, 132 bp, Zea mays
  Peptide Sequence Number=SeqID_79537
atggccatgatgggttcaacatcggaaaagatgtacctctgccaggaccgtgccgatgtaggcttgatgatcgaggaccctttaactggtcacatgcctcgtcatgggttaactttgccttgggcagactaa

SEQ ID NO: 36163 - DNA, 402 bp, Zea mays
  Peptide Sequence Number=SeqID_79538
atggaccagcggctcgggcggtgcggggaacgagtgaggggacgccagggcgcaggatggctgataggtggggccatggtagggccgggcctactggtcagcggcacggggcaagcgcaggcaagggcgtcgacgcgtgatgatggacgaggcctgccaaacggtgacccagagcggaggtggttggcacggtgcgcagcgctgacgcgtgggaccagggggtccactggtcagcggccacgcgaggggaaaaggagagggggacagggtgaggctgctaggtgggccacggctattagggttgttttcaaccccgagccaggcgcatggccggccatgcccgatggcgaggggggtctgtctggggcgcgtggtccacggccagggcggcggagccactga

SEQ ID NO: 36164 - DNA, 252 bp, Zea mays
  Peptide Sequence Number=SeqID_79539
ggcaatcccagattgagcagcatggtcaacttggtcaccgtgctaaacactgagctggaccacacccttgacgagttaggaaaggctcaggcggagattgcggaactgcgtgctgagcgcgtggagcgctgccatcaggaggatggttctcctgcccctgttgggactcggcacccttactgctcaccgcaccatggtcgttatgcttatggcacccctgactacaggacctggataaacttagagctctag

SEQ ID NO: 36165 - DNA, 330 bp, Zea mays
  Peptide Sequence Number=SeqID_79540
atgcccttaataaccttgcatgttgtggctgcaagcaaaggcaaagctgtaaggaaaataattcaacattttcttgaagccttgaaaatatacgacatttatcaagtaactaggtattcagcaaaaaatgccaaagcacataatgctgcagctgctaatgacggtcaaacagttgctaaggagggagaagagaaagtaaagatgcacacacattcatactgttgcttggattatgctcaggagttcaaaaggggtgtcatgctgtggaggcgttcacctgacaggatgtgtttggactttggagggattattgccacttatgtcatataa

SEQ ID NO: 36166 - DNA, 441 bp, Zea mays
  Peptide Sequence Number=SeqID_79541
atgatggtggcgggtggggtgagagaaattgatgaggagaggcgaaggacgcccggcgctgatgacgagggcatgagtgagggggacaccgacgcctcccttggcctccacagaggcgggggcgagggcggcgtcgaggattgcgtggcgggggtgggcaacacagagacattgacaattttgccattatggctggtgaagctggcggcccgcgccttctacgatgacgtctcaatgaagggcgacaaccagcccaagacctcccgcggggacaaccgcggcatggccgtcgtcgtcctggacgcgctcaccagtttggaaggaagtgttgtaacagaattctgcctagggaagcgacttcaaccacgtcttaggtcgatcaccagctgttatgaccggccgccactacaggcgccggatcacagcagaggcaatggatag

SEQ ID NO: 36167 - DNA, 411 bp, Zea mays
  Peptide Sequence Number=SeqID_79542
atggtggccgagggtgagacggtggcgctggagttcacacccatcgctgagcgatgcctccagtaccttggcaagacgctcaagaagaaggcggcttctcaaggtcaaagaaggtgccccatttcttcttatttttgcttcgacacttatcacaggaggtcccacgaccttatcttcaatgggaagtccatctctggtgattattctttgaaaggacagatgaatgaaggcaaaagcatgagcagagcaactggacagttaagggagactaaagttccatttccagtcttttgtctcattcagtggcacataagtccctacgaccttatcttcaatgggaagtccatctctggtgattattctttgaaaggacagatgaatgaaggcaaaagcatggagcagagcaactga

SEQ ID NO: 36168 - DNA, 375 bp, Zea mays
  Peptide Sequence Number=SeqID_79543
atggagagcctcgtgtatgaggagttggcgcctatggccaatcggttcatgtggttccacaacaactgccagaaccggcagcgtggtgggtcaaaggatggatgcttcaattgcgatgaccctgaccactccgtcgccaattgccccaagaagggcaagcatgaggcagccatcctgtcttcaacggtgttcatgggagggttggcggtgtcatgtgtttctctattggttcttgtggccaggccgggctcaggcgagacttctctcgaggccgaggtcgggtcagcgcatgggtacgcaaccatgcctagagtggttggtagagtaatcaaagtggtctcctgcgggattcgtggaagagttggtggcatttaa

SEQ ID NO: 36169 - DNA, 237 bp, Zea mays
  Peptide Sequence Number=SeqID_79544
atggcttggcgggaatgcatgttcgtgaactcaattttcgccgtgctcatggacagacagttcccattagccatagcagtcatcgtcggcgagggctggtacaggccgtgtcagagacgtgcggcgagcgtgccgcggtcagggagcttgttggagaagaaaagaaagtccagggacctttatggaggtgtcagtgagactgtggaacagtgcaagggattctttaaagaattttag

SEQ ID NO: 36170 - DNA, 285 bp, Zea mays
  Peptide Sequence Number=SeqID_79545
atggtggaggaaggtgtcaatagtgctattatcctcggtggttggagcctatggcttcatagaaatagatactcagcctttgatgcactacaactggtaagctacacggatgagtacttccattgtgaaacttgcaatggtgaactggttgctgaggatgacaagcttgcttctgaggaaatgggagatggcgatgacaatgttagaaagcgcaggcgtgagaaattaaaggacatgcagcaaagaattgaagttagtcctcagttatctttggaactcttctaa

SEQ ID NO: 36171 - DNA, 615 bp, Zea mays
  Peptide Sequence Number=SeqID_79546
atgggttcgggcgctgctccaccatccttggtctgggcgggtgttggcgctggtgttgggcactggagcttcgccgcaagggtgcgctcgcgttggtgtcaaccaggagggagagggccacctgtgcgctatgaatttctcgccgatggagatcctctgccgctgggccactacactccgtggttgtgttccaccacctacgtccagctctcgttgatcgacctgggaggatgcgcagcgcacacggatgttcgtcgcagcttcgcctgggtggattcgttctcggcgcggctggaatttctcaccgatgtgagctctccgccgccaaagcgtcacctgccatgggcgggcctcgtcaccacctcgcactccggtaagaagcctcactatgatccaccatattgcactcctcgaatagcactgatcggattggagtttggggcacggggcgtctgtggaccgaacgccggtggggaggagattgatttcggctgcattgaattcgggccctcggatcttgatccagtggccgttatttcaataccggttcgggatccgacggccatagatcaccaataccccttcgactttgtagatttatacatgagcccctga

SEQ ID NO: 36172 - DNA, 525 bp, Zea mays
  Peptide Sequence Number=SeqID_79547
atggacaggcactgttcactgtctagtgcgccttctagagctgctctgactctgcgcgaactgtccgcgcactgttcacgctgtcagccgaccgttgaagtcgactgttgcgctggcgaccgttgcttcgcttggcacactggacagtccggtgacccaccggacagtccggtgaattatagcggagcgcggcctcagaaacccgaagttaccgcagcggaagaaaagggcagaggggcttaccagcggcgaggttgctctggtgaagggtcgggcaaggtccgggggtctctggcgatcacgtcgaggctagggacagggagttgtaatgtcaccaagtcaccagtgtcagacagccgagtcccgagaacaaattgtgccaaaatcgtgtcaaacggttttggtttgagttcaaactttaccagagcatgttcaaggaaatttggtgccacttttatatttggactttatggatttgagttttggaagacagggaacacatctgaacttgggaaagggttctga

SEQ ID NO: 36173 - DNA, 198 bp, Zea mays
  Peptide Sequence Number=SeqID_79548
atgggggggcagctagggttttgggtgggccggcctgccaatgatggcattgaaagggaggttaacctccgcaacgtcgaactagacgttctcagtgcggaagttctcctcagtcctgaatgtaaccgggagtgcgatgctcccaaggggatacaccagttgagggcctactccagagaatgggcgagagggtcctag

SEQ ID NO: 36174 - DNA, 288 bp, Zea mays
  Peptide Sequence Number=SeqID_79549
atggcgatggtcaataccaggcggggtggtggaattgatttgcctcctaatcgacacactcgttggatatatagacaaccccagccacaaccagcagagatgaatcctcctaattctccaccgggcggagtggacccactgattgtagctcagatgaggatgatgcaacagatggcggacaccatggcagatatgcgtgctcagatgcagcaagaatgccaggagatgcgccaggaaagagaagagatacgacaggagttgcgccaggaacgagaggagatacgctag

SEQ ID NO: 36175 - DNA, 495 bp, Zea mays
  Peptide Sequence Number=SeqID_79550
atgggttcgggcgctgctccaccatccttggtctgggcgggtgttggcgctggtgttgggcactggagcttcgccgcaagggtgcgctcgcgttggtgtcaaccaggagggagagggccacctgtgcgctatgaatttctcgccgatggagatcctctgccgctgggccactacgctccgtggttgtgctccaccacctacgtccagctctcgttgatcgacctgggaggatgcgcagcgcacacggatgttcgtcgcagcttcgcctgggtggattcgttctcggcgcggctggaatttctcaccgatgtgagctctccgccgccaaagcgtcacctgccatgggcgggcctcgtcaccacctcgcactccggtaagaagcctcactatgatccaccatattgcactcctcgaatagcactgatcggattggagtttggggcacggggcgtctgtggaccgaacgccggtggtgggcgccaccattgtggctga

SEQ ID NO: 36176 - DNA, 435 bp, Zea mays
  Peptide Sequence Number=SeqID_79551
atggccgacaacgccaacctccctccgacctgggccaccacagccggcctcggcttcttgaccctcaactccagggtcgccatctaccgcgtgtggggcgacctcgtctccatcctactggtaacaggctcgtacgccgctctgctactccttttccgctgcctccgtgactacgagcgcgcggcgcccgggtcccagccagagcgcgggcgaggcgctgtgtggctgctcaccgtggccttcgcctggaaggtggcggcggctatgccgtcggccgccgcttcggccgtcatctgggcgcttgccgttggtgctcttcgtccttggattggcatgcgcatggactgtaacattccaggtgtttatattccgctcgataacgagtatggatttaaacatgtaatatcagtgaatgaaacagatgctaaaatttaa

SEQ ID NO: 36177 - DNA, 291 bp, Zea mays
  Peptide Sequence Number=SeqID_79552
atggaagagggtaggaggtgggagaaactcggatggaggccagggcaccataggagagggagcaaggagggtgcggcagggagctggggccaagcagccgccatggatgcagggacgcagtccgcgcgccagaagaagccgctcggctgggcgcggtccgagcagaggagcaggggcgcggctggggagagcgccatgggagaaggggagggagagagagaagcgtgcggggactgctcggcgagctgcgcgcagggaagagaagaacagggcgcgcgacgctggagatag

SEQ ID NO: 36178 - DNA, 570 bp, Zea mays
  Peptide Sequence Number=SeqID_79553
atggggattaaggccatgcgagccaagaggacacgctggcgagcaggaaaccgcgcgagcataagacagggaaaacgacgggctcgacaacacgcgaagcgacgacagtcgaatcggcaacagagcgttggcgaattcaatgaacacgaccacagtcgcgtgctgacgcggcgaacacggcgagggaacttgacacgcgtagagaaacagcacggcacagtggagcagggaccaagcgccagcgagcagggaaatttcgcgctcacaacagaggagcttcagaggggctcgacacgcgcagctggggctaacgtagttcaagcaggggcgaaccaggggcgcgcgaaatctgggacagcttggctgggcacgcggccaacaggagagctcgagggagctcgactgcgcggcgaccagggagctgcgcaggagcgcgcgacgcagggaggattggagggaaatccgggcgccgagcgcagaggcaacgcggccacaagggatctgcaagagtacggagacgcaaagcagcagagcaaatcgaccggtgaagaagaaactgaccgcacttga

SEQ ID NO: 36179 - DNA, 321 bp, Zea mays
  Peptide Sequence Number=SeqID_79554
atggccgccaatacccagaccaacagtgatcagcacgtcttctcccctatgttacccagacgtggtggcgttcaccggccatggtggcgctccgacgccgatccccgatccaatgaactggagccccattattcccaccggtgggggcatgtacgtcttccatgtgacactgtggggcttcctagcctaaatcctgaccccgaacagcaacatccctttggttttgcccgcggcgatattcacctcatcgttctcggtgccgtgttctgtgctcccatcgcggtcgagtatgaaccgatggaggaagagggagggggctag

SEQ ID NO: 36180 - DNA, 387 bp, Zea mays
  Peptide Sequence Number=SeqID_79555
atggcgaggtcactgctggaggccctcggcagccatgggaagcaggggcgccgtctgcgtggggaaggaggagcagggtgcggcttgggagagaaggagcccaaggagaaagaggtgctcgtggaagatctcgggcagcgcaatcactcgctctgtgcagttctcctcccgcttcgagtcgacaagatattcagcggggagtgctgcgctgccgtctgggctgttcctgctgggcgtgtctgtggggagaaacaactccggccacccgcatccggtagcaaggacaacgcttttggcggctctgcaatggcgccaccgtgccagaccacacgccgtcgctggacgtcgattgaagaagaaacactgtggccgtggatctcgtattag

SEQ ID NO: 36181 - DNA, 261 bp, Zea mays
  Peptide Sequence Number=SeqID_79556
atggtgcacgccaactgggtatcgtcgcgtggagttctcctcccgcttcgagtcgacaagatattcagcggggagtgctgcgctgccgtctgggctgttcctgctgggcgtgtctgtggggagaaacaactccggccacccgcatccggtagcaaggacaacgcttttggcggctctgcaatggcgccaccgtgccagaccacacgccgtcgctggacgtcgattgaagaagaaacactgtggccgtggatctcgtattag

SEQ ID NO: 36182 - DNA, 465 bp, Zea mays
  Peptide Sequence Number=SeqID_79557
atggctgggaaaaaacggacccccggtcatcaccgatcaacagtgactgcgtcgggcttttcttcccacggtggcgccatgctaacccctggtgagctgccaccaccgacacccggtagcccgaccctagatcccaacacgcgttatacagtgagcagcacaagagaagcggaagggttagccggtctcacccgaaacaacgacgcgaggcgaggagaaccgcggtccgaccttgacgcgctctggtgtggcacaccgacgtcccaggcgaggcccacggtgaacacgccaaagagctggcgcggcgacccgtcgaagcgtggctggggttttactgggctagggcgagttgaacaaggtcaaggcgaacggaggccgcaagggcgtggtggtccaacgccgatggcgcgttgcgacagcagggagaaatacggccacagaagagaggagatggggaagaaatag

SEQ ID NO: 36183 - DNA, 51 bp, Zea mays
  Peptide Sequence Number=SeqID_79558
atggcgcagccgcttacctctctctctctcggtttcgctctgctggattaa

SEQ ID NO: 36184 - DNA, 1218 bp, Zea mays
  Peptide Sequence Number=SeqID_79559
atgagtagtgatagtaatttatttgttgatgctcatgatctatggactaaaattaagttgaaattttttaagtccatatgcactgcttctgctccctctattgctggtggtactaacttgtccaagggagaagaacaagaacgatggacaccaagcgatggatcctcctcaccgacaagttcgtcgtccactagttataaatgtcttattgctaacaatgatagtggaggcgaaagcaatgatgaggaggaatatgaggatgatagcgaggatgagtcttcatcaccacaaggtacattttcctgtattgcttccactgataataatgacagggaaaatgagacctacgatgtggaagaagaggagatacgccggttctacacccatctcaacaaagaagacaaagcgctcttggttaagctgttgaggaggaacaaggaacaaggcgagacgcttctcaggctagaggaaactctcatcaaaaccaacgacagcctagagaagatgaccaaagaacatgaggagctaaagtgctctcatgacaatttggtccaacgtgaattagttgatgaccatatcatgctcgatattgctcatgaggtagtaactactagtttaaacttatgtgaatctcgttctggcacaagtgatcaattagttaaagtattatcatgtgctgacctccactgccccaagaaaggccaatctttgattgagaaacaggttgtagggtcaaaaagaaaattgcttaggaacaagaaacaaagacaattgaggagtagacgccatgctcgactttctcaagatatttacaaacatgtggtgaataagcttgaggaaggaggaaccgcagcaagggtcaaactccgcgagaaagaagctcccaagacaatcaacatgaacaaagaaaaagagcaaaaagagaagaggaaaaggaggtgcttcaagtgcaatgagctaggccacctcattgcgtcttgtccatacaaagacaaggatgaagggatgaggagatgttttggatgcaatgacaaggaccatatgatcactgcatgtctgctcatgaagaatcaaacatgtgcaccctccaggatgaccctcactaagaaaaaggacaaacaacaagcgtcatgtcaggttgagcaacacttcagctacatgtgtggtgagcatggtcatctacctaaggttatatctcttgaatcattcaatgggtag

SEQ ID NO: 36185 - DNA, 312 bp, Zea mays
  Peptide Sequence Number=SeqID_79560
atggcgaagcctggccacactactcctggtcgtctcctgcggaagcagcaacccactcgacttacccgattcagacttgcgacttctgaaagctctcgtgtgggttttggtggtttggatgacaacccaattaaaggactaacaaagacaaccgatcaagccaaggatggaggcaagaacagcttcgaggtaccgagtgcacgggagaaggtcaaggagaccagaaacccaaagccaggggtgaagaagaagacttgcaaagtcaaggttgatcgagttaagagttatggtgcatcaaggatcactacataa

SEQ ID NO: 36186 - DNA, 984 bp, Zea mays
  Peptide Sequence Number=SeqID_79561
atgaagagtaaagtaaagtcgtttaatagggttcaagccttcctcaatagcgaccagaatcgatgtgcaatgaagctattgtctgcttatgaggaagatgatgctaaagaaatcaaacgcattgctcaatcaagtgccttcaatcaccttgaccatgtggcaaaatctcaggttggagaaaaaatcatggttaaagtagtgttcatttcaatctccatgttgtctgctgcgttctatttttatgtttgcaaggtcagactagctaacatcagaatgcctcctcctgacctcctccatctcatccaccttcagctgctctatttctgcattgttgacattaattcagcacggtgccccctactaacttgctatcagatccaagtcgctgcagaagggagcaaacaaagggagatgaagctcagagtcgtgtgcaggaagctgtatgactatgtgcggtatgacctcaaggagatagccttcccgtcgtcactgccggaccctcctcacatcaagaagcggcccaagctctcatggcatgaacgctggtgcatcctcaaggaggccacccggctgtacggcgcgtcatgggtccgggacatcggccctgagctgaggcccaacgactacaagaaggcagccgaggacgtggaggagcagtcgtccaatggcagccaccccagctctggtagtgacaggaaggggaaggcgagcagcgagccaactgtgctggaggacctcgctgtcgccgctaggggtggcgcagagacgctgaagcctgccctgcggcggatttacatggcccgcgcgtccacgtacaccgacgcgatgaagaatttcgtggagacgtaccaggaggggctcaaggaccagctgcaggagaaggctcatggcggagaaggtggtggtggtggtggtcgttatcatcatcaggagcagaaggaacatggcaatgaggatgaggcatcaaagccacctccgccatga

SEQ ID NO: 36187 - DNA, 453 bp, Zea mays
  Peptide Sequence Number=SeqID_79562
atgggtgaatggtccttggaaatgaacgagttcatcgaaacttggcaccccgaaatggctccccctaagcagacgccccgcatgcgtgttggaccacgaggcgtgcccaagcatcagctggcctcctgtacagtggagaccggcagtagcagtcatacacctccgttgcagacagacagcgaccgtcgcgcacctcagtcacaggtggagcagttacagcagaatctaaatgcatccttgaatgagcggtgccttgatgtagctcatattatggagatactggctgaaaagaagcagcttcagaagaagttagctgagcagaaggaacaactggcggcgataatgagagaaaaccccagttcaactgcccggaggcaagttcaactgctgaagttcaactcagctgaaaaagctcaactgcagatgaagaagctcaactcagctgatgtttag

SEQ ID NO: 36188 - DNA, 189 bp, Zea mays
  Peptide Sequence Number=SeqID_79563
atggatgctcaatatgatgtgactcaagaatggcttgatagggtgaagatagcaaggaaagggcttgaggaactaagcaaagatgttgatcctagggcaatagaccttgccatgagaatcaccgaaaggatgttcctcaaaatgaaggaagatgaggcaaagaacaagattgaagaagaaaaaaaatga

SEQ ID NO: 36189 - DNA, 582 bp, Zea mays
  Peptide Sequence Number=SeqID_79564
atggggaagcctggcccatcactcctcatgctcctcctctgccgagtgaccacacttgtacccaccataaccggaatgggagtgagcgtctcaagtcgcatgaggggtaaagtctgctgccaggttcactcaggcctctgtgttaaaaatcatagaaaaagacccactggatatttagttgtgatttttccaaagtttaaagtcaaaaagtgcaaggaatcgaagaagggctcaccgtggagcttggtctacgtgcgccggcgatcgggtgaagtccggcgacatcgatctggtgtctccggcgaggtagagctcaatccctggctctggaagcttcaccgaggtgtggccccctgtacttccctcttccgctacttcttcgtgctggtcaagtccgggaagaatagggaccacatcggtgcctactacttccagacgaggccagatccaaccgtcgtctacatccccacctttggcggcacgaggtgggagaattggcgtagcgaatgggtgattgccagcgccgaggccaacgaccgcctcgtcctgccgagcgatgggccagcgctcgaccgcaagtag

SEQ ID NO: 36190 - DNA, 648 bp, Zea mays
  Peptide Sequence Number=SeqID_79565
atgttgcggctgctgctgctgttgctgtggctgctgttgctgctgctggtgcccctgggggggggctctgaaacgagcgacccatcagcacgacgtagcctgcgtcgcctctcctcctccgaccccctgggcgggggcacctgcggaggcaccgcttgcagcccctttgcccttgtccaaggggctgggggccatggcgggagtggcactgcgagccacatcagtgagctggggacctcaagccggcgcatcggagatccggatcccgcggtgggggtcccggccgccagtctggcaaaccgccacgccgctcttgtcgagggtcggcagcgtggccaagatcgccgtcctcaggcctgggtcatcgcagagcgcagggatgttctgggggagtatcagggactcagggacgaaagtttccccagtaatccctcccaccagaagtgccagctcgtcctaggacagatcagtgcccggcgcgcgctggatcctgccgatgtcattcgggccggtgaaccagcagcacaggcgcggtctcctctgcagcggcgtgatccagcgcttcaggagatcaccgaccatgtgcatcaatgtcaagctgcccgtagccaaacccttgatcctgtccaatacgggcaggagctctag

SEQ ID NO: 36191 - DNA, 426 bp, Zea mays
  Peptide Sequence Number=SeqID_79566
atggaggccactaggaaggaccttgaagatctccaagcagatcaccgggtcggggtccagcgtattgctgcgtgggccggcgaggcaagcacgacactggtgccgctagggatgagccccatcctagtgtcggagctgccaacatcgatctccgatacactcctggtgctggactccaccgtcgatcgcctccggcgcctggaccagatcctcggggcccacctagaggcagagggcggcaagctatgctgggaggtggttgagtatgtcctgacgtgcttctggagccacgaccccgccatatctttggcgccggtgatcgttggtccggtagccgccatagaagactccgcccgggagggtgtacaagacgcagtggagctggtggccgagcgcttccagcgcgatcctgctggcgaactgtag

SEQ ID NO: 36192 - DNA, 2169 bp, Zea mays
  Peptide Sequence Number=SeqID_79567
atggctcgggatgttgcgaagtctgccgcccctggtgccagcaagcctccgaccggtgcgaagtccgctacccctgtccccagcaagccacttctggtcgtgcccgtgccagagcgaaggcctctgtcgccgtcgcgtgctgcagagacggaggtgggcaaggtcggggcctccatggatatttccgtggctgactatcttctgggcggcgtttcaatattcgacgtgcatacagggcgtggacttgttgggtcggaggctaggcagctggttgttgccccgacatctgtggcggctgggtcggtcgccgtggtgactggtatgatggggtctgcgcaggacccgtgggcccagttttgcgccagcggtgagatctcttcgaccgccgccttcttcgcacgtggcgggctcagtacgcagcagctgaagcatagttcgctgcccgaaaagcggcgacttgaagggaggaatgagcgcctccggacacagctctctgaggctatgcgggacaagtcagccgcggagagcaagagccgcaatctaatggacaagctatcgacggcggagtccaaaaaggaggagcttggccgtcggctagccgcggagaaggaggacgctgacaaggcctgcgcggaggctcacgctgtgcgtgccgaagctaaacttgcgtgcaccgaagctagccttgccctccaacgtgctgcgaaggcagaggcgaaccaccagagccttcacggtcatctggataaaacggaggcctctacccacacaggggtggaccgagcacgtgcattgctcgtggatgcgtaccgacaacttggtgcgcgaacggccccctttgattcatctgggaaggaggtgggcctccgctttcttgggtggctgcatgaggagctggaggtgctcctgtcgatcgtgacgggtcttatgtccttcgcttcgctcatcacctgtgagggggccgcgaacgccttgtcccatgagggatgcaggcacttcgaagtcttcaatcggtccgatgaatacttcaaccacgagatcttccaggttgaagatgtggtgctaaagcgctccgctggggcactttatgataggatgtggggccctcaccgccaggacactgtccaggaaaggtctgattgggcgatggagcagatggccaatgatgaggagatcaaagacctgggtgatctgaagagcgcgacccctttggcggagggtgcgagggcgggggctgaggaccagctggcgccgctaactggtgttggcgaggacgacccagcggccgccgttgcgttgcctgaggatactacgggggcggccgcgctggctttcgaagaccctgcatcttcggccagccctacgcaggttccgacgtctgggcctgcgcaagcaacctccactgatggtattaattttgtggcggtcgtgaacgaagtgcctgctaaggaaggtttttctggttctgagtctgggcctttttcgtctgatggtggcggttttgagagcccattttcttggactgaggagtcttcggatgaagatttggattattttgctgcgttagatgtggccgtggtggagtcatcgccacggctggggatgagcgaagcgttggatcccccggccggggagaggatcgaatgccatcaacgaagggtggtggcgaagcatagtgttggtaagagctcgcgaagtgggaggcgccgtcggatggggttggagcaaactcgtcttcgtgtagatcggggatccatacaaaaggtggaagggtgtgaatccggttgcccggcactctgtcgtgttgagggcccatattactccaggcagttggtcgacccatttgccctttttgtcgtcaagaagccttttcttgatggcggtaaaaaattttccattgtcacgctcaacaacgccgttggactatgggtggtacaccgaggcgaagacaggcttggtgccgatgaaaaagcagaaatctctgaagtcttggttgtcgaactgtttgccgttgtcgactgtgagttcggacgggactccgaagcggcaaacaatgttttccagaagaatttttgtgtggtcttcgatgctatggtgaatactgccctggcctcaatccactttgtgaaatattcgacggcaacgaaggcaaacttgaggttcccttga

SEQ ID NO: 36193 - DNA, 306 bp, Zea mays
  Peptide Sequence Number=SeqID_79568
atggcgcagagacttacccggaccacgttcgccggtgagcggaaggagtccggcgagggatttgttttcccgactacacactatcgtttgcgcgtggagccgagcgatttcgggtcaagggcagagagttgtcgcctcggcaatgtggcagtgtcacagggtggagtcccgaggcaaatccctgccaagatcatgtcaaacggccgaattttgctcccaaacttctccagagtgtgttcaagatttgagttttggaaaacagagaacacggctgaactttacaaagggctgaaaattcagttctaa

SEQ ID NO: 36194 - DNA, 624 bp, Zea mays
  Peptide Sequence Number=SeqID_79569
atgactcaggcacccatgccgcctatacaggatagccaactacttcctaagccatatcgtgttttgcgggcccaactatgctgggtgtctggcacgtcctcgttcagttgcgtggcctgcccaacgatgacactgttgaagtgtataagtggattgtctaccttctactatcaacttaagcttttgggttcaactggttttcataaaaataaggatagcttgcttagagatcaaacaggagttgcccttggtcatgagctcactgacaagatgccacctaatgagtactatgagtattttggtccagattacactctacatgtcgctccaagtaacatggagaataaaaacacacggcatcaattggatgacataaaatcaaaacttctagataatctttcaaaactccgacatgctcctagtgttcagtttcaagagcgacctcctgaggctgagttacctgagcaagatgaagacaaagagaatcctgatgaaagacatgatgctgattctgatgtggagatgaatgatgccaaacctttgcaggactctggaaggagggggaatttaagaatgaagaaagaatctgctgagacacatgcaattggtcagatggctctctaa

SEQ ID NO: 36195 - DNA, 528 bp, Zea mays
  Peptide Sequence Number=SeqID_79570
atgaagtgtactcacttccacaaccttcggcgaagcatcaaccttcgttatgtcgccgaagaagacagcagcgccaggggctgcactccagccactagacacaaaccaggagacgatctctctccaagaagccagaagccagaagaggaaggctaccagcccaacacttcaagaggaggagctagaccaggaaatcagggacctagaagtcattcatcagcaggtgcaaaggaaaaaaggagaatatgtcctggttggtcgaccttcagaagaagatcgatgaagccgctgaagaaatacgccaccttacccaagatgaccatgaccgaaggcctcagcacagggaacttcgtcaggagagctcattcaacgaagaagaatggtatgatgacttccatcatggtagctttacctttgatgatgcttctcctctggcagcagaattgtaggctatcccatgaccacaatcctacaagccacctcagttgcccatgtatgatgggcactcggatccaaagcaattcttga

SEQ ID NO: 36196 - DNA, 1302 bp, Zea mays
  Peptide Sequence Number=SeqID_79571
atggtggatgggttccgatggatcagaccgggctctttcgtcctgtacttggtcttcttcttcctgtccgcagccctgtcggaggccaatatcggcgacttcgatgaatactggcagcagcgcaagctcatggccgacgccgcggctgaggccacatccgtcgagaaggaggacattggcacgaggcgggagatgatggggacgacgacgaggaagtctaagttcagcgggccgtgcagggcgacgaacccgatcgaccggtgctggcggtgccggcaggactgggcgacggaccggaagcgcctggcgcggtgcgccaaggggttcgggcgcaacaccaccggcgggctggccggcaagttctacgtggtgacggacggcaccgacgacgacgtggtgaacccgcgccccggcacgctccggtggggcgtcatccagatcgagccgctgtggatcaccttcgccaagaccatgatcatcacgcttaaggaggagctcatcatccgcggcgacaagaccattgacggccgcggcgtgcaggtgcgcatcaccaacggcgcgcagctcacgttgcagttcgtcaacaacgtcatcatccacaacatccacatcaacgacatcgtctcctccaacaaggacggcggctacgtccgcgactcgccggaccacttcggctggcgcaccgtctccgacggcgacggcatcaccgtcttcggctccaccaacgtgtggctggaccacctctccctctccaactgccaggacggcctcatcgacgtcatcgccaagtccaccggcgtcaccatctccaactgccacctcaccaaccacaacgatgtcatgctcttcagctccagcgacaagcatcccgaggaccagatcatgcagatcactgtcgccttcaaccacttcggcagaggcctcgtgcagaggatgccaaggtgccgctggggcttcttccacgtggtcaacaacgactacacgcactggctcatgtacgccatcggcggcagcaaggcccccaccatcatcagccagggcaaccgctacatcgcgccgcccaaccttgccgcgaagcaggtcaccaagcagcatgacacgccggagtcggtgtggaaaaactgggtgtggcactccgagaacgacctcttcatggaaggcgcctacttcaccgtcaccggcggccagatcaacaggcagttcaacaagaaggacctcatcaagcccaggaacgggtcctacgtcaccaggctcacgcgctacgccggctccctcgcctgcacgcccggcaagccctgctag

SEQ ID NO: 36197 - DNA, 183 bp, Zea mays
  Peptide Sequence Number=SeqID_79572
atggagactttgtcggttgaatatcagcaggagttcgaggaatacaaggagcagctgatcaaggaagcgcatgcgaaattcctgatcaacttcaaggtggacaggaatcacaaggttgaaaccaaggagaatatgcatgattcatcagctgaaaattggctcgaccaagcacaaccactttag

SEQ ID NO: 36198 - DNA, 465 bp, Zea mays
  Peptide Sequence Number=SeqID_79573
atggatgacttgagtacaatgaccccgactatagtgatcggaaaaattgcggcatttgagatgtcgagaaaatgggtcgacaagaggagccaactttttcaagaccatatgcttttgcatgtgatgaaagaaaaggcaagaagaaggctcccactccaagttcctcaagtgaagatgaggaggaagaagaaagtggtgatgatgaaaataatcaaccatcaacatcatcctctgaggacaaagaaacaatctgacacatcagaaaggtcaaggatcttctctttaacattgacaggaaaaagcaaagaaagagaggatgcttcgcatgcggggagaagggccacttcagggacagctgtccaaatatggccgaacccacaaaggggagggacaaaggcaatgcgcttacaagtgttaaaactcgggatgactcttcaagaaaagatgaaccccaaggacgcgtag

SEQ ID NO: 36199 - DNA, 234 bp, Zea mays
  Peptide Sequence Number=SeqID_79574
atggccgccgccatggccggctcgccctggccgcccgcccggccgcgccctggccgcgcgcccccagccgcgcctggccgcgccctggccccccgcccggccgcgcccccgcccatgcgtgctcggccgcctggccagcccgaccccccccccccacccgcgcgctcgcctggccgccggttcaaccgggccggctcagccgccccggccgcccagctcggccgccctgcctag

SEQ ID NO: 36200 - DNA, 541 bp, Zea mays
  Peptide Sequence Number=SeqID_79575
ggggaagtcctcagtgagccacaccgacggccacaacgtcttcaccatatcctcctccttccatttggctccacatgttgtcgtcgttcctgggtgccagtcgaagataccgtcctcgtcgcgcctcaccaacgcacacgacaacagccaccgcggcacgtccacgctattcctccgcctccgcggggtcctcaagtgcgaaggcggcccgccacgctgcgccgaccgggccgagggcgacgttggcatggtgttgggtgtggggggcatccaacgggacgtcgacctagacgacgtggatccgcctccgcatggtggttgtggcggtggcggcggtgcagtagagcggccagtcgagggagggtggagccgaggaaggtgggaggagaggggtaatcaggggatccttcgccttccatggatcaggttagcggcggaggtgagggaggtcgtgccatcagttgggtcgacgcacgcggccagcgaccacgcgcagtcgacggtagtggctgggcacggactagggttttttaggcgatag

SEQ ID NO: 36201 - DNA, 1098 bp, Zea mays
  Peptide Sequence Number=SeqID_79576
atgcagcgcctacccaacgcgctcagccgcgcggcgcacgtcgcgggcgcgtccgcgcctggcatatattttggaattggaattggtattggtaaagtcgaattccagcgtttggatgttcacggaattcggaactggaaatccatcccaattcccctggattgctggcaataccttcaacttcaagttgttgaatatgtgaatagtgatgccccttctcttcctgagtcacaacatcggggccttgttcaacgactcaaagggaagactggacgatttcgtggcaatttgtccggaaaacgtactgagtacacaggaagaaccgtcatatctcctgatccaaatttgaaaataacagaggtggctattcctgtgttgatggctcgagtcttgacttatcctgaaagggtttcaaactataacattgagaagctgagacaatgtatacgaaatggaccattcaaatatccaggggctaattttgttacacaacctgatggcatgaagcagagcttaaagtatggtgatagaaggattactgctcgggatttaaagtgtggatgtatagttgaaagacatttagaagatggagatgttgtcctctttaatagacagccgagcctgcatagaatgtcaattatgtgtcacagggcaaggataatgccatggagaacactcagatttaatgagtctgtttgcaacccttacaatgctgattttgacggagatgaaatgaatttgcatgtccctcagacagaggaagctcgcactgaagcgcttatgctcatgggggttcagaataatttatgtactcctaagaatggtgagatactggttgcttccacgcaagacttcttgacctcatctttcctagttacaagaaaagatactttctatgatagatcttcctttactcttttgtgctcataccttggtgatggaatggagaacattgatttgccaacaccagccttgattaaacctgttgagctttggactggtaatgggaacaaggatggcctttactctgttcttttaagagattataattctcatgctgcagcaagctgtatgaatcgtttggcaaaatttaggtga

SEQ ID NO: 36202 - DNA, 918 bp, Zea mays
  Peptide Sequence Number=SeqID_79577
atggggcacgggcgtccactcggattacccgtcagcagctcgctggagacaccatgttcggcgccctccaagggcaacatggagctctccccctcctccttgtggaaaggcgacgcaggggcgcgccataggaaactctgctttgcccgactccagggctcggactcgggctcagccccagaagacgacgaactccacttcgcccgaccccagggctcggactcgggctcagccccggaagacgacgaactccgctttgcccgaccccagggctcggactcgggctcagccccagaagatgacgaactccgcttcgcccgaccccagggctcggactcgggctcagccccggaagaaacgaactccgcttcgcccgaccccagggctcggactcgggctcagccccggaagagacgaactccgcttcgcccgaccccagggctcggactcagccctggcctcagccgacggtctccgcctcgcccgacccaggggctcggactcgacttcggcctcggaagacagactcgacttcgacctcggaggagcctccacctcgcccaactcagggctcggaccgaccacgtcacaggaggcgccatcattaccctaccccaagctgactcaggctacggggaacaggaccggtgtcccatctggctcgcttcgccagacaagctccaacgctcctccgacggccacgacaccacaccaaccgggtgccgaaacctctccggctgccacgatggcatggccctcttagagagggttggccgcatggggaaggacgggacggcgctcgcgcaaggccgctcgctccctcccgcgtggacgcttgaggagaacatccttttctccccagtcatgtggtttgtgcacccgctatcaatgatccaacttgagcccccggatgcataa

SEQ ID NO: 36203 - DNA, 168 bp, Zea mays
  Peptide Sequence Number=SeqID_79578
atgacaaaagaagctggccaaggatctggatcatcagagcgcatgggaggggttatgaaggctggggagcagcgggaggataaggagggggaaagttttgtccggtttggacatggtggtggcctgactccttccggtataactgttaagaaaaaggagatcgggtaa

SEQ ID NO: 36204 - DNA, 333 bp, Zea mays
  Peptide Sequence Number=SeqID_79579
atggagcaccgtcccgggctggaaaggttgccggagaattcccatctggagcttgacgggaagctgttcgtcaacacgcagcaggcccctacctggcgcgccaactatcggcgtttcgaccccggggggtccctggaccgacgagtaaattgtcgccgcgtgccccagcccagatgggtcgagctaagtagagaagcaaactctcgtggaagacgccggtatttttaccgaggtatccggaaccacgcaaggtcccgactaatcctcgttggtgcccctacgcaaagggaagcccacgcgagggccaagcaccacggtcgagtaactccgtag

SEQ ID NO: 36205 - DNA, 435 bp, Zea mays
  Peptide Sequence Number=SeqID_79580
atgaagaagattccagcaccgtcccgtgagatcaaagaagaagctgcaagcaccccgccagcaccgccaccctctgaggagctacaagggtcagtcccgttcgaagaagagttcgaccccgtgttgccatctcagtcgccgccagaagaaggctcagactcgggctcagccccggaagacgacgaactccgcttcgcccgaccccagggctcggactcgggctcagccccggaagacgacgaactccgcttcgcccgaccccagggctcggactcgggctcagccccggaagacgacgaactccgcttcgcccgaccccagggctcggactcgggctcagccccggaagacgacgaactccgcttcgcccgaccccagggcttggactcgggctcagccccagaagacgacgaactccgcttcgcccgaccctag

SEQ ID NO: 36206 - DNA, 369 bp, Zea mays
  Peptide Sequence Number=SeqID_79581
atgccgagaaatatggtaaatcgtggactttacccctcacgcgacctgagacgtggtctcccattccggttatggtgggtacaagtgcggtcactgcacgacggcagtcgggtcagtgaggcattgtacaacaaggcgatgacttcccacggatcctcagaggacggaaatgcactatcccacactgacgggcttgcacgagagggttttccccgcattttgtgggaggtacttcagggggccggatacacgacaccccctcagtacgcggtgcagcagttcgagaagcaccgagtgccccgctgtagggtgaggatgaccttggagcctcatcccctacagccaggctggcgctctttggactcctag

SEQ ID NO: 36207 - DNA, 453 bp, Zea mays
  Peptide Sequence Number=SeqID_79582
atgacacttgttctttgggacttgatgtttatgttgaatgctgcgtgcttcacagtcaaggatcttccaaagaagagttcacttaaacaggagatggaacgagatggacacaaggttgataggcatgctgttcatgaaagaaaatcaaaagctatgcctgaaggctatgaacagaagcaggaaatgaacgttgtatatttgagtgtgatgccaagcacccagaggggtctggtattggctttaaagaggaagacacacccaactttacgggttccttttattccaaaaacaaaagcaatggtggaagagctgttgaaggagtatgataatgtctgtactcttagggtcagaaattatgtactctttttgtatgcatcgtattttaacagaacacgtattggtccttatcttaaaattagcatcaaccgatatataccggaagaatgcatataa

SEQ ID NO: 36208 - DNA, 645 bp, Zea mays
  Peptide Sequence Number=SeqID_79583
atggagttgattacgggggcggccacggcgacgccatggatggtagtcttccaggagagcatggagaaggatggaaacctttcccggaacctcgctcgaattgcgtctggattgcgtatggaaatcacgaatcggggtcaatggagttttttgcgtgaactggatgcgagagggactggatgcggggattatggactggatctcgcggccgcaccatcaacgccgccctttaatcgggggagggactggatgcaggaggaactggatgcgggagggactggatgcgggagggaactggatgcgggagggactgggtgcggacgtgggatggaaatgggatccggccgagaggaactggatccggccgttgcgccgttgatggtgcggccgcgagatggaagtgggatcctgccgttgcgcgaactggatgcggccgttgcgggatggaagaactggattgcgccgcgggagggactggccgcgagatggaactgggatgcggccgcatctcgcgggagggactggattgattcttgcggcattaatggtgcggccgcgggatgcgggagggaggcggccgcgggcgagggtgggttgcgggaggcagaacgtgcaccgccccgcgggtgtggacgcctacagtag

SEQ ID NO: 36209 - DNA, 234 bp, Zea mays
  Peptide Sequence Number=SeqID_79584
atggcgggcggaaataagctcgccggagctaaggaaaggtggctggccggtgaggagatatggagccaggaaatctggtctgtttccctgcccaaacccgaggcaaatccaagaaaaaccctgggtgacactggggtgtcacagccttccccccttaaaggaatctcgtcccgagattcaggccagagtccttgcagggtgaagcgaagggtgagacttataggaaatgggtga

SEQ ID NO: 36210 - DNA, 579 bp, Zea mays
  Peptide Sequence Number=SeqID_79585
atggccctcgcctcatttgccaccacctcgttcaccattgtacttcttttctctctcccctcgtgcctccacctccgcgccaccccattctcggcagagggcgtaggagcatgcgctcctcccccatattcgtccgacaccagccacgacaccgactcgcgcagtggctattgcacgtccacaaggacgtttcacatcatgcgcgcaccatcgttttcaccgtcgtcggatgtctcgttcgtcttcctggccttcgccctgttcttcctccccaacctgctgcccccgcccacggtcgcaaccgtgagccgaccgacgctcgtcgacgtgggtacaacgcgagtcggtcatgctcctggcctttctccgtgtgtgccgtcgaggaggacatggtggcgcctgccacacttaggttatcttggcaatgaggagtccaggtatgtccgcctcttcccttcccctcctgctctacgaaaccttggaagtggggaaggcgagggatgggggtctctgatttgctgcctatggtaccagtgcgttcataaaaaatattatgcgaagagcggagataatcaataa

SEQ ID NO: 36211 - DNA, 1359 bp, Zea mays
  Peptide Sequence Number=SeqID_79586
atgcccctcataaaagtttacaacaatgactcagacccttatggactaaaaggtcattctatctttaagtcggttcgacccttcgtcttcggatatgctgtagttccgaagcttcgtaaacggtgtcatcggcatcatgttcaagcagcttcagccgaagctgtttctttttgtaggaccttcggcgacaaagcatggtcccaacaccgtcaatggggctcggtgtatgtggctcgctctgccaaggttgatttgtcccttggggaggagtgcggtggcaatgagactgatggttctggttatgactatggtgttggtaagtggtattctttccgtttggaaaggatggctcgtcttagacacactgcacgaaagtctgtcatccccttcttaccctcccgccttgctgagcgtccgcttcgccgtcccgtggccggacagtccagccacttggagcggctgcaccaccgcctgcatgaggagcaggaacgtcgacgacaggagcagcagggctcttctttctcgctccaccaggagatagagtccgtgaggagctgctcccctgtgcttcctctagaggcgccccctgcaccaccactgggcaccccagcctctggagtagctgctggaggagacccagacgacggaggtggcgacgacagctcgagccacgacaccgacttctctgctgaccaggagccggaaggatgggttgctcgacccatcactcgcgacgctgctcgcgggtgtcacttccatgatgcgctcaacaccctgctacgtcgggcacttgaccggcgtacttggtccatcgagtatcgctgtgtggtctaccagcatagtcgcggggtctacccggaccgctgggaggcaacctgcttggtgcgccgtccggagaacagtctccagggtgcggaggcctgctcagagcactattctatctctgagcgggactcggctgaggcggccatgcaagatgccgcacgacgtgcgctttcgcactactgctcggttctcggtggggtagctgacggtctcaacctgaagtactacccccgccgtccatctggcagcacaggaggcgtgattgtttcacctatcggtgaggacaatcctaggttgagcagcacagtcaacctagccgccgtgctaaacacggagctggaccatgcgctagacgagctgagtagggctcgtgctgagatcgccctgctgcgggccgagcgcgcggaacttcgtcacctggatgatggttcccccgctcccgtcgggactcagcacccgtaccgctcacctcggcgtggacgccagtcttatggcaatcccgactgcaagaccaagataaatctagaaccatag

SEQ ID NO: 36212 - DNA, 465 bp, Zea mays
  Peptide Sequence Number=SeqID_79587
atgactctggatgggcactgtgtgtgggttgctgttgtctgggttgtttgtgtgccctgtattggttttggaggttttttcttagattatacactaatgataataatacatgccttgcaaatagatgagccattttttttgttacggaaaccggattggggaccagctaaaaggaagaaggcaaccacagcctcaactggaacaagcattgttattgttcatattcctaccagaatgctattccctgctttgcctcctcgtgcaactgacaaaactaatgaagctgctggaaataagagggccacatccaaaacaacagctacttctaagaaatcaaagagctcatcttctgcctcaacagcttcagtcagaagatctggaacaggctccaaccagccagaaactagtagactagagcctgtgcctttgagcattttgtaccctactagcgtggagccacaatag

SEQ ID NO: 36213 - DNA, 483 bp, Zea mays
  Peptide Sequence Number=SeqID_79588
atggctggcctcgctggcgacgggcccggggcatcagctgacccccgaaaaatcctggagactaatctgaaacggaagaccagggcggaactaaccctcggagtaatccatcggagcgagcttccttaccagcaagtggagaaatgcagccgagaccgtgcggatctgtgctttcgggagggggacgaagtccgccgcgacgacggtggaggacgagcaagggaccagctggccgcgacgtgctccggcggaaggagcctggcagctacgccagcggcacgcaccagggaagaacggcttcgcttgacggcgctcgtggcgggcgcctggggccggcgaggcgaatctgggatcaggaggaggctggggcctggggcgaggaggacagcgaagcgagtcggcggagctgaggagagccggcggcgaggagttcgaggaagcggcggatccgggtgtagaggttttctcaaattgacaatttga

SEQ ID NO: 36214 - DNA, 741 bp, Zea mays
  Peptide Sequence Number=SeqID_79589
atgcgtttttggagaatggttggttttggtaaacttccaaagtaccatcaggatcctacaacagaagagttagccaaaacactcgattgttggccatcaatgaattattatatcacgggttgtagatatgttctcatgccatggaaattcaatggatgtcacgcccttttcgtaatagatcatgttaaaaagcatgtgacttttatcgattttacaccgactcaagattggtgtaaacacatgccatacaagaggttcgcggaagcgattatcatggcctcaaaaaaatataagattgcttacagcaagatacgttctggatgggcggaggatatctttaagtgggaacatacaattcagactggtgtttcaattgacttaagagggtttaataccagctacctcgttctacaagctatggccatgtgggggaacgacagacgactgaaatttgttgggtctattcaatgtcgcttaggcaacagttacaatatcctggaagaaaatccgtggcagctctacgctacaataagggtgataaagatgtctcgcccaatggaagttcccccggcgtactacgcacacctggcggccttccgtgcgcgccactacatggacgatgacctctccgaccaagggtcgtcttcagtggcgagctctcgcatgaaagatggcgttgttccggtaaagcatctgccaaaagtgatggagagcgacaaccagttcatgttctactgctga

SEQ ID NO: 36215 - DNA, 225 bp, Zea mays
  Peptide Sequence Number=SeqID_79590
atgggcaaaatatcacgaaggtcgcaccttcgtgatcagacttataaaacaatgatcttcggctacgaagcatacccccaacaaggattaaaaggcatatatgatgagaagggtatgatcgtgacgaaggttgccgttgcttcgaagctatgcacaagggagcttcggcttaatcgcgggaaaaggaaccgacttaaaggggaaaatggtatccagtcctcatag

SEQ ID NO: 36216 - DNA, 279 bp, Zea mays
  Peptide Sequence Number=SeqID_79591
atgggggcattcaggttcctcgggcggtccgtgttcaacttgacaaaccggatggcgatcaaagtggacgagaaccatgtttggaatcacgttgtgcatctagtatatatgaggttgcgacacccaaatgtggatgcacctcaacctggacccgcatcggcatctgaacggtcaccccccaccaccctcttccgcttccgcaccctagaggcatgtgagagcaggactgctgacagtaactttgggattggtctcccgtatacaattactccagaatag

SEQ ID NO: 36217 - DNA, 948 bp, Zea mays
  Peptide Sequence Number=SeqID_79592
atggtggaagccgcggcggtgagcagatcacgaccgaagatcaagcaggagcccgcggagacgaccgcgatctgcaaactagtccgcgtcttctgcgacgaccgcgacagcacggactcctccggtgacgaggctgccgccggtggtggtgctggagcggcggcgggggcgcgtaagttcctcgtggagatctccgtggagaagcaccagccgcgctgcaatgccatggcgcccgcggggagggctgctggcggtggcaagaggaaagcggcggcggctggcacgccggcggagccgaggtacaggggcgtgcggagacggccttgggggaggtacgcggcggagatccgcgacccgcacaagggcgagcggctgtggctaggcacgtttgatactgccgaggaggcggccaggaggtacgacagcgagacacgtcggctccgtgggccatcggcgatcaccaacttccccgcgacgcctgacgatcgtgtcccgcttccggcgccggcgctgtcgttgcacggcgttgctgccgtgggcgagcactcctccgccgaggaggagtcctgcgacgagtcccagctggtggtgggctcgccggtctccgtcctccgggcaatgcccgacgagacggcgcgtgcgactctgccgccgaaaatcgcggacgccgccgccggttgtgcgaccaagaaagacgcgcccgacggccgcggcggcctctccccgttctccgccgatgacgcgctcctgccccagctcggcgaggacgcgttctctttcggcggcgtcccgttcgacgacgacttgcccacgccgcagctcggcctcgactacctcgccgccgaccccgcgctcgacctcggcagcctcccgatgtggccaggagtcgacggctgccgcttcagcgacatcggcgacgacgacctcttctccctccccgcgctctga

SEQ ID NO: 36218 - DNA, 1716 bp, Zea mays
  Peptide Sequence Number=SeqID_79593
atgtctgaaaaaccagaaaagcaacgaacacctgcgcgcgagaaacccgcccccgtcgccgtcgtcggcctccagccgccgcgggcgatgggttgcttgttacccgatcaggcgttcgtgcggctgcggaaccgcacgtacggcatgtacctctacgcccacgaggacggcgcggccgtcgtcctgaagccgcaccgcgcctgcctgcaaacggtgtggcagttgcaccggatcctgcgcgccgaccgcaacctcaactacatcctcttccgcagcgccgcctacggccggtacctcaccctctcgcgcgagacgtcgccgatctaccccggtcatagtcaccaagtgaaccacacgttccagggcgtctacgagaccccgatgcaggacgacgtcctctgggtgattgcctctgcggacaacctccacgccgtcatattccacgccacttaccgtgtcctccgctccagcccctcgaacatgctcctcttcggtcacgccttcgtcgtcggcgacatctatcacccggtcaattacggcaccactatacattggacggttgaggaaattcccgtgagaccagaaccaccagtcattcacctcccaactgacgatcactactacttcggttcagaagtctatgttctgttggccggactggtttttgtagacctcttgctcctcatttggttcgctttaggggatgatcacgggaacgtcaacccacgctccaggggatgctggttattctacggcaactgcttgttgcaactgagagccgacctagcgaagctgctcaaggaaccggccgactgcatcacgctatgcgtgcgggccggctcccaagggcggctgacccctttggtcatcgatctgccttccaacgatagtgacatggagatcattgtcctcaccaccatgtcaccggggttctcattcgagacatgtgggtggatcaaatttttgagaaagaaagccaacgagtggacagctggcatctcttcgaacttcaaaagttggaataccccgccctgcagcctcgggccctcgctcggtgcagaaaagcaacgaacacctgcgctgtcgtctccacagcgcgcgagaaacccacccccgtcgccgttcccgccgccgcaggagaagcaccaccacctcgggcgcgctatgaatcgcttccccgacagggggttcgtgcggctgcggaaccgcgcgtacggcacgtacctcttcgccgacgacgacggcgcgggcgtcatgctgaagccgcaccgcgcctccctgcaagcggtgtggcaggtggaccgggtcgtgcgccgcggccgcggctacatcgtcctccgcagcgccgcctacggccggcacctcatctgcgcgaccgggacgtcgtgggtcgaccaaagtcacgaggcttaccacacggtccagggaaactacaataacccggagcaggtcgacatcctctgggcgcctgttcatcgtctggacaacgtccacgtcgtcatgctccaaggcctagattgtcaacgtatcctccgcgcctgcgccccgaacactcccttcttcagatacgtcttcgtcgacgcctttcaacgcagcactaattacggcaccatggcagattggacggtcgagaccattcccgtgagaccagcaccaaccgtcattcccctcccagtcccacccctaactgaagtgagctcgccgtccccggcctga

SEQ ID NO: 36219 - DNA, 525 bp, Zea mays
  Peptide Sequence Number=SeqID_79594
atggccactcgacgtctacgtccacagcctacaggtagtcagacagtcagtgacctcaagaccgaagaaaggaagcaaaagctttccaggtataggaagaagaagatcaagcggaactttggcaggaagatcaagagacaacatgaatggcttccaaagggctgggtgatggaggtaagagctggtggggagaaggcggacaagatgtacaagttttatgtctactcaatcactggtctacgattgctgtcaaagcaagatgtactactctatatcaatgaggcaaaggtctctgggtgcgacaccaatggacaatgtgacacaacttctgaagataacatactttcaaaagtggactttcggccaagtggattgcctgaaggttgggtgaaagaactagtgtacagaaaaaccatggaagggttgatcaagagagatccgtactacacggatcctgctagttcctacacattccgcacgctgaaatctgcattatccttcctagaaactggaaagacatggtaa

SEQ ID NO: 36220 - DNA, 765 bp, Zea mays
  Peptide Sequence Number=SeqID_79595
atggcggcggcatgggcggggctggccggctttgttgctcgtcgcggcgcagttggcgtcagcggcgcaagtcacggcgccagcgttcctgtgggcgcccaaaaactacgggtcgccgccgcgctgcgcgccatgggcagcgccgtcgccttcgtgaagctcgacggggagcgctaccccaaggcggctgccgccgtcggggtcaagggcttccccaccgtactcctgttcgtcaatggcaccgagcacgcctaccatggcctccacaccaaggacgccataattatattcaagaattttgaggtactgatgcgttatgaaatgctggatgcggaaaaaatgtatcgttttcaagttttagtttgctcgaaataccatgaagaatttgtgaaggcagcaaccacagacaacgaggtacagtttgtagaaaccagtgatacaagtgttgccaaagttctatttccaggtattgcgtccgaggagaaatttgtgggcctcgagccagagaagtttgaaaagttctaccgtttactcgaggatttactaccttacctggataaaggtccgaaggggcaccgtgcagctcaacctcaaaagcgcccaaggaaagttgatcaggaagcttctacgggcaagcaaggtaaaattgctgtagaggatgaggatgaagaactagcaagggcaatagcagcttcgctagaggtagtcattgaagcatcagacgccagtgatgatgatatggctgaagctgaacctgaggactaa

SEQ ID NO: 36221 - DNA, 234 bp, Zea mays
  Peptide Sequence Number=SeqID_79596
atgaagcacaaaaccgcagctctcaagctcactcaaagatttctctccaaagatttgaaatgggagaggcaagagatgtgtgagagagagaggaaggagagaaaaccccagctcaactgcccggaggcaagttcagctggtctgaagaagctcaactcagctgaagtcaagttcagctggaaagctcagctgcagttgaagaagttcagctgcttttcagcaagaacactctag

SEQ ID NO: 36222 - DNA, 516 bp, Zea mays
  Peptide Sequence Number=SeqID_79597
atggagtgcttccccgaccaggcgctcgtgcggctgcggagcctcgtgcacgacacgtacctccacgccgagaacgacggcgtgggcgtctccatgaatccgcaccgcgcctacctgcacacggcgtggtgggtgcaccgggtccggcgagacgaccgcgactacatcctcctccacagcgccgcctacggccggtacctcgctctctcacgcgagaccgagacgtcgcggatctacaccggtcaccatgcaaacctcacggtccagagcgactacgaggccacggagcaggacgacgtcctctgggaggctgatacggtgaccaacgtcattgtcgtcatgctccacgcctctcaccgtgaccgtctcctcagcgtcagcccctcgaacacctccgccttcagatacgccttagtcgtcgacagcgcttaccgcgtcagttgcggcagcgcggcattttgggaggtcgagaccattcccgagaccagaaccgcccgtcattcaccgcctaactga

SEQ ID NO: 36223 - DNA, 1311 bp, Zea mays
  Peptide Sequence Number=SeqID_79598
atgtcttcttcctcccttaagcgtcgtgtcttcccatcttccaagcccccggatggggggtttccgccgcctttccgcctccttgttggaggaacgcaactccatgggagttggtacctctcagccatcgttcggcttcaaggattttcatcaggcagcctggttgctcccttccgccggtggccacccaagacggtgacctccagctcctggatggggagaggcaaaccaggctgtgatcccgccctcagcatcgggtgtgttcgtcatcctcgctggggcgggggtcgaggcgagccggggctctacctcgcgtgcgggtcgacgaaccacctcctcttccagcttctggtggtggcaatcgtcctcccgcgctgcgacggagtcgtcctccagtcatgccggggaaggcgaactgttgctgtccagctaggatgcaacattccgtcttccccctcgcattcggggcgaggatggcagcgaggatctaccggagcgcttgggagcggcccgctctttggctttgatggcttgttcgcatcccttgagtgggaccgcgaacaagagccttccggtgactgcgttcacctggggccatggctgccgctgcagaggtcgctggcgagcctcccggcgttcgtcgcctcgcaggcccgaggtcgctcgtaccatcgaggatgggaccggagtcccgtttgtgatggcaccttggatgccagcgagtttgttcattgcggctgtcgaggcctgaacgaatccctcggcccgttcggccttgctgtctggggctcctctagcttagttgaagagacccctcggccgcccttcggtggaccgaggccagggccgacgccaaagtcgatcagtcgaggcctcgggtcgggctggcgcccttggaagccggttgaccgaggccccaggggtaaccggttgagccgcctgctcgggccggattcccggaggagtccctggaccgcggcgccgcccgaggctgggtcgggctttgctgaagacgtcgtcgatgccgagggtgctacggctcccttcagcgtgaagacccgagcctgcaagatcagatcatcttgtagcgtgtgctttctgcggccgccgaggccagaagaacacaccctcgccgcgcttgcgaagctgcgtcttttttcctcttgtttcgagcatctggactctgtcgataacagggataaggtgatgagtgaggtatccgtatcccggaggcgtaggagtccctcggctcggtcagccttggctgcttacgtgtacctcgtcgtttccaggatccgcttcccgaagtag

SEQ ID NO: 36224 - DNA, 120 bp, Zea mays
  Peptide Sequence Number=SeqID_79599
atgaacccgcgtagatgtgcttttggggtgttggctgacatagatcccgatggcattaagtccattcagaatgtgggagttccaacctgtaagcttgagatgcagaagttcctcagcaag

SEQ ID NO: 36225 - DNA, 204 bp, Zea mays
  Peptide Sequence Number=SeqID_79600
atggaacaggggcacctggcaagcgcttatagtaccggctcaggcagattggatacgggcatagttcccaaagctttatcctgtggactggactataagttggttacgaagtttgcagatgaagttatgatgctgggctccatggatgctagtctagtgatacccccggtcatcttccttgtttcgctgtactttgatgaataa

SEQ ID NO: 36226 - DNA, 252 bp, Zea mays
  Peptide Sequence Number=SeqID_79601
atgccgggttcgggggccggcccccccccccggccccggccgctcgcccgccccgccccccctgctcggccggctcggccgcccccggcgccgccggccctcgccagccgggccgcccgccgccggctcagccgccccggctcggcggcccctgcgcgccctgccccgggcgggttcaaccgccctagggccgcttcaccccaactggggagggagaaaatgaggggggagagggagagggttagggaataa

SEQ ID NO: 36227 - DNA, 948 bp, Zea mays
  Peptide Sequence Number=SeqID_79602
atgatgaatacccgagcctgtggcagcggcagtggcggcaggaacgaccagaccatgatgggcttctccgagcatccgaagccggcggcgtcggggcaggcgcagccgtccccgccgtcgtcgccgagcgagcgtccgccagcaggccgcgggcgccggcgcgcgcaggagcccgggcggttcctcggcgtgcggcgccggccgtggggccggtacgcggcggagatacgcgaccccacgaccaaggagcggcattggctgggcacgttcgacaccgcgcaggaggcggcgctcgcctacgaccgcgcggcgctgtccatgaagggcgcgcaggcgcgcaccaacttcgtctacacgcacgccgcgtacaactacccgcccttcctggcgccgttccaccacccgtcgtcggtgcagcagcagcattacggcgccgcgccgcacgttggctcgtacggccaccaccactaccaccaccagggctcgtcagcagctgtcgtcggcgcgtcctcgggcgagtgctcgtcggcgttgccgcccgtggagcgcgccgacggcacgctgctgctggaccgcggcggcggcggcgggcaccaccaccaccaccaccaccaccccgagttcctgttcgcgagcgcggacgacaactccgggtacctgagcagcgtggtcccagagagctgcctccggccgcggagcagcgcggcggcggtggaggacctgcggcggtactcggacgcggacgcctacgggatgggcgtggggctccgggaggacgtggacgacctcgcgcagatggtggccgggttctggggcggcggcgccggcgacgcggaccagctgtgcggcggagggttcccgtcgggcggagccggggacagcatggccgtggcgtcgtcgcaggggtcgtccgacggctactcgcccttcagcttcctctcccactga

SEQ ID NO: 36228 - DNA, 369 bp, Zea mays
  Peptide Sequence Number=SeqID_79603
atgggtcatactgtttcttaccttggccgtttcttgctaatggatcttacactgatgcagataatcttgaatgatgcttttaccttgtaccttgtaaccatatcagtgactaggatctctaagacgacagttaaacaaatcgaggatgcgttcaaagaatttactacgagggaggatattgctattgtgctcatcagtcagtatattgccaacatgataaggtttctggtggatagctacaacaagcccgtccctgctattctggagatcccatccaaggaccatccatatgatccagcgcacgactctgtgctctctcgagtgaaatatctgttctctgcagaatcggtggcgtctgataggcgatga

SEQ ID NO: 36229 - DNA, 915 bp, Zea mays
  Peptide Sequence Number=SeqID_79604
atgatggaaattgagaaggatctgaggcaaaacctgagaaatagagatgaaagaaccttcctgagaaccaaaatagagctatgtatgataacaggcagaatttcaatagaagaaccaaacctgggaaagatattacatactataactgcaatgggaccagtcaccatcatggacaatgtccaaatcaacctttcttatagaactgcaagaacagtgaacacaaagaacagtggacacaaagctatgttttgtttcagcattcacatcccctctgataagggtaaagaaagtaaacctgatgattccatggagttagacccagctacgattgactcccaagaagaattggtggattatgaacttgaccccttggagcaggaaaaattagaggtgaaaattattgaccaaaactttaaagagagaacaaaaaagctttctaatgtgctcaacaatgactccagtgcaattcatttgccaccagattggaaaaatatggacatggtgccagatactagtcatactacagacaaggagaagcagagttcagacatcctgaaggttggagaagcaaaccaagggagagttattaccaagatctcggccattgctacaagatcaagctcaagagttgctgatctgggagaaggaaattgtgacatcaagtcaggtactagttctctcactgccttctctacttctgatcctgaatcattaatgcattttacttcattttgcaatattaaattgggacacgacctagtagaatcactagatactatccctaccatccaagatcaagaagcagccaatgctgcctgggcagaaaataaagtaaggactgtccagtccaaggattgggttgatgtcaataatgcttccaacgaagaagctttattgactttttcagagttgtaa

SEQ ID NO: 36230 - DNA, 483 bp, Zea mays
  Peptide Sequence Number=SeqID_79605
atgaagaagacatggttgccttacgaaaggagcctccctccttttaaaggcaacttcccctacgtgcgcccccagacgccgcgggtcgagtcttctccaacacgctccaaggccctcccctgcgactcgggggctgggtcccgcatgtcatgcaagccggctcagggcagaagaagccaaaccgccgcgcatgggaccggggaagggggataccccgaaagggatccttctccgcgaaggaaccgggctctgagccccccattactgatcaggggttcgaaggctggccccccaagggttcaacagccgcctcagatcgcgtgggcccgacacccactactggtcaggggttcgaaggccagccccccgaagggctccatggccgcctcaggctactcgggctccgcgcccattactgatcaggggttcgaaggctggcctccgaagggttcacagtcgcctcagacaccgagcgagggatga

SEQ ID NO: 36231 - DNA, 126 bp, Zea mays
  Peptide Sequence Number=SeqID_79606
atggatctcgtccgtgggcaactccccggcccgacgggtgttctaggcgcgtcgcgggatgctgtcgcgcgtgcgtgtgacctcggtcgtggatctgtgatcgtgcggttaggctgctggggctag

SEQ ID NO: 36232 - DNA, 828 bp, Zea mays
  Peptide Sequence Number=SeqID_79607
atgctgcagagcaagtcattcgtgaagaagacgaagcaaggccgcatccaaaaggtaactgctcgggcaaacgccgtcgtctctcgaggtgctcccccaaaccctacgcccctacctgacgccgtcgtcgcctcttcgcaggtcgtcagggagcactacctccgcgacgacatctactgcagcttcatcccctgcaccgcctgcgccgcagccgcggagcgaaagctcagcgccgctgccgccgccatcctcgtcatcgacaccaacgtcgtgctccaccagatcgatttgctggagaacccggcgattgaggatgtcgtcctgctgtcagtggtgctggacgaggtgaagaataagaacctttcagttttcaacaggatcaaggcactgtgtatcaacaaagcacggagattctatgttttcgccaacgagcagcacaggttgtgtggtatgtttgactctgcaaataacataccactggcactgaacatcaaccctaaaaaatatttaaagctgatgaagcaccctcattaccaagtgagcaaaaagagctcaggctttacaagcaacatgttgatagtctgcaccaattggcatcctgaccagtccgcgccggcgcgcccggagcgcacgcccttcagcttcaaggacccggtccctgacaccaagcccgcctccacgggcgtcgaggtcgcggtggcgccgttctggaacacggagaaggtcatttcagctaagaaacacataactgaagtttcagatgatcgctgggcgcagggtgctgtctgtttctctgatgttagttcacttagcacacttaatggctga

SEQ ID NO: 36233 - DNA, 4074 bp, Zea mays
  Peptide Sequence Number=SeqID_79608
atggacgacgacgccgagctcgaggagggggaggcctgcggggacgacaccgccttcgtcgaccccgacgtcgcgctctcttacattggcatgtctcaaaagcctcctgctgtgacagtttcatctaccccccaaagtaatggtcctatggtgcctttttctggcgattcaattaaaaaggaaatacgcccaaccacaaaggctgaagggggttccgtctcccatgattcgtatggaccattgaaatgtcatgaccaaaatagacttaaagtccggataaaagttggctctgataatgttttggcaagaaataatgcggatatctacagtggtctgggccttgatatttcttcaccttcatccatcgaggatagccccgatggccgtgggagcctatcccctgaagttaacaatgtgccacatgaatctccacaaaccatccttcagatcatgacatgcttttcagttcctggaggcttcctgttatcccctctaccagccaatatcttgcaattgacaaaaaaggttgtggcttcgtcaaagaagtgggaatcaaatgtgcacatagaaagtgtacaagaaccatatgaaggccacacgactaaaaaggtaaaatctgatgctaagaaaaagaagctgatagatgcaaaaaattcaaagaacagaaatgatattagtgcagttatgaaaaaggagattgatatagaaacagttgctggtcaaaagatcgtatccgaagctctcaacatatcattgctgtctgatcccagagccatggatgcaaaaggtgagaatcgacttgaagtggaaccagcagaaaacaacttggcgggaactagagatgcccgattgaaagagcggtccactaagaccaactccatgccaatcatagttgaacctgccaaagcagaggcgacggaatgcttagagaacagtagttttggtagttcagaaatggatttttcagcagtaaaagcggaatcaaaatccaaggcagaaaagggagaggcaactttagaagagaggaatacaactaatggcaaagacctaatatcggataggaagcaagaaaagaaaatgaaacctgagagtaaatataacgcctctaactttgaagttagcaatgttataaacgaaagaggtccagctgtttcccggagcatgggcaaagtttctggtaaagaagccttaccttatgacacaaatgaggaaaatagctccaagaatgaggtcaaaaaaatgcagagagaacaaaagaccaatgcttcgagatcttctgatttcctggaggatgagaaacacattcgttcttctgctgcagttaaggagaggaaaagtgacatgcaatccaaatctagccatactggaaagaaacccaaaacaaaatcacatagagatgttagggacaacctgcctgaaggatctcacggaagcaaggaaaaagacacattggagaatgaaagtgcctttggagatctccgaccaaaggaaaagccatggaaatatgacatcgagagggattctgatgcacctgggatctctaggagggagatttcttctagtgtaaagcatgataagcacttggcttctgaggagcagaagatgcatatacctccaccttccactgtatcaactgcaaatgcagctccagttgtgataaaggagcattgggtgagctgtgacatatgtgataaatggcgtctcctaccttatgagatgaatccttcagatcttcctaagaagtggaaatgtagcatgctatattggctacccgggatgaataggtgtgagattagtgaagaggagactacgaatgctctgaatgcactttatgtccctgcccctgcaaatggtattcctgcagttggtcatcctcatgttgcttcaacaggactagtaacatccagcactcccaacatgaatggacatattgagcagaatagaaaaagaaaaaatattccaagtgatggaaattttgtggctgagggttctcacctaacacaggtttcaggtcatccaatgagcaaccaacatgctcctagtaaaactaaaacttatactgatggtatccagtattcggctgagaggcattctgtaagcaaatcagttgacccaataattgaaaagaaaaggtccaagagcaagcatcacagtagctattctgatggaggagatcttgttgaaagacctaagaagcattctaaagtgaaaaacaagagagacttagatcatgatgaatacaaagcttctaagaaaattaggaaagaagagcgacaccattttgatgtagatcggatccttggatctgatttagctagcggagatgttcctgatgaggccaaggctttgcctgcgaagtcagcaacctcaaagggttcaggtgaaaggactgacctttcttcatcaaagcaaaaaagtgcctcacggcataatcgtttggaaacttccaagaaagcaagacaagatgatttagttggtcctgaagacgagagcaagggatattttcaccagtcagatgtacaaagatcagatttgtctagtaagaagaggatagtgaaggaatgggaggagagccagcacaattcagtagctcatgtaagcaaaggagctgtcaaagaaacctatagggaccagaacttaaaggaagcaaagttgaaatcattgaattctgaagagctgttttctatgacgagcaccaaaccaccaaaagttcaacatgctgatcaggttttgtcttatgatggggggcgtatgaacagtgagttagttgaggataacacactctttagtggcaaaagaggtctgcctgaacaagaaaagagcctttctgatcaggctttggacttgggtgaacctgctagtgatgtggcctatattcagacttcagctgtaacttcaagttcttcaaaggcttcggtctcacaaaaaaagaagcagaccactcaagctatgaagacttcaccaattgagcctctttcttcatcaccacggaggaactccaacattgacaaggtctctgtccctcatagtagaatttcaggtaaggatggatctctgaatgctaactcagccactgtgccaatcatggcaaaacaactaaatactgaagttcgcgtagcaagcaatgatcaacggtctagtgaacctgtttcggttggttctccccgaagaaaatctgatagggataatggactggttcagttaactcaaggtcatgcctctgatggttttcatcttgaaaggggtttcaatgaggacctgcagcctgaatctgggagaaaggattccaatgtaaagagctcccatattcctaaagcttctcaccatttgcattctggtgaaaaaaacaactacaatacagatggctctcctatgcaaccaggaaagcatcctgttgatccaaagacatcagtcttggataaatgtgattcaagcatgcatgaaagtaacaaaagcacaaattctcttcaggatagaaatggatcaactcattgcccaccagatggaaatcctctgctcggtttaccatctggaaaagagaaatcatatatcaacagcaacaagcaagattcacagaagcctaaaccccagatggtctgctcacctttgaaagaaaacaaactggattctcactccacaccattaaaacctaatgggtcaaaattgactccacaatcaagacaatacaatgctcaaaatggaggacgacatggcactgcaaagcatgcaattcctagtcctgctgatacttctagtccagctaggaaggacaatacttcaactgcatatgctctcaaagaagcccgggatttaaagcataaggctaatcgtttgaaggtttttctcttacaatttgatgccatgcctggagaaggaaaagagcttgaaagtacaagactctactttgagtctgccctaaaatttttgcatgttgcatcacttttggaacctcctagctttgatggattgaaacaaggtgatgcagcccagagcatgtattcagatactgcaaaactttgcaagttgtatattgcactgttggatcttgaattgaagtgcttctgcatagcctga

SEQ ID NO: 36234 - DNA, 240 bp, Zea mays
  Peptide Sequence Number=SeqID_79609
atgttaggtttcagtgggcaacgagggggtatttctgctttgggagagtgttttcacaaaaggagagatacactcatcaagggggagcttgccaacaaaaggtttggagcccaggggcggtggtcgatggctgaggtgaaggtcatgcgagctcatgctgatggacaacgagcagttaaatacgagtgttgggatttggctgatggaccagagcagcgggtgaccaaccgtggtggctga

SEQ ID NO: 36235 - DNA, 87 bp, Zea mays
  Peptide Sequence Number=SeqID_79610
atggggaaggtcctcaccagcgatgaagacatgatgaagcctgaccacgacatggtgcggtcggcggtcatttcccaactctggtga

SEQ ID NO: 36236 - DNA, 240 bp, Zea mays
  Peptide Sequence Number=SeqID_79611
atggccatgatggattcaacatcggaaaagatgtacctctgccaggtaccagactttgggtttttaaatgataaagctgagaccgggcagactaataccagaaaggccaacatgcaatgggagtggagagatggcgagagtagcgtgtaccctccgtggaaagaggctggacggtggtgtatctgtgctctcggttggcgtgaacccggtttggtcctaagaaacccggtggcgagttga

SEQ ID NO: 36237 - DNA, 2889 bp, Zea mays
  Peptide Sequence Number=SeqID_79612
atgattggagatgaagttgctcagtttgggtcctgcacgtttacgtcgaagaccggcaagaccacaatgcaggtagtcgagttggttccttgcgcccgcaacaagtggggcaactggaatgagttttggttttacgttgctgagggtaccgtcgaagaccatgagggactccccgtgtccgagatgtgttctcatttttactcagcgtacccgccctttgaggtggcggaggaggatgcggacgaaggggcccttcggtgcgccgccggcctgagcagtgggcgcgatttggttgaagaatttgtggcgtacggggtatggcccttggcgcatggctgggcattgggcgaagtgtgccctcgccagatgcctttccacggtgggagggtggtgcgaagtccagccttcgcggtgaatctgagaagccgcgatccggccgcctttgtgcgtgaggcggaggatggggcggtgcggctcgttggtcgttacgtgccgaggacagagggccagcgcagctgggaaatccgcgggtcgaatgaccgtctgaacagggtttttgaattgaatcaactgccgtatgacggctatcccggtcaagacgatgtggaccgccgtgggaagaagccggtggtggagactagagacgaccctgtgccggcggccgccccatcctctaagaagaggaaactaggtactgccatgggaggacttggggtttccgatggttttgctagagagttgatgaggacatgcgcggccccggggggaaggatgtcttcgcccgagctccgggagtcttcggctcggatgctgagggttaccgggggttgttggcctaggaatgttcctatcccccgcgcagctggcgaggacttttttacatctcgcatggttcgtgaatggagagtttttccttacgggcgaaatattgctgctgttgtgtcggcagtgatggacaaggatcgccagggagctgcacaaaagcgccaggcggttgtcaggctcattgaagccaggccgaagaggcagcggggggctgcgaaggctgcggccctcggcggaggcaagccgccgctggcggcgaagtcgggcgtccctgcatctagcaaggcgccggaggcaacgacaggcgccggaggctccaaatcgacgaaggttgtgccgccgtccagcagagtgccggaggtcgcgaaggcggcccgagcattgccgtcgccaggcaagcgtgtcgccgacttcgccaccgatattagtgtggacgactatcttggtgggtcggacgaaggccaacttgctatagttgcgcctgccgcggcgaccacgacggctgccgtagtgccgaaggcgaagggcggggctcttagcgccggaggcgaggtgttggccctcgcggccgtcagggatgaggcgggcgctgtgtcccgccggctgaaggaggtgaaggaggcactaagtcaggcggctgacttcgtcgaccgcacagcgtcgggggcgctcatggcagttgtgtctgccgaagtcgagagacttcggacgcaacatgctgacgccgtccatgaaaaatcagtcgccgacagtaagtgccgcaagctggcggacaaggtggccgcactggagagggagaaggctgacctccggtgccaactagcgggggagaggagggagaccaatgaggccctcgccaaggagcaggctgcgcaggcggaggccaaattggcgcgggcggagggcaataatgcccgggagcgcgccgagcagctgcaggagcggctcaccgccctggagagccgcgtggagagggccgaggccgcgtcgcgcgcggaggcagagcggacgcgcaaacagcttatggatacataccatgagatgggcgcgcggaccggggtttatgtcgtatgcctccctggtcacctgcgaggggcgatgaacgcgctctcccgcgaagggtgccgacacttcgaggtcttcgaccaagccaatgaagattttgagcgagatatctacaaggttgaggaccccatagtgaaggactccgccggagccatctacgaccagatgtggggtccgcacggtcgcgaggtggtcagggagcgggccgagacggcgagggctcaggcggcgcgtggcgagagggtggatgacttcggggcattgaacagcgcactgcctgacccggagtcgatcccggcggaggccgtgaccggggccgccctggagccgcccccggagaccgcagaaggcgctccgaatgcccccgcagctgctgcggccgtcggagaccttcccccagagaccgccgaaggcgcgccagatgcccccgcagccgctgcgccgagtgctgaggatcctgcgacggtggcggcggaggcgacagcggaggcaacggcggaggctcccgcgacggctgggtcttcgcaggttcaagattttgggcctacgcacgcaaccgccactactaaatttttggcggcttcgaccgtggatggtggtaataaatgtgatggttctgcatctgagttttctgattttgctgactctgggagctcggttgagtggactgaggagtcgtcggaggaggacttggactactttgcggccttggatgtggctgcggcggaggcttcaccgcatgctacggacgcggaagatgtgcctggtcctagtaccgggcgccggcgacgaagggcggttgcgaagcgtagagtgagtgaagcggagggaggtcggcttcgtgtgagtagggctggccggcaggaactgttgtctttgccagccaccgtaagtactggtgaaggggaattgcgaagtctttttgcgggtggggagcttaggataatgttatttaattatagggagatgggaatcattcctaaggttgagccgatgtag

SEQ ID NO: 36238 - DNA, 237 bp, Zea mays
  Peptide Sequence Number=SeqID_79613
atggcccaccggagttgcttcggcccgcccgagactcgctcaccgccgttctcccctctctgctcgtgcattcatggcctcttccccgccattgagttcgccgtggcgccctctccctctctgcccaacttcagcgaccccgacgccaccctagcttgcgcatgcctcaactccggcgacctcactgccgtggagaggagcggcgccgcttcacgcacgtctgtttccccggtctga

SEQ ID NO: 36239 - DNA, 899 bp, Zea mays
  Peptide Sequence Number=SeqID_79614
tggccgtggaggaagaaaggggcggaggggcttaccggcggcgagactgctctagtgaggtggtcgatggtgtaggggaggtcctgagggtcacggcgatgtgcgggtcaccgtcagggatggtcggagtcggccggtccacgtgcacaggcggggaagctcgtcggcggcgaggagtccggcctaaccagggcacgattggtcaatcaaatgggtcagctagcttcaccagagatcaaggaaggtatgtgtgcaaggaatcagagaatgactcactggattgctcggtctacgcgcgcaggcgagcgaccgaagtccggcgaggacgatcttgggtctccggtgaagttctgtcgtgtccgagcgcttggaaagcttcatgggccaccgacgaagctaaccaaagggtaggcgcaacttggaagcgactggagggagctggccacggtggccgaggcttgggcagtggaggcgggcggaggaaaggctcgccggagctaaggaggggcgtctggccagcgaggggctcgcgtcccaatgccatcttatggcatgtgaaagaggggttagttagacatgattttgttaatgggagcattaggattagagctaaggatcaaggcaatattaatatgaagccaatgcaactggatgccggttgcatggccagctggaacttgcaaggattgtggcggtttgttacggcgcccacgagaggatttgctcagcgcaacgagctgaagaggatggctgaccgcacggaccacaaactagtgagggcgagcgaaatggagctgctgaccgatggggcccacacatcagagcgcatgcgagagtctggcggggcggcaccatgcgacagtggctcgttctggtgtagggcggcgcgcgggatgtag

SEQ ID NO: 36240 - DNA, 1083 bp, Zea mays
  Peptide Sequence Number=SeqID_79615
atgcctaataaaccactttcagcattgactctacaagatcgaaatgcagaggttcaaatacaggtccacaggaaatgggagtttcgaggtgccgttgacaatggccctatattacacatcgacatgatcctgacagactgcacaggcaatgctatccattgtcagattccttcgttcctagcagctacaagaggcgatgaatttcaagttggcaaaatatacaagatgacccgcttttcagtagcccgtgcaaaatccacctacaagcctgttgatggtgatctcatgttgtatgtcaaaccatacacaacccttgaactttgccacacttcaccatcaggttttcccctttatgtttatcatctaacaagctatgacaagattgatccagatggatcaaatgcaagaaacttccatggggaagtactgttaagtggtggcgcagcctgtcattggtacttcaacccatcaattgaagaagctgaagctttttatagcaggattgaatctgaaaagataaacatagaattgcccagtcttgacaaacaagaaattacacctccaagttttccacaacgagaacatcacaaccttaaatacatactgtctttaaacccacatgatgtaccggatcaaggatatgaatgcacgctcactttcaaggcatcagatggaactgaagaagctgaaatgtttgcattcgacaatgttgctaggacaattattgggaaaccatgtccaacagttgttgcatcctttcctgatgcatcagctatcccacctgaaattgcagcaatagtttcacggaaatacacattcattatagaattcaacagccagtcattcagatttctagaaaaaacattgctcatcaaaggaattgtagcatcatatggaagaatgacatcactaccaatagtacaagaaaaagatgatgtgcaacttcctctcactccaacaaaaaacaaactgataacaacagctgccgaatctccttctacacccatgtctagactttccacagcagactcaccaagcatgccccaaaagctgacatattctccagcaaagaataagccttag

SEQ ID NO: 36241 - DNA, 201 bp, Zea mays
  Peptide Sequence Number=SeqID_79616
atgccacctccgctgtcacgcatgatgagctgcttcgcctctggcaccgccttgttccttcgcgatctcacattgctgtggacaaaacctgtaaacatgttggatgaactggagcagctattgaaaggtaactctatggtgaaagagctaacgcctaggacaaatgactaccttgtttcatttcgagaattgattgagtga

SEQ ID NO: 36242 - DNA, 2448 bp, Zea mays
  Peptide Sequence Number=SeqID_79617
atggcgtcgtcgccggacttgttccctaacgttgccttctccgacgtctctgccgccgcccccgcggccgaggccaccgccgcgttcgggctcggcgccaccaccggggccccgcgcctctgcctcgtcaagtccgggaaggacgaggcggagcccacggtcgacatcgacctcgccgatgcgcaggtggtcgccgtgatcccggtgaatgtatttaagttgggaccgatggagtggctgtgcgtgtgcgacgagtcggaggctaaggctggcgtggaagagtacatattaaatggcttcatgttaactctcagttctttgaggcagaagtcattttcaagagcaattaaggttgttcttaggacagaagctgagagcaaagccttctctttagcttttcaacaatggaaacaccaagttattagtggaaaagctggtgagaggttggagaatggatcaataattgcttcgaaaagcaaatttgatacaaaaattgaggcatcatcagcaaagatgtatttccactactacgggcaattattacatcagcaaaacatgttacaagattttgttcggacaggaacatactatgctgctgtaatggaaaaccgatctgactttgagggtcgagttgtggttgatgttggggctggaagtggtattctgtcgttatttgctgcccaggctggtgccagacatgtctatgcagttgaggcatccgaaatggctgaaaatgctcaacgtctaatgtccgggaatccgtcacttggacagcggatcacggtcatcaggggcaaggtcgaggaagtagagcttccagaaaaagctgacatattgatttctgagcctatgggaacccttttggttaatgaaaggatgctagagtcctatgtcatagctagagacagattccttgctccagatggtaaaatgtttccaacaacaggaagaggagattgtgagcagatcagcagggaaggggagaaggatgagagcagggacagtggcagcaaagggaggcagtggcgagtgattcacatggctccattttctgatgaatacctttatgttgaaatagcaaacaaggctctcttttggcagcagcacaatttttttggtgttgatcttacacctttacatggttcagcattccagggatatttttcacagcctgttgtggatgcatttgacccaagattattaatttctccaccaatatatcatacacttgattttactagcatgaaggaagaggagctttacgagattgatatccctctgagttttgtagcatctgttggcactagagtacatggattggcttgttggtttgatgtgttgttcaatgggagcactgtgcaaaggtggcttaccactgctccaggatctcctaccactcactggtaccaactgcgatgtgtgctttcacagccattgtatgtgatggccggccaagaaataactggccgccttcatctcgtagcccatagtgctcaaagctacacaatatacttgacaatgtcagctaaaatgtggggtgtgggtgcggagcaaggcggtatcctacaaacatctacaggaaaacttgaactcaaggagccgtactacaggttgtctcagccgcaatcctacatgttgccacaagatcaacagcagcagcagcaattgtcatctttgcagccacacagcagctggctgaagcctggatccgatctgaatctgccgggcgttcgttcagttggaaaacagcaggaatcctacacacgtgagtcccgtgcgggacggtctgctagatcgcggagtgcatcaaacggtgctgccggcaatggaatatcccgtcccagccagcctgcgtgcttccaccaactttggaagcgatttccttgcgtaccatgccgtctcgtcgttgccaagaagctttcaagtacgggcagtatagatctgtcaactgtcgtacccaaatctgtcgatcgaacgtgtcgacaaatcttctgttgcttaacctcaaagcaaaattgcgaaggttgccatgccagcagcttcctgccaacggtcgtacctaaaactgtcgatgacatctcgtatgtatgcagtctcatcaaaattgtgctgcattcccacccgaaatttctagaacctggtttcgacgctcgacatcatcgtttatggcccaccagcggcagtgccctccaatttgaaccactagcacacagatcgatccgcgctattcgagaaaaaaagagacacaggccggttacgccgttggcgacgtgcccatcacggagcggctacgtgtcggtcccgctccagagtgttcttgcacagcctggacggtgccgatggagagtgccacaaatcggacggcccgacgatgccgcccgccccctatatagccctctttcccggcccttccgtctcctcgttcttccagcgaagcaagcagcctaa

SEQ ID NO: 36243 - DNA, 888 bp, Zea mays
  Peptide Sequence Number=SeqID_79618
atggtcactacgtgcaatgaaaccacactgccacctgtgccaatgttgcgtcttcttgactgcggaaccagtgccgcgactcgaggcagccccacgcgtgacccaacagtgccaattgagtgcagcggtcacgagtcagccagccgcggggggaccgagaaaggggatattttgaaagggatccttctccgtgaagggaacgggcaccgagccctcctactgatcaggggttcgaaggctggcccctcagaagggggttcaaaggctggcccctcgaaagggttcgacagccgccccagaacacgtagagtaagggatgaccctgggtacgtccgatacatggccgaggctcgggctacgctcccgagtcacttcgccctttcactgaccgatctgacaggaaaacagcgccgcctgccccgctccggctgctgtgccaaccgcctgggcgaaaccgacaacggtcaagttaagcctcgggcgcaacaggaagctccgcctcgcccgacctcgaggctcggccttggccttggcctcgggaggagatctccgcctcgccggaccccagggcttggcctcgacctcggcctcgggaagagtcatatcctcgcccgaccctgggcctcggccccagcctcggcctcggaggagccgccgcctcgcccgacctcaggctcggatcaaccgcgccacgagggatgcatcattaccctactcctagctagctcaggctacgaaggaacaagactggcgtcccgtcaagcttaccccgcgccaacagctgtactgctacagggctcaaggcacttctccgacggccacgatactacctctacagggctcgagacacccccccgacggtcacgttattatctgtacagggcttag

SEQ ID NO: 36244 - DNA, 456 bp, Zea mays
  Peptide Sequence Number=SeqID_79619
atgcaggcggcatgcaactgcaccaagggggcgcacccttccgactttgacgcgtccagcatggaggcccaggcccacacatcatgtaacaggcgcgccggttgctacgtgcggggaactgcaccgccacttgcgccagtaccgcgccttctcgactgcggaaccggtgccgcgactcaaggcgaccctgcgcatgacccaacagtgccaaccgagcgcttcggtcacgggtcaagtcagccgcgggagaaggcgcgacggttgatatggccaaaagacaggagacacctttggcaggcgaagcgggcgacgcttcacctctgccatgatgaccgcgtcaaaaaagggaccgggaaaggggatactctgaaagggatccttctccgcgaaggaaacgggctccaagcccccctactgatcagaggttcgaaggctggcccttcggaagggttctga

SEQ ID NO: 36245 - DNA, 69 bp, Zea mays
  Peptide Sequence Number=SeqID_79620
atggcgagaatagcgtgtaccctccgtggcaagaggctggacggtggtgatgaaatgacggagttctga

SEQ ID NO: 36246 - DNA, 195 bp, Zea mays
  Peptide Sequence Number=SeqID_79621
atggccgccatttcccagccggctccctcttcctcctcctccccaagtgcagcaaccatcgatgtcgcgcttcgtgctggtccgttcatcgaaatgtcgagacttgtggacagccagccccctatgaccagtcccatttcgctcaggttatccaaaaatggcgaaaggtggtgtaggttggtaattgggaaatag

SEQ ID NO: 36247 - DNA, 351 bp, Zea mays
  Peptide Sequence Number=SeqID_79622
atgacaagaacagggaaggggaggctggctgtcgaccttgggcgcggccagggaaggtggagctattgctttgcgccatggacaacagagagagggaggaagggcgccatggatcaagctctgcgcacctacatgaacagagagaagaaacggtgggggaaaatggagaggggccctggcttcttgctggccgtggagcaaggagcagagagcacacagggaggtggaggcgccatgggagagaggcagcgccatgggagcttggagctcggctccctgcttgcagccgtgtgggagaaggaggcaggctgcttctgcgcgagggagaaggaggaagagagtggcggctag

SEQ ID NO: 36248 - DNA, 456 bp, Zea mays
  Peptide Sequence Number=SeqID_79623
atggaggggcagagggctccgactgggggaatggtggctcggacacgacaagaacagggaaggggaggctggctgtcgaccttgggcgcggccagggaaggtggagctgttgctttgcgccatggacagcagagagagggaggaagggcgtcgtggatcgagctctgcgcacctacaggaacagagaggagagacggtggggggaaatggagaggggcactggcttcttgctggccatggagcaaggagcagagagcacgcagggaggtggaggcgccatgggagagaggtagcgccatgggagcttggagctcggctccctgcttgcagccgtgtgggagaaggaggcaggctgctgctgcacgagggaggaggaagagagtggcggctagaagaattagatgggtgggaatggaaaatttccaaatttgcaagggagagggctcctatttatag

SEQ ID NO: 36249 - DNA, 525 bp, Zea mays
  Peptide Sequence Number=SeqID_79624
atggaatcactgcttgtgggtaaaatggtgacgaggatgatggttatgattatgcttatggtaatgatggctcgtcttagacacactgtacggaagttagtcattcctttcttgccttctcgtcttgcggagcgtccgcttcgccatccggtgaccggtcagtctagccatttggagaggttgcactaccgcctgcacgaggagcaggagcgttggcgacaggagttggagcagcagggctcttcttcctcgcttcagcaggaggtaaagtctgtgaggagctgctctcctgtgcccccgctggaggcgccacctgcaccaccactgggcgtcctggccactagagtagctgctggaggagaccccgacgatggaggtgacgacagcagcttgagccacagcatcgatcttttagaggagcaggagccagagggatgggttgctcgacccatcactcgtgacgccgctcgcgggtgtcactttcacgatgcgctcgacatcttgttacgccaggcacttgactga

SEQ ID NO: 36250 - DNA, 300 bp, Zea mays
  Peptide Sequence Number=SeqID_79625
atgcgtagcggaaatcgcggcggtgaagcggagatggttagcgaggtgggcgacgagctgggagtgcggctagacgcgactggaaggtttcctcccgtcctacaagcgcgcagcaaggtagtgcagaagatagcgctgacagcctggacccacaaggcagacagaacacacccacacccgatgcagactgaactgagcaaaggggcccgtcaatcagagattgcaacagagcgagagtggttgacggcgcgggacccacctgtcggcgccgagacgcgggatggctgtgcgggtgtttag

SEQ ID NO: 36251 - DNA, 861 bp, Zea mays
  Peptide Sequence Number=SeqID_79626
atgcaggcggcatgcaaccgcgccaagtgggcgcgcttctccgactcccaacatgcccagcatggaggcccaggcccacgcgtcatgcaaccggcgcgccgaatgcttcgtgcatgcaactgcacctccacttgcgccaccaccgcgcctcctcgactgcggaaccagtaccgcgactcgaggcgacccagcgcacgacccagcagcgccagcctggcgcggcgaatcccatcagagggaggcatcgagccctcggaccccgtcgccaggggaccgggtccggcagatcacccgcagctcaccggagacaccatgttcggcgcccatcgagggcaacatgtctctttccccccctcctccttgcgaaaaggcgacgcaggggcgtatgtaaaaaagccgagtctgtccctgatcgccctctcgccttgtgtagaggctcggggctgctctcgcaaacccggctccggccgaaccgttgacagcgtcaacataccagcccgagaacttgggacccgaccgtacacccgggctacggccagctcgcatgagggaacaaccagaccagccgaagcattacgcgaggcattaagacctcgaaggagtgaaaccactcctccgaggcctcgggggctacacccggcgggtgcgctcgcgcgcacccaccggaacaaaacgcaaccgagaaaggctggtccccttgcaaaaaagtgcgacgagagcctccaagcgagtgctaacgctcccttcgaggctcgggggctactgtcggggaccataattaggggtaccctcaaggctcctaattctcagctggtaacccccatcagcataaagctgcaaaggcctgatgggtgcgattaa

SEQ ID NO: 36252 - DNA, 711 bp, Zea mays
  Peptide Sequence Number=SeqID_79627
atgacccacgcctgcgcctataaaaccctcccagacttcgattatacccttccgcgcaccctcaaacctcaccggagtctagctcgccgccgtttgcccgtgcgcagcgtgtccgcggccgcccaatccctctgccaccgtagaccggccagtggagccattcccaactccgtccagctctcggagaagactgtgcacacctccgtgaagctccccgagcaaggaatcggagtttgcttcgccggagaggccagtccacgctcgccggagctctcaaccccgccggagtacgtggaccgggtaaaccactccaccatccttcgattccttgtgcacacggtcgctacgttaccccgtgaagctcaccgtgccctcggattgaaccagttcgccgtggtttggccggtatactcgccgccgacgaggacacccgcctgcacgtgtggaccgggcgattccggccatccccgacgtcaagccgtacctcgacgtgaccgccagagcctccccgagccaaccccacccttcgccgggcctccctcgccgccggataagaaaaatagaaaatactgtaatcttgctgacggagagtacatcctcgtgacggagcaaggagctgctcaggaggtagccccggatccagcacctgagcctgcaccagaggacctgtccgccactgctttggaaggcaagccccggttttatgcataa

SEQ ID NO: 36253 - DNA, 468 bp, Zea mays
  Peptide Sequence Number=SeqID_79628
atgaccttggagcctcatcccctgcagccaggatggcgctccttggactccgagtccttcgggtaccgggcagaggacacgatcgaggcgatcgctctgcatggattgactaccttctgcggattccaccccttggagctggctacccaccccattggcttgttccccgctgagaaggaggacgacccaatgtggaaggatcgggtggagcatgccaaggacatctgggccatctacccaggtcagactgcgcacttgacagtacggtgcatgaatgctctgtaccgtctgcaggtggagcagctatccactgacattcaggagttggaggagctggagatccaggaccaggaggccaacgaggacgtcgacattgagggaggagatgagcccgcctccagtgtggacactattggctcgggaagaccaccttcccccgagtcgagtgttgcttcgttcgctcactag

SEQ ID NO: 36254 - DNA, 269 bp, Zea mays
  Peptide Sequence Number=SeqID_79629
actgtaatcttgctgacggagagtacatcctcgtgccggagcaaggagctgctcaggaggtagccccagatccagcacccgagcctacaccagaggacctgcctgccactgctttggaaggcaagccccggttctctggaggagatggttgctgggataacttggccgtccaccttgcccaccgggttggactgttgagtgggaccctgcctcggctgaggaggagcatgaggagtgatgggacaggcttcccccatctctctgtttaa

SEQ ID NO: 36255 - DNA, 210 bp, Zea mays
  Peptide Sequence Number=SeqID_79630
atggcagaagcaagcttccatgtgttcgacgcgagctggcatccgggggcgcgctcagagcacgcccactgtaatcttgctgacggagagtacatcctcgtgccggagcaaggagctgctcaggaggtagccccagatccagcacccgagcctacacaagaggacctgcctgccactgctttggaaggcaagccccggttttatgcataa

SEQ ID NO: 36256 - DNA, 516 bp, Zea mays
  Peptide Sequence Number=SeqID_79631
atggggatacccagcgacggcgacgacgtggtgcaaatccggcacgccgacgccgccggcgagcccaccgtcgtcaccgtgagctgccccgacaagacaggactgggctgcgacctgtgccgggccgtcctcctcttcggcctcagcgtcgtcaagggagacatgagcaccgacggccgctggtgctacatcgtgttctggctgttgccgcgcgggcggcggcccgtggccgtgccgtgggacctcctcaaggaccggttgcttcagctctgccccgtcgcgccgccattcggcttcgggtcccacgacgcgtacctcgcggcggcggctggcctgcaggacgttccgcctcccgcgccacagctcttcctgctcaagctatgctgcttcgaccggatgggactcttgcacggtaacgcctctgaatccacctccggctgttgctctgttctatgccaagtgctaggttcagtaactacttcatatccgtccagcaaatttgaatttttaatgtaa

SEQ ID NO: 36257 - DNA, 2439 bp, Zea mays
  Peptide Sequence Number=SeqID_79632
atgtgtttgcattattactcagcgtacccgcagtttgaagtagcggaggaggatgcagacgaaggggccctgcggtgcgcggccggcatgagtagcgggcgcgatctgattgaggagtttgtcgcgtatggggtgtggcccttggcgcgtggctgggcgctgggcgaagtatgccctcgccagatgccttcccgtggcgggatgctggtgcggagtcccgccttcgcactagatttgcatggccgagatcccgccgggttcgtgcgtgaggcggaggatggggcggtgcggattgttggtcgctacgtgccaaagacggaggcccagcgtagttgggatatacgcggatccaacgattgtttgaatagggtcttcgagttgaaccgtctaccgtatggcggttatcccgggcaagacgttgtcgaccgccgcgggaaaaaaccggcggctgagactgaagacgaccccgcgccggcggccgccccatccactaagaagaggaagctaggtactgcgatgggaggactgggagtctccgatagttttgctatggagttgatggggacatgtgcggcccccgggggaaggatgtctttgcccgagctccgggagtcttcggcgcggatgctgaaggttactgggggttggtggcctaagaacgttcctatcccccgcgcggtcggcgaagacttttttacatctcgcatggttcgtgacttgggagtgtttccttatggacggaatattgctgctgttgtgtcggcattgatggacaaggatcatcaggaaactgtgcagaagcgccgggcggtcatcaggctgcccgaggctaggccgaagagggcgcgggggactgcgaaggctgccacccccggcggtagccagccgacgcttgcggcgaagtcggccgcccctgggtccagcaaggtgtcggaggtcgtgaaggcagccggcgccggcggaaccaagactgcctcggccggagccgcgaaggcccgagaattactttcgccgaggaagcgtgttgccgatttcggcaccaatattagtgtggacgattatctcattggatcgggcgatgggcaacttgttgttgttccgcctgcggtggcgaccacggtgtctgccgcggcggctgacttcgctgaccgcgtggcgtcgggggcccttacggcggttgtgtctgccgaagtcgagagacttcgggcgcagcatgctgacgccgtccgggaaaagtcggccgccgatagcaagtgccgcaagctggcggagaaggtggccgccctggagggtgagaggactgacctccggcgccagctggtggaggagaggagggaggctaatcaggccctcgccaaggcacagtcggcgcaggcggaggccaatttggcgcgggtggagggtagtctcgccagccagcgcgccaaggagtgggagacgcggttcaacgctctgcaggcccgcatggagagggccgaggcttcaacgcgctcggaagttgagcagacgcgcaaacagctcatggactcataccgcgagctgggcgcgcggatcgctgacttcgaagtgcccgatcgagagtcaggccttcgctgcctcgagtggctgcaagaggagttgttggcgctcccgaccattgtggagggatttatgtcctttgcctccctcgtcacctgcgaaggggcgatgaacgcgctgtccccgcgaagggcggcgcgtgccgagaacgtggaggactttggagctttgaacagcgcgcggcctgaagcggagtcgaacccggtggcggccgaggccgaggtcgacccggcgccgcccctggaagccggcgaaggctccctcgctgcccctgcggctattgtgtccggtggtggctcgtcgccaaccgctgtgccgagggctgaggatcccccgaagacggcggcggagcgggcagcggaggatcccacggcgactgggtcttcgcaggttcaagattttgggcctgcgcacgcaaccgctactgctaattttgtggcggcttcgactgtggatgctgggaatgaatcggatgagtctgcttctaagttttctggttttggtgactctgggagttcggttgagtggacggaagagtcatcggatgaggacttggattactttgcggccttggatgtggcagtggcggaggcttcgccgcgtgttgcggatgctgaagttgtgcctggtccgagtgctgggcgtaggcggcgaagggcagttgcgaagcgtagagtgagtgaggtggatggcggtcggcttcgtgtgggcagggctggcaagcaggaattgttgtcctcgccggccgttgcgagtgtaggtgagggggagttgcgaagtctttttgagggtgaggagcttaggataatgttatttaactatagggagataggaatcattccgaaggctaaaccaatgtga

SEQ ID NO: 36258 - DNA, 228 bp, Zea mays
  Peptide Sequence Number=SeqID_79633
atggcggcgcgctcaagaacgatgatcctgctgctcggaccggccaagatcagtagtggctgcccgattaagctactgggtgagtgttacgggcgtgagacaaccctagaacgggagcagtcctgggatgagctgaccacggggcgcagaagatcttggctcgtgggtaatagaaaaggggaaaacgaagtcgcaacggtctcgggtggaattgggaggcaagattaa

SEQ ID NO: 36259 - DNA, 546 bp, Zea mays
  Peptide Sequence Number=SeqID_79634
atgaacgtcgacgagcagggagggttcgacggtcaagggaacgagcgcgatcgtcgtgctgtgcggacggagctccagcgaggctccacggactccggcgatgaacggcgacctctggcgacgaacggcgagggagagagaacacgagaagagggagcgagctcggctgtgggagagagagagggagctcggggaggagaagggaagggagttcggtcggattttatagggagagggaggaagaggagagggcggccggggtcattcaagctgtcatcaacgccgtccatgaagagagggattagtgggggagtacaaacagacgaaatgaagcttccaataatgcagagaagaacggtcggctgggcacagtttgcggctcgggcgtcggtgttgggcgcagctcggtcagacttcctagcgcgggtgcgcagcgcgtcgggtcacgaggctgcctggtgcggtctgctcggcagcgtcgaggtcgggctggggctcggcgcgcaggctcctggcgcgtcggggaggcgaggctcagtcgcttag

SEQ ID NO: 36260 - DNA, 345 bp, Zea mays
  Peptide Sequence Number=SeqID_79635
atgggttcccacgacggaacgtcggcgctgcgcagattcggcgaagcgagacgcggagacagtcgaacagatcaatggcgcagcatggggctgctgcggtggtccggcaccgctgcgcagatcgggtcggcgctggctgcggacaagcgcataggagctatgttgcagcagagcacaaggcggagctcggagcagggcgcgatcagggaaagtggagttgctgcttggcgccatgggaagcttggcctcggccatgggaaagaagggggaaggaggaaggggagccggctgccttgcgtggaagaggaacagggagggcgtcgggtagaggagatggtcggctag

SEQ ID NO: 36261 - DNA, 240 bp, Zea mays
  Peptide Sequence Number=SeqID_79636
atggatgactttgaggagttccaggactacgacggtttacctttcaaaaccgggtgtgacactggcggctcggccgtcggggttgtcctggcgcggcgcggggtgctgcttgggtcgcgcaggctccaggcaagtggcgacggccagagaagagcaagaggagtagagaagggagaagggcgcgggtgggaagagcaaggagaggtgggaccgggtgggtcccacatgtttgagagataa

SEQ ID NO: 36262 - DNA, 84 bp, Zea mays
  Peptide Sequence Number=SeqID_79637
atggcccacgaagggatggcctggcgagatagttcaaggctgttcttggcacgacaagagcagcaacaacaggagccggtgtaa

SEQ ID NO: 36263 - DNA, 366 bp, Zea mays
  Peptide Sequence Number=SeqID_79638
atgaacgtaaatggaaatttgcagaatggaattgggattcagatgggtcaaattaaggcgatagaaatcaaggagatcgcggaaaaagggagaaataggaagagcgagaccgcggagaagaaaaggaacataaatcacggattcgtgggtatcctctgttggaacagtgaccccgtggcaaatccgccaagaacagagctccttcggaggaaggaccccgatggacacgagatggagaaggtcagaagcgtaaatgttgacaataataactcggccatcacccctaaaaatgacgatatgatgcccgagttactcagttacttttcagaggaatcaacttcacagataaggaaaacggaggaatga

SEQ ID NO: 36264 - DNA, 450 bp, Zea mays
  Peptide Sequence Number=SeqID_79639
atgggcaagagtaacaaacgcaaacgcgagccgactcctccatcggaggacttcggcgactcggaatactcggaggaggacttctcctccgagtccgaggggtctccggctcccgtctctcccccggtgtcgtctgacgattcagacgactcccaggggattgccttggaggtctggacttatatccgggccatcgagcgctccgggctcgagggctcagatgagtcggagtactcctcagacgaggaggactcttcggactcgtccgaggagggcggtggcggcgatggcggagacgacgacgacggaggcgacggtgacgacggcgacgatggcggtgacggcggcagcaggggcggcaacagcggcagcaagggcggcaacagcggcagcagcaggggcagcaacggcggcggcagcagcaagggaagcaacaaagccagtggctag

SEQ ID NO: 36265 - DNA, 369 bp, Zea mays
  Peptide Sequence Number=SeqID_79640
atggatgtccctgttgccaagccatggatgacccgcgcccatgggagcttctcccactacgccaaggaggagggagctcgcagggaggggcaccgagcagagagagtggaggccgcagtggcgctgtccgtagggggcggctccatgcgcgccatgggaggaagggagccgagcttcctgcgctggggaagaaggccccctgttctagccgctcgccaggagaagaaggagggtgccgcgccacggctgatgcgctgtggaggctgtcggccatggaaggcagagagcagagggcatgcacgccaaggaggaagagggctggcgtggggagaagaagacagggaggctgtggcggctggaaatttttga

SEQ ID NO: 36266 - DNA, 393 bp, Zea mays
  Peptide Sequence Number=SeqID_79641
atggagaagggctcggcggcggtggagtggaggcaggaggagggctcgacggcggccgggcaacgggagctaggggcagcggcagacgggagatgggagcccaagcggtggcagttccagggtttgggcggggaccgcgtgggggaggtgaggacagggcagggtactattagggaaaagatcctcgggcccctagggcccactagtcagtggaaggacaagggaaagccgccaccccacctcccccatcaaaccctagctgccccctcctcaagccttctctccaaggtgccattcctttcccgctcggatctatgtcgcgttggtgcaagtctccaattggattttggtggagggaagaagaagggaggaaagggggaggattcaaggtga

SEQ ID NO: 36267 - DNA, 171 bp, Zea mays
  Peptide Sequence Number=SeqID_79642
atggtgtggtcctcccgcaccagccgggtgaagggtatcctcagcccttggaacaataaaaccgaaatcatgttcgcctggagactactcagggcgcttcgtggaagcacgacgggtgtcgtgggggagggttcagaggccacgattgatcagagcacacagaatcgctaa

SEQ ID NO: 36268 - DNA, 456 bp, Zea mays
  Peptide Sequence Number=SeqID_79643
atgggcaagaacaaaaagggcggaagttcgtctcaccactccggcgacaagcggaagcgcgagccgagtcccccctcggaggacttcggtgactctgagtactcggaggaggagttttccttcgagtccgaggggtcaccggtctacgcctctcccccggtgtcgtccgatgacttggaccatgcccaggggatcgctgtcgaggtgtggacgtacattcgggtcatcgagcgctccaggctcgagggctcggatgagtcagagatctcctcggacgaggagaactcctccgactcgtctgaggaggggagcggtggtgacggcgacgacgagggcgaaagcggcgatggaggcgacagcggcagtggaggcaatggcgacggcaagggcgacgacaatggcggcaagggcgacggcggcagcggcaaggccagtggcaaagcgcctttggcttaa

SEQ ID NO: 36269 - DNA, 456 bp, Zea mays
  Peptide Sequence Number=SeqID_79644
atgggcaagaacaacaagcgcaagcgtgagccaactcctccatcggaggagtttggtgactcggagtactcagaggaggagttctcctctgagtctgaggggtctccggctcccgtccccctgcgtgagtcgactgacgactcagacgactcccaggggcttgcggcggaggtctggacgtacatccgggccgtcgagcgctccgggctcgagggatcggatgagtcggagtactcctcggatgaggaggactcggacggcggtggcgaggacgaggacgacgacgacgacgacgatggcgacggtgacggtgacggcagcggcagcggcaggggcagcggcggcggcagcaaggacggtgacggcggcgatagcaggggcagcaaccggggcggcagcaacaggggcagcaccaggggcggcggcggcggcagcagcaacagggccagtggctag

SEQ ID NO: 36270 - DNA, 186 bp, Zea mays
  Peptide Sequence Number=SeqID_79645
atggagcactgtcccgggttagagaggttgctggagactgcccatctggagcttgacgggaagctgttcgtcaacacgcagcaggcccctaccaggcgcgccaactgtcggcgtttcaagaccggggggcgcaaggggaggatccaggtgtacaatggggggtgtagcagagtgctacgtgtctag

SEQ ID NO: 36271 - DNA, 426 bp, Zea mays
  Peptide Sequence Number=SeqID_79646
atggcccctcctaccagggcatctcttcactcgctgtgcgtcactggaaacctggtgccgcgcgtcagcgcgttcgtctccatcgccaacggatgcaccggagttcgtggggacgggcactcctgggatctcggtcaggccgttgctcggccttggtataagactgtcccctggcatgcgtcacggctccgttttgacccacgccaaaagcttagccaccgtgcccgccgtcgagttcttagagagaagcgccgcccgggtgtattgtcgtgccgcgccgcgggtgaaagccctcctcggcggcgttccgttccctgcacgcggtcgtgtggatcttggttggagttgttatgggaaatcgagaggaagctcagcttcaactttggttgtcaggcgactgatgaagcccttgccatggtacagtag

SEQ ID NO: 36272 - DNA, 585 bp, Zea mays
  Peptide Sequence Number=SeqID_79647
atgaggtctctatcacggtggcggaaacccgatttggggaaagtctcgaattggcaagctctggtggacgattcgaggtacgaggtcgttgcaggtcttgagtatgatcggactgtccgctggaattctccggaccgtctggcgtggtcccggactgtctgcgcctctgcaaggaagaacaagctgaagatttggcctgctttggccaaaccatttcagcagcatacacctctgctgattcgtcgtccgagctactttggtcgcactctactatatggacattgtgacgaatggttttggcagtctctttgcttcggttttcacaagccaaagctctctgcctgtggcgccgaggtaacacagctcagcgccataggctatggcgccgagatcttttttatggccatgttcttctccactgtacgcactggcaaggtgaatgagttgagaaatttatggcactgcgggtggtggccagtgaagattgcccttgtcatggatatttcttgtagttcagctcataagttttatgagatttatcacaaggctgaactacaaattgtgccaaacaaggggagaagttga

SEQ ID NO: 36273 - DNA, 165 bp, Zea mays
  Peptide Sequence Number=SeqID_79648
atggactacatggtgtttaaggttgctgaattggatggagcagcaatgatttgtcacactaacaacaaaataaaagtttcacataattatatttcaaactttcatattaaaatggtgaaaaaaatagttgataaaagaagggacaacgatgtaatggggcaatga

SEQ ID NO: 36274 - DNA, 465 bp, Zea mays
  Peptide Sequence Number=SeqID_79649
atggagcctggcggagggacagctgtcggagcggttgagtccttgctgacgtcctcttgcttccgtaagggggctgagagccgccgccgtcacagggtacgcggggcgccatcattgcctatccggcggagccagccagatgggacgccggtctcgttccctgcggcccgagtcagctcggggttgggcgatgtggaagctcctccgaggccgaggtcgagtctgtcttccgtggtcgaggtcgagtccgagcccctgggtcgggcgaggcggagttcgtcgtcttctagggctgagcccaagtccgagccctgggtcgggcggagcggagttcgtcgtctttcggggctgagcccgagtccgagccctgggtcgggcggagcggagttcgccgtcttccgggacttagcccgagtccgagccctgggtcgggcggagcggagttcgtcgtcttccgggacttag

SEQ ID NO: 36275 - DNA, 387 bp, Zea mays
  Peptide Sequence Number=SeqID_79650
atggacgccctggatcagacgccccgccctggccagctttccctagcccccagcggcggcgttgcctatgtccgtggtgagggctcactagagacgagggcgcgggcgcgctggggatcccagagcaatcggaaaggcttggggaggtcaggggctagtgcagcaaacatgaatgctgggacaacaccgactcaggggcatctgagggtggcggtccacgatgaggcggtgacgctacctcactctggtgaggaattgcgcacaacagagattagggaaggaaaaaagacgggaataagaatgaggaaggaagaaaacgatccaagcaacaagagcgtaaaagaacaggagcaaactttctctcaagtcactaggtggttggaatga

SEQ ID NO: 36276 - DNA, 723 bp, Zea mays
  Peptide Sequence Number=SeqID_79651
atggtgagagtccaggctctagcaatatccgctgtggagtgccaccttgaagaagctgttctagaggcattgctatgcggactacctgagattagcgttgctgattttgatattgttcgttcagatgaggtaccgtctgttggtttattggacgggcgagaggtaagcctgccaatatctcaggaagttactgcattagtcagccgtcttggggatccagccccagcccccgagggtgtagcagttggctcgtctcctgctgtttcgatggaagtccggattgggttgtcagtgcctcgggttgatgatgttgtggcaatgagaactatcctatttatcgagtcaaaacaagatggtccaatcaccttggaagtgagtggcgcggatgtcggtaaagtcatgccgactgaaacagttgtagttgaggatgctatcctagatcagtctcatgaaggtgctatggtaactttagccgacgtcaagattccaatggaggtcgcacttcagttgggagatttgtactcttccgctcttgtcacttcttcccttatggctcttgcaaactctactgcttctgggagggtcttgcctgtgctagctttgcctcttcctatgttcctagcggacttgcaggcattgcaatggggacaacctggtgtgtttggtgttttaagaaagggtgagtacacattaacgtactcagcaaatgtcccgtttggctaa

SEQ ID NO: 36277 - DNA, 789 bp, Zea mays
  Peptide Sequence Number=SeqID_79652
atggcaggaaagaagggaggtaatggtaggaggacgattaagggcgagaagaggaaacgacctctgactcccccattcgaggacttcagtgatttagagctttccgaggagcggactcctccgtcgtcccccggctccccgtcgtctgcttgcacacccgactccatggggctctcggtggggaagtgtgcctacctccggggcattaagcacgttggcctcgatgactcaaagaagtctgaagaggaggagaaatatgtggaggaggacgaggatgacgggtacgacggcagcgatgaaggcgatacgaccgacagggtcagtagcggcggtggcaaggatcgcgacaacgacaagggcaagggcgatgacgatgacagcagcagcggggcagcaacagtggtgacggcaaggacgatgatggcggcaagggcagcaatggcggcgactgcgacaatagcagtgggggtagcaacagcagcggcaacaagggcaagggcaagggcagtaacgacgatgacaatgccggtgcttttcttggaatcaatccgcattttggattatggaaatacctctaccattgcaaatcggtaccattttcttttcgcagagtctttttctgtgtttgtgtccaaccctcccattcgtggagaatgtgggggtgcaggccatagagcttggagattgaagttcgtaatcgctattcaccatggtttgcctgaggtggcaagcagacccacatttccatacaacgcccaactgatgactctgagattgaagttgttctag

SEQ ID NO: 36278 - DNA, 801 bp, Zea mays
  Peptide Sequence Number=SeqID_79653
atggtcgccttccaagggggtcaccctccttttaaaggcgactatccctacttgcgtccccagccgtcacgggctgagtcttctccaacacgctccaaggccctcccctgcggcgcgggggctgggtcccacatgtcatgcaagccgactcagagcagaagaagccaaaccgccgtgcgcggtgcgcacaaccgcccagcggttacaagtgaccctccacttttgcccagaccaacgggcgaaaggggcgggcagccatgcaggcggcatgcaaccgcgccaagtgggcgcgcttctccgactcccaacacgcccagcatggaggcccaggcccacgtgtcatgcaaccggcgcgccgaatgcttcgtgcatgcaactgcaccgccacttgcgccaccaccgcgcctcctcgattgcggaaccaataccgcgactcgaggcgacccagcgcacgacccaacagcgccagcctggcgcggcgacaacgcgcccgtgttccgttcctcgaacggctcgcgcacgcgcaacggccgccccgccaaccacacgccccgtcgcattaactccgcggcgggacaggcggcgcctctggcaggagaagcaggcgacgcttcgccttcgccgctccgagccaccctactgatcagaggttcgaaggctggccccctggaagggtttgacagccgcctcagatcgcgtgggccctacacccactactggtcagaggttcgaaggtcggcccctcggaagggttccacggccgcctcaggctactcgggctccgcgcccattactgattag

SEQ ID NO: 36279 - DNA, 546 bp, Zea mays
  Peptide Sequence Number=SeqID_79654
atgggggatacccaccgtctttccgcctcatcgttggaggaacgcaactccacgggagttgcccggctgtaccccccccccccccgccggcggtcacccaagacggcgactaccagcccctgggtggggagaagcaagccgggctgcgatcttggtcccaccctcagcttcaaggatgttcatcatcctcgctggggtggaggccgggctgagccggagctctacctcccgcgcgggttcgtgggtcaccctctcctgcggtgttcgagggagagggcgctcgctggccctacgggcgggtcggacttcgacaacgcggggctggtcgacggcgggcgtcgtcagccccagcgtgtcgagctcgtcggcttggctcccggtggcccctcctgccggaaggcggctgccgcgccgtgtgcacgggaggaccgcccaagatgtcgcgcgctgctagggcggcgttcgtgttctggggcggtcctgcctttgccccggtatggcgccttcacgcggaggtcggtgccccactcgtccgggaggatctaa

SEQ ID NO: 36280 - DNA, 429 bp, Zea mays
  Peptide Sequence Number=SeqID_79655
atggagggtaggggcatgagcataataaaggatggagctaaagcaaggattggaaccgacagggagagaatgcaaccaagacataacttgcaaggtgtcaaagaagggggagcagtcaatgatgaactagatatggtattatccccgaacatggatggaaaagaggaggcttccaagggtaggttcaaggtaacaacagacaaggatgtaggagaggaggtaaataggcatgagacaaaggatataagtaccacaaaggatggagttaagacaggacctacaagtggaaaagaagaagatacatccaagggccagatagggtcagaggtgataacagacaagggtgtgagagagaagatgaagacattgaagagccagtggtatgagtataacaaagaatggagttgcgtccaagcttacacgcggtaa

SEQ ID NO: 36281 - DNA, 333 bp, Zea mays
  Peptide Sequence Number=SeqID_79656
atgagggtggtacgggacgcccttggccaagtaattagggaagtcttatgttgggtgctggtttttggtcattgggaaacggaggcatctgttatggctcctatattctcgctcagggatctgggtacgggcatcgtcccatggctttttcctgagggcagaggtataggttttgggacatcagatggactttatgcaatggtcatttccaacattcgcatagtgaggacccgagggaaaagccacgtagtgagacccttccagttcaccttggaagtgatcaatggggagtcgcgatcctcgggcagaaaggggatcatggctcatgggtaa

SEQ ID NO: 36282 - DNA, 621 bp, Zea mays
  Peptide Sequence Number=SeqID_79657
atggcattgctacgtaccgtcgtcggcggcgggcggtctgcttcactcgagccagaacgtcggcgagttaagggagcagcggaggaaaaggagcagcaagacgacgggcggctagggttttacggagcgcggaaggcagagttcaaaaagcgccgcccccgccccccttttataggcggggcgcggctcttcgggaaacccgcaatccgacaggccgcgacgcttcgggaaacccgcaatccaacagtacgccgtccatcaacggtcacatcaaaaacccccgcggaaccacttcgagcgagggcagcgtctccgccatctagcgacgtcttcggcaccaggtgtctgagggcacatgcgtccttaacacaagacgctgggcactcagatacctataaatacccccgcacagtgcccgtgagaggagagatcaacagtgctattgcccccgtgcacgtaaccctgttgtcaccaccgttcactcttgttggccttcttgctgcagagagcaagttccaacacggacgtgtcgccggtcccgatctccctcatggcggatgctcccgacatcacttcgagcggttaggctctaatgaagtactggcctctgataccaattga

SEQ ID NO: 36283 - DNA, 78 bp, Zea mays
  Peptide Sequence Number=SeqID_79658
atggcggctcacaggcggcccgattgggcaaaacccaaggcgcgggcgcgggctagcagcggcgcgaggaaaggctaa

SEQ ID NO: 36284 - DNA, 630 bp, Zea mays
  Peptide Sequence Number=SeqID_79659
atgacggctaccagcctgtggaggtcgtcgacgggaaggggatccgaggacatccgcaaaccctccaagtcggcccccggcgtcatctcccaaagcggcagtcgccgctccatcaaggggaagcaccctccggcgatgaatggcggcgaccactcccgcagcgaagacagcgccacccgcgtcactccgactgctgtaccactcgacggagtgaggctgacggcggccaagtccggcctcgggtgccataggaagctccgcctcgcccgaccccagggctcggactcgggctcggccccggaagacgacgaactccgcctcgcccgaccccagggctcggactcgggctcggccccggaagacgacgaactccgcctcgcccgaccccagggctcggactcgggcttggccccagaagacgacgaactccgcctcgcccgaccccagggctcggactcgggctcggccccggaagacaacaaactccacctcgcccgaccccagggctcggactcggcctcggccccggaagacagactcgacctcgacctcggaggagcctccgcctcgcccgacctagggctcggaccgaccacgtcacaggaggggccatcattaccctacccctag

SEQ ID NO: 36285 - DNA, 315 bp, Zea mays
  Peptide Sequence Number=SeqID_79660
atggcgcctcctgtcgacgtggttggtctgcgccctaggttgggcgatgtggaagctcctccgaagccgaggtcgagtctgtcttccgtggccgaggtcgagtccgagcccctgggtcgggcgaggaggagaccgtcggctgagcccgagtccgagccctgggtcgggcggtgcggagttcgtcgtcttctggggctgagcccaagtccgagccctgggtcgggcgaagcggagcttcctatggccggtcagtggagcggtgaagtgatggcggtcacttcggctctgtcggctggggggcgcgcgtcaggataa

SEQ ID NO: 36286 - DNA, 1236 bp, Zea mays
  Peptide Sequence Number=SeqID_79661
atgagacggaaagacggcgggtatcccccatccgggggcttggaaggtggaaagacacgatgcataagggagcgcgaagacatggtcgccttccaagggggtcaccctccttttaaaggcggctctccctacttgcgtccccagtcgtcgcgggctgagtcttctccaacacaccccaaggatctcccctgcggcgcgggggctgggtcccacacgtcatgcaagccggctcagagcagaagaagccaaaccgccgtgcgcggtgcgtacaaccgcccagcggttacaagcgactctccacttttgcccagaccaacgggcgaaaggagcgggcagccatgcaggcggcatgcaaccgcgccaagtgggcgcacttctccgactcccaacacgcccatcatggaggcccaggcccacgcgtcatgcaaccggcgcaccgaatgcttcgtgcatgcacctgcaccgccacttgtgccactaccgcgcctcctcgactgcggaaccaataccgcgggcaggagcagcggccccgtcatcagccaagctcacgtcccatccgggggcagcgagagaaccctctctcacggcgtgaagacaacgcgcctgacaggcggcgcctctggcaggagaagcgggcgacgcttcgccttcgccataatgaccgcgtcagaaaagggaccgggaaagggggataccccaaaaaggatccttccccgtgaaggaaccaggctccgagcctccctactgatcagaggttcgaaggctggcccctcggaagggttcgacagccgccttagatcgcgtgggctctacacccactactggtcagaggctggcccccgaagggttcacagccgcctcagacgccgagcgagggatgaccatgggtacgttcgatacataaccaaggctcgggctgcgctcccgagctcaccggagacaccatgttcggcgcccatcgagggcaacatggcgctttcccccctcctccttgcagaaaggcgacgcaggggcgtatgtaaaaaagtcgagtctgtccctgatcgccctctcgccctgtgcagaggctcgggggctgctctcgcaaacctggctccagccaaaccgttgacagcgtcaacataccagcccgagaacttgggacccaaccgtacacccgggctacggccagctcgcatgagggacgaccagaccagccgaagcattacacgaggcattaagacctcggaggagtga

SEQ ID NO: 36287 - DNA, 225 bp, Zea mays
  Peptide Sequence Number=SeqID_79662
atggcatgttgtggaagacatcgagatgaactcagacatgaagctatcaccactatggcacagaggactagatgtagggaaaccgaggatgaaaccaccaattcaaaacatggagaatatagaggtgagcatgttgaagaagatgtcgagatggactctaacatgaagctaccaccatggaccccattgcaaatacatgctcataggtggagtgtaacgccctga

SEQ ID NO: 36288 - DNA, 642 bp, Zea mays
  Peptide Sequence Number=SeqID_79663
atggcgcgacctcctctgcactcggcgacaacggcgggcgcgggcacgacgtggacgccgagggtgaggcaggcgctgggcgagcatggccgctactgcgcgcgtccgcgcgatgtgcgcggcgtgggcgcggctggcggcggggcgtgcggctgggtcgcgcagggcggcatggggcgcatgggcaagcgtcgcacgggcgtggctggcggtgggaggcgtggctgggtcgcgcttgcgggcgtgggccacggcgcggctaaggagcgtgtggtgggcgagaatcgcgcggctaggccacatgtgcgcgaggccgactgggaggcaaggggtgggtcgaggtgggctggtggggagagggtgcgcctgggtgggctagcacgcgctcggcgggccacgggcacggtgggctggccaggagtgggagagggggcggttgggctgctggcgcggctgggcgggccggtcaggggaaagggctgggggctactgggcagggaacaccagcccctgcaccaggtcgcggaccatccagcccttggctgtggaccgttcgcgcctccgcagagagcactaatgccagttctcctcacagtgattggcgtccggatcggcgccaacacacacaaatataggtattag

SEQ ID NO: 36289 - DNA, 831 bp, Zea mays
  Peptide Sequence Number=SeqID_79664
atggggttcagccaagaaggccagactacgcctgctggcatgcgtgggggcattgatggtgtttgtagagggaaagcatatgcagactacggggctgtttggtttgtggctaaatatgtcacactttgcctaagtgaacattattgggtaaagaagagtggtcaagggcacaacttgctttcaggtttcttctgcaagactccacagccgatgggggcggtggattgctggccacatgatcatattctgagggccaagattagatcggctgaaggtcgaaccgatgacaggggccccttaccggcgttcgtagtcgtgatggtcgttgactatggcggccgagaaccgatgatgaggagatccagcgtgaggccttcaaaacttatttcttatgaccatttaaaaggtgaccctgatttaggtggtggtacaaactccccaatatttgtagacatcctgaacacggtggttgcgtcgataaaacattctctgacaggggataactctgacgtctcccccagcaatatcatcgagccaacttgggaaaccttgccagctgaagaacagatccagtttaaggagcacaaggaacaactaatccaggaagcgaaggcaaaattcctggccaacttcaaggtgggcacgaacaacaaagtcgttcggcaacgggcgacagatctggcttcactccgacctactacggctacccccaaggcgcaggagttggtacgattcagaatgtgcgatttggttacgattcaggctatagaaagtgttggaaaattggtttcaatttcatgcgtggccaaatggaccaactcaagaaagtaa

SEQ ID NO: 36290 - DNA, 2628 bp, Zea mays
  Peptide Sequence Number=SeqID_79665
atgaagctgtggaaggagacttccaggagttccaagattacgacgagttctaggtgtggggtattcgaattaaatcaactgccgtacgacggttaccctggacaagacgaagcggaccgccgtgggaagaagccggcggtggagactggaggcgaccctgcgctggtggccgccgcctcctcgaaaaagagaaaattaggtactgcgatgggaagacttggggtgtctgatagtttcgctagagatttaatgaggacgtgtgcggccccgggggagaggatgtcttcgcccgagctccgggagtcttcggctcggatgctgagggttaccgggggttgttggcctaaaaacattcctatcccctgcgcggctgaggaggactgttttacatctcgtatggttcatcggtggaaagtttttccttatgggcgaaatatcggtcatgttgtgtgggcagtgatggacaaggatcgccaaggcgcggcgcgaaaacgccaggcgactgtgagggttcacgaagcccggccgaaaaggcatcggggaacggcgaaggctgaggcctctggcggaggcaagccgccgctgccgacgaaggtgggcgcctccgcgcctggcaaggcgccggagacgacggtgggcgccggaggccccaagctgtcgaaggtggtgccgtctgccagcggggtggcggaggctgcgaaggcggcccgatcgctaccgctgcctggcaagcgcgttgccgacttcggcaccgagattgatgtggacgactatcttggggggtcggacgagggcccgcttgctctagttgtgcctggcgcggcgatcgcgacggctgcgccagcgccgaaagcggggggagagacccttggcgccggaggcgaggtgtctgccctcgcgctggtcagagacgaggcgggcgtggcgacccgtcggctgaagggagcgacggaggcgctgagtcgagcgacggaggcgctgagtcaggtggctgacttcaccagccgcactgcgtcgggggcccttacggcagcgttgtctgccgaggtcgagagacttcggacgcaacatgcggacgctgtccgtgagaagtcggcctccgacagcaagtgccgcaaactggcggagaaggtggccgtccttgagaaggagaaggctgacctccggcgccagctggcgggggagaggagggaggccaatgaagccatcgccaaagagcaggctgcgcaggcggaggccaggttggcgcgggcggaaggcaatatcgccaaggagcttgccggagagctgcagcggcggcttactgcccaggagagccgcgcggagggggccgaggccgcgatgcgagcggaggccgaacggacgcgcacgcagctcatgacttcatatcgcgagctgggtgtgcggacgggtgacttcgaggtgccggagcgagaggccgggcttcgctgtctggaatgggtgcaggaggaactgcaggagctccccactgtcttggcggggttgatggcgttcacctccctggtcacctgcgaggcagcgatgaacgcgctctctcgcgaaggctgccggcactttgaggccctcgaccaggtggatgaggattttgggcgtgatatctttgaggtcgaagaccccatggtgaaagaatccgccggggccctctatgaccggatgtggggttcatacggtcgtgaggtggtccgggcgcgggccgaggctgcgagggctcaggcggagcgcggcgagcgggtggacgatttcggggcgctgaacagcgagctgcctgagtcggagacgacccctgcggaggccgcgactggagtcgccccgggacctaccccggagactgcggaagatgcaccgggcgctcctgcatctgccgcggccggcgaagaccttcccccaaaggtggccgaaggcgcgccagatgcccccgcagctactgtgccgagcgctgaggatccagcagaggcagcggcggaggctcccgcagcggccgggccttcgcaggttcaagattttgggcctgcgcacgcaaccgctgccactgagtttttggcggcttcgaccgcggaagatggaaatgaatgtggtgggtctgtttctgagttttttgatgttactgactctgggagctcggttgagtggactgaggagtcgtcggaggaggacttggattattttgcggccttggacgtggctgcggcggaggctgcaccacacgctgcggacgcgccaggcgtgcccggtcctagcaccgggcaccgacgacgaagggcggttgcaaagcgtaggattagtgcggaggaaggggctcggcttcgcgttagtagggctggccggcaggagctgctgtctttgccggccgcctcgggtgtaggggaaggcggttcctgcgatagacttcggatttttgcgcgtttgtgcttggtccggctgcaccttttaggcgacttctgcgcggatagtcttcgcgatagacttcgcttttgcgcacttgttgtgctaagtccggctgcacccttaggcgacttctgcgcggatagtcttcgcgatagacttcgttttttgcgcacttgttgtgctaagtccggctgcacccttaggcgacttctgcgcggatag

SEQ ID NO: 36291 - DNA, 1287 bp, Zea mays
  Peptide Sequence Number=SeqID_79666
atgaggcggaaagacggcgggtaccccccatccgggggcttggaagatggaaagacacgacgcataagggaggaagaagacatggtcgccttccgaaagaggcccacgcgtcacgcaaccggcgcgccagatgctgcgtgcaagcaactgcactgccacttgcaccaccaccgcgcctcttcggttgcggaaccaataccgcgactcgaggcggcccagcgcacgacccagcagcgccagcctggcgcgatggtcaatgcagccgaaagtgggccggcagtaatgacggtggcaggcgggtgggagcggcggtcacgtcgtcggccagactcacgtcccatccaggggcagcaagagaaccccctctcactgcgtgaagatagggcgcccgtgatccgttcctcgaacggctcacgcacgcgcaacggccgccccgccaaccactcgccccgtcgcattaactccgcggcgggacagacggcgcttatggcaggagaagcgggcgacgcttcgccttcgccggaccgggaaagggggataccccgaaaaggatccttccctgtgaaggaaccgggctccgagccccccctactgatcagaggttcgaaggctggccctccgaggggttcaacagtcgcctcagatcgcgtgggccctacacccactactggtcagaggctggcccccgaagggttcacagtcgcctcagacgccgagcgagggatgaccaggggggaccgggtccggcagatcacccgtaggtacttttgggcgtgcctctgggcccctagccgacccccaacgaatggggcacggacgtccactcggattacccccttgcagctcaccggagacaccatgttcggtgcccatcgaggggctcggactcgggctaagccccggaagacggcgaactccgctccgcccgacccagggctcggactcgggctaaaccccggaagacggcgaactccgctccgcccgacccagggctcggactcgggctcagccccagaagacgacgaactccgcttcgcccgaccccagggctcggactccgccctggcctctgccgaacaacctccgcctcgcccgacccaggggctcggcctcggcctcgtccatggaagacagactcgacctcggcttcggaggagcctccacgtcgcccgacctagggcacaggccagccacgtcaacaggaagcgccatcatcaccctaccccgagccgactcgggccgcagagaacaagaccggtgtcccatctggctagctccgccagatag

SEQ ID NO: 36292 - DNA, 555 bp, Zea mays
  Peptide Sequence Number=SeqID_79667
atgacctcagggcagacgctgctgcgacaaggccctcgcccacgtccccactcgaggggcaaggacaagctatcaaagccaaagagccggaggcccggagtgcagatggcggcagcgatctcgtcggtgacgaggacttcttcagccgccaccacctcagcaccgacgacggcagccatctgcccaccggcaaatccccactcgggtcctcccggacaggcgagcaccgacctctgcgcggaggcgtcgtaccggagcaagggcaggacagcccaagaacacgaacgccgccctagtagcgcgcgacgtcttgggcggtcccccggtcctccccctacgacacgggggttgggtcccacgcgtcatgcgagctggcccatgacagaagaagccaaaccaccgcgcgcggagcgcgtaactgcccagcggttacaagcgctcctccatcttcgcctaaaccagcgggcgaaagggcggaccgccatgcaggcggcatgcaactgcaccaaggggatgcaccctttcgacttcgacgcgtccagcatggaggcctag

SEQ ID NO: 36293 - DNA, 888 bp, Zea mays
  Peptide Sequence Number=SeqID_79668
attaggccgatggtgaagccaacaaagactattctcagcctccatgacattcggcgtaactggtttgagttcatgcctcacacagagcgaattgttgtaatctttctgtgggctccagttgttcttatttatctcatggatattcagatatggtatgcgatcttctcatcacttactggggcacttatcgggctgttctcacatctgggggagattcgcagtgttgagcaactgcgcttgagattccagttctttgcaagtgcaatgcagttcaatttgatgccagaggaacacctggatgctgtgcacggtggcctccgaagcaagctgtatgatgctatcaatcggctgaagctgagatatggctttggtcggccgtataggaagattgaagctaacgagcagggccgtgccaggaaggccggcgtggtcacgagaggtgggtcgtcagcatgcgccactccagagcgcacgcatctgaggagccgacgttgcgcgcacgcctctgtgaagccatcgacgccgtgcctccagatcggagactcgttgtcgctgcgcctctggatcgaggaattgtcgtcgtcgtgccaccggatccgggagctgtcgtcgttgcgccttcggatcaagaagccgctgtcgtcgcgccaccggggagccgccgccgccgtgccatcggatgagggagccattgtcgttgtggcttcggatcagagggccaccaccatcacgtcttcggatctggacgtcaccaccgccgcgccttcggatttgggatcgacccgtcagttgcgcgaccggaggccaccgccgccatcgcgcgtgcctagacaccgggacctggttcgggttaaccggatgacagcatttggccagggcttcacctag

SEQ ID NO: 36294 - DNA, 654 bp, Zea mays
  Peptide Sequence Number=SeqID_79669
gttcttgctgaagacaaccaatatgatatagtgaaattctgtaaaaatgagggccttgttcttctagctgatgaggtatatcaagagaacatctatgttgacaacaagaaatttaactctttcaagaagattgcaagatccatgggatacggcgaggatgatctccctctagtatcatttcagtctgtctccaaaggatactatggagagtgtggtaaaagaggaggttacatggagattactggcttcagtgctccggttggggacgaatcatatgcttcctacaaggcagagaaagatggaatccttcagtctttagctcgccgtgcaaaggcactggaagatgcattcaacacgcttgagggattttcatgtaacaaggctgaaggagcaatgtaccttttccctcagatccatctgccacataaggcaattgaggctgctaaagctgccaagaaagcacctgatgcattctatgcgctccgtctccttgaatcaactggaattgttgtggttcctggatctggatttggccaagttcctggaacatggcacgtcagatgcacgatcctgccgcaggaagataaaatccccgcggtgatcacccgcttcaaggctttccatgaggcgttcatggctgagtaccgtgactga

SEQ ID NO: 36295 - DNA, 204 bp, Zea mays
  Peptide Sequence Number=SeqID_79670
atgggcgagcttggtacgaggctgacgatgcggtcccatcctgcaggcagaaccgaagtcgtggagacgagcgaggatctcggacgcatgtgggtggagttagcggcaacccccagtcgcctgcctgtgaaggccgcgtgtatctacgtttcttttacgcactttgattattgtaaagactatgtggatgtctcagacatatga

SEQ ID NO: 36296 - DNA, 252 bp, Zea mays
  Peptide Sequence Number=SeqID_79671
atgtcgcaccgagccgtcgcgctgggccgccgcacaggcaggccgcgccgagccgccgcgctggctggtcgcgccgggccgccgcgcgtccgcgccacaggtcatggggccgcgcgcccatgccgtcgcgccgccgcggagaaccgcgcgcccgcacgccgccgcgccctggggaaaaggaaccgcgtcggggccgacgtggtgatgcaggcagtgcgcgtcgagggactcaaactcgagcatgagacataa

SEQ ID NO: 36297 - DNA, 774 bp, Zea mays
  Peptide Sequence Number=SeqID_79672
atgacttctcacggatcctcggatgaagggaatgcacagtcccacactgacgggcttgcacgagagggtttcccccgtatcttgtgggaggtccttcaaggagctggttacacgacgcctccccagtacgtggtgcagctgttcgagaagcaccgagtgccccgctgtagggtgaggatgaccctagagcctcatcccctgcagccaggctggcgttcgctggactctgagtcttttggatacagggctgaggatactatggaggcaattgctcttcacggactgaccaccttctgcggattccaccccttggagctgtccactcaccccattggtttgttccccacagagaaaggaggacaaccccaatgtggaaggaccgagtggagcatgccaaggatatctaggctatctacccaggcgaccaagatcactttggataacagagaggaacttatggttgacttgtccactgagatggtggaaaaagacctacaagtggaacaattgtcaaatgagatccaagagcttgaggagctagtgggaacgagggagaacaccattgaggttctcggggatcagcttatcaacactcagcagcaactcgcggaggctaaccagcatctggatatgcaccaccaggagatccaggacatggaggccaacaaggatgtcgacatcgagggaggagaggaacctacctccagcttggacactgctggctcagggagaccaccttcccccgagtcgagcgttgcctcgtttgctcactag

SEQ ID NO: 36298 - DNA, 72 bp, Zea mays
  Peptide Sequence Number=SeqID_79673
atggggaagcctgtcccatcactcctcatgctcctcctcagccgagcagcatggatcaagcagtctcattag

SEQ ID NO: 36299 - DNA, 159 bp, Zea mays
  Peptide Sequence Number=SeqID_79674
atggggaagcctgtcccatcactcctcatgctcctcctcagccgagtgaccgcatttgtacccaccataaccggaatgggagaccacgtctcaggtcgcgtgaggggatatgtccactgccaggttcactcagaatttagaaatcatcatgttaagtga

SEQ ID NO: 36300 - DNA, 171 bp, Zea mays
  Peptide Sequence Number=SeqID_79675
atggcattgaactcatctaatggtgcgaaggaccctgcaccagacgagggccattctatcaaagatcttgcatataaggcttcagaatgccgaaggtccgaaaacaccttctctgagctcgttgtcgagaaacgatttaaatattcccagcgcaaggtggtcccaccatag

SEQ ID NO: 36301 - DNA, 525 bp, Zea mays
  Peptide Sequence Number=SeqID_79676
atgcgccgacaggaggactccaccaggtcagccactgtttatccgcgcggactccgtcctagtcacctacaggtgggcccgcctcgtcagaaccttctcccacctatggctggaaatgttgagtccacgtcgtcgcctcctgttagttcacagaatcctctcccctccgcgccaccgcggctcatgctgttggcccaccccaacctcgctggagccttgactgttgatttaggcgactcaatggggcctcgggtgcgcggccgtgaaccagcgaagcctggggaccaggccctgggtcgagtaattgctcgtcgtcgttcaaatccggccatgggccgccattctttctcctcagaccctctatccaccaccacctccggtaagaaggcctctaccgagtttgctgctatctcttctacgcatagcgctagggaatctagaattgaatgttgtgggcactggattgggaacgcgccggcgatgcccgccgtggtgtgctccgtgccgcccggtacgggacagtag

SEQ ID NO: 36302 - DNA, 930 bp, Zea mays
  Peptide Sequence Number=SeqID_79677
atggggagaggcaagccgggctgtgatcttggtcccgccctcagcctcgagggtgttcgtcatcctcgctggggctgggagcgaggcgagccggggctctacctcccgcgcgggccagcgggccacctcttcttccagcttctggtggtggcaaacatcctccagctctgcggaggagacgtcctccagccatgccggggaaggcgaactgttgctgcccagctaggatgcaacattccgccctcttcctcgctttcgcggcgaggacgacagcgaggacctgccggtgcgctttggagcggcccgctctttggctttaatagctggttcgcgtcccttgagcgggaacgcgaacgagagccctccggcggcctcgtccgtcctgggaccatggctgctgctgcagaggtcgctggcgggtcccccggcgttcgtcgccccgcaggctcccctgagtccctcggctcggtcggccttgttgcccgaggcttctcttgctcagttaaaggaacccctcggccgcccttcgatgagccgaggccgggggtagcggtgtcagcgcgaacagaggcagagttggcccgaaaagaagacctggtcggccggagcctggccgggttgcccgttagcgggaccgacgccggagttgtcctgccgaggcctcgggtcgggctgacgtcctcggaggacagctggctgaggccccggggtgaccagccgagccgcctgcccgagccggattcccggagaagaccttggcagcgatggcccgggcttggtgatgacgccgtccttcagagtggagatcttcggatcgcgtcgccgtccgaggctaggtcggacctcaccgaaggtgttgtcgacgccgagggtgctgctgctcccttcaagcgtcaggatccgagcctacaggatcgaattgtcttgtag

SEQ ID NO: 36303 - DNA, 552 bp, Zea mays
  Peptide Sequence Number=SeqID_79678
atgggcgtgagagaggtggaaatcccgcgaccttcgtgttcgtcccgcgccctggtcgggcataaggagaggatccagccggagagattttggcactcagctggtgtgatgtcgtggccgtcggaggagtgctggagcctggcggagtggcccgagtcagctcggggtagggtgatgatggcacctcctgttgacgtggctggtctgtgccctaggttgggcgatgtggaggctcctctgaggccgaggtcgagtctgtctttcatggtcgaggtcgagtccgagcccctagttcaggagaggcagagaccgtcggctgaggccagggcggagtccgagccctggggtcgggcggagcggagttcgtcgtcttctggggctgagcccaagtctgagccctgggtcgggcggagcggagttcgtcgtcttccgggacttagcccgagtctgagccctgggtcgggcggagcggagttcgccgtcttccgggacttagcccgagtccgagccctgggtcgggcagagcggagttcgccgtcttccgggacttag

SEQ ID NO: 36304 - DNA, 681 bp, Zea mays
  Peptide Sequence Number=SeqID_79679
atgctcctacgatttggtcggtcggtgcggcgatttggtcagggttgcttcttggcgaagacagggcctcgggcgagccggaagcttgttcgccgctggaggggggcctcgggcgagacggaaatcctccggggtcggctgcccttgtccgaggctaggctcgggcgagtcgtgatcgtgtccttcgaatggaccgatcctgacttaatcgcacccatcaggcctttgcagctttatgctgatgggggttaccagctgagaattaggagccttgaggcacacttgcgaatggcatcctcgaaagaagataccatgaagtctttgcttaaagtacttgtcgactatgccgaggatgccacaaaatcccttggtggattagtagatcatgcattagaccacatgcatgatgaagagatattagctaggaccctctttgccatgaaagaaaaacttgatttgcttcaccaagatgccttagaggctaaagtccaagcttttcctgaaattgctaagtacgacggggatgacataagtgttgaaccaacatctccgtcgacccctccaacagttactgaaccatctgtcgatgaagaggagttctactgccccgatgtgagtgatgagtggtacttcagcgactcagataggtcaactcgtaatagctactggaatctttattag

SEQ ID NO: 36305 - DNA, 354 bp, Zea mays
  Peptide Sequence Number=SeqID_79680
atggcggtcatacgagggattcctgcattggagcttcctataaactgtagcggggtgaggctgacaacagctaaaggcgcaacaggaagctctgcctcgcccgaccttgggcctcgacctcaggaggaggtcttcgcctcgccccgacccccagggctcgggcctcaccctcggcctcggaaggtggtctccgcctcgcccgaccccagagctcggtctcaacctcgacctcgggaggaatcgcgtcctcgcccgaccccggcctcggcctcagaaggagtctccgcctcgcccgaccttgggctcggaccgaccgcgcaacaggggatacatcattaccctacccctagctag

SEQ ID NO: 36306 - DNA, 621 bp, Zea mays
  Peptide Sequence Number=SeqID_79681
atggcggcgccatcgttgacctcgcctgactctgaaggtcggtgccgaagtgcgaccccaacacggggtgcaggccactacgaatctattggtaagctcaatttcaccattggaaccccaaacgcggtgatcaccatgatggcgcggccccaagacgccaggagctggtcaggtgctttggatgatgatgtcgaggctttaaagcgcggaggcgcgaggtggttccacggaatccgagtcctccggcgagcctttcgcgcgaagtggttgcggcccgcgcggcagaggaaagtccgaacgcggcggcacggcttcgtcggtgtttgttacggagggaaggagcacctgccagggttctacagtaaccccatggcaaatccgccaagagcagagctctcgcggaggaagaaccccgatggacacgagatggaggagctcgggctcagagatgacggacatgtggttacctgcgaaaggcagttggctgttggggtcgattggaggaatcaccacagcagacgaactcgaggctttcctcttgggcgccatctcgattctaccggcgagcagagtgggaggcgaattgcagagaggattcggaagcgagaaagcaagaactag

SEQ ID NO: 36307 - DNA, 522 bp, Zea mays
  Peptide Sequence Number=SeqID_79682
atgaagaggttgctggagactacccatctggaactcaacgggaagttgttcgtcaacacgcagcaggcccctacctggcgcgccaactgtcgacgtttcgaccctaggggaggggatgcacttgcagtaggggttacaagcgctcgcgagggagagagagcgagcctgttcgttagcccgtcctcccgcgtgaccaccctctcgcatgagggccctggaccttccttttatagatgcaaagagagggtccagggtaatgatgtatcccctgttgcgcggtcggtccgagcccaaggtcgggcgaggcggagactccttctgaggccgaggccggggtcgggcgaggacgcgattcctcccgaggtcgaggttgagaccgagctctggggtcgggcgaggcggagaccaccttccgaggccgagggtgaggcccgagccctgggggtcggggcgaggcgaagacctcctcctgaggtcgaggcccaaggtcgggcgaggcagagcttcctgttgcgcctttag

SEQ ID NO: 36308 - DNA, 1026 bp, Zea mays
  Peptide Sequence Number=SeqID_79683
atgacatatgagagtggggtgcagtggtggctcgtcgacatcagccattggcacccttcccctgcccagttcgatgatgcaccctccctcctactacttcacgatggcaccaccatctccaggtaccgtgccgatggaggaaaggagaaacaaggtattttgaagctggggaagttcatcgcctccgagcccttcaacgtggggggattcgattgggcgatctacttctaccccgatgggaagagcggcgaggatggcgttgtctacgtctcgctcttcatagccctggccagcgaaggcaccgatgtgcgcgcgctgttcgaggtcacgctcgtcgaccagagcggcaaggggcaagacaaggtgcatacccactttgggaggtctctcgagagcgacccatacaccctcaagtaccgcgacagcatgtatgcttatctatggtggaaagaaaaagtgattgactcatacttgaaaagaaaagatggcctttgcccattgacgcctgagaaatttgccatgacctcgttcctgaccaagaaaaactgtcaagcacagttgatatattgggattccaaggtatcagaggctgatatggatgcaatgtggaaacatcctgatgtgtataaggagtggataaaatctggtgagagacgtggaaatgtacgattctcccatgatgcaaagaacatgccttacctttctcgcgtcgaggtgaaggatatgattgccttctcatgttgtgtatatgatggtggtgatgaggagaaggaaatggatgcagccagagaaataggttggagagggaaatttactaagagaggacgtgttgggttaatgcttcgtggaatggatttcagcaataagactgcaatctttttggcatctggaaagatttacaaagcagagaagaacatggcttctcttcttgaaatgtttcctctcctacagacaaaagagacactggcatcagaagaggaacttgctccattcaaggtggacggcattgaagcggcacttgcttaa

SEQ ID NO: 36309 - DNA, 396 bp, Zea mays
  Peptide Sequence Number=SeqID_79684
atggagttcagaaaatatactaaaggcacttggcgtgttccaagtgtggtcaatggagttgatgaagatagcagccaagagctagaatgcataaggaaagccatttttacctcctcggtcaatgttattaatgtcaggtttatgcaaatcagggtgaatgttagacctttagaattaagtactttgtacctgctctaccttgatgcatttgagcagttaaagatggaaacatcttcatctttggaagccaacaaggcaatgtgctacaactctctctttgacattctaatctccgagaagtttaccatgttatgtgatgtgctaggtggagcattccacgtcagtaagccagacgatgtaaagaacagaaacagaagatgcaagcgactggaatga

SEQ ID NO: 36310 - DNA, 789 bp, Zea mays
  Peptide Sequence Number=SeqID_79685
atgggacatggaccagctagcgaggacgacgacgatggagatgatggatcgtcaagcaaagcaagccacacacagctgatgaggtgctcttgctctgctctggccatgcatgactcaggtgggagacttcaaaagcatgtactgctgaagcgtgacaatggagatgtcggaacaatcgttggggatttggagaaagagttggaggcaaaagtgtcggacacccagtgcgctgctgctgaaattcaggatctattgaaacaagtggatgctcagccggtgaatgtgaaggatgtggatagattgcgtagggagatgcaggctattgaagatgacattgccaacaccgagaaggggaaagcagcactggaggataagttctgggaagttgaagctaagctggttaccaagcttgaggagcttgagaggcatgctcatcagttcaaccaggccctcaaacaattgaaacctactgttgcttttcagtacatgatagattcaaaaggatcttctcctgctgagatgctaggtactggttacaaaacagtactaaaacctgcacttctggctcatgctgaggagaacaaaaggatctgtctctcaaatcttgaaaacttaaatggtctacagaagcagctgcaaggaaatgcgaagctatgttgtgcagtagtgggaacttttttaggttctggaaggtcaggggatggacttccacgaactgatcgagatctcacacggcgaccgacggcggtaaatgaatattcttgtggtgtagacacactcaacatttga

SEQ ID NO: 36311 - DNA, 945 bp, Zea mays
  Peptide Sequence Number=SeqID_79686
atgggcgcacccggacactgtccggtgcgccagccacgtcacccaaccgttagggttctgacggtttcgaccattggagctctaacagcctgggccactagacagtccggtgtcgcatcggacagccactgttcactgtccggtgcgccttccggcgctgctctaactctgcgcgaactgtccgcgcattgttcatgttgcaggcgaccattggagtcgatcgttgcacttgggagccgttgctccgctggcacgccggacagtccggtgaattatagcggagtgcggcctcagaaacccgaaggtgaagagtttgaagtcaatccaccctggtgcaccggacagtccgatagcctgcgggctatcacgtcccgctgtattaactcccacctaggggccacacgtcccatccggctgacacaaccaacgcgcgctgctccgcctcctcaaggtgacacgaaagagacaccgcttcgtattaccttcccagcgaaggaaatgagacctgagcctcttactgatcaagggttcaaggttaacccctcagtagggctcggtaatcgccctagagcacatgggctccgaaccctttaccgatcaggggttcataggttggcccctcagcagggttcgacaaccgccctagagcatagagccaggaatgactatgggtatgtccgtacattggccgaggctcagactacagtcccgaggtaccctgagacatattcgagaccccttgagcgattcgtgatgtatcccattggagggaagcatcgagccctcggaccccatcgaatgggtccgggaccacatgaatcacctgcaggtattttggggcgcatctccgtgccactagctgacccctatcgaacggggcttgggcctccgcttggactacccattaacagctcaccagaggcatcatgctcgttgcccacctag

SEQ ID NO: 36312 - DNA, 342 bp, Zea mays
  Peptide Sequence Number=SeqID_79687
atggtcccatccactttcaccaactacgatgacgagcgcccgagaataacggccactgctcccccacgccgactaccgtgctcaaacaactacggattgaatgtgtgtgcatctaagcacggtcccaacctcgggagggaactccgcttgctcgaagtcgacctcagcctcgggaggaaactttgcctcgcccgagctcggcttcggccaactgccccggcaacaaccccccgccaatcccgtaggaggctactccgacaactgaactacccctccttgtacggctgcatgcttcgaggtaggctcgaccaaggcatcgggaggaacctccatctcgcctga

SEQ ID NO: 36313 - DNA, 378 bp, Zea mays
  Peptide Sequence Number=SeqID_79688
atggggcatggacgtccgctcggattacccgccagcagctcaccggagacaccatgttcggcgccctccgagggcaacatggcgctttcccccctcctccttgtgaaaaggcgacacatgggcagccaaagtgaccgcagtcacttcgccgctccactgaccggcctgacagaaggacagcgccgcctgcgccgctccgactgctgcgccactcgacagagtgaggctgacatgcagtcaggcccggcctcaggcaccataggaaactccgctttgcccgacccagggctcggactcaggctcagccccggaagacggcgaactccgctccgcccgacccagggctcggactcgggctcagccccggaagacggctga

SEQ ID NO: 36314 - DNA, 312 bp, Zea mays
  Peptide Sequence Number=SeqID_79689
atgaggatcaggctcaagacaatgaagaagaagatcaagaagatgagccaactcaagaggagaacaatgatcgagggggagatgccaatgatcaagacaaggaagatgatcaaaaagaacagggtcaaagaccgccacacccaagagtccatcaagcgatacaaagagatcaccccggtggaagatgcattaagagattcggattgggtgttggcaatgcaagaggagctcaacaacttcacgaggaatgaggagtgggactttgctcagattgtagccaaagtccctgagggtttgcctcatccaaagtag

SEQ ID NO: 36315 - DNA, 666 bp, Zea mays
  Peptide Sequence Number=SeqID_79690
atggcagaggagggaggtgacggagaagaggcgaccattggagttgaccgttgcacttgggagccgttgttccgctggcacatcggacagtccggtgacccatcagacagtccgatttttagtagacccaaagatgatatcatcaacataaatttggcatacaaacaaatcatttgcaatggttttagtaaagggtgtaggatcggctttgccaactttgaagctgtcggagaggagatctccccggccgggtggcggattgcacccaccctaaatcctaaagagaggaggggcctaagcgttttgcttgctacgagactggtggatcaacacacaagagcacacgagggtttagagtggttcgggccgccggagcgtaataccctactccactctgaaggggggcatgcacaaagggactgggccccgacatgtgggctcagggacataaagagtatagtgcttggatcctctaatgtctgttgccgaggcaatcttcttgtgtcctggcgctcgaggtctgcgtatccttggcgtgcaggggaagcttcttgcagaagagaagatgagtatagcgtgcagcttggcacgggcgcactgtttgccagcagacccagcaggcacgccgcttgctggatgaccttgatgccgtctgccagcggataa

SEQ ID NO: 36316 - DNA, 657 bp, Zea mays
  Peptide Sequence Number=SeqID_79691
atggtggaaggatgccaactcccatggggttgcacccctccaacagcagcaggaagaagacaagatcggcggcaccaccacgagtgcgcgctccccgatggtgaagtcgccggaagatacggccttgacgcggatccctccagagaacactggcgcaccccatctggaggcccagaaggcgaaggggcacggtggtcgcaagaggagcgaggcatgactactgtccgggagatcgacccctttttaaagctccgtcgcaactggcggtccaactcaggggcccaggcccacacgtcatgtaactggcacgccggttaccgtgtgcaaagaaaccgcaccaccgcttgcgccaatgccacgtcttctcggggctgtcatgggattctgaaaaggctcgcatcctcccctgaggcgggaccgggagccactgttggtaccctaaatcaggggtaccctctcctacagcatgaagacgctgcacctatgcgacgtctcctagccacgcgaaggacggcgcctgaccccaccgggtgggcaggccaaagggcgccacatggcgaggaaagacaccacatctcagggtctggtgctgacaagtgtgcgggccttgccctccacttcccgctcaggcggagacccgctgcttgtggcccatga

SEQ ID NO: 36317 - DNA, 411 bp, Zea mays
  Peptide Sequence Number=SeqID_79692
atgggcagcagctgcaccagcgcgcacgaagaggtcttcgctctcgtcctcacggtgggagtgaggacaagaccatccaagaacgctgcccccacccgcacggcgtacgacgtcttgtacgacctcccagtgtggctggtgccgcgggagaagccgtggatgtggccaacccgcgcacggcgcgaccgtcgctcgtgcggtggacgggcagccacgctctgccccagcggtaggaggcagcgccggaggcggcaccagagccgcccaggccggggagccaatcacgcggcagctgacagcgccacagacggcgaacgcccttctcccccgaacactgagggaagaagcgggctgctacccacgcggaggtggggccccaactcggcacaccctcctccccagcatggatga

SEQ ID NO: 36318 - DNA, 189 bp, Zea mays
  Peptide Sequence Number=SeqID_79693
atggagtggtggagtgtgcaggattttgggtacggaaccaggctaaccggccacacaggctccggatcaccctatggaacagacatccgttctttagaaccagcccccaggccttcccctatttttgtaaagctaatagtctgggttcatgggggtagaccctaccgggttgtcgtatgcgtgatctag

SEQ ID NO: 36319 - DNA, 317 bp, Zea mays
  Peptide Sequence Number=SeqID_79694
atgggacagaggacacttgccttcaccaaactgctgatcagggacttcctctgcaacttcctcgggaaacacagactgctcgttgtctacgtaaaggacaccggaggggggcggttcacggcggagcggctcggcggcggcataaaacaactccggcgaggaattaagcgcagtagaaggcaatacgcgggtttggagggggcaggagaggttctttacctcaaggcgggctccggggactcctcggtggcggcaatggcgcgacggtggcccggggcgacggtggcggacctccgtggctgcacggggaacagcgg

SEQ ID NO: 36320 - DNA, 1383 bp, Zea mays
  Peptide Sequence Number=SeqID_79695
atggacctagaggaccaagaagcgcagaagcctctcctggtcaccgcgcccgggagaatcggtgatggcagtcacttagctgagtccgacgctgcctcgtcctcctcttcgattgcggtggtggtcgccagcaccgcagtcgccgtcgccggatccttcgagttcggcatctcggtgggctactcgtcgccttctcagtctggcatcatgcgtgatctcagcctctccttagccgagtactctgtctttggctccatactaaccattggagcaatgctaggagctgttgtcagtggtaccgtggcagaccgagttggtcgaagatctcatctgagcaggttccagtctatatatcagagaataacaccaaagaatcttagaggaggttttgcaactgtaaaccagtttatgatatgttgtggggcatcacttgcttatgttctgggaacttttatcacctggcggactttggcaatcattggagtggcaccatgtttgctgcaactggttggccttcttgttactcctgagtccccaagatggctggctaggtttggccacccaggtgcatttgaggcagcattgcagaagctaaggggaaagggaactgatatctctgacgaagcaacaggaatcaaagattttacagaaaagcttcagcaattaccaaagtcgaagatgttggacctttttcagaaggattatatccgtgctgttacagtctgcattcaggttggagtagggttaatggtccttcaacagtttgggggagtgaatgccatttgcttttatgcaagtgaaatatttgtttcagctggtttctcatcaggaaatacaggaatgctggctatggttgctgttcaggtttataatttgagttctgatctgcagattccgatgacaggactaggagtaattctaatggacaaagctggacggaggccacttttgatggtatctgcagctggaacatgcctgggttgcctactagttggattgtcattcttagctaaggaacatcactggggaaaggacctgaacttagtgctggctttggcaggcattctgattttcggtggatcattttcactgggtatgggaggaataccctgggttataatgtcagagatctttcccataaacatgaaaggagcagcaggaagccttgtaacactcgtcagctggcttggctcgtggatagtctcgtacgccttcaacttcctcctggtgtggaactcctacggcacattcttcatctttgcaagcatatgtgggctcacagttgtgtttgtggagcagctagtgccagaaaccaaaggaagaaccctagaggagatccaagcctccatgaactcatccttggcgtccccctctgatatatga

SEQ ID NO: 36321 - DNA, 255 bp, Zea mays
  Peptide Sequence Number=SeqID_79696
atgcggaggagaagaccctacgtgaacatccatggaagtgtgagagggagaaccaactcggacaccctcaggggctgggtcatagctcgcgctacccatccgagccggatcatccccggcgacaccctcgggggctgggttgggcgatgtggaggctcctctgaggtcgaggtcgagtctgtcttccaaggccaaggtcgagtccgagcccctgggtcgggcgaggcggagaccgtcggcggaggccagggctga

SEQ ID NO: 36322 - DNA, 699 bp, Zea mays
  Peptide Sequence Number=SeqID_79697
atggcgctcactggccatgcgagcggggcggacttcgataatgcggggctggccgacggcgggcgtcgtcagcttcagcgcgttgggctcgccggcttggcgcccggtgccccctcctgccgcgagggcggttgtcgcgccgtgcgcacgggaggaccgcctaagacgtcgcgcgctgctagggcggcgttcgtgttctggggcggtcctgcctttgcaccggagtccctcggctcggtcggccttgctgtccgaggcttctcttgcttagttaaaggaacccctcggccgctcttcgatgagccgaagccaggggtagcggtgtcagcacggacagaggcagagttggctcgaaaagaagacttggtcgaccggagcctggctgggtcatccgttagcgggaccgacgccggagttgatctgccgaggcctcgggccgggctgatgtcttcgggggacagctggccaaggcctcggggtaaccagccgagccgcctgctcgagccggattcttggaggagaccctggcggcgatggcccgggcgtgatgatgaagtcgtccttcagagtggagatcctcggaccgcgtcgccgtccgaggctaggtcggacctcgccgaaggtgtagtcgacgccgagggtgctgctgctcccttcaactatcgagatccgagcctgcaggatcggattatcttgtag

SEQ ID NO: 36323 - DNA, 531 bp, Zea mays
  Peptide Sequence Number=SeqID_79698
atggggtgctccagcgtcgccttgctcttgctgtcgttggaggagcacggcctcgtggagatcggcacctttcagccatcgctcggcttcaaggatttcgtcgtgcaggctgaggtggagagcgagctgagccgggtttcgcctcccgtgtgggtcggtgacccgcttcttcctccatcatttgggggagaatgggcgcagtcatccgtcctccacctgggcaacggttgtgtcgtacaccggtggctgctgtcaccgccctcgcggagagggtgtacttcgacaacgcgggttcaatcggtcgtagacgtcgtcatctgcagcgtgtccggctcgctggcccagctgactctagcgccgctctcgatgctgcctcctgccgcttggttctcgtggggaccaacgctggccggtcctcgaggatttgagtggggatctgccagcgagctgcttggagttcgttgtcccgctggccccccggtgtggaggttgttcatgtccccgggaatggaaccggagtcccgtttgtaa

SEQ ID NO: 36324 - DNA, 810 bp, Zea mays
  Peptide Sequence Number=SeqID_79699
atgactgtatacattggatccagtccgcaccatgtggaatggagtgtcactgctgctgggcacagattcaaagacacctgccaagtcatcgctcgcaaggcattgagggccctatgtcagatctatgaagaagtggccgacaccccgctcatattctttccgccctttcagagagaccatctagtttggatggccaggatgcgtgcattggaaggtcagcagccgcttgaggacgacctcacagtcgtgtacctcactacatacctgctcacctggatgcccagtatgatttcttggctcggcaccacccaagccaaggatgagcacgtccagaagctgatggaggcctacttggtaacccataaccaatgtagagccatgcggatccaagagcccgctctatccaacccagttcaacccatgagaggtgaagatccccatattcttgaatgtcacccggtctctatcagaggagagaagaaggcttgggaactcctggaaggagccatagtcttggaaggaattccagtctcccctcaggctatggataagcaagagcaccccgaatcctcccaagatcccctgccagagttgtttgagcccctcaccatgaagaagattctagcaccgtcccatgagatcaaagaagaagctgcaagcaccccgccagcaccgccgccctctgaggagctacaagagccagtccagcttgaagaagagttcgaccccgtcttgccatctcagttgccgccagaagaagtcatcaacatcagctccctcttgacccatccaggagatatctcagattga

SEQ ID NO: 36325 - DNA, 252 bp, Zea mays
  Peptide Sequence Number=SeqID_79700
atggtgaagccccagggcgagcaattggatcctgagcgacggggaaaagcggggccggatttttataccgaggcagagtccgcgttcaaggagtccatggccgagaatctcgccgacgctgttgcccgagatccctggcgagtttggcggtgctcagctgcgaggcacgcagtccgttacgaagaagacgcaactcacatcccgggtccacggcacagagaggcttacaagtgggaccgctcgtcggtgtga

SEQ ID NO: 36326 - DNA, 534 bp, Zea mays
  Peptide Sequence Number=SeqID_79701
atgcttgcatctagctatgcatgtgatttaagcatggaaggcattcttgagcgttaccagcgttactcatttgaagaaagggcagtacttaacccaagtattgaagaccaggcaaattggggagatgaatatgtccggttaaaatccaaacttgatgcacttcagaagagtcaaaggcagctgttaggagaacaattgagttcactgaccataaaagaactccagcaactggagcaacaactggacagttctttgaagcatattaggtcaagaaagaatcagctcatgttcgattcaatttccgcgcttcagaaaaaggagaaagcacttacagatcaaaacggtgtcctgcaaaagttcatggaggcagagaaggagaaaaacaaggctttgatgaacgcgcagctccgggagcagcaaaatggagcatcaacaagctccccatcactttcaccaccaatagttccagattccatgccaactctaaatatagggtatcacgcttccactgaattaattactgcacttaactaa

SEQ ID NO: 36327 - DNA, 513 bp, Zea mays
  Peptide Sequence Number=SeqID_79702
atgaaggctggggagcaccgggaggataaggaggggggatgttttgtctggtttgggcatggcggtggcctaactccttccgaaaaaggagatcggcctcctgggactagtaattgtatcacatttgagtctcaaaggattggggcgcttcacctaaggaccgatttgtcatcactccttacctatactcttatcaagtacaaccactcgagactgtatgggcagtcactcaatctgaacttgtacagtccgaaccccagggttatgatggctggggagcaccgggaggataaggaaggggaatgttttgtccggtttgggcatggtggtggcctgactcctttcggtataatcgttaaggaaggcgagctgcttggttattttgacgctggtactgaattccaccttgttggttgttctgacgatactgctgctgctgctgaggaaattgcctctggtactggtgctggtgctgacgctgatgctggtgaccttaagggtgaccttgcttga

SEQ ID NO: 36328 - DNA, 261 bp, Zea mays
  Peptide Sequence Number=SeqID_79703
atggcgcctgaggctggactcggcggctgtcagcctcaccccggcgggtggctcagcagtcggagcagggcaggcggcgctgttttcctgtcaggcgatctggccaaggttgcttcactgcgaagcctgcccgaactgggcctcggcgagtcaagggtgcgcccgttgcttgaggaggccctcgggcgaggcgtgaatctgcctgggtctactgttcctgcccgaggctgggctcgggcgaggcgagatcgtgtcccttga

SEQ ID NO: 36329 - DNA, 366 bp, Zea mays
  Peptide Sequence Number=SeqID_79704
atgcaggcggcatgcaactgcaccaaggggatgcaccttttcgacttcgacgcgaccagcatggtggcccagacccacacgtcatgtaaccggcgcgccggttactacgtgcgagaaactgcaccgccacttgcgccagtaccgcgccttctcgactacggaaccggtgccgcgactcaaggcgaccctgcgcatggcccgatagtgccaaccgagcacatcggtcacgggtcagtcagtcgcgggagaagggcaggcgacacctttggcaggcaaagcaggcgacgcttcacctccgccatgatgaccgcgtcaaaaaaggaacgtttcacccgtcttgcagacattacagaacatcagagataa

SEQ ID NO: 36330 - DNA, 351 bp, Zea mays
  Peptide Sequence Number=SeqID_79705
atggccaggcatatgtgctgtacggcggctcaccggccgagaggaggcatcgaggaaggaaatggagcgccgatggcgcgactgcgacttgcaggttcagctgcgcgagagcgcgacatggctgctcaccggagtaagttcatgagtcagcgtcgcgcacggggagatgctggtcgcgaaccgctggccgcgctggggactagccgcgcaggctggctggcgtgctgggcaagccgcgcgcgcacggggatctacgcgaggggcataccgccatggccgaggagagggatgggagaagaacgtgtggggaggaagaggaaggaggatctgtgcgcacctggtaaccgctga

SEQ ID NO: 36331 - DNA, 282 bp, Zea mays
  Peptide Sequence Number=SeqID_79706
atgaaggacgacgagggcataggcgctatgggagcggcggtggcgtttgccgccatgggcgtcttcggcatctatttcctgtggcccgtggtgggccccgcttcggcggggatgatgatgaaggcgcccggcgccgcaggttgggtcatctgccgcgcggtgttcgaggccaacccgcagttgtattttaccatcctccgcacggccggcgcggcagctgccgctgccacgctcagcgggtgcattgactatagccgtgcccgtgattggtcttctgcgtag

SEQ ID NO: 36332 - DNA, 993 bp, Zea mays
  Peptide Sequence Number=SeqID_79707
atggtgaccaccagttcgatggtggggagaagcgagccgggctgcggcctccgccccgccctcagcttcaaggatcttcatcatccttgctggggcagagggcgggctgagccggagctctacctcccgcacgggtcggtgctcgcccgtctaggaggatccgagtggggatctgccggtgggcagatggcttccatcgtcggcgctgaggtggtggcggctgaagaagtcctcgtcgccgacgggatcaccgccaccatccgcgctctgggcctccggctctttggctttgatagcttgtcctcgcccctcgagtggggacgtgggcgaggggctcgtcgcagcagcgcccgccctgaggtcatcgctgctactgtttggccacccggagcagaggtcattgtcgctgctgccggagcgggcgtcggcgagccacctggggagtccctcggctcggtcggccttgccgcccgaggctgctcttggttagttaaaggaaccttcggccgctctgcgatgagctggagccagaggcagcggtgccagcatggacagaggcagagatggctcgaaaagaagcttcgtcggctggagcctggccgggccgtccactggcaggaccgacgccggagtcgggttgccgaggccatgagccaggctgacgtcctcgagggacagctggctgaggctacggagcggccggttgagccatctgctcgggccgggttcccggaggagaccctagcagcgatggcccaggcgtggtgccgacagaaggtgatgagtgagagggggttcgtcccttctagcccccgagggagggtcgggctttgccgaggcaaggctgacccttccttgatggttagactttattggcacctcgccttgactgttagccagcttgtatgttccaggcttcaaaatcttggcgatgatgaatggcccttcccagggtggcgtgagcttgtcgcgccctcgggcgtcttgtcgtag

SEQ ID NO: 36333 - DNA, 531 bp, Zea mays
  Peptide Sequence Number=SeqID_79708
atgggcgtgattaaggtcaaggctcagtccactcaagggacacgatctcgcctcacccgagcccagcctcgggcaaaggcagccgaccctggaggattcacgtctcgcccgagggccccctccagcaacggacacaccttcggctcgcccgaggcccagtcttcgcagagaagcaaccttggccagatcgccacgccaaccgaccgtatcgaaaacagcgctacctgccccgctccgactattgtgccactcgacagagtgaggctgacagcagccaagtccagcctcgggcaccatgggaagctccgcctcgcccgacccagggctcgaactcagcctcgacctcggaagacggactccgcctcgcccgacccagggctcggacacagcctcaacctcgaaagacggactccgcctcgctcgaccctcgggcccagactcgacctcgaccttagaggagcctccgcctcgcccgacctcgggctcggacctggcacatcacagggggcaccatcattaccctactcctag

SEQ ID NO: 36334 - DNA, 471 bp, Zea mays
  Peptide Sequence Number=SeqID_79709
atggtgatggggacgtgtgggaggaagacgggaaggaaagatcaggtgcctctcgagtctcgactcgagtggtgcgcaggcaagagagctaggagaagaggaagggagggggcggttttagatgggaaggaaagcggtttggcgaaaccacggtggtttcgctcgtcccgctgtcgtgttttgattggacgcgggggttttggagcggcgtggaggcagctagaccgtcggatcatgacggggatcgttattgcgggccagaaggatgggcctagcgaggccggcgttcgagtgatgcgctcgtcagggcgcgcggggcagggattggtcgagcctggcgtgggccggaagggtgcggttcagtgttccagtccagccttccagggtcggtcgggcacaagggagcgagatggcaagtcaaacgtcgcgtttgctgcagggcgtctggctgatgggtccacacgggtgtag

SEQ ID NO: 36335 - DNA, 384 bp, Zea mays
  Peptide Sequence Number=SeqID_79710
gccgagcccgagcccctgggtcgggcgaggcggaggtcgttcggcagaggccagggcggagtccgagccctggggtcaggcgaagcggagtttgtcgtcttccaggtcttagcccgagtccgagccctgggtcgggcggagcggagttcgccgtcttccgggtcttagcccgagtccgagccctggggtcgggcggagcggagttcgccgtcttccgggtcttagcccgagtccgagccctgggtcgggcggagcggaggttgcttcttagcgaaggcaaggcctcgggcgagccggagatgtgtccgccgttaaaggggggcctcgggcctctacagctttatgctgatgggggttaccagctgagaattaggcgccttgagg

SEQ ID NO: 36336 - DNA, 183 bp, Zea mays
  Peptide Sequence Number=SeqID_79711
atggccagagtatctcaggaggctattgccgaaggtgcctccaatgctgaagctgaacagattgtggctgaaggaggaagtgagaatgaaagtgaagaggacaacagtattccgagcccaatgaaacctagccacattgaatttgggaaattgagagcacctagagggggggtgaataggtga

SEQ ID NO: 36337 - DNA, 312 bp, Zea mays
  Peptide Sequence Number=SeqID_79712
atggagaagagatggctcgagcagccaaagtctgctcagtctgggtgcaccggactgtccggtggtgcaccggacagtgtccggtgtgccaggctggctctggcgaaaaggctgctctcgggacttcgacggcggtgtacgactataaatcaccggactgtccggtggttcaccggactgtccggtgtgccgttcacaggcgaactcgtcgctctcgggaaaccatcaacgacgtacggctataattcaccggactgtcagtgtaagggcgagaggctccaagttgtggagattcctcgcaaacgggattga

SEQ ID NO: 36338 - DNA, 900 bp, Zea mays
  Peptide Sequence Number=SeqID_79713
atggcttgtcttagacacactgctcgtaagtcggtgatccctttcctgccgtctcgccttgcggagcgtcctctgcgtcgcaccgtgtccggtcagtcgagtcacctggagaggctgcaccaccgcctgcgtgaggagcaggagcgccagcgtcagcagagggagcatcagggctcttcctccccacctgagcaggaggtggagtccgtgaggcgccattcctctattcctcagctggaggcaccccctgcaccaccgcgggatgcctcggctgttggaggagctactggaggaggtcctggaggagaccccgacgacgacggcggctcagaccacagcactgagtcctctgagccgcaggaggcggagggatgggtcgcccgacccatcacccgtgacgctgctcacggctgtcacttccacgacgcactcgacaccctgttgcgccaggctttcgaccggcacacctggtcgatcgagtaccgttgtgtagtctacctgcacagtcgcgggaggacgcagcacgacgtgcactctcctagtactgttccttattcagtgggggtgaccgacggtcttaaccttaggtactaccaccgccatcctactggtagcacagagagtgtggttgtctcgcctattggtgaggataaccctaggttgagcagcacagtcaacctagtcgcggtgcttaacaccgagctggaccactctctggacgagctgagcagggctcggacggagattgctgagttgcgtgctgagctggcagagcgccaccaccaggagggtggttcccccgctcctgttgggactcagcacccttaccgctcgccgccacgtggtcaccacacttatggttcccctgcatgtaagaccaggatagatctggatccttag

SEQ ID NO: 36339 - DNA, 465 bp, Zea mays
  Peptide Sequence Number=SeqID_79714
atgggaagaggcaagagaggcaagggatggacccaccgcgttgacgggaaacgcaagcgtcctccaagttcgccctcggaggacttcagggactcggagtacttggaggaggtttcctccgagtatgacaggccgcccgctccagcggcccccgtggcatcgtccgaggactcggacgactccatggagctgtctgttgaggcgcgggtgtaccggcgatccatcgagtgcgccgggctcagtgggtcgttcgacttggaggaggtgatgggctcctatgactctgaggagtggagcggcggcgagggcgatgacgacaacaatgacagcagcgacagcgacggcaaaggtgacgatggcaaaggcaacgacaaaggcaacgacaaaggcggcaacgatgacggtaagggcaacggtgacggtaagggcgacggcaaggccaacgacataatgctggtggcataa

SEQ ID NO: 36340 - DNA, 429 bp, Zea mays
  Peptide Sequence Number=SeqID_79715
atgggcaagaacaagaagggcggaagttcgtcgcaccactccggcgacaagcggaagcgcgagccaagtcccccctcggaggacttcggtgactccgagtccgaagggtcacgggtctacgcctctcccccggtgtcgtccgatgactcggacgattcccaggggatcgctgccgaggtgtggacgtacatccaggccgtcgagtgctccgggctcgagggctcgaatgagtcagagatctcctcggacgaggagaactcctctaactcgtccgaggaggagagcagcgatgacggcgacgacgagggcgacaacgacaatggaggcgacgatggtggtgatggcgatggtgacggcaagggcgacggtggcaggggcaagggtgacaacggcagcagcaaggccagtggcaaagcaccactggcttaa

SEQ ID NO: 36341 - DNA, 276 bp, Zea mays
  Peptide Sequence Number=SeqID_79716
atggaggaacggtccaccgggacccacctgtcggctaagggaaggttgacagcccggtcccagataggggctgactctttcctgccgaagcctgaccttgcttcattggagctggagcaaaaggtcttgctggggtgcttgcttgcggaggagcagttggtgcctgttgagtttgctgcctggaactgccacgagctggggtccaatcaaaccgtccagaaagagctcctgcttcttctcatcgtcttcaacatccctaggagcatatcgagatag

SEQ ID NO: 36342 - DNA, 822 bp, Zea mays
  Peptide Sequence Number=SeqID_79717
atggcgcccaagaagagaaaacagagtgctactattccagtcatcccgccaatcgacctcaacagtcaactccccttcgctgagatatgtgcattgaacgacagaggcttgactattgaagttgttgttgttgttgattttgtcttcaagaatattcaacctctgaaggatagagtctaccctgcctacctgtatactaggacgaccactgatgatgctgaggtgaacgttgttctcagtatgctggcggtcgcgcctgtcgaggggaagaaaagaaagaaaatacttcggcggtcatcaggcttagaactgggtgctgaacctactggctcagtcctcagcggtggcttggcaagcgccaacctcaaggatgacattgaaaattgtgatggtgctagagttggtggtcatgggttgacgatgtctgccatcgaccatgcactagaggagattatccctgaagaccttttattggagccacctgaaactgaaagtgttgtcgtctgtacagaggttctggatgacatccccttagctagacagggttattcagctcttgtgtgcatgatcgagggtgcttcagcttccgaaggtgccgccaaggataaactagcccaaggcgacccggatactgggaatccgctgcttgctgtcgaaactgaggtctccttgagtgatgctctcaatattgcttccactgatactccatcatcagatagtgtaccgaatgtcctcaactctatgtcggcccagttgaagtcctgtggtgcccctgttcccgatccagttttgtccttgatgcggtggaatcccctcctctag

SEQ ID NO: 36343 - DNA, 381 bp, Zea mays
  Peptide Sequence Number=SeqID_79718
gaggcgctcgtgttggcatcgctcatcgacgacaagaacaagtttggtgactgccagttcgacctccggaagcaatcctacgtggtcgcatgcgctgttgtggacgacaagctccggcgcagccgccgcttggacgtggtccagagtggctgcaccgcgctgtccatcatcaagcaggggacctcaaggtcgtcaccaacatcggcaaatcccaggttgttctgggcaccacatccaacgatgatgccatcacgctgtctagctcatcgtccacctgaagcccaacctaccacaggagtagctgaaagatctcttgtgggttttggtggtttggatgacaacccaattataggactaataggtgtgctaagtgttgaatag

SEQ ID NO: 36344 - DNA, 723 bp, Zea mays
  Peptide Sequence Number=SeqID_79719
atggccacgccgcgctgccgatcgaggagaacagagagagcaggcaggggagagaacgtcgaggggagggaggagagactcacctgcgataaccgcggagacgagctgcctgccccgcatgatttggatctgggcaaagatgataggttatgcgatggcggggtgggtttatataaaaagagcgagcgcgggagacggttgccgaattcgtcgtcaaatgtgtcgcaaccgagcgagagaggcggttgcgaatacgacgagggaaaaagagaagaaaagcgaagagccgagggagtaacacctgaatttggtggatatttgaaaagaaattttatacccccaaattcagggtgttacagatctaacccccttaacaggaatctcgcccccgagattcaagaagaagctagcaaggaagcaggatgttcaaaaccaactgatgcaattcttgaggatctcctggacatgtgggttaggactcgcacacgcttccgctgcgtcacttcaatttattggttgatgttgatcacattgtcttcattggggttgacgactaacccccttaacaggagcgttgatacacacttgatgaaggtgctaccgactctgatcttgactgatttgaaggagttggaggttgccaaatggacaggtgcaagaggaaagaatagcgagaaaaggggaaactacgctaaggccatcgaaagacaacgggagcgataa

SEQ ID NO: 36345 - DNA, 453 bp, Zea mays
  Peptide Sequence Number=SeqID_79720
atggccacgccgcgctgccgatcgaggagaacagagagagcaggcaggggagagaacgtcgaggggagggagaaggagagactcacctgcgataaccgcggagacgagctgtctgccccgcatgatttggatctgggcaaagatgataggttatgcgatggcggggtgggtttatataaaaagagcgagcgcgggagacggttgccgaattcgtcgtcaaatgtgtcgcaaccgagcgagagaggcggttgcgaatacgacgagggaaaaagagaagaaaagcgaagagccgagggagtaacacctgaatttggtggatatttgaaaagaaattttatacccccaaattcagggtgttacaggaacactgcaaaaacatacgttaatactacggaccgtccgaaggagaagcgagcaccgtctaggaccaagcgcggaccgtccggtctttga

SEQ ID NO: 36346 - DNA, 216 bp, Zea mays
  Peptide Sequence Number=SeqID_79721
atggacatgttcaagctagccatccgatacgcgctgagcggcaaggcgtggggcacgctattggagcacaagatcgccttcaccgccaagaaggactgcatgcgggaggagcaggaggcacagtgggcgatggtgcagcgtagcctgcacggcttgcagatgctcgaggagaccggcgacagccgtcgtcctccacgagcgcaccagctaccatga

SEQ ID NO: 36347 - DNA, 615 bp, Zea mays
  Peptide Sequence Number=SeqID_79722
atgtatcatcatcatgccgccgctaacaaccacgttccacccaagcctcccgcacgacagggcctccgcttcgctcgccaacttggtcgccttcttcagaatttggatcacaaactcaacaaagggggcgtcgggtgggggctgcgacatgtgcggagcgcgaggtggaggaagagcgctcgactaccttgttggcactttgatgaggcggacgacagcattgtatggggtccgcggcatgtgcggagcacggggtggaggaagagtgcggcgacgtcctacctcactagcgttgtgggagcttggaggcggtgcatgggggcgttgggtgccaaaggttcacacttagccaataaaaagaccaagtattggggttcaacaaaagagcaaagggacaaccgaaggcacctctggtctggcgcaccggactgtccggtgtgccaccggacagtgtccggtgcaccaccggacatgtccggtgcaccagaggactccaactcaaactcgtcaccttcgggaaattccagaggcgactccgctataattcaccggactgtccggtgctccaaggaagagcgttctcaggaactcgccagcttcgggaattcactttag

SEQ ID NO: 36348 - DNA, 567 bp, Zea mays
  Peptide Sequence Number=SeqID_79723
atggtcctttcagccctgtctctcgctctgcccgcgcgaacagagagccccgccactgctcaccgtcagccgctgcccgttctgcgatcaccgtcgcgctcgcgccccgtcctttgcctcggtgagattcgcctcgccgttagctgctcgagacacccttcggtgtgccttccccctctctggtttgcccggtctgcgctcaccggagcggttcttgcgcagtcggagctccgccaccatcgccccgtcgcgtccctgtgccaccgccattaccccgtgactccagttcttcccctcgaggtgagcaacctgcccgcacccttaattcggtcgttactgccagcgcacgattgttcgccagagttgccccgcgccgccgttagcctgcctcggcgtgtgcagcaccctctggtgctcccgcaccggcatgatgcccatggccgagtccgccagaccgctctgaacgcgcccgagctagtccccaagcctctggagccccgccgtggccagtccactcgtctccggcgagctctcaccgcgggaccgagcgacgctgagagcacctag

SEQ ID NO: 36349 - DNA, 162 bp, Zea mays
  Peptide Sequence Number=SeqID_79724
atggtgggtacaagtgcggccactgcacgacggcagtcggggtcagtggagcattgtaccatgcaggatgtagttgatggtgtgacttggcctaccaccctgccaccgggttggacggtcgagtgggatgttgctccggcaggagaggagcatgaggagtag

SEQ ID NO: 36350 - DNA, 543 bp, Zea mays
  Peptide Sequence Number=SeqID_79725
atggagcttcaacaggggagcgccatgggagtagggagggcgctgcttgggggctcggctgggggattttctgggcgccctggctgggagcagggaggagcaagacgccggctggagatggtggattggtggccggcgttggaggaggagggtgtagggagcttggagttgcggctgggcatcggccatggaggagtctctgcgcacgcacaggaaaacagaggggaggagagggacgagctggataagcagcccatgggggagaagggcgcagggaggtggggctgctgctcgccgccggccagaggtagaagaaaggggctcgcgcccatggagctaaggaacaggggggccatggagggagcgtacgcaggggcgtcgggtcctgagcgtcccttggccacgagcagggaagagcagagggcggctggagatacaccggcgccatggacgccagggaggagcttcagcgccgaggaagaaggagcaggggcgccagcttgctgctcgccaggaacagagaaggaagaaggttgtgcgtga

SEQ ID NO: 36351 - DNA, 1014 bp, Zea mays
  Peptide Sequence Number=SeqID_79726
atgaccctggagcctcatcccttacagccaggctggcattcgttggactccgagtctttcggataccgtgctgaagacactatcgaggccattgctctccatgggctgacaaccttctgcggttttcaccccttggagctgtctactcatcccactggcttgttccccgctgaaaaggaggacgacccaatgtggaaagaccgagtggagcatgccaaggatatatgggctctttacccagggcagactgctcacttaacggtgcgatgcatgaatgccctgtaccgcctgcaagcggtgcaaggagaggcaatgcctcagctaatggcattggtggaagctaccaagatcaccctagataacagagaggaacttgtggtagacctgtccacggagatggtggaaaaggacctgcaggtggaacagatggccaaccagatccaggagcttgaggagctagtgggaaccagggagaacaccattgagcttctcgaggatcagctgataaacaatcaacagcaactcgaggagcctaaccagcacttggatatgcaccatcaggagattcaggacatggaggctaacgaggatgttgacatcgagggaggagtggagccggagcccgcatctagcctggacactgctggctcagggagacccccttcccccgagtcaagcgttgcctcggtagtggaatccaaattcccactactcaatggagtttgttcagatgtggctaagtatgcagcctatcatgcagacactgatgagaagaagagggacaggttcaggaggggcctcagtactaagctctgcgaccgtctcaacacagtcagggcaaatagctacaatgggttagtcaacatggcaatttcccaggaagactgcatcacagcccgccaggcagaaaagaaaaggaagacccctgtggcaggaccttccgctcagcctcaacgcttcaggattgtctctgacactcagaacaggggacctcaacatcagcaaggacgttga

SEQ ID NO: 36352 - DNA, 147 bp, Zea mays
  Peptide Sequence Number=SeqID_79727
atggcgttgtgtggaatttggagaggatttgatctctttggttctttggaggacatggttgctggagtgacttggccgtccatcttgccaccgggttggactatcgagtgggaccccgcctcggctgaggaggagcatgaggagtga

SEQ ID NO: 36353 - DNA, 324 bp, Zea mays
  Peptide Sequence Number=SeqID_79728
atggggaagcctggcccatcactcctcatgctcctcctcagccgaggcggggttccactcgacagtccaacccggtggcaagatggacggccaagtcactccagcaaccatgtcctccaaagaaccttacaatggatcaagcagtctcatttgctgcgagaagcagacgattggaatcgagttttatccttgcaagtgactgcacttgtacccaccataaccggaatgggagaccacgtctcaggtcgcgtgaggagagcaatctgcgggcaggttcactcaggatttaacaacattatgctaaaggaagaaaaactaagttag

SEQ ID NO: 36354 - DNA, 504 bp, Zea mays
  Peptide Sequence Number=SeqID_79729
atggggaggctagaaccccgggcagaatgggaatcacggcttgcgggtaaagtgtgcaacctctgcacagtgttagaaactggtatatcagtcgtgctcacgatggcccgtatcaggtgtactgcacgtaagtctgtgatcccctttttgccttctcacctggcggagcgtccactgcgtcgtatggtgccaggtcagtccagtcacctggagagactgtatcgtcgcctgcacgaggagcaggagcaccgacgccaggagcaggagcaggagcagcaggactcttccccctcgcctcagcgggaggtggagtctgagaggctgccttcccctgcacctcagccagagatgccccctgcaccaccacagggcatcccgcctactggaggagaccctgacgaagacggagacagagacgacgacgatgccggtggcagttcgagccacgacacggagcactcagaggagccagatggatggattgctagaccccataactcgtga

SEQ ID NO: 36355 - DNA, 594 bp, Zea mays
  Peptide Sequence Number=SeqID_79730
atgtcgttatgccgaagttccctggaaggtagcttcggcattatttccgtgttgatcttccgaagaatcaaatttgaaatcagatttgagatagaaaatagagaatataaaaaagaaataaaagaaaaagaagctagatgggccgttactgccacattttggcccatcttcctgcgccggcccactcaacccacctccacacgccgctcggttgttacactggcacaacaggcctacttgtcagccacccgtgagcacgcgccagcccaggttttctctgcctcgtgggcccttcgcctgaacaccgctatcacgcgggcacgcggacacggactcgtccacagggtcgctgccacatggggcccgccgcacatggtcttcctcttccccaacaaccttccgccatccttgctccggggtcgcctcaaccaatctccaccgattgccgagttccgcacggcaggcacctggtccccagaccttaagggtgtgtttggtttaaggaatcaccgcatccaaattgaggtggtgcatcatgggttcattcctcaaatttggtgggatgacctcattcctcatattagtactaactaa

SEQ ID NO: 36356 - DNA, 141 bp, Zea mays
  Peptide Sequence Number=SeqID_79731
atggcgggcggaaatgagctcgccggagctaaggaacggtggctggtcggtgagggattcgagttagggatcaaggtgaacatccctgatcttggctcaaggtctgaatttcagaattatgaaattcagaattcccaatga

SEQ ID NO: 36357 - DNA, 207 bp, Zea mays
  Peptide Sequence Number=SeqID_79732
atgcggcttcatatccttagaggtatgaaggcagaagtcatccttgcatttgcagacatttgcactcatgaggaatatatgaagtgtgacattactatgttactattgtggtttctacctgcgagagatgtgtcatctcactcttgcattactcaatgcaggatgacgaagctgaagagcaatgatctgaagcttgacagaaggtga

SEQ ID NO: 36358 - DNA, 249 bp, Zea mays
  Peptide Sequence Number=SeqID_79733
atggacatcgccgacagcgacacgctcacagacaaagtggaggtcgatctccacatgcttcatgtgctggtgttgcgcggggattggtggaaagacgagtctggctcgtgcgaggggacaaagtggagcgacacgctcaccgacatggacatcgccgacaacgacacgctcacagacaaagtggagctctccaagcaatcggagctaggacgcctcggccacgcctctcttgttgggtttcaactctag

SEQ ID NO: 36359 - DNA, 996 bp, Zea mays
  Peptide Sequence Number=SeqID_79734
atggctgaaaggtaccgactcccacggagttgcgttcctccaacgacaaggcgaaagaactgcgggcataccccatccgggggctcggaaggtggaaagacacgatgcataagtgagcgcgaagacatggtcgcctttcaagggggtcaccctccttttaaaggcgactctccctacttgcgtccccagccgtcgtgggctgagtcttctccaacacgctccaaggtcctccccctacggcgcgggggctgggtcccacacgtcatgcaagctggcccagagcagaagaagccaaaccaccgcgcgcggtgcatgcaaacgcccagcggttacaagcagttctccacttttgcccagaccagcgggcgaaagggcgggcagccatgcaggcggcatgcaaccacgccaagtgggcacacctctccgacttccaacgcgcccagcatggaagcccacgcccacgcgtcatgcaaccggcgcgctggtcgctacgtgcaagcaactgcaccgccactcgcaccactgccacgcctcctcgactgcggaaccagtaccacgactcgaggcgaccctgcgtatgacccagcagtgccagccaggcgcgacggtcaatgcggccaaaaatgggccagcagtgatggcggtggcaggcgggcgggagcagtggtcacgtcgtcagccaagcttacgtcccatcctggggcaggaccaggaaagggggataccccgaaaaggacccttctccgtgaaggaaacaggctccgagcctccctactgatcagaggttcgaaggctagcccctcggaggggttcaacagccgcctcagagcacgtgggctccacacccactactggtcagaggttcgaaggctgacccctcagaagggttcaacggctgcctcaggccactcgggctccgcgcccactactgatcaggggttcgtaggctggccctcgaagggttcacagccgcctcagacacagagcgagggatga

SEQ ID NO: 36360 - DNA, 1075 bp, Zea mays
  Peptide Sequence Number=SeqID_79735
atgtcttcgcgctcacttatgcatcgtgtctttccaccttccgagcccccggatggggtatgcccgcagttctttcgccttgtcgttggaggaacgcaactccgtgggagtcggtacctttcagccatcgttcggcttcaaggattttcatcagtcagcccggctgcatcccctcgccggtggtcacccgaggcggtgaccaccagcccctgggtggggagaagcaagccgggctgcgatcttggtcccaccctcagcttcaaggattttcatcatcctcgctggggtggaggtcgggctgagccggagctctaccccccgcgtggtttcgtgggtcagcctctccttcagcgttcgagggagagggcgttaactggccctgcgagaggggcggacttcgacaacgctgggctggtcgacggcgagcgtcgtcagcctcagcgtgttgggcccgccgtcttggctcccggtgccccctcctgccgcgaaggcggttgtcgcgctgtgcgcacgggaggaccgcccaagatgtcgcgcgctgccagggcggcgttcatgttctgggcggtcctgcctttgcaccggtacggcgcctccacgcggagacgagggcaaggttgcagcagcgtccgccttgaggccatcactgctgcagttcggccatccggagcgggggagtccctcggctcggtcggccttgctgtccgaggcttctcttgcttagttaaaggaacccctcggtcgctcttcgatgagccgaagccaggggtagcggtgtcagcacagacagaggcagagttggctcgaaaagaagacttggtcggccgaagcctggccgggtcgtccctaagcgggaccgacgccggagttgatctgccgaggcctcgggccgggctgatgtcttcaggggacagctggccgaggcctcggggtgaccagccgagccgcctgctcgagccggattcttggaggagactcaggcggcgatggcccgggcgtgctgatgaagtcgtccttcagagtggagaccctcggatcgtgtcgccgtcggaggctaggtcggacctcgccgaag

SEQ ID NO: 36361 - DNA, 2265 bp, Zea mays
  Peptide Sequence Number=SeqID_79736
atggcgccgcacaccaccggggtgggaggcggcagcggggccgaggaggaggtgtcggaggcggcggctgcatcccctgcgttacggcaccgccacgctggcaagggcgaggccgaggccgaggggctggacggcaatggcgacgctggggccgacggccaggcgtccctggagcgggtgttcgcggacaaggcggtgccgtcatggcgggagcagctcacgctgcgggcgttcgtcgtcagcgcgctgctcgccgtcatgttcaacgtcatcgtcatgaagctcaacctcaccacggggatcgtcccctcgctcaacgtctccgcggggctgctcggtttcttcttcgtccgcatgtggaccgccgccgtcgagaggatgggcttcctctgccatcccttcaccaggcaggagaacaccatcatccagacctgcgtcgtctccgcctacggcatcgccttcagcggtcggactgcaaatgtgcagcaacgctttcaggaaatgggtgattatctgtgttttcaagtggtcattgtgcgatcagatcatttaaggcatgagacaagtggcttcggcagttatctgtttggaatgagtgacaaaatagctaaacaagcaacagaggctaaagatgctaataacataaaggatcctcaccttggatggatgatagggttcctattccttgtcagctttattggtctctttgcacttgtgcccctaagaaagattatgattgttgactacaagctgacctatccaagtggcacagccactgcatatctcatcaacggttttcacacacctgagggagccaagcttgcaaagaagcaagtaaagacgttgggcaagtacttcatgtttagctttttctggggctttttccagtggttctacactgcaggggatgagtgtggattcaaaaatttcccaacgttgggccttgaagcttataacaataggttcttctttgacttctctcctacatacgttggagttggcatgatctgcccatacatcgttaacgtgtccgttctgctgggcggtatcctctcatggggtgtaatgtggcctctcattgccaagaagaaggggagttggtacctggctagcgtcgatgactcaagtctccatgggctgcaggcttacatggttttcatttccatcgccttgatccttggggacggtttatacaactttatcaaggtgctgatccgcacgattgcgggcttcatatcgatggtgcagcaaaattcaaaaggcatgcttcctgtttcggacaatggcagctcaatgtccgctaccgaagctctgtcctttgacgacgaacgtcgcactgagatttttctgagagatcaagttcccaagtcagttgcatacgggggctatgttgtagttgccgcgatatctatcggcacccttcctcagattttcccgcagctcaagtggtactacatcttggtcgcctatgtcgtggcgcctgtgctggccttctgcaacgcttacggaagtggcctcactgactggtctctcgcctccacctacggcaagctcgcgatcttcgtgttcggtgcatgggctggcctctcacacggtggcgtgctcgttgggctcgctgcctgtggtgtcatgatgagcatcgtgtccaccgcctcagacctgatgcaagacttcaagaccgggtacctgacgctggcatcaccgaggtctatgtttgtcagccaggtgatcggcaccgggatggggtgtgtcatcgggccctgcgtcttctggctcttctacaaggcgttcggtgacattggcgagagtggcaccgagtatccggcgccctatgccatcgtgtaccgcaacatggccatcctcggcgtggatggctttggctcgctcccagaaaactgcctcaccctctgctacattttctttgcggcagcgatcgccatcaaccttgcgagggacctgaccccgcacagggtgtcgaggtttatcccgctgccaatggcgatggcgatcccgttctacatcggatcctacttcgccatcgacatgtttctgggcagcatgatcctcttcgtgtgggagcggctgaacaaggcgaaagcggacgcgttcggacctgcggtcgcgtcggggctgatctgcggagatggcatctggaccctgccgcagtccattctggctctggccaaagtgcagcctccaatttgcatgaagtttttgtccagatcgaccaatgccaaggtggacagcttcctcggcttgtcatga

SEQ ID NO: 36362 - DNA, 241 bp, Zea mays
  Peptide Sequence Number=SeqID_79737
atggagcgcgtggatgggggattccccggcctcccgctcctcggcgaggcacaaatgacttttccgcgctccggtactcctggttggcggcgagacggcacgagacagtggcgcggtggggagttcgccgaggcaaatcaccgcggcaatggcgtacttcgacgacgctactctttcccttctcggtttagtggtagagctagggcgtacgagactcaacgaatcaagctgaacatcagaa

SEQ ID NO: 36363 - DNA, 219 bp, Zea mays
  Peptide Sequence Number=SeqID_79738
atggtctggcgcaccggactgtccgcaccggactgtccggtgtgccagcggagtaacagctacacagcgccaacggtcgtctgcaacaggactgaaaaacgctacagtgcgcgcctgcgcgcgcagaagtcagagcagcgccagaaggcgcaccggacagtgaacagtgactatccggtggctcagctgtcagaagctccaacgatcgggaaccaatga

SEQ ID NO: 36364 - DNA, 240 bp, Zea mays
  Peptide Sequence Number=SeqID_79739
atggatttgaacatgaatggattgctggttgatggaaactacatatccaacttggtcttgagtgtttttcatgacccatctgtcatggaccaggagcatggactgcacatcaaagatgtcatagatcgtctcaaactaccagatgatgtagtcagtattgtgcttgtcaagggcaccgaacccctgactggcgggacctcggctacgcagttcgtagccctcggccgtcttctccggtga

SEQ ID NO: 36365 - DNA, 822 bp, Zea mays
  Peptide Sequence Number=SeqID_79740
atggaggatatgggcggggcatccgtggtgcatgggaagaacgattgggcggggtggtcctgcgcgcgggggtcatcgacgatggaatttttgcgtgttggattgctacgaggcgtggatagcggcgaggggatgtgtttccttctgtggcagtggcaggatttttgcttccataaccgaggcattgatcgcccagatgggtcggcgcgagacggaacacaagggggggaaacacccgaggtcgggcgaggcggtgactcctccgaggtcaaggctgagtccgacccctggggtcgggcgaggcggagaccgtcttccggagttgaggctgagtccgagccctggggtcgggcgaggcggagaccgtcttccgaggtcgaggttgagtccgagcctaggggtcgggcgaggcggagaccgtctttcgtggttgaggttgagtccgagcccgggggtcgggcgaggcggagaccgtcttccggagtcgaggttgtgtccgatccctggggtcgggcgaggcagagaccgtcttccggagtggaggttgtgtccgagccctggggtcgggcgaggcagagtccgtcttccgagtcgaggttgtgtccgagccctggggtcgggcgaggcggagtccgtcttccgagtcgaggttgtgtccgagccctagggtcgagcgaggcggagtccgtcttccgagtcgaggttgtgtccgagccctggggtcgggcgaggcggagtccgtcttccgaggccgagacggggggccgagcccctggtgtcgggcgaggcagagcttcctatggcgctcgaggctggacttag

SEQ ID NO: 36366 - DNA, 444 bp, Zea mays
  Peptide Sequence Number=SeqID_79741
atggagttcgagatccagtcgctgctcggcaagctgcaggacgtcaacgacgccatgagccgctgcgccgcctccagcgccaccaccacctccgtctcccagaagctcgcgcgccaccgcgacatcctccacgagttcacgcaggcctccggtggcatgtcgccaagagtgcatttgctcagggaacgagcttccattcatggcagcatcaaccagattgatgaggtaattggccaagctcaaagcacaagagtagctcttaacaatcagagggccatgtttggagacattcaagggaaagtgaagcagctgggtgaaaagttcccggtaatcagaggtcttcttggtgccatcaagcggaagaaatcaaaggacaccataatcctctcggcagtgatcgcggcctgcaccatcttcctgatcatttactggctttcgaaatga

SEQ ID NO: 36367 - DNA, 2718 bp, Zea mays
  Peptide Sequence Number=SeqID_79742
cgatcgccagggcgattcttgttcatccgccgccgccagcgcgtttcgccgtcctccaccgccgcacgccctcaacattaatcgccgccgccgttgacagcatcgtcgagccgctgccgttgtcaatcttgcgcgccccgcgtcacattggctcacatccgcggtcgctatgtcgtccggattccaaggctgctgtttcaataatgcggaaggttgatcgacccccaaccaatccgaagcgtttaatcattgagtcaagtcaagaatgtttcagtgttgacattccacgctcgactgacatggcagaccctacaaatacgccgtctgatggtgatcctctgcagcatagaaagacgggtgttgcagctgctgctaaaaacattgctatgcctaatgtggatgatgatgatgactttgagccacccaaaaagaagtgcaatatctcaatggatgccccaataagacgcagatgcaacccaggagatgttcttgcgtccattcagatattgaatgaaaggcaacgtcaagctatagtcagaaaaggattttctagtattcttgacatgacaattgatgcaattggatgtcgaacacttctctgttggctcatgcagaagctagaccccaggtacatgactcttcgtattggtccagacaaagaactcaaaatcaccaagcagactgtccatcagatattgggtcttccaaatttgggtggtggaaagccccttaatattaatgaagcgaacgctgcggtaacacttcgggtctcattgaatattagcaaggatgagtttgttatttcaaagctccaagacagattgaggctaggccaggatgatgatctttctatcagatgtttttttctcattctcttcaaccgactgctattcccaacagctagctggtctatttctttcaatgaggttgtacttacagaagaaatggagcgattccctcaaattgattggtgccatctaatttttagtgacttatgtgaggctgcccagagatggcacaacaagagcattaacaatgtgtcggcgacgatatatggatgttccatcattgttctttttcctatgaggccagaaacttttgatgaagacccaaatcaacatgatcgacttcccaatataatcatccaactccctcttatgcaagacttgatggcaaataagattcagatgcttcctgtacatcaacgccagaagttccaagctatgttgattgattatgacttagaggttggcaaaatatttgcctctatcaagcaatgtttgaatactattggtacaaagcagtccaatctagctgctacatttggagaattgattgatgaggttcttcgggccgatgaatctgttacaccaaatactcaaggtcagacagtggtaggtggcacagttgacaatgattctggaccagtatttgacaatactcctattgggagtgtttctgcaccaggtctcttcttatctgaattagaatgtgctcgcgctcttcgggcatacttgtgttctaggttcattgaattggacagaaatataattgactttggtgaacatcgcgccaattgttgtgacatacaacaatcttttggtgatggcgcatgtctcgacaacgtgtttatgcaatgtttcattgagtgtgtccgcgatgactggtctaaacatattcctccactcaatgctcaccagctcattctagatgttaatgttgggataatggtacccatgctacgatctggacattggacattgtatgttgttaatcttcagattggacgcatatatgtgttagattccaacccttatggaccagagatgggtgggactatcttgaaaaattaccattgtatacctatggatttgggtgataggaaggtttcatgggccaggttaatgatgagtaggctcaatctagctattcaaaatgctcgaccaagatcagctctccctgcttttttgaagtaccctattgaactcatgaataactgcccaacaatgaaattggggtctaatgattgtggattctttgtcatgagatatatgcagaactacgactacatggttggagctatgaatgcagtcattgatccggataattcagaggacattcgctctcttgtactgcattacctaatatttcatcgactagatagaaacagctccgtggctcctactccgatgagttcatatgcctccgccaacccctcttcccgcctccactatggcagcacgtccctcaaagccgacgatatgacggcgagctcatctgggcgctcacaaaccgcttctagggcatcggttccttctttgctccggcggcgcttggaggcagaggtgttctgtgtcggccagatctgggcgagatcggggcgagatggccctgcacatgatttagcgacggtcgtggacgacacgcccgcgggcaatgggttctcgcccaatcggcttcgcgtgatgctgctgggggtggacaagcgtcgcttggggcaggacagtgccgccatggaggaagaggacagcggtggcggcgactacgacactgtgttgaaggcccacgctagatccggtggcggcgactacggcaccgtgctgaaggcccacgctagatccggtgccagcgacggtgggtgcgtctgcttcatcccgtccaccctcgtttcgattctccactcctcgcgatgctgcccctcgttttggattattgggg

SEQ ID NO: 36368 - DNA, 717 bp, Zea mays
  Peptide Sequence Number=SeqID_79743
atgagccttgcaggaagcccagaaaggcaggctggcaaccttccctggaatgacacctgcagcttcagaagcagggcaactctagcttcacttccagggcaggcatcgaactggaggggggcagaaacaaccttgtttgcattctcaggagtcccagggctgaggggggcgactaccaagcaggtttatgagcggcatttcgcgaacaaggaaaccaaggagttcaaagatttccacattgcctacgtcgagttctgcaagtatttcaacacggtgatgcccggtcaggattttgacactccatctactacggtgattcagaaattctttgaagacgagtggaagccggagaagaacgaggaggagaggaagaggaagttcctggagttcatgaggaagaaggtgagggaggccaaggtggacgacagcttcttcatcgcggcggggctggcggtgccggtggcggccgtcatcggcaagagggccagcgggcagatcccctacgtgaagagcgtgaggctggacctggtccccaacgtcgtgttcgtgccgttcgtgacgctgctcggcatcatgggcgccaccgcgtggcagatgggcaacaagagcgctgtcgcccaggaggacgaggacgccaacgaggaggagaagaagaaggagacgatgaagcgcgcggcggggcagcagcagcaggaggagcaaaacaggtcgccttga

SEQ ID NO: 36369 - DNA, 2211 bp, Zea mays
  Peptide Sequence Number=SeqID_79744
atgacccgccctgttgctgtggaggatgtgaaaagagaagtgaagattcttaaagcacttaaaggacatcagaatattgttcacttctacaatgcatttgaggatgattcatacgtgtacattgtgatggagctatgtgagggcggtgaactattagatcggattttggcaaaaaagaatagccgctatagtgagaaagatgctgcagtggtagtccgccaaatgctcaaagtagctgctgaatgccatctgcgtgggttagttcaccgagatatgaagcctgagaacttccttttcaaatcgaacaaggaggattcaccactaaaggcgacagattttggtttgtcagatttcattaagccagggaagaagttccatgacattgttggaagtgcttactatgtcgcaccagaagtactaaaacgacggtctggtcctgagtcagatgtttggagcataggagtcataacctacattttgctctgtgggaggcgccctttttgggataagaccgaagacggtatattcaaggaggctctggcgagcacccttaacgaggaagagctatcagatctgaaggatcagtttgatgcaattgatatcgataaaagtggatcgattagtatcgaggaaatgcgtcatgcccttgcaaaggatcttccctggagattgaagggtccccgtgtgctggagattattcaagcaattgacagcaacactgatgggctcgtggacttcaaggagtttgttgcggcaactctccatatccaccagatggcggagctcgactcagaaaggtggggcatacgctgccaagctgctttcagtaagtttgatcttgacggtgatggatatatcacgccggaggaactcagaatgcacactgggttgaagggatctatcgagccgctgctggaggaggccgacatcgacaaagacggcaagataagcctgtccgagttccgcaagctcctacggacagcgagcatgagcaacgttatggcctcctctgccggttgccgcctgcctccccgcatctccttcaactcgctgctggcggccgccgcgtcctccgcggacacgcgcacccgcgctctcgcgctcccggctctcgcgctcgcccacgcctccggccgcgtgtccctcgactcgtacgccctctgctccgcgctccgctccgcgccctccgccgcggggacgctgcacgcgctggccgccaagtccggctggctcggcagcgtcttcgtgtcctgcgcgctcgccgcttcctacggcgggtccggccggtgcctggacgcccggagcctgttcgacgaaagtcccgccaggaacggcgtcttcgggaacgccgtcctcgccgcttacgtgggcgcggccgagtgggctcccgtgctgaggttcgccaggaggttctcggaactgcggctgcaggttgactggtacacgatgacggctgtggcgcgggcgtgtggcgaggtggccaacgctgatctcggcgtccaggcgcatgggcatgcggtcaggaggctgggaggtgtagaggtggacgtgttcttggtcagcgcgttcgtggacatgtacgccaagtgcgggcttatcagccaagcggagcgtgtgttccgccttgcgcaacaggagaccggtggcagaggtgacgttgtgctgtggacggccatgttgaacgcctatgcgcggcatggacagtgcaaggaggttatccggcagtatgacctgatgctggcctctggtgtctatccggatgaattggccatgttagctgtactctcagcttgccagcacgccggggaggtggtcaaggggctcaactactttgaatccatgcatgcagattacgggctggtgcccacaccggagcactacggttgtgtggtcaacatgctgtgccgggcaggggaagtgaccaaggcgtgggagattgccaccaaggacggctgtgatcatgcaatcggcgtgtctacatggggggcactgctcagtgcttgccaggtgcgtttaaatgttgaggtcgggagaatggcagctcagaaggcaatcgaattggaccctaccaatgttgggatttacattgagctgtcaaatttgtatgcaagggcttgcttgtgggatgatattgaccagctgcgggaggtgatgaaggagagagggttggaaaaggatgttggatgtacttgggttgagcttggttcatga

SEQ ID NO: 36370 - DNA, 591 bp, Zea mays
  Peptide Sequence Number=SeqID_79745
atggaggagcacggcggcgcgcgcccgttcacggcggtccgcccgccggagatcccgaatccggccagacccggcccccggcgtgccgcggcggcgcccatgccatcggcagtggccacgcgaactaacgcacctaggccaattccgagctactctaaacgtgctagagattcaagcgaaacatgggaaggagaactcaccgaggatggtggcggacaccgagctgaccacgacggattgcgagtctgcggcggtgttgagtcgacggcgacaaattccggtgccgccggtggcttgtcttctgaaattcggttgcggccaccttcaacacgtccgaaaggagcccctgggttccttaccccgagcacggtcgtcggcacgcccggattcgcctgcggcggggtgaccgaccactgggtccaagctgtcagcgcaacagaggagctacgcgcgcggagtttggctgacgggtgggcccttgttgtcggcgtcgtgatgcctggtgggcgcgcggatgggaagttcccactggaaggaaaatcacagtcaacggagtttgtaaaactggaatatgggtctggctggtcttag

SEQ ID NO: 36371 - DNA, 444 bp, Zea mays
  Peptide Sequence Number=SeqID_79746
atggagagggtagagggcggctacccaagtggaggagaggaagagggagggggcggcggccaaaggggtggaaaagagtcgcacaacctcgacaacttctttgtttccacgattaagagtcttcttcaagtccagctggtttctgatgctaatgcaatcagaaatattagcaatgtgatcttccaaactcatccttttcgccttaggggggctatccaatgtggcttctctgatccttttggacgagcaacccacaccgtcatcaggagtaccgtggctgccatagcttcacaagggttcatggacacctccagcactaatcaaattgcccctgtcgtgtgtggttcgaccaaacaaagtgtaaagctcatcaagaaagggtggtggttttcctcgactgccctgaggactaggatcctgcgtttgaacatagtgcagatttag

SEQ ID NO: 36372 - DNA, 678 bp, Zea mays
  Peptide Sequence Number=SeqID_79747
atgtcgacatcaccgagtgattcctctgcttcttttgtctcccattcttctagccgtgaaccaaccctagagtgggatcctacagcggcatatgaaaaacaggcacctttgcactgggatgcagatggatgggacttcgcagttgcatcggaatccgacggcgacctcaccgacggggacgacctccagttcctcgttgacggggagctggactccgacaccagcactgagtggtcttgggcgtacgacggagaatcgtcagatgtggagtccttgtacaatgatgacgacccgatgtctggacattggatgtgcatggtctcctcggacgacgaagatgacgagaacgacgacgacgacagcagtgacgaggacagcgacagcagtggcgacaatgacggcgatgatgatggtggggcaagccaatgcgatgagatgcctcccagcaagcgtcgtcggctgcaacatgatagcttattctgttcctgcataagtttgcccaatctggcacattcattcactgattcttgttccccggacaaacctgcgtgtgacaagagaactacacctgttcagtacaacctacgcaagaagcgtgccaaaaccacttccacgaaattgttaaatgcgcctttgtattcattgacttacaacaagctcttatctttgtttctttga

SEQ ID NO: 36373 - DNA, 1113 bp, Zea mays
  Peptide Sequence Number=SeqID_79748
atgtctccccctgaacaactaatagtaaagtctctcatacctaatgcactgtcagttgatgaattgcaaagtattccgaaaaggaaacgtcacaaggatgcccagtcccaagaagaaacacaggagtgttacattgatggatggactattacgtgcacacagtttaagcctcatggtcgcatcaggtccaagaaacaaaaagggaaacatggaaaaggtcaagaaataacttcaagaaaagcttgctatcaatgtggacatgaaggtcattactttcgtaattgtcctgagaagagttcaccacagatcacctccaagatgaagctatctcagtcttcagacatggaatatgaacaaaaatgcacagaaatttctaccaacaacgtaaagacaactccaccattaatttttgcaacactggtcattcacacaaccatcgccaccgtgttgtatgatcctcgtacaacacattcttttatcagtgcccagtttgcaacaaagtatggtatctttaagtgtcccttgagatcaaggaagatcatcagtgcactcgaaaggaaaatgttagtgaactacatatgtccaaaaatgatgtaccccaatggaaatgaagtaaatgatgccaatgacaatactcctaccttaacgactatgaacgagaaaaatgagtcacagaaatattcgatgaatggaatgaagaacaacaaaaggaatagaaaaatgtttggatacatgattagtccacctcaaccacaagcaaaagccacgaaacacatggatacccaaacagaagaatcaagtcaggctcagctatatgagatacagacacccagtcaactctcaccccctgttggtcaagcaaagttgactcgcaaagaactcaaagcaagaggtgcttgctactactgcaaaaatgaaggacatattattcacgaatgccccaagaaacatctagaccgattagagaagaaagctgccaagcatgacctaagcaataattcagaagaccaacctttttataagtacgatgatgaaggtcgcttgattagtatacattgcggagcaaagaagacaggaagttccttgatattaaaagagttcaatgagaactaa

SEQ ID NO: 36374 - DNA, 942 bp, Zea mays
  Peptide Sequence Number=SeqID_79749
atgcagcccggctgcaccccctcgccggcggtcacccaagacagtgacctccagttcgatggcgggggaaagcaggccgggctgcggcctctgcccctccctcagcttcaaggattttcatcatcagtgctggggaggggattgccgcgtgcctggctctccggcccgagtggcttcggagccactcccggcgccgccttccgccacggtagttggaagagcatccgccctgaggtcatcgctgctgctgttcagccctccggagcagaagtcgtcgtcgtcgccgctgccggagcgggcgatggcgagccgttcgtcggtcttgtgttgctccgcaggccccccaatcgtgagtccctcggctcggtcggccttgctgtccgaggcttctctcacttagttaaaggaacccctcagccgctcttcgatgagccgaagccaggggtagcagtgtcagcacggacagaggcagagttggctcgaaaagaagacttggtcggccagagcctggccgggtcgtccactggcgggaccgatgccggaattgagttgccgaggcctcgggccgggctgatgtcttcgggggacagctggccgaggcctcggggtgaccggccgagccgtctgctcgagccggattcttggagaagaccctggtggcgatggcccgggcgtggtgatgatgtcgtccttcagagtggagatcctccgaccgtgtcgccgtacgaggctaggtcagacctcgccgaaggtgtatttgacgccgagggtgctgctgctcccttcaactgtcaagatccgagcctgcaggaccagattatcttgtatcgagaaggcccgaagaatcgcttcggtagaggggctttcgagcgtgaagacttgttcggtccgcggaatcacttatccgaacgcgagttacttatcgcaaaaggtgatgagtga

SEQ ID NO: 36375 - DNA, 813 bp, Zea mays
  Peptide Sequence Number=SeqID_79750
atggcgcctcctgttgacgtggctggtctgcgccctaggttgggcgatgtggaagctcctccgaagccgaggtcgagtctgtcttctgtggccgaggtcgagttcgagcccctgggtcgggcgaggcggaggccatcggctgaggccagggcggagtccgagcccgagatcgggcggagtggagttcgtcgtcttctggggctgagcccaagtccgaaccctgggtcgggcagagcagaagttcgccgtcttctgggacatagcccgagtccgagccctgggtcgggcggagcggagttcgtcgtcttccgggacctagcccgagtccgagccctgggtcgggcgaagcagagttcgtcgtcttccgggactagcccgagtccgagccctgggtcgggcgaagcggagttcgtcgtctcctgggacttagcccgagtccgagccctgggtcgggcaaagcggagcttcctatggtgccttcgaccgggcctgactgcctgtcagtctcactctgtcaagtggcaccgcagtcggagtggcgcaggcggcgctgtccttctgtcaggccggtcagtggagcggcgaagtgacggcggccacttcggctctgccggctggggagcgcgcgtcaggataaagctttatgctgatgggggttaccagctgagaattaggagccttgaggacaacgagcagcttgtggttcctgagtgtgttgccaaagatccctctgagcaacaacctggggggctcaggctgtttcctgagtacctatccgtaaggacctgtttggggagtgacaacccgggataa

SEQ ID NO: 36376 - DNA, 1497 bp, Zea mays
  Peptide Sequence Number=SeqID_79751
atggaggcccaggcccacgcgtcatgcaaccggcgcgccgaatgcttcgtgcatgcaactgcaccgccacttgcgccaccaccgcgcctcctcgactgcggaaccaatgccgcgactcgaggcgacccagcgcacgacccaacagcgccagcctggcacgacggtcaatgcggccaaaatgtgggctggcacggcgggacaggcggcgcctctggcaggagaagcgggcgacgcttcgccttcgccataatgaccgcgtcagaaaatggaccgggaaagggggataccccgaaaaggatcattccccgtgaaggaaccaggctccgagcctccctactgatcagaggttcgaaggctggcccctcggaagggttcgacagccgcctcagatcgcgtgggctctacacccactactggtcagaggttcgaaggccggcccctcgaaagggttccacgaccgcctcaggctactcgggctccgcgccccctactgatcaggggttcgaaggctggccccagaagggttcacagccgcctcagacacaggatgaccatgggtacgttcgatacataaccaaggctcgggttgcgctcccgagggctcggactcgggctaagtcccggaagacgacgaactctgctctgcccgacccagggctcggacttgggctcagccccagaagacgacgaactccactccgcccgaccccagggctcggactccgccctggcctcagccgatggcctccgcctcgcccgacccaggggctcggactcgacctcggccacggaagacagactcgacctcggcttcggaggagcttccacatcgcccaacctagggcgcagaccagccacgtcaacatgaggcgccatcatcacccctaccccgagctgactcgggccgcagggaacaagaccggcgtcccatctggctcgctccgccagataggcaatgatggcgcccccgcatactctgtgacgacggcggctctcagcccccttacggaagcaagaggacgtcagcaaggactcaaccgctccgacagctgtccctccgccaggctccatcgctcctccgacggccacgacatcaccccagctgggcgccaaaatctctccggctgccacaacggcatatcctctccttacgcctataaaaggaaggaccagggccctcttagagagggtgggccgcgcggggacgaggacgagacaggcgctcgcttgaagccgctcgctccctctcccgcgtggacgcttgtaaccccctacagcaagcgcacccgacctgggcgcacgacgaacacgaaggccgcgggatttccacctctctcatgccggtctctggccgcctcgcttccccccttcgcgctcggcctcgcgctcgacccatctgggctggggcacgcggcgacattcactcgtcggctcagggaccccccgggcagtctggcggactcggtcgtggccctcacgccggcgcgggagcactag

SEQ ID NO: 36377 - DNA, 189 bp, Zea mays
  Peptide Sequence Number=SeqID_79752
atggctcaagaaattatacgaaaaagcgagaaagccgcactttctcctccctcagagcctgccgagccatcggcggtcccccacgcgaagggggacgacgaaattagaaaaatggccgaagctatcatggataaagttgttgatcaactactaaacgaagctgcagaagtagttctaagggaagattag

SEQ ID NO: 36378 - DNA, 462 bp, Zea mays
  Peptide Sequence Number=SeqID_79753
atggcgagccttggccagacggcggcgccgtcgatgcccatgacagtccgcccgcccggcccccaaacaccaccaccgataataccacgtgaagctaaggtcaacgctaatgttcagaggggaggttcttaccagagggaaccagaaataatcccggattgcgccctgaactctatggggcagcagggcccagtccgcctcgatcgggagctgggaggagatcccgaccgtgcggcccacgtactggtgacggtgtgcgcggattctgtggagtacggccgaggagatatgcatggcggcaaatctcaacaaacccagctgaagaaacggcatggccgaggaccgcgcgaagccctggttgtcggccgctccgagtttgcggcgccacgggatctgttagtcatggcgcgactgtgcgggtttgggttgcgcgggggtgttgggccagttttggaaacctag

SEQ ID NO: 36379 - DNA, 2508 bp, Zea mays
  Peptide Sequence Number=SeqID_79754
atgtcgtcgtcgtcgtcgttcaaagcgggggagtcgtctcgcgcccgcgaggaactgaatcgcaaatacgaggtcaagttccagcccggcccgtgggcggcactctcttccatcgccgtcgtcctcgacgactccgccggaaacgaggagcgagcaaagctgctcgcgcccggcgcctccgacttccttctcgacctccggcccccgctggacggcgcctcctacctggtcctgcccaagcgcctggtccaggactcgaagtggttcagctttccctgcgtcatctccgcctgctccgaccgcctcctcttcctcgttagccgcggcgaccaagacaggaactacgcctacttcctcggtgacgcccacgccggcactgccgccctcctccccgacgtccccgcccacctcggcgtcgaaactaatttcccgcgacgcagcatcggcctcatcgccgacccgcgacacggtggccactacatggtggcccatctgtatcccacctccacgacccgccaccagaccctgctctgctactccaccgtcaccgaccagtggaccgccaggccgctggtctccgccccggaccacccgccttggggcgctcacggcgtcctcgcccacggcggcctcctctggtggatcgacgtcgcctacggcatgctcgtctgcaaccctttcgctgccgacgacggcctgcgcctgcgcttcatcccgctcccgcttggctgccagatgaaggccctcaccgggcgcgcccgcctcttcctcgaagacatgatggaccgccgacgcatcatcaggctcagccagggcaagctgcgctacgtcgcgatccaggtccagcgaatccccaaggatcaggccacggtctgcatgttcacgcttgtcctcaggcaggggggccagcattcctgggaacacgagtacacggtgaccttcgccgacatatggagccaccgcagctatgccgatgccagactgccgtcgggcgtggtgccctcgctcgccttcgtcgaccccaacaaccccaacatcctctacttcttcctggacaagacgctcttcgcactggacgcacaagccaggcaggtcctgcaccacatggagtactcgttagaccccgattattacgggcaactcagggtccggtactcctgcttcgttgatgcctgggtgctgccgccaacgcttctccgcaagggtgacagccggtggacttatgacgacgacgaaggaacggatggatctgatttcgaccaaacaacatctctgttgtccctgatggaaatcaagagccagttagacgacgaaggaacggatggatctgatttcgaccaaacaacatctctgttgtccctgatggaaatcaagagccagttagacgacgaaggaacggatggatctgatttcgaccaaacaacatctctgttgtcccagatggaaatcaagagccagtcagacagggagcagacgacggctgccgatgtggcagctgccgactccgatgtggcagctgccgactccgatgaacaagctaacagggagcagacgaaggctgccgatgtcccagctgccgactccggtgaacaagctaacagggagcagatgacggctgccgatgtaccaactgccgactccgatgaacaagatgaccaagctgccgactgcgatgaacaagctaacagggagcagacgacggctgccgactccggtgaacaagatgtcccagctgccgactccggtgaacaagatatcccagctgccgactccggtgatcaagatgtcccagctgccgattccggtgaacaagctaatagggagcagaccacggctgccgttgtaccagctgccgactccggtgaacaagatgtcccagctgcagactccggtgaacaagatctcccagctgccgactctggtgaacaagatatccctgctgccgactctggtgaacaagatgtcccagctcccgattccggtgaacaagctaagagggagcagaccacggctgccgatgtcccagatgtcgactccggtgaacatgatgtcccagctgccgactccggtgaacaagctaacatggagcaaaccacggctgccgatgtcccagctgccgactccggtgaacaagatatcccaggcttcccagctgccgtctccggtgaacaagctaacagggagcagaccacggctgccgatatcccagctgccgactccggtgaacaagatatcctagctgccgactccggtgaacaagctaacagggagcagaccacgactgtcgatgtcccacctgccgactccggtgaacaagatgtcctagctgcctactccgatgaacaagatatccgagctgccgatttcggtgaacaagctaacagagagcagacgatggctgtcgatgtcccagctgccgactctggtgaacaagctaacagggagcagacgacggctgccgatgtcctagccgccgactccgatgaagaagctgatgttgaaccatag

SEQ ID NO: 36380 - DNA, 333 bp, Zea mays
  Peptide Sequence Number=SeqID_79755
atggaccggacgatttcggccacccccgccgtcgagccgtacaccgttgtgaccgccaggacctcccagagccaaccccgcccctcgccggacctctctcaccaccgagtttgccatttattttacattgtgcttaaagttaaagaaaatgggaaagattgcaacctcgctgacggagagtatgtcctcgtgccggagcaaggagctgctcatgaggtagcccaggatccagcaccagagcctgcaccagaggatctgtctgccactgctttggaaggcaagccctggtttatgcataacctgttatttatgctattttactacacttattga

SEQ ID NO: 36381 - DNA, 353 bp, Zea mays
  Peptide Sequence Number=SeqID_79756
atggaaattgtcataccagtcatcttcgttgggaaaccccctcctgatgaaagtcttgatgctgaggccttcggtgttgctcatcctgagcaagatgacgaacttcttcagaggcttcgtctatctgcctctgcagttcagctagcctggccatcttctccttcttgcgttgaacctgctgctgaaggatttccagattttgaatctcctgatctagatcatcctctggaggtgttggactgcggctgcagcgtgccagcccctggtgctgaagccttcttcggaggcatgacgaaggggatgcttgccgaaggtgttgaaaagctcaaaaaatggaagtgggttcaccggag

SEQ ID NO: 36382 - DNA, 336 bp, Zea mays
  Peptide Sequence Number=SeqID_79757
atgtcgaagacaaaagagggtagctcgtctaaacaaggggtggagaagggtggtttggtgaatttgaaattattccttcccggcttaagaacttttgttgaggaagcagttatccagactacgccagctactaagccgaaggttcactctattgtactgacgaaggaggagaaaattgaggaagaagttgttgaggtgcctgtccaagaagaggttagtgaacctcctctcggcacgcctattgttgagagtgtgaaggttgaactggctgtggaagtggttgggagcccgaagattgatcttgattcaaagaaagctgctacctcaagaacttag

SEQ ID NO: 36383 - DNA, 327 bp, Zea mays
  Peptide Sequence Number=SeqID_79758
atggtcgaggtcgccgcagaggccacgtgcggcaccaaggatgttgtggcgtgggtcttgagcaaggtccaccatctagtcgttggactttgccatcaggatgctcagcatttaatgtgccatgtccactctactgacgggcggcggccaggccatcctgcaggcggcatgcccgtccgctccggtggcgggcagtacgcccgtgatgcggcatacactatgcccatcatcactcgtacgtcgccagtgaagcttccgctgcatgccaatactacgcaggctgcggatatcagggcgcaaggagaatgcactggcgaccagcattag

SEQ ID NO: 36384 - DNA, 1128 bp, Zea mays
  Peptide Sequence Number=SeqID_79759
atggaggtattaaacctcgcccggaggtccgggctgtgcatccaggggtccgacactttcccgtgggggtctggacccactgtcgccaccttggagtatatcatctcctctggccacgtggcggccccggagccgcgccacgtggaggggtcgggtgctgttcaccgcgcgactagagataaccgcgcgagcaccgtgtcttcatactgtaagactgggctgttggtttcggcggaggtgaaaaggcgcgctaccgcaggcggtggcgtgcacttcatgcggtggttcacctttcttcgcacatggaggccgacgcccgaagagtatgactcgtgggcccgggcccccgtgtcagagactggaccgctgctttcggcagaggtgaagaggcgcactacagtaggcggtggcgtgctcctcacgcggtggttctccttctccgcacacggaggccgacacccaaagagtgaagaggtgcactaccgcaggcggtggcgtgctcctcacgtggcggtttgccttcttcgcacacggaggccgacgcccgaagagtatgactcgtgggcccgagcccccgtgtcagagactgggtcaccttggcgcgcatcgggcgaggtcttctgcggcgctttggggcgtcagttgggggaatctctctttaaaaaggggactcccccgagtgcggtagccattctcatcactcgcagcgccctttcgctcttgagttctccgcgctcttctgccgctgtagctgccatgaccttgctagatcctcccgagcgtctccaacccgaggtggcactcaacttggtgcgcaacctgctcggatggggtacgccggcgttcgccggaaggatctgtgttggtgcctctcctcacgacgacctcgccgccggagagtttgtgctcttcgtttccaacttccccagcgggttggcgttgccgatctcgtttttcttcgtgctgctgctggaggagctcggcctccaacctcagcacttcacgccctgcttcatccttcaggcggccatcatcacctaccttcgcaagatgaggtcatacaagacgtcgtacgccgtggagatggcggccgtgcacttccagcgcggccctactgatgccgagtag

SEQ ID NO: 36385 - DNA, 1419 bp, Zea mays
  Peptide Sequence Number=SeqID_79760
atgcttgctgagcttatacaaattgccactctgattatatgggatgaagcgccaatgacacatcgtcgttgcttcgaggctctagatagaactatgcgagatattctttctgagcaaacaccttcaaatgcaatcctccaatttggtggcaagattgttgttcttggtggcgatttccgtcagattttacctgtcgtacgaaagggctcacggactacatccagaggtggccttagaatcttgattgagaatgaggatggttcgtgcgggatgggagacgtgttgattccaagcctgcagtgtgggaacttgtctgtgacaatatgtgtgttcgtctctcggttttgggacttttctgatcctcaggatgatgcaaggctgttacaaagtgatatgttagagcaggttattgatattcctcctgcatttcctacacttacctactccctcactcacatagagcagatccatgcgcgcatcgaccataaagactactatacagatgggctttgtctgactggaagctcaccatgtaagtggtacatcaatccatccattcctgaggtagaaacccttatgtccagcgcacgcggtgatcataaaccagtgaagtggaatgcaactgttacttcgagccagcttatatctcctgttgctgaggagcaaaaggtgtcgtacatcaagtatctccatccctttgaaaacaagggaaaggaattcttgtttacagtcactataaggaaaattgacaacaagtggtggtataactcatgcagaaaatgtgcctgcacagctgtcactcacggagactcttacaaatgcacaaactgtgattgtgctaacattgctatgcccgtccaaaggtataaaatacttgtcactgcaggagacgagacagctgatacatacttcattctctttgggcgcatggctcaaagaattgtcaaaaggccttgcgatatgctcatagcgaacactccatcaggcttcattccagatgcaatcacaaagctgcttgaaaggacgttcatttggaacgttagcttctctgggcacacaattaactctggagacgtttgcttccaggtcaatgctactgtaaaggaactaggcaatcaaaatgttgacatttcaacatcaaccgtagggacacaccagtcttcacttatgttctcacaaggtgcaagcagcagcatggaagacactcctcacaagacagacaccttgtcttcacctctgacacctttgacgcctcagggtagcatcgccactacaaagtatttggaaaccgttgacattggagatgctgagcgtgtgactactcagtcctcgacaactaggaagaggcgagtctcgatagcaaaagttgtgcttccttcttgcgcatattatcatgctcttcgcctagcaaatcaatag

SEQ ID NO: 36386 - DNA, 663 bp, Zea mays
  Peptide Sequence Number=SeqID_79761
atggtgcgaggtaacatactcattacccaccactacgagctaatatacacacacctacagtctcccattgctaaaatcactggacatgtctttcaatcaaataaacactctgcccaaagagattggcctggctactgctttagtcaagcatcaaacaacaacatatccagagtaccagatgtacttgttggttgttccaagttaagtaaattggatctagagggtaacaagcttgtgacactttctgaaaacatgtttgtgtcatggacaatgctcacagagttgaatctcgatgtggcaagcactgaaaagttcagacaaagtgaggggcccagaattgtcatcgatctcttgcaaggaggctcagaaaatccagatttattggatgctggatttagtgttgtggcagcaggttctgctggcaatgaagttgtgaaagagtcctttatggaactgaaggtcaatgaactcattctgcgggttatgaaggataaatcaaaatctaatgtgcaaagtttgtatgatgccatatgtgttctgctgaaacttgatgacaaccgagtggtagcttctcaggtgtatgctgttgaaaactgtgaaattgttgtccagttcaagtttttcaggcacacgttcattttggagtcatatgggagcaaatag

SEQ ID NO: 36387 - DNA, 627 bp, Zea mays
  Peptide Sequence Number=SeqID_79762
atggggaggctcagctgcacctacaccaccgtgctcgtggcgctcgcgctctcagctccactggccgccctcgccggcgacccagacatcctgaccgactacatcgtcccagcggacgcgaaccccgggaccaccaacggcaccttcttcacgttcacggggttccgcgcggccatgaccatgcccatgcccaacttcatgccgaccaaggccacgatggcggagttcccggcgctcaacggccagagcgtctcgtacgtgctgctcatgttcccggcggggggctcggtgaaccccacgcacacccacccgcggtccgccgagcttctgctcctcctcgacggcgcgctctctgtcggcttcgtggacaccgcgggcaatctcttcacccaggacctcgccgccggcgacatgttcgtgttccccaagggcaccgtgcactggcagtacaaccagggcacgcagcctgccaaggcgctctccgccttcgggagtgccgccccagggctcgtgtccctccccagcaccctctttggcgccagcaacatcgacgataacgtcctcgcaacgtccttcaagaccgatgtggccaccatccagaagctcaaggcaggcctccacgcataa

SEQ ID NO: 36388 - DNA, 531 bp, Zea mays
  Peptide Sequence Number=SeqID_79763
atggcgcgcgtcctcactgctcttcttctctccgctatcctctctctcccggcgctctctttccccagccgtggagctcccacgcacgattctctactccatctcctaaccgagccccctccagccacctccctcggcttcttcctcccatccgatcgcccctgctcatcttcctacctcccgcagctcccagccgagcggttctctccccctgcgcgcccttcctgcttcccctgctcggatttctactttcctccatggccgagcgtcctcttcctctggtcgacctcctgtaacacccgggttttaggggtccaaagcccgggcgtaaacataatcaccaggaccgccatcgcagcaaaatcctcccgagggcctccctacactgaccactcccctactgcccttgcccctttcggattttataattctctggacggagcctcattttctggaaaacgcaggggctacggcgtaaaagaacctaagacacaggccgcaacccagctggacggcgggttgttttggtga

SEQ ID NO: 36389 - DNA, 450 bp, Zea mays
  Peptide Sequence Number=SeqID_79764
atgaacaaaccagttgttggatctgaaacttctgatgcaaaccatgatttgaagagttcaaatggtaaaagtaaacatatgccttctgaagcagtatgttcctgtgcagagattcctggaggtcataagtccaacatcacagttgaaatttctcaaaacgttcagtctgttgacagtagtaagatgggatcaagtatcaaacatgcaaaatttgttgaagatggttcttccaccgaggacttaaatgaggcattgccatgttctcaaaacaaatggtgcttcatatgtgaatttgaaaaactcattgtggagggcaaccggtgcaagactgccttgtcaccgactggaatactctctcatttgaatgacattggcaggatctttggtcctgaaatgctccaagaagctggagcagctcatacttatacagaatgttttgccattaagtga

SEQ ID NO: 36390 - DNA, 234 bp, Zea mays
  Peptide Sequence Number=SeqID_79765
atgaaagcccaacttgctaagagagggtgttacagatctaacccccttaataggaatctcgcccccgagattcaagaagaagctagcaagaaaacaagatgcttgagaccaagtgatacacttcttgagaatcccttggagctgtgggttaggacccgcacacgttaccgctgcgctactctgatcttgttggttgatgttgatcgcattatcttcagtggggttagcggctaa

SEQ ID NO: 36391 - DNA, 333 bp, Zea mays
  Peptide Sequence Number=SeqID_79766
atgcaggtgtttgtccatgtcgcgtcgttgcgctgccgcagctcgcttcctggtcgcgcctccgtgcacaaccgcttggcccacctgttgctgcgcagcgctcgcgcctgcatctcgcggccagatgtgcgccagctctacgcgagcaagccccagccgaccttttcccctggcggcgcggccaagctccgccctgcagcgcggcagagaggccagcctggcgtgcagccgggttccgccttgcaaccggcgcggcggccagccccgaccgagtctcccctagtgcgcagcgcggccgcgagccccatcctcaccgagctcctcctgtcatga

SEQ ID NO: 36392 - DNA, 342 bp, Zea mays
  Peptide Sequence Number=SeqID_79767
atgggagatgagcagcagacctgcgcgagctggaaaaagatccggcgaggagacgcagggaacactccatggctgaatctagagcacgctggtgagcagggattcgtgcgcgcggccctgaatccgagcagggaagcaggcgctggaaaactgagaaggagttggggtgcttggtggccatggctaggcgcgccaggggagcttcggcaggtcgcggcgagctcggaagagcagacgcgcggagggagaggctcgcgagcacagctggacaccggacttggggatgaagccgcgacgctggggcgaaggccaagccagcaatgcataagatatagacagtaa

SEQ ID NO: 36393 - DNA, 423 bp, Zea mays
  Peptide Sequence Number=SeqID_79768
atgccgccgccgttgctgcccctgctgctgccgccgttgccgcccctgctgctgtcgccgttatcaccgttgcctccgtcgttgttggggaccttcggcatccgaaggtcctcaaaaacaggatttaacagtatttctggagtacaatgtgtgaacaggtatcttcggactaaagtcggcattgctgtagaccgggataatacgaaggtcgatacagagccgaaggtgcgagcaggaaagcttcggcgtgacagcaaagagtggaaccgacttaaagatgaaaaggctattcagacctcgatagactactacagaattattatcaaattacttgagaacaagtccccaacagtcgttgtcgtcgtctccgccatcaccaccgctgccctcctcggacgagtccgaagagtcctcctcgtctga

SEQ ID NO: 36394 - DNA, 1149 bp, Zea mays
  Peptide Sequence Number=SeqID_79769
atgaaggacctagggcctcttcaccacttcctcggcattactaccgagcgtcggcctcagggtctcttcctccaccagcgccagtatgccctcgacatcttggagcggcctcagttcaagcagcaatacctggagccggtcgagcgcttgagccgtccgccgtcccgcacgtccgccgccgagcgccgaggcccgagggcacgaccgcacgagcagccaacggtcccagcaccgcggcaccgtccgcgcctctgggctctggcgattgtccgccgtccgctcggcccgaggccccgagccgcgccggcgcgccgcggctacggttctccggccatcgtccgcggtccgcccgtccggcgagcgcccgagggcccgagcagcggagcaggcgagcagctccgcgcctccggcctccgcccgccgtccgcacgggctcggaccgagcctctccgccgactccgcgcctccgctgctcactgctcaggcgctccgcccgccgtccgctcgggcttggagcctcggaccgagccgctccgcgactccggcgcgccgtccgccgttcgcccgatggcccgagaaggcgagcaggagcagctccgcgcctcaacccgtcgtccgctcggcccgagcacgcgtcgttgcccctgtgcctccgttcgccgatcgagccactgtctgcctgtccatgtccctccgtctgtcgagctgttgtgccttccggtttcgccatccgccgagcagatcagagctcgtgctgcctactggaaacaacgtgggatattcaaggtggttaaggaagctgatgaaaacacaagattccatcatgcacgagcttcacaaaggctgcctcaaaatcaaataagggctcttgagctggatggtcaggcacaacaacaaccatttgttttccctcagtttcagccgccgatgcctcagtggggattacatgctccgccacctccacctccacctcagggatccggggtcatgggccacaacacgccaccaccgatcacaccagcaccaggaagagcttatgcaggggagggagctactccaggagagaatccaaacccgttacacgacttcatcaacgagtttttcgcttctggaggtagtggacacaactccaacgaccccgatatgtga

SEQ ID NO: 36395 - DNA, 459 bp, Zea mays
  Peptide Sequence Number=SeqID_79770
atgcatgcgcgagcgctgcgcagcaacaggtgggctgagcggttgtgcatggaggcgcgaccaggaagcgagctgcggcagcgcgacgacgcggcatggccaaacaccagcatcgcgggggtgtggcttgtgcggatgcgtgcttgctacaggacggggccagagggtgaggcagcgagcgctcgcggtcagaaaccaaaacgggaagctacacgaaacaaaaatagaaaaaaggggagaaagctcaccggaagttcttcctcgtcaagacgatcttgggcagaggaggccaagaacagaaacagaagtgggagggaggagaagaattggcgtggggaggaggcggctagacaagtggacgacaagcttgaatatgggacgcgcaggctgaagttgtcaagatacttgcatcgtgggcggaagaaacggttggaggagatgacgtgggatgggagatga

SEQ ID NO: 36396 - DNA, 465 bp, Zea mays
  Peptide Sequence Number=SeqID_79771
atgaacaagatcaaagacttgagcagccctggacgtggaagtgaaaaaaggaagacgagagtgacggtcgagctggcaggcatggcaaagatgcccaaaggaaccccgactacaagagatgtcagagcggctgaagagttgagacatcacgtcaaatccagggtgaccgaggcgacgatgccagatggtggaggttgtggtggcagtaagagcatggggggaggctacaccggtgggggtagtagagggcaagtgaatagagtagagggggccaaagctgtcacagcgagcgagcacgacacgagtgggaaggtggtgtatggtgagcccccagggatcgaactccataaagcagtggttgtcgctagtgaaccgacgaaccgagagaaggtgatgagtcagattgggagcaacaagaatgtcgttaaggtagaagggtctcagaagaaccgatgcacctactga

SEQ ID NO: 36397 - DNA, 147 bp, Zea mays
  Peptide Sequence Number=SeqID_79772
atgtacgaggagagagccaagggatgggagggagacaacaaggtctcgatcgtcagggaggcagttgcctaccaggcaacggatcccagccccaggcgctcaaaatcgaacgcctgggaacgctgcctggtggccaaacttggctag

SEQ ID NO: 36398 - DNA, 579 bp, Zea mays
  Peptide Sequence Number=SeqID_79773
atgaacgtaaatggaaatttgcagaatggaattgggattcagatgggtcaaattaaggcgatagaaatcaaggagaccgcggaaaaagggagaaataggaagagcgagaccgtggagaagaaaaggaacataaatcacggattcgtgggtatcctctgttggaacagtgaccccgtggcaaatccgccaagaacagagctccttcggaggaaggaccccgatggacacgagatggagaaggtcaggctcagaaacaacagacatatggttacctgcgaaaggcaactggctgttgggatcgatagggggaatcacagcagcggacgaactcgaggccttccgcttgggcgccatctcaactccaccggcgagcagagcgggagccgaattgcaaaagggcagagagggtctagaggcaggaaagcaagaactagggcacggaaagcaaaggcggccgaaggcacagtacatatggggttttcccaggtcggataccgtttccaaaaagcgcccagtcatcacccggcggttatttctaaacgctggcgtgccatgtcatcacccggcggttacttctaa

SEQ ID NO: 36399 - DNA, 321 bp, Zea mays
  Peptide Sequence Number=SeqID_79774
atgtcaaacaagcccttctcagaaaacacaggcgcgcactccgtaatattcatcggaatctccgaactgttcggggtgcaagcggagcaaccactatatggtccaacggacagcaggatcagatcagcactgcagcacgctgacacgaaagcatcggagtatcgaagtcagcggcgcaccgtcctgtcccacatgacgacaaactctccaatggtcaaggaggccagagctctaaccgttggacaatatggcggggcaccggacaggcactgttccttggtccggttacttggagttaaaccaattgaaaatctcacttag

SEQ ID NO: 36400 - DNA, 492 bp, Zea mays
  Peptide Sequence Number=SeqID_79775
atgaacaggcttgggccgaaaccagcccaggtcggcccaacagcagcagaatcgcgctcgcgcccgcgcgcgcgatggcggctttgcagaaaagccctcgaggttttatctaacaggaagcgggttcggttactatttcctggggtcactgacatttcacaaaaaggtcctctggtttctgtctattctgtgtttcacgtcctcgacggcgttcaagcgcggccgtgctccggcgagcaactatgccggccgattgacgctaagaccggtgctaatctttggctgagaccaaatccgagtccccatgaacgttttccccaacttaattgcactattggtggactagggagctccggccacggtaaccgtgcggatgaattcaagaactacgcgttcccggtgatgggtggtcacacagttcaaattgatgacttgataagcatcacgaagctatgcaagtgcttaaacaagaaagcaggggacgggggctga

SEQ ID NO: 36401 - DNA, 747 bp, Zea mays
  Peptide Sequence Number=SeqID_79776
atgacttcccacggatcctccgatgacggaaatgcactgacccacactgacggacttgcacgagagggctttccccgcattttgtgggaagtacttcagggggccggatacacgacaccccctcagtacgcggtgcagcagttcgagaagcaccgggtgccccgctgtagggtgaggatgactttggagcctcatcccctgcagccaggctggcgctccttggactcagagtctttcgggtaccgggcagaggacacaatcgaggcgatcgctctgcatggattgactaccttctgcggattccatcccttggagctggctacccaccccattggcttgttccccgccgagaaggaggacgacccaatgtggaaggatcgggtggagcatgccaaggacatctgggccatctacccaggtcagactgcgcacttgacagtacggtgcatgaatgctctgtaccgtctgcaggtggagcagctatccactgatattcaggagttggaggagctggtaggtaccagggagaacaccatcgaggttctcgaggatcagctcattaacactcagcagcagcttgctgaggctaacgagcacctggacatgcaccaccaggagatccaggaccaggaggccaacgaggatgtcgacattgagggaggagatgagcctgcctccagtgtggacactgctggctcggaaagaccaccctcccctgagtcaagtgttgcatcgttcgctcactag

SEQ ID NO: 36402 - DNA, 126 bp, Zea mays
  Peptide Sequence Number=SeqID_79777
atggagggtagacagatttttgtttcattgctctacgcacagacgtgtggacagacatcaagcaaggacgcgcaggcgcggcaaaatcccgagcacgacgtaggcaaccggccacaacgagcatag

SEQ ID NO: 36403 - DNA, 1074 bp, Zea mays
  Peptide Sequence Number=SeqID_79778
atggctcgcgcccgcgcttataaaaccctcccagacttagattgttcccttccacgcaccctcaaacctcaccggagtctagctcgtcgccggttgcccgtgcgcagcgagtctgcggccgcccactccctctgccaccgtagaccggccagtggagccattcccaactctgtccagccctcggagaagattgtgcacacctccgtgaggctccccgagcgaggaatcggagtttacttcgccggagaggccagtccacgctcgccggagctctcaaccccgccggagtacgtagaccgggtaaaccactccaccatccttcgattccttgtgcacacggtcgctatgttaccccgtgaagctcaccgtgccctcggattgaaccagttcgccgtggtttggccggtatactcgccgccgacgaggacacccgcctgcacgcgtggaccggacgattctggccatctccgacgtcaagccgtacctcgacgtgaccgccagagtctcctcgagccaaccccacccttcgccggacctccctcgccgccggctctccgcaagggtcccggcccgagcggacgcctcagctggccgctccgtagcctcagccagctatcccccgaggacctcagcctggctcatggcctcagcagcgtgactccggggttggtctcgctcgtggatgatctggccaagctccagccgccgctgctgcacttcctcagcctgggaaaccgcctgctcccgggccgacgaagcctctatttcgagccgactccgcctctgtccacaccgacaccgctgcctccggctccagctcatcgtagagcggcagaaggtcctaaaactgagcgagagaagcctcgagcggcaaggccgaccgagccgagggactcctacgcctccgagatacggatacctcactcgtcacctttcgcgcaaggcaactcaccctcggttaagtggaatgaacaacctccacacctgagggcctgcgggacaacaaactccaggtggctcgccggtgaccactgcaccaacagcgcgacaacgacctccgtctcgggcggttag

SEQ ID NO: 36404 - DNA, 591 bp, Zea mays
  Peptide Sequence Number=SeqID_79779
atggttctcagctccttacggaagcaaggaaacgtcagcagggccccaggccgcatcgtcagctatgcttctacggggctcaagcacttctccgacggccacagccctgggctctatttaactacaggaagccccgaccaggggccagcagcggtgtcgcctcgaggcaggcgaccgacggtggcgctccaccaggaacgagcgacaacgacgctccgaggcaggcgggcaagcggtgacgacgctattgaagcggacggacgacagcagcgcaccctaggcccgacgacaacggcggttgtcccgtccgtctctgcgatggccaccgccgccgccgctctagcatctgtggcgccgtcccttgcacccaaggccaacgacagcaggaaggcggtggtgtccatggacgcgtcggagctggagaagcacgtgctggcggtggacgacaaatccatggaccgcgccgcgatcgccaggatcctgcgcagctctaggtacagggtgaccgtcgtggagtcggcgacgcgcgcgctggagttgctcgcgatgggcctgctccccgacgtcagcattatcatcaccgactactga

SEQ ID NO: 36405 - DNA, 1758 bp, Zea mays
  Peptide Sequence Number=SeqID_79780
atggaccaatacagatacaagaattatctggacagcattattttgcagctccgtgaacagtttgcagattcttcattgatggtactcaactttagagatgaaggaaaaagtcttatttcaggcattttctccaagtacaatattacagtcaaagactacccttgcaagtatctaggatgcccattacttcctttggatatcattctccacttcctggggctgagtgaaaggtggcttatgcttgaagggcagcaaaatattctgctaatgcactgtgagaaagatggatggccagtgttggcttttatgcttgcaggtcttcttctgtacaggaaacaatataatggggagcaaagaactctagatatggtgtataagcaagcccctaaggagcttcttcagatgctaaccacattgaatccacaaccgtcacatcttcgatatcttgggtacatatgcagaatggatgatgacatagggtggcctacacaacctattcctttcaccttggattgtgtaattcttagagaaattccaaatgttgatggagtcggtggctgtcggccaattgttcgagtatatgggcaggatattccaacaactgacagaaatcatggtgttgtttcaccaccatcaaaggccaagaaaaatattaggcgttacagacaggcagataatgcgccactgaagttaaatgttggatccttcgtccaaggtgatgttgtccttgaatgtctgcatgtagatgatggccgaggaaatgaaaggttaatgtttagggtgatgttcaatacctttttcatccagtctcacattttactgttgaactttgaggacatcgatgtcccttgggatgccgatcaccagttcacaaagaacttcaaagcagaggtactcttttcagagttggatgctgagtctgatgcatccactgaagtagcacctgattatgattatgatgatgatgatgatatggatgttgcctctgctgatgagttctttgaagcagaagaactcttcagtaatgctgattcccaagaaggaaataaggatgctgatactctttctatagcatctacagattatacttcaactccaagcgccgaacgttggagaaactcaccgttttccaactttgagccgaatattggcattgatggatcacgagacaataaagtcgataacttgggcttgttagaaacagtaaacgatggaaagacatgcacatccactgaagccaatactatgctcaacaatgaaactgcagttgttaagtcaactttggcagctacaatagatggagacgcagatagtggtatttcaaagtctacttataaagtggatgattacatgtttgaaaagggtagttccaagcaggatacaaggatgggttccaatcaagatttgggtcagattgataatgtgttggttaaggaggtgattatattagaaactaatagtcctaaggacatacagatgatcaaagaggtcatcatatctgaagttacaactctcaaacaggtagtagacgggagtatgatggaaactgaattagatgagacagtccatgattcagaaagcattgcattggcagaaactgaggatacaaaacaacttaatattttttgcaaacaggatgagggacacagtgtgcaagatgaatatgctgcttatgacaatggcatagtgattgaacaagaagaaaagcagcaacgaagaaaaccttaccatcagagacacaaattcagaagtgactga

SEQ ID NO: 36406 - DNA, 1095 bp, Zea mays
  Peptide Sequence Number=SeqID_79781
atgggtcggcgcgagacggagcacaaaggggggaaacaaggagacaggcgtaaaggggaaacccgcgaccttcgtgtttgtcctgcgcccagatcgggtcgaggtcgagtccgagccccgggtcgggcgaggcggagactgtcgtccgaggccaaggctgggtccgagccctggggtcgggcgaggcggagttcgtcgtcttccggggccgagcccgagtccgagccctggggttgggcgaagcggagttcgtcgtcttccggggccgagcccgagtccgagccctggggtcgggcgaggcggagttcgtcgtcttccggggacgagcccgagtccgagtcctggggtcgggcgaggcagagttcgtcgtcttccgaggcccgagcccgagtccgagccctggggtcgggcgaggcggagttcgtcgtcttcccgggggctgagcccgagtcccaagccctggggtcgggcgaggcggagtttcctatggcgcccgaggccggacttggctgctgtcagcctcactctgtcgagtggcacagtagtcggagcgacgcaggcgacactgtcttcttgtcaggccggataaggtgtcaggccacccttgcattaaatgctcttgcgatacggtcggctggcgtggcgatctggccaaggttgcttcttggcgaagactgggcctcgggcgagccgaagctttgtgctgatgggggttaccagctgagattaggagtcttggggccggcgctggcgggtgggcgctggggcggcagcgataccgggcagcacggggcccgatcatcgctggcgccgccgccgcggtctggctggctggccgcgggcaaacgtgctgtcggctggtcccgggcgtcgcggagcaagtggacccgggggcaggccgccggagacggcggcgacggcgacggcggacggaagcgcaaggggatggcgctgttccggaggctcttctaccggaagccgccggatcggctcctcgagatcgccgaccgcgtctacgcctttcagctaacatgtcttcctcgtgcatgctgcattagcttactgtgccagcatgattttgcagcctttatttaa

SEQ ID NO: 36407 - DNA, 429 bp, Zea mays
  Peptide Sequence Number=SeqID_79782
atgggcaagggtcacaaacgcaagcgtgagccgactcctccgtcggaggatttcggcgactcggaatactcggaggaggagttctcctccgagtccgagggttctccggctcccgtctctcccccggcgtcgtctgatgattcagacgactcccaggggattgccgcggaggtctggacgtacatccgggccgtcgagcgctccgggctcgagggctcggatgagtctgagttctcctcggacgaggaggactcggacggcggcggggatgaagatgacgacgacgacgacgacggcgacgacgacgatgatggcgacggcgacggtgacggcagcaacggcggcgggggcagcgccagaggcggcagcagcacgggcagcaccaggggcggcggcggcaagggcagcagtagcaaggccagtggctaa

SEQ ID NO: 36408 - DNA, 339 bp, Zea mays
  Peptide Sequence Number=SeqID_79783
atgcccggcgtaccgagggatgtcgccaaacactcgctggatattcgggccggagcccgatccgtcagacagcctctgcgcctcggtcatcaaggaagggtcggcctcgccttggcagagcccgaccctccctcggaggctaaaaaggtggaacccctctgcgtcaagatcgggcatacttctccgcgtcaaaaatttttcaatcaaaaaaggggcctcttgcgtcctcccggctacgttctcccggctatgtcagaagcagggtctcgaggagcgaacgcgggtacatgtaaatggcaaggccgactgagccgaggagctcctgtgcctccgggttag

SEQ ID NO: 36409 - DNA, 390 bp, Zea mays
  Peptide Sequence Number=SeqID_79784
atgaacgtccctgacgacaacacgctcacggacgaagtgaagatcgatcttaacatgcttcatgtgctggtgttggactgggttgacgaaggggtagacggaattgacgttgtcgcagtagacaaatgtgctcctggtgagagggttgtgaagattctaaaggagatggctaagccccagcacgcctcaggcacaccgttggtgatggtgcgttactcagccttggtccgaagtagagacagtgagcacaatgttatcaacatacaagaggagttttcgaatacaacattatccaatacatcaaggtgtttgggaaaaactttggttgagaccaatcagccagagcgggacccagctggcgctctctttacagagaaaaactttggctga

SEQ ID NO: 36410 - DNA, 975 bp, Zea mays
  Peptide Sequence Number=SeqID_79785
atgataaatgttcacaggaagattcgatactattcacaaggaactcatgcaactgatgtggagcaggcattcctcttccacctggaggaggaggagggccaccaggcattccaggaggcattggaggagatggaggaggaggtggcggacctccatgacctccaggaggaggaggaggtgctggagctccacctcgaaaccctgctggaggtggaggcggtggagttcctcctagtcctccaaagggtggtggaggaggaggaacacctccaattcctccatatggaagcggtggtggagctcctatgtatcctccaggaggtggcggtggcgatggagctcctacatatcctccgggaggtggcggtggtggtggagcccctacacttgctttgggatgtggcagagctaatgcacattcccctggaggtggaggtggcggtggagactctacatgtcctccaggaggaggcggtggtggtggagcccctacacttgctttgggatgtggcagagctaatgcacattcccctggaggtggcggtggcggtggagactctacatgtcctccaggaggaggcggtggtggtggagcccctacacttgctctgggatgtggcagagctaatgcacattcccctggaggtggcggtggtggtggagactctacatgtcctccaggaggaggcggtggtggtggagcccctacacttgctttgggatgtggcagagctaatgcacattcccctggaggtggcggtggtggtggagactctacatgtcctccaggaggaggcggtggtggtggagcccctacacttgctttgggatgtggcagagctaatgcacattcccctggaggtggcggtggaaactctacatgtcctccaggagatggtggcggtggtggtggagcctctctgcatcctgtttgaggtggcagcgggatggaagcctctacaaatacactcatag

SEQ ID NO: 36411 - DNA, 642 bp, Zea mays
  Peptide Sequence Number=SeqID_79786
atgtgcaagtggtgctctgcttttggctcctctcggatgctccccggcgtctccactaccctgactgggtttgtggttcctttgctaccgggagagaaccgtgaggatcatccttctccccctcccaaggcaccaggggcagatgtggaggattggaggcgggtcaaatcatcctcgtcccagggtgatcttagtggggttgcggtagtctttgacttggtgatcgagggtgaggcaatggaagcagttgtcgagggagatgatattgaagagttttttttcaaaaagaaaaaagggcccgaaaaacgtagtagattgccgtattcggaaaaaaagctgcacagcgcagtcacaacagagggcagagggcagaagccagagggatcggacggtggcgggcgggcgcgaggtggtctggggctgtggcggttgcgactcgcgacgtggacactggacagccacagggatgcgtgggtcgcccctctgccactcttccctgctggtgctgggccgagcgtacgaggccaccacgaacgaagcgcggcggcctaccctggccggaacacgatagcagctgcacacggcgggcatgcgaggtgtcaggtgtgcacggcgcatgcgcggcaggacaggagcttttga

SEQ ID NO: 36412 - DNA, 561 bp, Zea mays
  Peptide Sequence Number=SeqID_79787
atgtcttcgcgctcccttatgcatcacgtctttccatcttccaagcccccggatgggagatacccgacgtcttttcgcctcatcgttggaggaacgcaactccgtgggagttggtacctttcagccatcgttcggcttcaaggattttcgtcagccagcccggctgcaccccttcgccagcggtcacccgagacggcgaccaccagcccctggatggggagaagcatgccgggccgtgatcttggtcccaccctcagcttcaaggatgttcatcatcctcgctggggtggaggccgggctgagccggagctctacctcccgcgcgggttcgtgggtcaccctcccctgcggcgtttgagggagagggcgctcgccggccctgcaggcgggtcggacttcgacaacgcggggctggtcgacggcgggcgtcgtcagccccagcgcgtcgagctcgtcggcttggctcccggtggcccctcctgccggaaggcagctgtcgcgccgtgtgcacgggaggaccgcccaagatgtcgcgcgctacaagggcggcgttcgtgttaa

SEQ ID NO: 36413 - DNA, 927 bp, Zea mays
  Peptide Sequence Number=SeqID_79788
atgcagacggcatgcaaccgcgccaagtggacgcgcttctccgactcccgacacgcccagcatggaggcccaggcccacgcgtcacacaaccggcgcgccagatgcttcatgcaagcaactgcaccgccacttgcgccaccaccacgcctcctcggttgcggaaccaataccgcggctcgaggcgacccagcagcgccagcctggcgcggcggagaagcgggcgacgcttcgccttcgccataatgaccgcgtcagtaaaggctccgagcctccctactgatcagaggttcgaaggctggccccccgaagggttcgacagccgcctcagatcgcgtgggccctacacccactactggggttcgaaggctggcccccaaagggttcacagccgccttagacgccgagcgagggatgaccatgggtacgttcgatacataaccaaggctcaggctgcgctcccgagctcaccggagacaccatgttcggcgcccatcgagggcaacatggcgctttccccctcctccttgcagaaaggcgacgcaggggccgtcaacataccagcccgagaacttgggacccgaccgtacacccgggctacggccagctcgcatgagggaacaaccagaccagccgaagcattacgcaaggcattaagacctcgaaggagtgaaaccactcctctgaggcctcgggggctacacccggcgggtgcgctcgcgcgcacccaccggaacaaaatgcaaccgagaaaggctggtccccttgcaaaaaagtgcgacgaaagcctccaagcgagtgctaacactccctttgaggctcgggggctactgtcggggaccataattaggggtaccctcaagactcctaattctcagctggtaacccccatcagcataaagctgcaaaggcctgatgggtgcgattaa

SEQ ID NO: 36414 - DNA, 405 bp, Zea mays
  Peptide Sequence Number=SeqID_79789
atgggcaagaacaacaagcgcaaacgcgagccaactcctccatcggaggattttggtgactcggagtactcagaggaggagttctcctctgggtctgaggggtctccggctcccatccccctgcgtgagtcgtctgacgactcagacgactcccaggggctcgcagcggaggtctggacgtacatccgggtcgtcgagcgctccgggctcgagggctcggatgagtcggagtactcctcggatgaggaggactcgtccgaggaggacggtggcggtgacggcgaggacgacgacgacgacgaaggcggtggcggcggtgacggcagcggcaggggcggcagcagcaggggcggcagcaacggcggcaagggtgacgacggcggcagcagcaggtccagtggctag

SEQ ID NO: 36415 - DNA, 477 bp, Zea mays
  Peptide Sequence Number=SeqID_79790
gagtatggaactgagcagggtcaactggagggaacaacgatagtgattaacgcctggcgctcggcaaagattgtatctggcgaagtgtacctagagagggatcttttcgtcgaggacacgatagacctccgggacaacaagttgcaacataataataatgtccaaaggctcctcaagcattgtgcattgccaagcaaccgcgcaaggtccacaagtagccaaaagatggaggcacaggccaaggcaggtgctagaggtgccaggggcgggacgaaggtggccatggtgtactactccaagtacgtcaagacccagaacagccctgccgtgagtattggtatagcacagcagctcgagtctacagccgccgccgtcgtaggagtagcaggaggcggcggcgacgcggacgtcgacgagagggcgtcggctttcatactggcagtccgggagcggttcaggaacgagaacaagtattaa

SEQ ID NO: 36416 - DNA, 216 bp, Zea mays
  Peptide Sequence Number=SeqID_79791
atgaagcctaaggaagaaagaaattctatttgtttggagatagccaagtttttctatgagtgtggtataccattcaatgctgcgaactcaaggaatggggcggtgaacaacggggtcgatgaaggagacgttgccatcgtgaattatggtgccattgatgatgagagggtgtacgatggaattggcgatgatgatggtggcatggagatgaggtaa

SEQ ID NO: 36417 - DNA, 609 bp, Zea mays
  Peptide Sequence Number=SeqID_79792
atggacgccacgcctgctccgtgccgcgccttgtccgtgcgcatggacaaccagcagccacgcctggcttctttctgtcaagcactccaccgcgccctcactcactctcgttctctactctcgtctcgctctcactcgccctcgctctcggttcgtcttccacccgacgtcgttcgccatggccgtcgcgagctagctcgcgtccgcgcctccactgaccaccgtagtccacaaaccaagtcgcaaccacttcgtcgtcaactgcctagacctgtagccctttgctcgagcttggagaatgccttgagcaccaccgtcaatgtcgtcgttcctcggtccccgctggcgtgcgtggaccagatatctccatccatgacccaccgagccaagaccaccgtcgagttcgccttcgtcgatcacacctgtccgccacctcgcctagccaacttcatcgtcgactcagtagggtataagaaaaatagggaggaagtaccagtggggattgtcgaggagctaccaggaattcttgtggaagatggtgaactcgaagctgaagctcaggagtgtcctgatcatcgccccagttccttcgagaaaggcaagccctga

SEQ ID NO: 36418 - DNA, 96 bp, Zea mays
  Peptide Sequence Number=SeqID_79793
atgacgcacaaggagattcgtcattccccagaccttgactacagatcaagggacttcttttatgtcaaaggaggccaatggacagaccgagtctag

SEQ ID NO: 36419 - DNA, 1281 bp, Zea mays
  Peptide Sequence Number=SeqID_79794
atgtccgccgcgccggatgagttcctggcacaggggacctacctcgccgcccccgagcccttctccccctccatcttcctcgacctgcccccgacgccacgccccaacggcgacgacccgacctccgacgacccagcctcctccgacgatctcgtcctccccttcatctcgcggatgctcatggaggaggacatcgacgacaagttcttctaccagttccccgaccaccccgcgctcctcagcgcccagcagccgtacgcacagatcctctccgacgccaccgcctcctcctcctccgactccgccaccgccatcagctcagggaccgtcgggaactccaccctctcgtcctcctcccttgccgccgcatctgccgaacccacctggccctacgacccaatcgaactctcccagctgctgcgctctcctccgtacccggacatgggggtggggctcgatgatttcaccaccgaagaggtcaacgccgtcttcttgccgggacaagacgccgcgttccagccgagtccggcgttctttgttaccggcggtagcggccaacggctgagcgcttccctcaccgcccagaacgttggcggtgttggagctcaacagcagcgtgtttccctcgttgcccaggacgccggtgatagcgtggccatccagaggtcggcgttcttgaatggcgcggaggagacgaagacagaggccaccaccttgcctgctggtgatggtgaccatgccgcgctgttgtcggccttcttgggtgcgcagaatggggaaaacatggacatgctcaacgtggccttcctcaaaggcatggaagaggccaagaagttcttgcccaccaataatagccttcttgtcgaccttgacgacacctatggccaatccttgcctacagacagagacaccaagccgtgcactgcctttgctgctacccaagtgaaggaggaggaggtggtggtggatgatctgcgcatcgccatggatagcgagtctgagaagagtgtgaggagggcaatggccaccggtgatcgccgaagtgcaaccgagatgctgaaacagatcaagcagcactcctctctcagaggggatgccacacagaggttggcctattgttttgcagaaggactggaggtgcgacttgctggcacagggagccaggtgtaccagtccctcatggcaaaacgcacatccgttgtggagttcctcaaggcatacaagctatttttggcggccatcagcctcaataaggtagagaaggtgggcctccagaggtga

SEQ ID NO: 36420 - DNA, 1920 bp, Zea mays
  Peptide Sequence Number=SeqID_79795
atggccgccgcgccggaggccgagggtctcttcggtgaccccgagcccttctccccgtccatcttcctcgacctgcccccgacgccccgccccgatggcaacgacgaagtcccggcctcgtcggacgacctcgtcctccccttcatcacgcggatcctcatggaggaggacatcaacgaccaattcttctaccagttccccgaccaccccgtgctcctccgagcccaggaaccgtacgcgcagatcctctctgagccagctacagctcgcgccgcctcggggtcccccgccaccgtctcgccgtcctccgacgaggaccctgtccagcccctcctgtccccgccgtaccccgatacgggactgcgtgacatcaacgacgacggtgtcggcgccagcccggggttcgagcagagtgatccggggaaattgaggaccgcagccttgggattgcccaccggtgacggtgaccgcgcggcgctggccccggtattcttcaacagcggagacgcggacgcggagatgctcaacaaggcattcctcaagggtatggaggaggccaagaagttcttgcccaccaccagcagcagccttctaatctacccacctggggcagaggaggagttgggcattaatggcaggggccgcaaggacagggacaggctcggttgggatgacttggaggctgagacgttcaggaagagcaagctgatggttcccgagcccgaggaaactgacgagatggtcgatcaaatgatcttcaacggactcgaaatgtgcctcagagaaatgaaggccctgcggatcagtatgggcagcggcgaggctaagaagaacagcaggaagggcaaacagggaaggaggtcgagcgccgacgaggcggtggagctgagcaccttgctcgtccactgcgcacaggctgtggccaccgacaaccggcggagcgcgaccgagctgctgcgacagatcaagcagcagtcgtcacccaagggcgacgccacgcagaggttggcacactgtttcgcagagggactggaggcgcggctggcagggtcggggagccagctctaccggtctctcatggccgagcgaatcccggccatggagtacctcagggcctactggctgtacctggcagcgtgctgcttcaagatgacggcgttcagtttctccaacaagaccatcttgaaggccatcgccgggaggagaaaggttcacatcgtggactacggcatagactacggggttcagtggccaagcttgctcggccgtgtggcgaccatggacatggagggcgggccgccagaggtgaggatcaccggcatcgatctcccccagcccggcttccgcccagccgcgcggatcgacgagaccgggcggcggctcagcgactacgctcgccagatcggcgtgccgttcaagttccgcggcatcacggcgaggtgggacgcggtcggtgccgacgacctcagcatcgaccccgacgaggtgctcatcgtcaacagcatcgtccggttcggaaacctgatggacgagggggccgacatagacagcccgagcgctagagacgtcgtcctcggagccatccgcgaggcacggcctgacgcgttcatcctccacgtcatgaacgtgtcctacggcgccccgttcttcgtgacgcggttccgggaggcgctcttcttctactccgccatgttcgacatgctggacgccacggctccgcgcgacagccggcagcgcttcatggtcgagcgcggattcttcaggcagtgcgccctgaacgtcgtcgcctgcgagggcgtggacagggtggagcgccctgagacgtacaggcagtggcaggcgcggaaccggcgggcggggctcaggcagcttccgctggatccggacaccgtgagggcgttgagggagaaggtgaattga

SEQ ID NO: 36421 - DNA, 1929 bp, Zea mays
  Peptide Sequence Number=SeqID_79796
atggccgccgcgccgctgccatcgcagaacctggagctggagctggacttgtttcacctccatcccgatccaccctctccttccgtcttcctcgacctcccgcccacgcctccgcccacctacctggacgacgacgacatggtgctcccctacatctcgcgcttgctcatggaggaggaggacgcccacacccacagcttcttctaccagtaccccgaccacccagcgttgctcaacgcgcagcagcccttcgccgacatcctagctgacatcgctgctgctgcctcgccatcgtcctcctccgtcgacaccactgacggcgcccatggtgatgctcctctgcaggctcaggctgaccactcgcccaacggcagggacgcagatgcagacatggccacctccgccttcctcaagggcatgcaggaggccaccaggttcttgccattgccaaccagcgacgctactctcctccacaactccaggggccgcaagaacaagcatgctgtagcccgggacgacgagccggagtcgggcagagcaaccaagctcatgctgccggcgcacacgacagacgacgccgacgcccgccagatgttccacgaactgatgacccacgagcgcgacgacatctgcatgaagggcgtgcagctgcacggcactgccagcacccagaagaaggccacgcggcggcggcggcgccggagcccggctgccgccgccgacgcggtggacctgcacgctctgctgctccggtgcgcgcaggccgtggccacagacgaccgtgcggccgcgaaggacctgctcgcgcaggtccggcggcactcctcgcccacgggcgacgctgcgcagaggctggcgcactgcttcgccgacggcctggaggcgcgcctcgccggcacgggcagccgcttgtaccagtcgctcatgctccgccgcacctccgtcgccgacttcctcagggcgtaccgcctctacatgaccacctgctgctgcaagagggtggcgttcgccttcgccaacaagaccatccacgacgctttcgcgctcgccggcaggcgccgccggctgcacatcgtcgactacggcctcggctacggcttccagtggcccgggctgctgcgcggcctcgccgccagggagggcggaccgccggagctggtcaggatcaccggcattgacctgccgcagcctggctttcgccccgcacagcagatcgaggacaccgggcgccgcctcagcgattgcgcacgccagctgggcgtgccgttcgagttccggggcatcgcggccaagcgagaggcggtgtctccagaggacctgggcatcgacccagctgccgaggtgctcgtcgtgatcagcctctgccatttcaggctgctcacggacgagatcgaggtcgagatcagctcctccgccgccgccgccgggcctagtgggcgtcgtcgtcccaccgccagggaccaggtgctctgcaacatccgccggatgcggcctgacgtgttcatccacggcgtcgtcagtggcggctacggcacgacctacttcccgacgcggttcagggaggcgatgttccactactcggcgcagttcgacctgctggacgccaccgtgcctcgggacagcccggagaggctgctgctggagagggacatcttcggccgcgccgccatgaacgtcatcgcgtgtgagggcgccgaccgagtggagcgccccgagacttaccggcagtggcaggcgcggaaccgtcgggcggggctcaagcagctccagctgcaggctgacgtcgtgaaggtggtgagggacaaggtgaaggacaagtaccatagggacttcggcatcgacgaggaccaggggtggttgctacacacgtggaagggacgtgttctctatggcctatccacatgggttgcacaacatgctgacccatga

SEQ ID NO: 36422 - DNA, 243 bp, Zea mays
  Peptide Sequence Number=SeqID_79797
atggctcggacgcgtagctcggcggtggttacgacaggggcggggacagggaaggaggcgagaccgtcgagctcagcatcgtcgagagctccaacgacttcgacgagctgtcatgcggctatacgttctggtgccatggctaccaccaccagaggcggacgtctcctacgctttcacgacgatggctctagagcttccgatcaagcgtacgagagaatgaaagaagttggcgtgcgtgattga

SEQ ID NO: 36423 - DNA, 279 bp, Zea mays
  Peptide Sequence Number=SeqID_79798
atggcgcgcgtccccggcccggtcccctggcgtggccgtggtgagcgtcacgccgcgagattcgtcgtgccgctattgtcgtcgctgcacagcagcgtctacatcgctctagtcgtcgccaaggggaactggggtgtagttcgcttcgtcgtcgtgccgttaatggggctcagtgtatgcggctcgctctgccaagatgatgatgaggatgatggttatgattatgcttatggtaatggtaaagaaggaggcgtcgaggtggatctccaggagttctag

SEQ ID NO: 36424 - DNA, 417 bp, Zea mays
  Peptide Sequence Number=SeqID_79799
atgcagtcggcatgcaaccgcgccaagtgggcgcaccctttcggctccaacgcgcccagcatggaggcccaggcccacacgtcatgcaactggcgcgtcggttgctacgtgcgagcaactgcaccgcccctcgcgccgctaccgcgcctcctcgactgcggaaccagtaccgcgactcgaggcaaccctgcggatcgagaaaggggataccccgaaagggatccttccccgcgaaggaaacgggccccgagcccccctactgatcagaggttcgaaggctggcccctcggaggggttcaacagccgcctcagagcgctcaggctccgcgcccactactggtcagaggttcgaaggccggcccctcagaagggttcaacggccgcctcaggccactcgggctccgtgcccactactga

SEQ ID NO: 36425 - DNA, 108 bp, Zea mays
  Peptide Sequence Number=SeqID_79800
atgaaggggattgggcccctaacaccctgccctctgcccctcccggaggtcgtcatcgccaagaaggatcagaagcggaaacggggcgccatgctcgcgttcagctga

SEQ ID NO: 36426 - DNA, 555 bp, Zea mays
  Peptide Sequence Number=SeqID_79801
atgcacccattcaatgagtcctccaagcagtactcaaatcagtatgcattcaggcctgatcagtggcatggtgtgggtggaaacctggacggcattacaacattcactaacatcggtatagatattggacaggctcagctgaacctgaatcagatattgtgcaggcttgcagaagcgagaaaagacttgacagagaacctgaagcagctacagtgcaggacactaatttttgttggtgagaattcccagttccatgctgaagttgtgcacatgactgcaaagcttgataggcgatatagcgctcttgtggagccctgcctctacatggacttcggcctcgcttccgctgtcaccacgctctggacctgcaccgatgtcacgcacctcatgcacgtgctcctgcagttccgcctcgcctggtgcgacaagctaatctgttatgcccgcgccgtcgccgcgcactacgtctgctccgtcaagggcctctgctttgacctcttcatcattaggggtggaaacagagctttcaatgcatgctggaggtgcacgatgtga

SEQ ID NO: 36427 - DNA, 318 bp, Zea mays
  Peptide Sequence Number=SeqID_79802
atggagtgtcctggcaatccacatgtcgcgcatggcggtcgcacctccacctccacgccggagcacgcgcccaccggcacgcccctcacccaactttcatccccaaccatcccatctgtcgattccaccccatccgtgcaggccagccacgtgccgtacaaccaccccgccaagcgcaagccccccccgccccgccgcctagaagaaggaggacaagccccgccgccgcctggaaggaggaggacaagccccgccgccgccaccctcgcattgccagcccccgccctggcgacttgtccggccaatgtgggtgtttag

SEQ ID NO: 36428 - DNA, 156 bp, Zea mays
  Peptide Sequence Number=SeqID_79803
atggtgctggttgagttcttcgcgtcgtggtgcaggcactacaagcagctggcgcctacccagaaaaaagttggcactgatggcgtgcttaagggtgtcaccacggtcgcaacgctcgatgctgatgcgcaccaggtgctcgcgcaagaatggtaa

SEQ ID NO: 36429 - DNA, 1278 bp, Zea mays
  Peptide Sequence Number=SeqID_79804
atggacgacagcagtcttctctactgtgacgaagaccctctcgtcgtctctactacgccgcctccgcagctggcgtcaaatagctatacgctactagcaccccagcagcaggcggcgtcagatgatgcggaggaggaagatcatcatctgaaggagcttctcgtggaccacatggccaagcagcggtcctatgcgccgacctgccgagaaggctacctggagcatctgctgccgaggaggacgacaacgcagccggaagagacgatcaccatccctggccctggcagtgtgtccgccgctcgctccggaggagtgcactacatcatctatgcgtttggtaggctgggactgacggtggcgacggtgttcaatgcagtcaactacctggaccgattcctctccatcaactgccacctgcggtgggaggcgtggatggttgaattggtgagcgtggcgtgcctgtccatcgcctgcaagctggatgaggtcaacatcccatcactccaccatctccagatggaagaggtgatgagccactcgttcctgccggcgacggtccgagacatggagctgacgctgctcaaggcgctccaatggcgcctcgcctgcgtcacgccctactctttcctccttccccttcttaatactcctcctcacacagcagcttggactagccgctgcactcgtctcctcatccgctccctcgcagagcccttgttcatccagtttgatgcctccgttatagcctcctctgctcttcggtgtgtggcgctgcaggatcatcgacaccatcatcacaacactactactactgattatggtagctgcatcatcagccgccttgttcgtcctgcaactgataccttcaacgccttgtgtgacggagcagatgacgacgacgacgacgagtgtttcatgatgatgaaaacactctgcgacgacgacgcaagctgcagcagctcggcggatcagcttcgaattggtggaacacccatcgtcaccagctctacatgcatgagcagcgatgagcagctgcggaggagccccagcgtgtcagtgattattcgtcgtcgttcctgcttgggattgaaaacagcaggcggtggcggcagcagacgaatcaacagcagcaggtcagctgttattagccgccgtcgtcgccgcttgtttggttcatcagcatcagcacaagcacaagcaccagcacctcaagccgaaggcaaagactctgacgatgatactacaaacgtacgagatgaagatatctcacacacatag

SEQ ID NO: 36430 - DNA, 489 bp, Zea mays
  Peptide Sequence Number=SeqID_79805
gccaaccccaggagacacgtgctccaaaaacatcgccaaaatgaggccagaagtgtcatccatgacatcctcaatggatcatacagcggggcttctttgtgtcaaggttccgtgaggccctcaaatacttgctgcaatgttcgacgcgatggacaccattatgccgcaggaaaccagaataggttgctggctgagaagtggttagcaatgtgtgtcatgaacatcgtcgcgtgtgagggtgtcgaccgggtgtcgcggcctcacagctacaagcagtggcaggtgagaagcaaacgagcagggctgaggcagcttccattggatccgaacattgttcagatgtccaaagacaaggtaaaagaggaataccacaaatacatagtgatcaatgaggatcacgagtggctcctcactggatggaaagggcgagtgctctctgccttctccacgtggacggcagatgatgttagatctggcttgagtgaatga

SEQ ID NO: 36431 - DNA, 369 bp, Zea mays
  Peptide Sequence Number=SeqID_79806
atggctgccgctgccccccatgcatactcctccctcgtgcctgtttcggctgcgcggcctctctccggaagcacaggaaggttccggcatggcgactccactgtgttgctgaagacgaaggcgtacaaacgatatggtgttgtaaagggttccatcttgactgcttggcgcctttgccgttgtaatcctcttggtggatatgggtatgatcctccaaaatggtttggcgaggaagatgttctggtcactgtcagaaacaatgcacaactgtatgtggtagtttcaagggaaagcctccccatcgactatactgccaaggaacttgattggatttctgagatttctatgctgaagatacataaatggtaa

SEQ ID NO: 36432 - DNA, 225 bp, Zea mays
  Peptide Sequence Number=SeqID_79807
atggggcagagggaggagcttggccgcgggaggatgaacgccggcggatgcagcaacgatggaagcgggcggcgcgcgcggcgcaaggccacatcaactcagaaatctcgatcgttggatcgtcaaccgataaatcttcatcattggatggaggctcaacaatcatatgacgatactccagagtcttctggtatcggcagcccatggaagagtaaaagccaataa

SEQ ID NO: 36433 - DNA, 138 bp, Zea mays
  Peptide Sequence Number=SeqID_79808
atggagccctcaaacctgcagcaaacacacctcacgttcgggaagtccaagatctgtagctctagtgctccaaatggattcaaatttttacagaagactcttgttgtgatgcttggtgactgtttgttatttttgtag

SEQ ID NO: 36434 - DNA, 294 bp, Zea mays
  Peptide Sequence Number=SeqID_79809
atggtcgtggcgcgggtgggagctgagggtttaggatttttagggtgctctccatggacagcagagcgcatggatggcgcggccgtgcggcacagaagttcatcagagtcaagttccagcttatcgtcagaatcttccagcagcgatgatgaggataggggttcaaggaagtccagatcacgatctagttcgaagagaacaaagcaggaaaagaagcaccgatcaaggtccaagcacagagacagtgaaagtgaggaaggtccagttcgcctctctaaattcttcgggaagtaa

SEQ ID NO: 36435 - DNA, 141 bp, Zea mays
  Peptide Sequence Number=SeqID_79810
atggtgccgccgcgagttcgccggtgtgcccagccagagatgagaggagagggcgtggacgagcaagccactgaggatccaggggttcagcaggtggagagtgctgaacgggagcttgttgaaggcaagttgtgtccttga

SEQ ID NO: 36436 - DNA, 648 bp, Zea mays
  Peptide Sequence Number=SeqID_79811
atggccatgactttgactggcgacatgaaccggtggatccctcggtggtgtacgcaagtggtggtggaaaagcgcatggacggagaaacaattttggagaagttggctgtatacagccaaaatgctgctcggtctgggtgcaccggactgtccggtggtgcaccggacagtatcctgtggtgcaccggacagtgtccggtgcgccaggctggcggctgtcaactggctgctctcgagacttcgacggcggtgtacggctataaatcaccggactgtccggtgagccaacagtcggcccggccaacgatcggccgcgtaatccgcgcgcgacgcgtggtagagccaacggtcagaaggggcaccggactgtccggtgcgccaacggctctgaatctccaacggtcggcttcgccaaagaaggaaagaaatctgcaccggactgtgtccggtggtgcaccggactgtctggtgcgccaggcgacagaaggcaaaaattgccttcctggaatgctctcaatggctcctagctgccttggggctataaaagggacccctaggcgcatggaggagaataccaagcattctctaagcattcctaagcaccaagactccaattccgcgcattcgattctttgtgatagcaactag

SEQ ID NO: 36437 - DNA, 321 bp, Zea mays
  Peptide Sequence Number=SeqID_79812
atggggacgtattcttggctaagctgccgatgcccaccccgttggcagtccctggccttcgcagctaggtcatcgacatcggcaccgcctgcaccagccgtccaagcacctgcacccgaaggtgacgaccccgacgactctggggacgacgatgacgaggatgacgacgacgatgaaggaggagacgaacacgtcaaccaggaagctaactacgcccagcaggactacttcatgtggtttggtcctgttgtcgaacattatacatcaatgtttgagacggggcacttccccaacctactgcaagaagtgctcacgcgctag

SEQ ID NO: 36438 - DNA, 729 bp, Zea mays
  Peptide Sequence Number=SeqID_79813
atggaaagctcttgggtcattaggacatcatactgctcagaggaggaaggctttcctcaccttctacggagttgcggactgcgcaaggggatccgcaagaagcccgaatatgtctggaaggaataccgcgaaaatggaatagagaaatgctctatggcagtctacctgggagaaagccgaagctacccaaaccaccccccttccaacaacaaaaatacccccacctggaggaaaagacttcaggctctgtcagggagagaccccatcgaggatgaccccaccattgtctacatggccggatacctccacaccctcgatacccactacgatgatctctcctcccactgcacccacctaaactcccgggtggaaagcctagagcagcaagtcaaagagcttaagaaggagaaggcatctctccaagagtgtctcgacaaagcggaaggcgaggaggccaacacccatgaatcctatcgaaccttaaagatggactatgataagaagcttaagaagctcgcccccacaaagaaaatccggaagaaaaccacgagccaaggatgccagacggaaaggaggaagaaagctcccccagcaccagctcccaccaggatggagaatttgtccgatatcgaggacatatccctcgctagccttgatgatcttctcaaggaatttggggacactctagaaaaagaattcggtagtacctcagggaacgctcgcgtgtag

SEQ ID NO: 36439 - DNA, 432 bp, Zea mays
  Peptide Sequence Number=SeqID_79814
atgtccaacagcctctcccccgttatgatcttgcccctactcatccccgtcttcgtccgaagccgctaccgcctcctaaggagccaccccatcccttatgatgaggacatcctccactattacccgttggcaaagacgcaattggcccaattggcccaattccccacccccgaggtccatcaaccattgatccccgagacaaaccaccaaccaccgagatgccgcaagttgcccctcctcaagatcgagatggatgccaccctgccgctcaagaaggccaagacaaggacaactgctgctctggcggatgaggttcgaacgccgaagatgcccggaaagaagccggcgccagccgtagagcagatcccgacgccggaggagacactgaggatgcgcggctatagcggaactgtccattttattccagcttaa

SEQ ID NO: 36440 - DNA, 918 bp, Zea mays
  Peptide Sequence Number=SeqID_79815
atgtatggtttacaggtggtgatgaggatgatggttttgattatacttatggtactgatggctcgtcttagacacactgcacggaagtcagtcattcctttcttgccttctcgtctcgcggagcgtccgcttcgccgtccggtgactggtcagtctagccacttggagaggctgcaccaccgcctgcaccaggagcaggagcatcaacgacaggagctggagcagcaagactcttctttcttgcttcagcaggagatagagtttgtgaggagttgctcccctgtgctcccgctggaggcgccccctgcaccaccacttagcgccccagccgctggagtagctgctgcaggagacccagacgatggaggtggcgacagcagctcgagccacatcactgacctttcagaggagcaggagctggaaggatgggttgctcgactcatcactcgcgacgccgctcgcgagtgtcacttccatgacgctctcgacaccctgctgcgccaggcagtcgaccgacgcacttgcatagtcgaggggtttacccggaccgctgggaggcgacctgcttggtgcaccgtccggagaacagtctccagggtgcggagcataggaggcgtggttgtctcacctgttggtgaggacaatcctaggttgagcagcacaatcaacctagccgccgtgctaaacacggaactggaccatgcattagatgagctgagtagggctcgtgctgagatcacccagttgcgggatgagcgcgtggagcatcgtcacctggaggatggctcccccgctcccgtcggtactcagcacccgtaccgctcacctcagcatggacaccaggcctatggtaaccccgactataggaccaagataaatttagaaccatatatcgtcagcgtcagatcttgtaattaa

SEQ ID NO: 36441 - DNA, 462 bp, Zea mays
  Peptide Sequence Number=SeqID_79816
atggccttgctctccataatggaaacatgctctgcttccaccctgaactggtgctgcctgactgctctggtgctgaaatgtggggaaggtatgattcatcagctgatactgcagagggtcgaccaagcctctcaagaaacgatactaccgcttggcgtcggtgttgacaactttaggagcatagcgggacagctgcaaaaacttgtctcgcaagcttgtctctgggcatctgaggcatctaaggctgcggtggtggctgctgctgctactgctgaatggtggccagagtctgaccgatggcttgaactacctgagtctgcattaagaacatctgctcgatggtcatcgggggcgggggtggcagctgctgacgggttcctcatcctgtggggctacctgctcctgaatgcaaccacacatcagaacggatcttgcaacttgcagcataagaaaagagtatag

SEQ ID NO: 36442 - DNA, 387 bp, Zea mays
  Peptide Sequence Number=SeqID_79817
atgtggccagagaagatgatatactccaaggcatcaacagtgggtccggacccccatgggaaagtgtcagacccctgtatatgcgtaccggacctccgggtaaggtccaggacccccacgggcgtgaaccggacccctgggatgagccccgatgctgccacgtggcctactgcccgtgatgtaagccagtgggcggagcctgacgtaaggcctctgggccgcgcggcctctgcatttattgcggataaggtgcgccgcctgtccattccactggcaggcgatgtgccgcatcagcatttattgagccctgttgtaacaccccaggtgttgccatggctggagcacaccttggcactcaagactatgatcacatgtggaagaacttaa

SEQ ID NO: 36443 - DNA, 708 bp, Zea mays
  Peptide Sequence Number=SeqID_79818
atgcgtcgtctcccctacgccggccgcctcgcactgctccctctcctccccctcccccacccgtcccgcgtgtcaccagagctacaccatgcccctcccacacctgtaacaatcaatgaacagatccgggttatgggccacaacacgccaccaccggtgataccaacaccaggaggagcttctggagggggagggagctactacataatagactccaaaccagataaacgacttcgtaaacgactttttcgctctggagtggacccgggggatatctatcccccacaagcccccgatctttgggttgatttagagaatgataatccatggggtgcaccggaggtgcacccaatgggtgtagcccccgaccttcaaatggattttttaaggataatccattcgaaggtcttccttttgcttgtaaaaattgacgtgaagccattcgcattatgctttggaggtcagcattatgtcatcaaaattttgctgcagaggtcagcatatattttgtctttagcagccgagtttgcaatccctccatatcttgctaggtatttactgcgtgccctgcacgaatgtgaccgttttgaaaaatatactgataattcctgggcgtcccccccaatgggtgtgggcaagggacgacttgatgggtgggagtgcttattgaatgctttgcgactgttcagtgaccgcggttggaagtga

SEQ ID NO: 36444 - DNA, 477 bp, Zea mays
  Peptide Sequence Number=SeqID_79819
atgggcaagggtaccaagcgcaagcgcgagccgactcctccgtcggatgatttcggtgactcggaatactcggaggaggagttctcctccgagtccgaggggtctccggctcccgtctctcccccggcgtcgtctgatgattcagacgactcccaggggattgccgcggaggtctggacgtacatccgggccgtcgagcgctccgggctcgagggctcggatgagtctgagttctcctcggacgaggactcggacggcggcgaggacgaagatgacgacgacggcgacgacgacgacggtggcgacggcgacggtgacggcagcaacggcggcggggggcagcggcggcaagggcagcaccagaggcgacagcagtacgggcagcaccagaggcggcagcagtacgggcagcaccagaggcggcggaggcaagggcagcagcagcaaggccagtggctaaacgccactggtctttag

SEQ ID NO: 36445 - DNA, 369 bp, Zea mays
  Peptide Sequence Number=SeqID_79820
atgggccgggtcaagcgggccggcccgaggcacggcccggccatgagggacctggtgccggcgatggatcgtcgatacgatccgacctccattaaccatgaactggtgttgatgggtcaagtcccagacgatgtggacgacgtgcacgatggtctggaggatctctttggttccactgcccctacccctacccctaccatcaacctcggcgacgacaatgtcgctgccgagggcgaggctcccccagatggcagtggtgctgctactgcgactgcctccactacggcaagcacgggtaggaagagaaaatgcacatccgatgtctgggaggacatggataagattttcgccactgaaaatggagtggag

SEQ ID NO: 36446 - DNA, 1167 bp, Zea mays
  Peptide Sequence Number=SeqID_79821
atggctgaaaggtaccaactcccacggagttgcgtccctccaacgatgaggcgaaaagacggtggaccaacgggcgaaagaggcgggcagccatgcaggcggcatgcaaccgcgccaagtggacgcgcttctccgactcccgacacgccagcatggaggcccaagcccacgcgtcacgcgaccggcgcgccggatgctgcatgcgagcaactgcaccaccacttgcgccaccaccacgcctcctcgattgcggaaccaataccgcgactcgaggcgacccggcgcatgacccagcagcgccagcctgacgcggcggtcaatgcggccaaaagtgggccggcagtaatgacggtggcaggcgggcgggagcagcggtcacgtcgtcagccaagctcacgtcccatccgggggcagcaagagaaccccctctcacggcgtgaagacaacgcgcccgtgatccgttcctcgaacggctcgcgcacgcgcaacggccgccccgccaaccgctcgccccgtcgcattaactccgcgggaccgggaaagggggataccccgaaaaggatccttccccgtgaaggaaccaggctccgagcctccttactgatcagaggttcgaaggctggccccccgaagggtttcaacagccgcctcagatcgcgtgggccctacacccactactggtcagaggttcgaaggccggccccccgaagggttccacggtcgcctcaggctacccgggctccgcgctcattactgatcaggggttcgaaggctggcccccgaagggttcacagccgcctcagacgccgagcgagggatgaccaggggtacgttcgatacataaccgaggctcgggctgcgctcccgagctcaccggagacaccatgttcggcgcccatcgagggtaacatggcgctttcccccctcctccttgcggaaaggcgacgcaggggcgtatgtaaaaaagccgagtctgtccctgatcgccctctcgccctgtgcggaggctcgggggctgctctcgcaaacccggctccggccgaaccgttgacagcgtcaacataccagcccgagaacttgggccctgaccgtacacccgggctacgaccagttcacatgagggaacaaccagaccagccaaagcattacgcaagtgagagcacctag

SEQ ID NO: 36447 - DNA, 636 bp, Zea mays
  Peptide Sequence Number=SeqID_79822
atggtgacctccagcttgatggtgggggaaagcgagccggactgcggcctctgcccctccctcagcctcaaggattttcatcaccagggctggggaggggactgcaccatgtctggctctcggacgcgagtggcttcggagccgctcgcggcgccggcgtctgccacggcagctagaagaggttcttccgccggcgagatagccaaggccggccacggaccgacctccaactctacgaccttctgcccgtccttgcctcacaagtttgggcatgggcgggggcctcctggcagcagcatccgccctgaggtcagtgctgccgctgttcggccccccggagcagaagtcgtcgtcgtcgccgctgctggagcgggtgacggcgcgccattcgtcggtcttctgttgctccgcaggcccacccctaccgagtggggttactcgcctgttgattatctgaaccgcttcaccaagcatgagtcgccccgtgtcaaggtgacgagtgagagtgaggattcctggaccgcgtcgccgtccgaggtcaagtcggacctcgctgaaggtgtcgtcgatgctgagggtgctactgcccccttccagcgtcaagacccgagcctgcaggatcagagtgtcttgtag

SEQ ID NO: 36448 - DNA, 315 bp, Zea mays
  Peptide Sequence Number=SeqID_79823
atgttgatgcagcagatcacaagatatacaatcactgaccgcatgttggttgcccacgtcatctcaccttggaccactcaccactggagctgcaacgcaccgctcaaggccatgaaggcgctcaaggctgccctgcaggtggcctcggtcgccttcgtcgggttccttgccgtcgccaatggaacggtcctcacgtcgactgttcagagggccacggtcgtgtcgacggccgtgctgtgcttcgctgcctcccgctggcttgccaacttcatccaggacttctacttccaatactacattcacgcctacaagtga

SEQ ID NO: 36449 - DNA, 1569 bp, Zea mays
  Peptide Sequence Number=SeqID_79824
atgccctcaggagaagatgagcaggagcccatgctcgaacgcctcccgctgtgcggccgtgggtggagcagcgccgtcgcggacggggtggcaggggccggcgacgttgctgaggccagagacgaagacggggcaacgcccgtcgactgttccaaggccttgtcgagtgtggaatggaatactgtcgagggtgagcgtgagccgggcgctgcatccaccttactccctccagctctcagctctcccttcgccgccgccgggtactcggcgctccatccaggcactccagccacccccaccccttcctccgccgccgggtactcggcgctccatccaggcgtccccgccccgcggccgcctgctactcgttcgggcgctccatccagcgttctccctccagctccagtctccggcgcgatgaagatcgcggtggaggggtgcatgcatggggagctggacatagtctatgacacgctgcgaaggctcgaggaggccgagggcgtcaagattgacctcctcctctgctgcggcgatttccaggctgttaggaatgagaacgatttacagtgtgttagcgttccacaaaagtatcgtaccatgaacacattttggaagtactactcaggagaagcagttgctccgtacccaaccatctttattggtggaaaccacgaagcatccaattatctgtgggaattgtactatggaggatgggcagcacctaacatatactttttggggtttgctggacactatgagaggcctccatacaataaagatactatacggtctgtgtaccatgtaaggcattatgatgttctcaagctcatgcatttgaaggagccgctagatgtattcttgtcacatgattggcctctgggcattaccgagtatggaaactggcagaagctcattagtgtgaagaagaactttgaagatgaggttaacaatagaacactaggcagcaaacctgcagctgaattactgaacaagctaaaaccaccatactggttttcggcgcaccttcactgtaagtttcctgctgttatccagcatggcaagaatggacctacaacgaagtttcttgcacttgataagtgcattcctgggcgcaattttttgcaggttatagacattccatccaatccaggaccatatgaaatccagtatgatgaagaatggcttgcaataacacgaaaattcaacagtgttttccctttagcacggacacagtttactatgcgggatgagcagctcgacactcaagaagaccggcaatgggtcaggagcaagttgaatactagaggagctaagccttttgattttgttcagactgcaccatctttcaatccttccagtacaacatctaaacagtccataacagtttgctgcaggaatccacaaactgagtcttttcttcagcttctggaactcccatatctgctggactcatctaaatctgagatgtttggtagaaatgagtcaacttctcagacaggaaacacacttgataatgaagatatagagctaccagatgaagatgaggatgctttagaagatgacgagtga

SEQ ID NO: 36450 - DNA, 1371 bp, Zea mays
  Peptide Sequence Number=SeqID_79825
atggttcttgctgatcgtggtgttgtctgcattgatgaatttgataaaatgaatgatcaagatcgagttgctattcatgaagttatggaacagcaaactgtaaccattgcaaaggcaggaatacatgcctcactaaatgcaagatgtagtgtaattgctgcagcaaatccaatatatggaacttatgatcgttcattgacaccaacaaagaatatcgggcttccggattcactgctttcctgttttgatttactttttattgttcttgatcaaatggaccctgagattgatcggcaaatctcagaacaagttgcacgaatgcatagatattgcactgacgatggaggagcaaggtctcttgataaagagggatatgctgaagaagatgatggtgatgctaatgcagccatttttgtcaagtatgatagaatgctccatggtcaggatagaagaagaggaaagaaatccaagcaggacaggctaactgtcaaatttctgaagaaatatattcattatgcgaagaaccttattcaaccaaggctcactgatgaggtaaccttttccaatcctggatacagtcatacagagcaatacaaagttgtggaggtattagtgtttatggaagagctacaggtgtcatgtgatgcagacgctcaagaagaaggtgccttctcaaggtcaaagaaggtgccccatttcttctccttgtttttgcttcgacacttatcgcaggaggccgatataggtctttcaatgggcatttcagggacagaagttgctaaagaaagctctgacattataatcttggatgatgacttcacgtcagttgtcaaggttgttcgttggggacgatctgtctatggtaatatccagaaattcattgagttccagctcaccgtcaatgttgctgcacttgtcattaatgtggttgctgctgtgtcctctggtgatgtgcccctaaatgttgttgaggttcagacaattttcatccttttttgtgcaatttactcgaatgctgccattgcttcttcattcaagaaggaacctcttgttacaaatatcatctggagaaacttgtttgttcaggccctttaccaagtagcaattcttctgcttttcaattttgatggagtaaggattctgcgtctgcagaatgaaagccgatctgatgctgagaagataaaaaatactttcatcttcaacacatttgtattttgccaggtggggcagcaggctgctgtgctcttgggagagcagcccgtctaccacgccatacagcgtaccattggctgtagggccgtcatgccctcagtggcgctgcccggcaaggagggtgggtatttgggggagtatcggcgaagtattacttag

SEQ ID NO: 36451 - DNA, 765 bp, Zea mays
  Peptide Sequence Number=SeqID_79826
atgcctctgggctacgtcgcctccgcatttactgaggataagacgcgtcgcctgtccattccactggcaggcggtgtgccgcctctgtatttattgagacctgtcattccgctggcagacagcgacctgcccattccgcaggcgacaggcggtgtgcttgtccattccactggcaggcggcacacccatactgccgcgtgcactacgctcatcattactcgcacatctggaggccccctagctacggtggtcgcagtcacagagggtcagctccgccacgctgaagccaacaccagcacacgcatcgcagaacacgaatcgaccacccaggtgttcgagctctggcatccccgcatcgactccggaaccgaccatctccacccctccatggtccaggttcgagcggcggtcaacaccagggacctacggtggtcgcctgatccgcacggcggtggctccagccatccaggcatattcggctctgtgagcgagtccggcctcgcctgcccggagccgctcgccgttgatgctgcggtgggcacgggcacgaccaccaatgctgctcgtgtcaccgacatccgccttgacaacctcaccaccgcgctcctggggcccaacctcaactccgctgctaccctgactcacctttgtgagttgcgtgccgagctcagcttatcctccccagcgtcctatctcctgcagttggtgacccgtgaggaggagggtgcggttctcaggctagcaccttgcccaccaagtgtttga

SEQ ID NO: 36452 - DNA, 921 bp, Zea mays
  Peptide Sequence Number=SeqID_79827
atggcctcctccgtctccggcaactacccgcgtttcaaggtgcgcgtctctcttcgcatcagtctcctagagctacgaaacctcgtcaaagttagccgctccattaaggtcctttgcttgctcgtgcgtcccctgaccctgaaggtcatactcggatcgtcgtcgccggcacgccgcgagatcttggccgacatgggatacgagttcaccgtcatggttggttggctatactggaaccctagcgccgacatagacgagagggcgatccggagggaggaaccagagcagctggtcaaggccttggctgaagccaaggctgaggccatcaagcagaagcttcagggcgactctgctccggtcacagacggagaccaacctgcccgtctgctgatcacctcagaccaggtaggtggtaggttcagcagcctcgagtggatttggttttgtactcctgtggaatttgacaccgtctgtgaccattttcaattgatcctgagcgccggtaaaggttatgggtactcgggcgatcgagcgttcgcagttaacttcgttcttgtcaccgacctgagcaccgggactacaagaggaggatgggacgtacctgagatcaggtttcagcacataccggacgagttcatcgaccaagtgggcgacatgacctgcgtggccggcgggcttaagctgacacatccgtcagtacagccattcgtcaaagaactggtgggcacggtggatagcgtccgaggtcttccgagggagctcaccgagaagttgattcgagaatcgctgcaaggaaaagaagcgagagggcaggtgcctccggagcccttgccgttcgagaccttgcacgagggatcggcaattaggtttttggggagcgtctacgcgactgcccaaaacgtcttcttcctggtgatatga

SEQ ID NO: 36453 - DNA, 240 bp, Zea mays
  Peptide Sequence Number=SeqID_79828
atggcgcaccggacagtccggtgcgccaccggtgcgccaacggtgcgccaccggtgcgccaacggtcacttccaacggctagttctgacagctagccgttggactcatggcgcaccggacagtgaacagtccactgtccggtgcacaccggacagtccgcctggtcccacctggcagagggtgcaccggacagtccggtgcacaccggacagtccggtgccccaaagccagaaaccctaa

SEQ ID NO: 36454 - DNA, 1575 bp, Zea mays
  Peptide Sequence Number=SeqID_79829
agagacccagcagcaggagttcttttcagcactcggattcaggagtcattcttcagggctcagatgtctgctcagattgcgctacgagttcaccgcctattggatcttccagcgttcttgctagcagccggtgctgagtctgaggcgcatctcacctatttgccaggccttctgtcctttctgacgatcagcggcagatatgttgaggagtgggtccgcgtcttctatgcctctgtttggattgacccggatcatcattggatgaggttccgctttgagcgcgaggatgtcacgatcactgccagtcagatcagacagctttttggattccctgagtcgactactcgcctccacagtctctgctacggcacttcagatcctccacgtcgccctcacggcggtgtggctccagggacagctcacgtcgcggctctgttccgcccgcctttttcagatgggtcgcgacgttctccagcagacttcactactgcagcgaagtacttatatgagctcgtcagacggacactcctgcctaggatgggatacagggaggctaccactcacattcagctttggctccttggtgccctggtatcccattctgagtttgatgttgttgactttctgatctgtgagattgaggatactgttctggatgggattcgtgctcgacggcagctaccgtatgctcactacttatgccacatctttgcgcagctgatccagccacctcgttttcagaacacccttgaggcctcacgccttgtgtttggatcttaccgtcctgctcctgagattccagtgccagcttatgctcctgtgtttgacactcaggccgaggatgctgcacttcgacagtttgacacccagggtgcagctgctgatgatgatgattttggggttcctcctccgcctcctatgcctccacgctcacatgatcatgaggctgggagttcccgtgctgcccctgctcctcctccagctttggaccctgctcttgcttcgattcttcagactctcacccagcagcagcagactctcacccagcagcagcagactctcacccagcagcaggctctcctggcagccgagcaggctcgtttatctgataggatgctctcgatgtttcagagcatgcaggacaggcaggatgcacttcagcagcagcttattcaggatagggcagagaatagggcattcatggccctcatgcttcagcattctggtatctcagctcctccggttcagtctgctccgccttcttcgcttcacgctccagtggtgccttcgatcttgtctgcaccccctgctgttacctctccgctccggccggtcaccttggcgttcacttctccggttctcagctctatctgcccgcagccgcccgtgccaccagcatctgctgttaccactaccgctgtggcagtatctgtgaccgcttctgttccggtagctcctgcagcgctgcctgcgtccgagtcagtaccagctccagcttctaccgcagatcctggatccgagactgactctgaccctccgtcggcgtttgctctgctacctcgacctcgaccggat

SEQ ID NO: 36455 - DNA, 1824 bp, Zea mays
  Peptide Sequence Number=SeqID_79830
atgggatgtgctgcttccaggttagaagatgaggaggctgtcaagatgtgccgggacagaagggacttgatcaagcaggcactggagcagcacaaccgatttgcatcttcccacattgcttacattgagtccctgaagcgtgtttcggtggctctccaacggtttgttgccggagatgatcaccatgagctaatcttcgatacattcatctcccctatcaagcaacagaagccagagatgcttggtctgccttatggttcatatgagaagagaactattcatgtttcaaggtacctgaggtcagggcctaacccatcagtgtccattgaggagcacccacgtccggtggaaacagtccgtgtcgagtcaaattaccctatggacaacgacagtggcatggtggatagattcctaccaacacactcttcaccagtgagatcgtcttcatactacccgccaccttataacaggccaagctaccaacctccattggaccaggaaacagttagaaattcttcctattgcatgccttatgacaggccaagctatgcacctccatcaccccaggagacaatgaggacttcttattatgcatcttatgacaggccaagctacccaccaccatcaccccaggagccactgagaaattcatatcacgtgccatatgacaggccaagctacccacctccgtcaccccaggagcaggaatcatcaccgtgggacttcttctggaacccattctcatcactggacagctttacatatccccgccctcggagtagctatgacaatgtggtcactgatgatgaactcgtgaggttacaacgggtacgagaggaggaaggaatcccagaacttgaagaggaagatgatgagtgtcaagagcatgtacagatggacagaaaagaggaaaaagaagagcacgacaatgcagatgatgatgaagacgatgatgaagacgatggcgaggaatgtgagcattcagatgagtgtatggtttctaatgtgaattttgatgccaatatgaagcaagaaacaaagggatttgaatccaaaggtattcagtgtactgaagcaccagaaccttgcaagacagtagaacttgagataaaggcacacaagaaagagttgatgagaaacagagtagcaaatgcagaagaaactcctggtttcacagtatatctgaatcgaaggccagcaagcttggttgaggccatgaaggatatcgactgtcagttctcggggatatgtgacgctgctcggaaaatctcagtaatgttggaggcaagtagagctcagtactcaacctcaaacgatctttctgcgaagatgctgaacccagttgcacttttgcgttctgcgtcatcccgttcatcatcatctcgtttccttcttgctccctctagctcaatagatgatctctttaacaatgagactagcagctgctactctgaagaatcttgcagtaccatgtctggaagtcaccactctaccttggatagactctatacatgggagaagaaattatacaaagaagtaaaggcaggtgagcggttaagaatcgagtatgagaagaggctgacacatttgaggaaccaagatgtgaaaggcgaagaacctatctctgttgataagacttgtgcagcattgagaagcttgcatactcggctgaaggtgtcaatacacacagttcagtcggtatcaaggaggattgaaattctaagggatgaggagctgcatcctcagcttatggagttgattgtggacacggagacgatcagcaagcacgacgtgatcagggattttccttcgcatctcctgtag

SEQ ID NO: 36456 - DNA, 1002 bp, Zea mays
  Peptide Sequence Number=SeqID_79831
atggtggtggacgagccgagcttcttccaccagtggcagtcggacgcgctgctggagcagtacacggagcagcagatcgcggtcgcgttcggcggccacgggggtctggacctcgacctcgacctggacctggaccacggcgtggcgacgccgccgccgctgcagcgagtacccgcgccggcggccgaccaccgcccgcgcaaggcggccaggggcaacgccagctgggactcgtgcgtcacggagcagggctcccccgacgactactcctcgccgaccatcctctccttcgccggccaccacgccaaggcgcccaagcaggagctgctcgacgccgccgccgccgcgctgccgtcgttccagcaggcgcgcccggcgcccaagcgctcctacgacgacatgatggccgaggccgccaggtcgccggcggccgccgcacgcccggcctcacagaaccaggaccacatcttggccgagcggaagcgccgcgagaagctcagccagcgcttcatcgcgctctccaagatcgtcccgggcctcaagaagatggacaaggcatccgtgctcggcgacgcgatcaagtacgtgaagcagctgcaggaccaggtgaaggggctggaggatgacgcccggaggcgcccggtggaggcggcggtgctggtcaagaagtcgcagctgtccgccgacgacgacgagggctcctcctgcgacgacaactccgtgggcgccgaggcctccgccacgcttctgccggagatcgaggcccggctgtcgggccgcacggtgctggtgagggtccactgcgacaaccgcaagggggtgctcatcgccgccctctccgaggtggagcgcctcggcctctccgtcatgaacaccaatgtgctccccttcaccgcctcctccctcgacatcaccatcatggccatggctggtgacgacttctgcttgtctgcaaaggatattgtcaagaagctaaatcaagcattcaaatcacccttctga

SEQ ID NO: 36457 - DNA, 108 bp, Zea mays
  Peptide Sequence Number=SeqID_79832
atggccaccaatggagatcatatatcctgcaggcatgtagatgtaggaggtggtgtttactttgatcctcctccactcatatcccgacagacggcaacttcttactag

SEQ ID NO: 36458 - DNA, 402 bp, Zea mays
  Peptide Sequence Number=SeqID_79833
atgacaaatgtgcaagtaagtcagtcacatggattcaacctgaacaagtcgggatttagccgcatggactgtccacaaggctcggcgtttcgtcgaatgggtagggcgcgaagcgcgacgtcgaccgttagcacgagtttcgacggcgcgattgggggctgcgcaaaacagcgaccaaccgggagcgctgcgcagaggagggcgcaaggaatcagcaaggggcgacgtccatgctgggatggagctcggccatgggagtcgcaggggaaacaggggcgtcggtcagaggtggaagaaggggctcgcgcccatgaaggagaactgctgctcctcgctgagctgcgccatggacagagaagtggagatagcatgggagaagtgagggcgtcgagctgctgttga

SEQ ID NO: 36459 - DNA, 148 bp, Zea mays
  Peptide Sequence Number=SeqID_79834
atggacgcccagaaattccagcagcgagtccccttcctcgctgtttgtcgtggtgcccgccagctgttcgtcaaaatgcgcagcaagccgcgcgctgtcggctcgctgtttcgtgaagcccagtgggcagcaccgtcgacgctcaccg

SEQ ID NO: 36460 - DNA, 408 bp, Zea mays
  Peptide Sequence Number=SeqID_79835
atgggcaaaagtaacaaacgcaagcgcgagccgactcctccatcggaggacttcggcgactcggaatactcggaggaggagttctcctccgagtccgaggggtctctggctcccgtctctcccccggcgtcgtctgacgattcagacgactcccaggggattgccgcagaggtctggacttatatccgggccgtcgagcgctccgggctcgagggctcggatgagtcagagtactcctcggacgaggaggactcttcggactcgtccgaggagggcggtggcggtgatggcggagacgacgacgacgacggaggcgaaggtgacgatgacgatggcggtgacggcggcagcagcaggggcagcaacggcggcggcagcagcaagggcagcaacaaggccagtggctag

SEQ ID NO: 36461 - DNA, 303 bp, Zea mays
  Peptide Sequence Number=SeqID_79836
atggattctcgtccgggtcctgcgcgagcgacatccacggaggccgttggggaagacgacccgggtgccgactggatgggaccacccagcagatacccacccgaggacgtgcgcgagggaggtgggctgccaccggcgaagatctcggccggatcacaacaacccaacgatttctccatcagccgagactgtgaggcacgagacagcagtgaaacacagaggctggcattgcgggcccgaccgacagtgacgcacaaggtgactgacatcgcgaccccaggtgtcggcgcagtgggggtttag

SEQ ID NO: 36462 - DNA, 303 bp, Zea mays
  Peptide Sequence Number=SeqID_79837
atggattctcgtccgggtcctgcgcgagcgacatccacggaggccgttggggaagacgacccgagtgccgactggatgggaccacccagcagatacccacccgaggatgtgcgcgagggaggtgggctgccaccggcgaagatctcagccggatcacaacaacccaacgatttctccatcagccgagactgcgaggcacgagacgacagtgaaacacagaggctggcattgcgggcccgaccgacagtgacgcacaaggcgactgacatcgcgaccccaggtgtcggcgcagtgggggtttag

SEQ ID NO: 36463 - DNA, 465 bp, Zea mays
  Peptide Sequence Number=SeqID_79838
atgttggggacttgttctcaattgctacgaattaagaacaaggcaacacaaaatgttaaagctgtacgaggagcatcgggtgccacgttgccgagtctggctgactttggaggctcacccctacagcctcgttggcattcccttgactccgagactattagattcaggtcggacgacaccaccgagactgcagctatgaagactctgacaactttctttggctaccatcccttggagatggtaatgcacccactgggactcttccccgctgagaagagggatgaccccatgtggtgcaaccgtgctctgcaaagcgaagcctttgcgcaccttgctaaccttgctcagaccactaagctcaccctcgacagccgagaggacttcgtggtcgacttgtcttcagagttggtggagaaggacctacatgtggaacagttgcgccaacgcatcgccaccctggagtag

SEQ ID NO: 36464 - DNA, 162 bp, Zea mays
  Peptide Sequence Number=SeqID_79839
atgccctttacatttgctaatgactctatagtgatccatcaagactttctaagcttcggctttaaggacacattttcgccatttctgaagaaaaagatgtctcaagacaaaaaagttgttgctgagacgaagctgagcgaagaggagaagctccttgagtag

SEQ ID NO: 36465 - DNA, 198 bp, Zea mays
  Peptide Sequence Number=SeqID_79840
atggccgccgtgccaaggcctccttccccgcgcgcagcttttcctctactcctcccggctcctagcgctctcgtcctgtctccctgctcgccagacgtgtatattaatcgtgataattatgtggtgtgtcggattgctaattcggttattagtttgatgaagggaacggttaaccgggaaattagtttagaaatttaa

SEQ ID NO: 36466 - DNA, 1209 bp, Zea mays
  Peptide Sequence Number=SeqID_79841
atggagagtcatgatctccgggcagaatgggaatcacggcttgtggggtacatcaggctaataacttgggtgatgctaaaacctggctttctactagttgtcagcattgcaaccactgctcaggcgaagatgaagctgtggaaggagacttccaggagttccaagactatgacgagttctaggtgtgggttagcggcaacccccagtcggctgcctgtgaaggccgcgatggctcgacttagacacacttcacgaaagtcagtcatccccttcttaccctcccgccttgctgagcgtccgcttcgccgtcccgtggccggacagtccagccacttggagaaactgcaccaccgcctgcgtgaggagcaggaacgtcgacgacaggagcagcagggctcttccttctcgctccagcaggagatagagtccgtgaggagctgctcccctgtgcttcctctggaggcgccccctgcaccaccactgggcgccccagcttctggagtagctgctggaggagacccagatgacaaaggtggtgacgacagctcgagccacgacaccgacttctctgctaaccttgagccggaaggatgggttgctcgacccatcactcgcgacgctgctcgcgggtgtcacttccacgatgcgctcgacaccctgctacgtcgggcatttaaccggcatacttggtccatcgagtatcgctgtgtggtctaccagcacagtcgcggggtgcgctgcccggagaacagtctccagggtgcagaggcctgctcagagcactattctatctctgagcgggactcagctgaggcagccatgcaggatgctgcacggcgtgcgctttcgcactactgctcggttttcggtggggcagctgacggtcttgacctgaagtattacccccgtcgtccatctggcagcacaggaggcgtgattgtctcacctgtcggtgagggcaatcctaggttgagcagcacagtcaacctagccaccgtgctaaacacggagctggaccatgcattagacgagctgagtagggctcgtgctgagatcgccctgctgtgggctgagcgcgcggaacgtcgtcacctggatggtggttcccccgctcccgtcgggactcagcacccgtaccgctcacctcagcgtggacaccagtcttatggcaatcccgactgcaagaccaagataactctagaaccatag

SEQ ID NO: 36467 - DNA, 270 bp, Zea mays
  Peptide Sequence Number=SeqID_79842
atgaagctgtggaaggagacttccaggagttccaagactacgacgagttctaggtgtgggttagcggcaacccccagtcggctgcctgtgaaggccgcggttatctacgtttcgttttcgcactttgatttattttacaagaagcttcggctttgggatggaggacttctctatgacagaacgaagggaaataaagaatggacgacaaagctaaaagccaaaggacttcggctggacatgttgatgaagctcaagtatgatgatgattga

SEQ ID NO: 36468 - DNA, 252 bp, Zea mays
  Peptide Sequence Number=SeqID_79843
atggagagtcatgatctccgggcagaatgggaatcacggcttgtgggtggctatgagatcgatggttttggttatgactatggtgctggtaagtggtattctttccgtttggaaaggatacatcgggctaataacttgggtgatgctaaaacctggctttctactagttgtcagcattgcaaccactgctcaggcgaagatgaagctgtggaaggagacttccaggagttccaagactacgacgagttctag

SEQ ID NO: 36469 - DNA, 519 bp, Zea mays
  Peptide Sequence Number=SeqID_79844
atgtggaaggatcgagtggagcatgccaaggatgtgtgggctctttacccagggaaaactgctcacctaatagtgcgatgcatgaatgccctgtatcgtctgcaagcagtgcaaggtgaggcaatgtcacaactgatgggattggtggagtctaccaagatcaccctagataacagggaggaccttgtggtagacctgtccaccgaattggtggaaaaggacctccaagtggaacagatggccacccaaatccaagagcttgaggagcaagtaggggccatggagaacaccatcgaggttctcgaggatcagctcctgactacacaacaacaacttgaggaagccaaccagcacttggatatgcaccatcaagaaattcaagacatggaggcagaaggagctgatgaggatgtcgacatcgagggaggagaggagccggagcctgcatctagtttggacactgctggctcagggagactaccttcccccgagtctagtgttgcctcgtttgcccattag

SEQ ID NO: 36470 - DNA, 228 bp, Zea mays
  Peptide Sequence Number=SeqID_79845
atgacgaggcatgtgaccagtttaagggtcctcggtcagcaggcccacatcgacacggtccttaatcgactcaagcggagacactacaccgagactcccttctcgtgcaagtcaaccgcccgttctcagctttattatttaaacctaaagtttggtacctggcagagggttcaaagtagtagatctgagaagggcacttctcaaaatccacacaccaaaaagatatga

SEQ ID NO: 36471 - DNA, 435 bp, Zea mays
  Peptide Sequence Number=SeqID_79846
atgggcaagaacaacaagcgcaagcgtgagccgactcctccatcggaggagtttggtgactcggaatactcagaggaggagttctcctctgagtccgaggggtctccggctcccatccccctgcgtgagtcgtctgatgactcagacgactcccaggggcttgcggcggaggtctggacgtacatccgggccgtcgagcgctccgggctcgagggctcggatgagtctgagttctcctcggacgaggaggactcggacggcagcgaggacgaagatgacgacgacgacgacggcgacgacgacgacggtggcgacggcgatggtgacggcagcaacggcggcggaggcagcggcggcaggggcgacactagaggcggcagcagcacgggcagcaccagaggcggcagcggcgtgggtagcaaggccagtggctaa

SEQ ID NO: 36472 - DNA, 81 bp, Zea mays
  Peptide Sequence Number=SeqID_79847
atgcggcttcatacccttagagatgatgtggttttataccctcagaggtgcttgttgctcgtcaagggaagtgggaagtag

SEQ ID NO: 36473 - DNA, 393 bp, Zea mays
  Peptide Sequence Number=SeqID_79848
atgggcaagaacaacaaacacaagcgtgagccgactcctccatcggaggacttcggtgattcggagtactcagaggaggagttctcctctgagtccgaggggtctccggctcccatccctctgcgtgattcagacgactcccaggggcttgcgacggaggtctggacttacatccgggccgtcgagcgctccgggctcgagggctcggatgagtcggagtactcctcggacgaggaggactcgtccgagggctgtggcagcgatggcgatgacgacaacgacggaggcggtggcggcaatgacggtgacagcgacgatgacggtgacagcggcagcggcagcaaggatggcgacggcggcagcagcaggggcagcaacagggccagtggctag

SEQ ID NO: 36474 - DNA, 1686 bp, Zea mays
  Peptide Sequence Number=SeqID_79849
atggagatcgcgatgcaggatattctagacgcactggcgcgcatggaggcacgcttgaccgatgcgctggagctcgatgggttggacgaggacgccgcgagcgccaacgcggctgacgatgattcagacgctgtccacgtccatgcgccgctcaaccccgacgtgatgctcgactcgaacgtcgacactagtggatcaccgtgctacccgtgcctccccgagggcgcgacgctgttccgtcggaacccggatgagaagatccacgatgggctcatcggcggcatcagccagcacatctggagcatcacggacgaggtcgaacacacgacctcagggctggtccagacgctcatcgccatcgacaggcacttcgacctcatcatcaaggcgaggatcaagcacttggatccgttacctccgctcgtccccaacaccgacgcagaggaggaggttctcacgaccacgtccaccaggtgttcgagaatgggcctcaaccgtggcgcatacttcgtccccaacctcctcgtggtctgcatcatgggcgcgcccaaatccaacgaatacagcaccaaccgcgtcctgcaccgcacgcggctacagcgccgtccgctccagcacctgaccgtcgaccctgtcagcgccgtccacggcggcgacgactatgagctgtcccacagcgagtcaggcagtgttctcgcgatcgccgcgtttcccaactcgcacgagaagatccgttgtcagctcgtcaacaggacgaggctggcccgcgacgtccgcctcatcttatccctgacatcgttgaacaaggtgctcagccttcacatgagcacacatgacttcgactgcgccagcgtcgacaggaagtcttgcttgcgggcgtacacgccgacgagcatggaggacgaggttggccacttcagcctcgacgccaaggagtacatcctggatgagcactccaagttcctcaacggcgagctcatgaaccaactcctggacccgctccccctcgatccttacatcgaagctgctctatccccgttaatgcgtgcagcgtcagcatctgatcgggtgtcttcgctgaagaattatcaccacacactagggttatgcgaccattgggctgagaagaggtttaatggtcacaaatgtgtgcagttccacgccatcgaagagcgtggtcaggagcgcatgcggctgctacattttgtcttcgagattcgattcagcagcaagacgtattggtactgggtgatcaggcatcgtttgtcaaggaaatcacgacaatcgtttgtcgagctggttcaggaattgcttggagacaagctgtatttcaagcggtggggaatgtcagcatctcagacaggagcaatgagcatacagcgagaacaagtcacgggacgtgttgctaacagatctgcgtgggagggcgagggccgcggcgattccaccttcaccgtggcgagattagcggggtggggggcgaagacgttctcgggtgcgcaacaaaggagattgaggtggggcgcgggcgtggataggtggggagagggcgagggcggcgccatggatgccgcggcgattccatcgaggccgccagggagggggcgcaggaatgggggatctgcgagggagggcgagggcggcatggatgccacggcgattccatcgaggccgcggcgagattag

SEQ ID NO: 36475 - DNA, 489 bp, Zea mays
  Peptide Sequence Number=SeqID_79850
atgaacctcgacgagctcctagagaagaagtgctccactccggctggcagaggtggtgagatcagtccggcgccgccccttcgtccccccacacgtcttcggatctgcaacccccctgcgcgcagggaaggttgtgggaaagggcaaatctttgcacaaaaaagaggtattctagaatcttctgctaatcgccttttgtatttctctgctgctgaatcagctatttccagttcacagtctacacaaataagtacaatatcatgtgagatctttgggaaggatttgaaccttggccggccttcagtcgggctggcggtcggtgtatctaattctaaggtggatgagaggacatgggagcagaggagtgctgttggtggaacctcattactaccgagtgtccagaaaggtttccagaatttcagttggagtcaggctcgtgggctgaattcccatcagcagaagtttggcaacgtcttagcatttaaatga

SEQ ID NO: 36476 - DNA, 423 bp, Zea mays
  Peptide Sequence Number=SeqID_79851
atggaggtggtggcgaccaccaagccgccgccagcgtccgtatcctcgtccatgcagtcgttcgcgtcggcctcggggccagcgggcggcggggagttcacggcggacgacctcgcggcggcggaccagctggtgcagctcagcgtcagcggcggcggggatgaggtggaccactgctgttcgtcgtcggcccggtccgtgaacaacgccgagaacgaggaggacgccggggggccggtggaccggagggccaggaagcgctgccggctggtgtgggagctctacgccgccaccagcaagcaggtgaaggcggccggcgccggtggcaggaagcggaagggaagggacgggaggtcggatcgggccgacacgaatgcagcagcagtgctgaagtttggagccgaattcttgagcaccgcgtaa

SEQ ID NO: 36477 - DNA, 129 bp, Zea mays
  Peptide Sequence Number=SeqID_79852
atgaccatagaggacgccgtgcaagacaccgtcactattgcagccgtggctacgaacaacaacaatgacgctaagagcacgaccaccatctgcgtcgtcgtcttcctcgcgctcttgcttcctagctag

SEQ ID NO: 36478 - DNA, 312 bp, Zea mays
  Peptide Sequence Number=SeqID_79853
atgaaggaactcctagatatcgcaacttgtcatgtgttgggcgaagatgcggtgggggcaatcttcgaccaccgcaagaagagggctaaacgcgacaaagaggtcgatggcggcaccaatgaacaacccaagaaaagaaagaagaaagaaaagcagcgacacaatgacatgctagtggtcgtgacaggccaaaaagggagaaagctttcaactgaagatgttgtcgaccattttgagacgatgctcaaggcctcgtgcccaaaccacactgctaccccatctgtcacgcctacaaggattgtagattgctaa

SEQ ID NO: 36479 - DNA, 438 bp, Zea mays
  Peptide Sequence Number=SeqID_79854
atggcgaaactcacggcagtcgtcgtcctgctcatggtgctggccgccgcaacggctggcgcggtggtcaccaacgccgacggcgctacggctaccgtcccaggtcgtcgccaccaccagcaaaccaggaggagcagccgtttcctgcttgccaactcctcgccgccgtcgccgtactacgcttgctccaagaagtcagccgccgccgtgtgcttcgctccgggcagccccggcgcgacgtgctgcggcgggcggtgcgtggacacggcagccagcgccgaccactgcggcggctgcagcaaggtctgcaagcacgaccgcagcacctgctgcggcggccgctgcgtcgacctgctctccgacaagggcaactgcggcgcgtgcgggaacctgtgcgacaagagatgcagcaacggcttctgtgactacgccctgtaa

SEQ ID NO: 36480 - DNA, 1608 bp, Zea mays
  Peptide Sequence Number=SeqID_79855
atgccggaagacgtgcagatgaacgactcggagccccagtctgcggccccagctcccgccgccgccgcggcgccggcgctctccacactacaccgtaagctccctcactcctttcttcccctctcccaaaccctagagttctctatctaccatctctgcgtggctgaagcggcgcttatgtcagatctgaaggagatcgcgtccgtgatcgaggctggttctctgtccaaggaggtccgccggatctcccgcgccttccgcctcaccgtcgcgctccgccgccgccttgccgcacgggacgtctccgccttcctcgccttcgcgctacccgcgtcctccgaagcctacgggcgcctcatcgccctggtgcccaagttgtttagcgccgctacttccttagatctgccattactagaagatgatactgagatggacgttgatgctgtggctccagcaactcagatttcaatcaaacatggtctccctgagattgaaatatattgctacttgcttgcactgatttttcttattgatcagaagaaatacgatgaggctaaagtatgtgcaagtgtgagcattgctcgcctgaagaatctaaaccggagaactgttgatgtcttggcatctcgtctgtacttttattactcttatgtgtatgagcttaccaacagccttgctgaaatccgcgggaatctgcttgctctacacagaatggcaactttgcatcgtgacgagctcggccaggaaactctgctgaatcttctcctccgcaattacctccactacaacttgtatgatcaggcagaaaagcttagatcaaaggcacctcgttttgaagcacattccaaccaacaattctgccgatacttgttctacttgggcaaaattaggacaattcagttggagtacactgatgctaaagaaagcctcctgcaagctgctcgtaaggcaccaacaactgcccgtggttttcggatccagtgcaacaaatgggctatcatagtgaggctgctgcttggtgagattccagagaggactgttttcatgcagaaaggaatgaagaaagctctgacaccttattttgagctcacaaatgctgtcagggttggggaccttgaactgttcaggactgtcgctgacaaatttgcaagcacattcagcgcagacaggactcgcaacttgattgtgaggctgcgccacaatgtcattcgaactggactgcgcaacatcagcatttcttactcaaggatctcccttgctgacattgctaagaagctaagactagactctgagaaccctgttgctgatgcggagagcattgtagccaaggccataagagatggcgcaattgacgccaccatagatcatgcaaatggctggatggtatcgaaggaaaccggtgatgtctactctacaaatgagccacaaattgcattcaactccaggattgcgttctgcctcaacatgcacaatgaggcggtcaaggcgatgagattcccccctaattctcataaggaaaaggagagcgccgagaagcgccgagagaggcttcaacaggaggaagaactggctaagcacatggctgaggaggaggatgacgacttctaa

SEQ ID NO: 36481 - DNA, 411 bp, Zea mays
  Peptide Sequence Number=SeqID_79856
atgcaggcggcatgcaaccacgccaagtgggcgcgcttctccgagtcccaacacgcccggcatggaggcccagacccacgcgcgccgaatgcttcgtgcctgcagctgcaccgccacctgcgccaccaccgcgcctccatgactgcggaaccaataccgcgactcgaggcgacccagcgcacgacccagcggctccagcctggcgcgacggtcaatgcggccgaaaacgggccggcagtaatggcagtggcaggcgggcaggagcagcggtcacgtcgtcagccaagcttacgtcccatccgggggcagcgagagaaccctctctcacggcatgaagacaacacgcccgtgttccgttcctcgaacgggaccgagaaagggggataccccgaaaaggacccttccccgtga

SEQ ID NO: 36482 - DNA, 798 bp, Zea mays
  Peptide Sequence Number=SeqID_79857
atggcgcttcctgttgacgtggctggcctgcgtcctaggttgggcgacgtggaggctcctccgaagccgaggtcgagtctgtccttcatggccggggccgagtccgagcccctaggtcgggcgaggcggaggtcgtcggcagaggccagggcagtgtccgagccctggggtcggcccgagtccgagccctgggtcgggcggagcggagttcgccgtcttccgggtcttagcccgagtccgagccctgggtcgggcggagcggagttcgccgtcttccgggcggagcggagttcgccgtcttccggggctgagcccgagtccgagccctgggtcgggcggagcggagttcgccgtcttccggggctgagcccgagtccgagccctgggtcgggcggagcttcctatggtgcctttggcagggcctggcttcctgtcagcatcactttgtcaagtggcgctgcagtcggagtggcacaggcgacgctgtccttctgtcagaccggtcagtggagcggcgaagtgacggcggtcacttcggctctaccggagggcgcgcgtcaggataaaggtctttatgctgatgggggttaccagctgagaattaggagtcttgaggtgcccgcggcggaagaaagggtggaggggcttaccggcgacgagattgctccggtgaagtggtcgagggcgggggagttcgtcggcggcgaggagtccggcctatccagggcgaagttgaccaatcaaacgggtcagagagcttcaccagggatcaatgaaggggtgcgcgcgaggaattga

SEQ ID NO: 36483 - DNA, 1038 bp, Zea mays
  Peptide Sequence Number=SeqID_79858
atgacgtgtgggacccagcccccgcgccatagggggaggaccttggagcgtgttggagaagactcagcccacgacggctggggacgcaacccggctgcacccctccgccggcggtcacccaagacggtgacctccagcccctggatggggagaggcaagctgggctgcaatcttggtcccaccctcagcttcaaggatgttcatcatccccgctggggtggaggtcgggttgagccggagctctacctcccgcgcgggttcgtgggtcggcctctccttcggcgttcgagggagagggcgctcactggccctgcgggcgggtcggacttcgacaacgcggggctggtcgacggcgggcgtcgtcagcctcagcgcgtcgggctcatcgacttagctcctggtgccccctcctgccggaaggcggctgccgcgccgtgtgcacgggaggaccgcccaagatacgcgcgctgccagggcagcgttcgtgttctggggcgattctacctttgcaccggtggaggccgctcgagaagtccccgttgccgacgggatcaccgccaccatccgcgcttcgggcctccggctctttgtacttgtcctcgcccctcgagcgtcggcgtgggcgagggcaagattgcagcagcatccgccctgaggccctcgctgctgcagttcggccacccggagcgggggtcgttgtcgctgctggcggagcggacgacggcgagccacccgtcggtcttctgctgctccgcaggcccctcccccatcgagtggggtcgttcgtacctgcggaggtggaaccggagtttcgtttttaatggcacttcgaatgccaactcgcctgttggttgtctgaaccgcttcaccaagcgtgagtcgccccgtgtaaaggtgacgagtgagagcggagacccttggaccgcgtcaccgtccgaggctaggtcggacctcgccaaaggtgttgtcgacgccgagggtgctgctgctccctttagccgtcaagatccgagcctgcaggatcggattatcttgtag

SEQ ID NO: 36484 - DNA, 1161 bp, Zea mays
  Peptide Sequence Number=SeqID_79859
atgggccatgttgagaaccttgatgactatcgtatcacgttgaacctagaccagacgttgaaccagaagacatataacaaacctctcactttggagcagttcgcggtcgacacgtacataaagattgagagctctcgtttagatttcatatgcaagaatcaggatcggttaagggcagacctgtaccaaggtttagtggatagcatgctagatggagatattagagcagagaaggttggcaagcgaactgtgatgtcgacgtcgtttattggtggtcctcgtgacatgagacgtcggtatatggatgctatggctctggtgtggaagtttgtctgtgtctttcatgcgaagctacaagagttaaagcataggctgactaaacaaaatattcttggtaaggtccaagcctacgtctatgtcatggagtttcagaagcgagccgagatcccaagcaacaagtatcctgaactacgaaagatggttatcaagcatatgatgcatggcccgtacgtcgtgacgatgaccgtaaagaaaaggtctgagggtgcgaactggacaatagatgggttgtcccttataacccatgcgagcaaggcagatgatgatgttgatgagatcaagcagtatagagatgcaaggtgggtgactcctccagaagccttgtggaggatatacggctttgagcttagtcagatatctccacctgtgatgcagctgcaactccatcttccaaacatgcacatggtggcgtttcacgagcggcaaatggttgagcgagtcgtcaaccgtccaggtgttgataggtcgatgctcacaacatattttgaggcgaataggctacacgaggaggctcgtggcatcctatatcgtgacttccctgagtggtacacttggcagagtggtaaggacaaagtatggcaacggaggaaacgatatacaggtggacaagtcggtagaatagtctctgctcatccggccgagggggagcgctactatctttgtgttctcctaaaccacgtgactggcgctgcctcctatgtggatctaaggatagttgatggtgtcaccctaccgacttttcgtgaggcagcagagaaaaggggactgcttgagtcagacaacacactggatgagtgtctcattgaacgtgctcttttctag

SEQ ID NO: 36485 - DNA, 1170 bp, Zea mays
  Peptide Sequence Number=SeqID_79860
atggatggcggcaaccacccccgcggcggtgagccccccatctcgcagcacctgcaaggcctccagaaggggctggagattcttctatctctcgcgcggggtcccgtagcgccagttggtgccggaggtggtcaccactcgttgagaaaacgatgggagcctcccatcgtcgttccgaaggttaaaccaccggcgctgccaccccttgttcgaagaggcaaggatggcggggatatactgttgcgcacgcgcctgcctcaactggaggatgcagccaccggcccgcaccgccatgcgaactctcctctccctcgtcgccaaggcaaaaggctccgcagagaagagatgagtccacagatcccagtgggggccaatccccaaaaacccttcgcaaaccgccgcaaagatggctgcttgtgcaatggagttagggctaagattgacaagcggtacctttggcaggcgaagcaggcgacgcttcacctccgccatgatgaccgcgtcaaaaaggctggcccctcggaagggttcgacagccgcctcagagcagtcgggcttcgagccctcctactgatcagaggttcgaaggttggcccctcagaagggttcgacagccgcctcagacaactcgggctccgcgcccaccactggtcagaggttcgaaggctggcccctcggatgggttcgacagccgcctcaagccactcgggctccgcgcccactactgatcaggggttcgtaggctggcccccgaagggttcgacagccgcctcagagcacgcggagcgagggatgactctgggtacatccgatacatggccgaggctcgggctacgctcccgaggctcggtggctgctctcgcaaacccggctccggccaaaccgttgacagcgtcaacataccagcccgagaacttggaacctgactatgcacctgggctatggccagaaaacagcgccgcctgccctgctccgactgctgtgccactcgacagagtgaggttgacaacagctaagtccagcctcgggcgccataggaagctccgcctcgcccgaccccagggctcggactcaaccatgacgccggacgacagactccgcctcgcccgaccccagggctcggactcagcctcgacctcggacgacggactccacctcgcccgaccctag

SEQ ID NO: 36486 - DNA, 267 bp, Zea mays
  Peptide Sequence Number=SeqID_79861
atgccgcggggcaggaggagagcgcggacgcaacgacgcgggccaggagatggagattgcggacgattgggtcaggtgggaagcggcatccgcgattcttggcaccagagaggatgcggcggcgcggatcgtggtgtctctgtccatggaaggcgcgctcgtgttgtggaccttccaaaggcggcgcggttcaatattcttcgcggaaccagagagcagggaaggcattctaggggcatgtgcttggactcaaacaatcctttatag

SEQ ID NO: 36487 - DNA, 1036 bp, Zea mays
  Peptide Sequence Number=SeqID_79862
atgacctcgtcgtcctcctcgtccacccccacccgcccctcaccgttgcccttcaccccgcctcggaggcgcaaggtccccgcgcccgctgctcccgcggggacagcggcggccaggcatctccttcgctgcctgcacctccgcctgcgtgtcctcctcctcatctcgcttccctccctctactttctctccccgacccctgccatttttccgcgctccctcctcgccgacttcctttccgcggcggccttctcctgcgcgctcctccttctcctctgcctctccctgccgcggcttcccttcgcgctgacgctgccgctccccctccgccgcgcgcgccgatcccccatcctttggtccatcggttcctcgccatccgcatctgcgaccacccccacaaccggccatttcgtccaggtttatagcaacggtgacgtctacgagggccagttccaccgcggccgctgcactggcagcggcgtctactactactacatgagcgggaggtacgagggagattgggtcgacggcaagtacagcggcttcggcgtcgagacatgggccagaggtagccggtaccggggccagtaccggcagggactcaggcatggctacggcgtgtacaggttctacactggggatgtgtatgccggggagtggtcaaacggccagagccatgggtatggtgtgcacacctgtgaggacggtagccggtatataggggagtttaagaggggcgtcaagcatggtctcggccactaccatttcaggaatggagagacacaagctgggcactggcaaaatggagttcttgatactttaagcacccagaacttcatccctggatcacctattgctgtgaaccattccaaggtcctcaatgcagtgcaggaagcgagaagagctgcagagaaggcctatgacatcccaagagttgatgataaggtgaacagggcggttgcagcagctaataaagcagccaatgcagccagggtggctgccgtgaaggctgcacaaaagcgcatccccagtaatg

SEQ ID NO: 36488 - DNA, 321 bp, Zea mays
  Peptide Sequence Number=SeqID_79863
atggctccaaaggcgcacgcagcggcgacggctccaaaggcgcacgcagcgacgatggtggccccggaggagcgagcgtcgggcgtgaccaaaggctcaggcagcgacggctccgcacgcgcgctcggcaatgatggccccatccggcaatcgcgcgaggcaccgccatctccgacagcggtggccacgcgaggcacggcctgcgagggtcgacgatctatacgacagtttgagcgttcttcggtgaccaactcctctcgatccggtggtcttggcggcatcctccaacgacgacctcctccaatccattgtttatattga

SEQ ID NO: 36489 - DNA, 2100 bp, Zea mays
  Peptide Sequence Number=SeqID_79864
atgatgaccgcgtcaaaaaagggaccgggaaagggggatactccgaaagggatccctctccgtgaaggaagcgggccccgagccctcctactgatcagaggttcaaaggctagcccctcggaagggttcgacagtcgcctcagagcactcgggctccgagccctcctactgattagaggttcgaaggctggcccctcgaaagggttcgacagccgcctcagagcactcaggctccgagccctcctactgatcagaggctggccccccgaagggttcgacagccgcctcagaacaagcagagcgagggatgactctgggtacgtccgatacatggccgaggctcgggctacgctcctgagaggctcgggggctgctctcgcaaacccgactccggccaaaccgttgacagcgtcaacataccagcccgagaactcggaacctgactatgcacccgggcaacgaccactggtaacccccatcagcacaaagctgcaaaggcctgatgggcgcaattccggtcaaggctccgtccactcaagggacacgatctcgcctcgcccgagcccagccttgggcaggaacagcagaccaaggcagattcacgcctcgcccaagggcctcctcaagcaacgggcgcaccttcgactcgcccgaggcccagctcgggcaggcttcgcggagaagcaaccttggccaaatcgcctcgccagccgaccggatcgcagtagcattcaatgcaaggatcgcctgacaccttatcctgacacgcgctctccagtcgacaaggccaaagaaaacagcgtcgcttgcgctgctccgactgttatgccaccctccagggtgaggctgacagtagccaagtccagccttgggcgccataggaagctccgcctcgcccgaccccagggctcggactcaacctcgacctcggacgaacggtctccgcctcgcccgaaccccgggctcggactcaacctcgaccacggaggacggtctccgcctcgcccgaccccagggcttggacttaacctcgactccggaagatggtctccgcctcacccgaccccagggctcggactcaacctcaacctcagacgatggtctccgcctcgcccgacccccgggctcggactcaacctcgaccatggaggacggtctccgcctcgcccgacccccgggctcggactcaacctcgacctcggacgacggtctccgcctcgcccgacccccgggctcggactcaacctcaacctcggacaacggtctccgcctcgcccaaccccagggctcggactcaacctcgaccatggaggacggtctccgcctcgcccgaccctagggctcggactcaacctcgatcacggaggacggtctccgcctcacctgacccccgggctcggactcaacctcgacctcggacgacggtctccgcctcgcccgacccccgggctcggactcaacctcgacctcggacgacggtctccgcctcgcccgacccccaggctcggactcagcctcgacctcagacgacggtctccgcttcgcctaacccccgggctcggactcagcctcaacctcggaggagtcactgcctcgcccgaccttgggctcggactgaccacgtcgcagagggggctcaagcgctcctccgacggccacgacaccacacgaatagggctccaacacctctctaacagccatgtcgggccctcgtacgagaagggaccccccgggatcaaaacgccgacagaaggcaaggtgccaaccttcgacacgacgacgggcattggcggcagcgtcacttttagcacaacggtggctactacagccggcacagggggcagcgcgggggtgttcggcaccacatggatctgtggcacggcgcccaccgcgggaaccgtcggtatggcgagcatcagtggaagggtggccacgggcacgatcggcggctttggcatgacagtaatgcctgggacgacgacaggagtgacgggggggttgagcaagatgcagcacggcgtggcatgtagtgctgccgttgacgatgagcacgagcgctgtggcggagaagagagacaaagcatcacaagttattgctag

SEQ ID NO: 36490 - DNA, 216 bp, Zea mays
  Peptide Sequence Number=SeqID_79865
atggagacgggtgaagggaacactgagcttgggcagcgtcgcgcgggggataactccgaggatagaaggctattgaaaaagttgaacggtatacttctcgatgttgaacggtatactgagttggaaggttatgtgtggcaactggcaacaccccgtctcagctcttcccgtagaacgagctcttcccaacttactcattttcattcttatatttaa

SEQ ID NO: 36491 - DNA, 579 bp, Zea mays
  Peptide Sequence Number=SeqID_79866
gaccgcctccacgctgatgcaaggaagaaaggtgtacatgctgccactctagagggcttggatcaagttgttggcacgctcgatttggtcgttggttcatgggtgtgccacagtagcccagtcaacgcggatgttgaactcatcacatgtctgaaggaaagggttccgaccaagtccaacccccagaccgtgaagggccaggtgatggggatgatgtcatgctcctactttggccacaattcagagctcgttgatgagggtctcgtattctgccacgttgttggtggcgtcaaagtggaggcggatggcatagcagagcttgtgccgttgagactcggtaagcacctcactgatgaagtagatggtcctctgtactttgagtatgtggccttcatctgcccgctctacaacaagtgccacactaaccacctaagtggtagcagcaacgagaactggtcgcccttcctgaggagtttgtataggggcatgcccttttctccaagcctagagactaaacgacttagtgagccgaccagccgttggactcctttgaagttccagatgggccccatctactag

SEQ ID NO: 36492 - DNA, 411 bp, Zea mays
  Peptide Sequence Number=SeqID_79867
atggcgactccgacgagagggaagaaacggctggtcgtcgacgtcgatgtcgaggtcgacagtgaggccgaagtggttgccgccttcagtcgattgtctgtgtcaatcatcgccaagcctacaggcgacggtagcggcaaggagcactccatcggcaaggatgtcacctgcgcggccacatcagatacggccaaagaggtgtcagtgaacttcgcaatgtggcgcgtgtatgagcttgctcagtcacttgaggaggaagcacaacgtttagaagatctcgaagctggtccgtcgccaccattatctgagtatttcaataaccaatttgctgaagatcaagatatgggtggtggggaatgggcactggatgatgtcaattatgaagagattcggggtcgtcagaggaagtag

SEQ ID NO: 36493 - DNA, 2463 bp, Zea mays
  Peptide Sequence Number=SeqID_79868
atggaagtcttcgccaagcaatactgtctgcactggcagaagagaaaaattgggcataagattgcacaatttggatcgtgcactttcacgccgaagtccgggaagacttcgatggaagtcgtggagctgaggccgaagtcgaagaccacccagggctcccccgcggccattatgtgctctcattattatgtggcgtacccaccatttgaagtagcggaggatgatgagaatgaaggggcccttcggatcgttgcccgtacgagtagtgggcgtgatctagttgaggaattcattgggtatggggtgtggcccttggcgcatggatgggcattgggcgaagtatgctctcgcgagatgccctccctgggtgggcagaaagtgcgaagtccaccttttgctttggatgtgcgaggccgggatcctacggcggtcgtgcacgaagcggaggatggggtggtgcgaattgtggggcgttacgtgccgaagacagagggtctgcagagctgggatatccgtgggtccaatgacaggttgaatcgggtcttcgaattgaaccggttgccgtacggtggttatcccggggaagacgccgccgaccgccgcgggaagaaaccgatgggcgagaccgaggaagggccttcgcaggatgctgccccggccgctaagaggaggaaattaggtactacagtggggggaatgggggttaccgggggtcgatggccaaagaatcttccgatcccctgggcgaagggcgaagacatgtctacatcttgtatagctcgtggcttgaggatttccccttatggacggaatattgctgcagttatgtcggtagtgatgaacaaggaccgtcaggacgctgcgcagaagcgccggacggtcatcaggatcgcagatcctaggtgtgaggcgaagagggcgcgggggagcgtaaaggctgcggcccccggcagcagccagccgatgccggctgcgaaaccggctgcacccggatccggcaagtcgtcggcgagcgcgaagacagccgccgctggcgggaccaagcctcccccggtcgaggctgcgaaagtacgggagctgccctcgccgggaaaacgtgttgccgacttcggcacgaatatcagcgtggaggactattttgttgggtcgggcgagggacaaatggttgttgtcccgcctttggtggcgaccacttcgccatcagcggtggtaagggtgaagggaaccgcgcaggacccatgggccgccttctgcgcaatcggcgagattctgacagccgctgccgctaaggacgtggcgggcaccatgtcccagcggctgagggatgcatcgcagcggctgtcgcagcagctgagtcaagtggccaacttcgccgaccgtgttgcgtctggcgtcctcactgtggacgtggctgccgaagtcgagggactttgggcgcagcacgtggacgccgtccgggagaagtcgactgcagagagcaaaaaccgcaggctggtggagaaagtggccgccttggaggccgagaagacggacctccggcgccagctggtggaggaaaggaaggaggcgaaccaggccatcgctgaggtgcaggctgcgcgggcggaggccaaagtggcgcgggcggagggaagtctcgccagccagtgcgccgaggagtgggaggcgaggttcaacgccatgtgcggccgcgtggacaaggtcgaggcctctacgcgctcggatgttgagcggacgctcgcataccagcgggggcactttttgataggatgtgggggggcgcatgtgaatgtgcttttgctgcaaatggaacgtgccgaggacgtcgaggaccttggaggtcttgtcggcgtgccgctcaaggctgcggagggcaatccggtgctgccctcggatgccggtgaaggcccctcggccgtgcccgtgcctgctatggccggcgaagaccctgtgtcggcccctgcgccgacggtcgaaggtgcctcggaggtgggttttgggcctgcgcaggcaaccgctactgacgatgctaattttgtggcagcttcgaccgtggttgccggaaatgattctgatgattccgtgtctaagttttttgagtctggtgattccgggagttcggttgtgtggtcggaagagtcttcggatgaggacttagattattttgcggccttggatgtggctgcggcggaggcttctccgcgtgtgatgggtgccgaagttcttcctggtctgagtgctgggcgtaggcggcgaagggcggtggcgaaacagagggtgagtgaggtggagggtggtcgtcttcgtgtggacggggctatcaaacgggaattgttgtcctcaccggctggggcgagtgtaggtgagggggagttgcgaaatctttttgagggtgaagagctgaggataatgttgttcaactacagggagatgggtatcatcccgaaggttgagccaatgtaa

SEQ ID NO: 36494 - DNA, 462 bp, Zea mays
  Peptide Sequence Number=SeqID_79869
atgcccgcagttttaccctcccacctacacacagtgctcaccattaaccttacggacctattccgtccgttaccgtccttaaaagtgggacatctcgcccttacaagtgggacctctcgttctagctccgaaatgtgcccagattcaaacggtattacagaccctttgctcggcgtcataggctatggggccgaggtaacacatctcggcgccataggctatggcgccgagattccgtcgacagagaacgcgtcaaaagaaacaagaagaatatgcgctaactatatagtactgcagttgaaatatgacatgtcaaatttagtagcttcacaatatcttaataaggacacaaaaaatgttgccatttgtgttataggtgagatgccggatctaacgtgggagtatggagaggaaattagggatggttttaggtgcaagtattaccgtaaagtgaagagctaa

SEQ ID NO: 36495 - DNA, 666 bp, Zea mays
  Peptide Sequence Number=SeqID_79870
atgagtgattctgtaacggaatctcatcagagggaggcatcgagccctcggaccctatcaaacgggaccgggtccggcaaatcacctgcagggctcggcctcggaagacggactccgcctcgcccgaccctagggctcggacacaacctcgactccggaagacggtctccgcctcgcctgacaccagggctcggactcaacctcgacctcggaagacggtctccgcctagcccgaccccagggctcggactcgacctcgactccggaagacggactccgcctcgcccgagcccagggctcggacacgacctcgactccggaagacggtctccgcctcgcccgaccccagggctcagactcaacctcgacctcggaagacggtctccgcctcgcccgacccccgggctcggactcaacctcgacctcggaagacggtctccgcctcgcccgaccccagggctcggactcaacctcaacctcggaagacggtctctgcctcgcccgaccccagggctcagactcagcctcgacctcggaagacggtctccgcctcgcccgaccccagggcttagactcagcctcgacctcggaggagtcaccgcctcgcccgacctcgggctcggaccgaccacgtcacagggggggccatcattaccctacccctag

SEQ ID NO: 36496 - DNA, 615 bp, Zea mays
  Peptide Sequence Number=SeqID_79871
atgcgagccacgcgtttgctcttggtgcccgcgcctggccgcgtcaccaccagctcatcgcctacgcagcagcagcaggaccagtgtttctgccaggactatgacaaagtgcatcgccataaaaataaaatgtactaccatgtaaaaattgaaataacgacagtgtgctgcccaaaggttcccgatttcccagtggccaccggcgcaagtgggccggccccacgcagccccgccggcggcttcgcggaagctccgcctcgcccgaccccagagctcggcccccgtctcagcctcggacgacgaactccgcctcgcctgacccagggctcggactcagcctcggccccggaggacgacgaactccgcctcgcccgacccagggctcggactcggcctcagctccggaagacgacgaactccgcctcgcccgaccctagggctcggactcagccttggcctcagacgatggtctccgccccgcccgacccggggctcggactcgacctcgacctcggaagacagactcgacctcgacctcggaggagcctccgcctagcccgacccagggctcggaccgaccacgtcacaggggggccatcattatcctacccctag

SEQ ID NO: 36497 - DNA, 462 bp, Zea mays
  Peptide Sequence Number=SeqID_79872
atggccggttctaaaggtcacgttgatatctctccggacaatatcatgaagccgactgttgaaggtctgacggccgatgagcaacagcaatatgaggactatatgcgtcaagcgaaggagaaattcttatcacaatatacggtggatcaccaccagaaagttgtcaaacatggagagaccgacgtcacatctattctatcttcgcttcaagtccccaacatcggcgcccctaaacacgatcggaccatccgagcttctgcccggaccgtccggcttgctctaccagagagtccggggccgccctatgaccaccgtcgtccctgcttggcagatcggcgaccctggacgtggtcggaccgtccgagcttctgcccggaccgttcgacccttacgcgaacagtccggctttccatgccggacagtccggggccacaccaggactaccacgtggcgtcccgataa

SEQ ID NO: 36498 - DNA, 837 bp, Zea mays
  Peptide Sequence Number=SeqID_79873
atggtcgatacggccagaaatgggccggcagtaatggcggtggcaggcgggcggaagcagcggtcaagtcctcgcgcgcgcgcaacggctgccccgcgaaccactcgtcccgtcgcattaactctgcggcaggacaggcggcacctttggcaggcgaagcaggcgacgcttcgcttccgccataatgaccacgtcaaaaaaggccactcgggctccgtgcccactactgatcaggggttcgtaggctggccccccgaagggttcgacagccgcctcagacgtagagcgagggatgaccctgggtacgttcgatacataaccaaggctcgggctacgctcccgagagtgaggctgacagcagccaagtccggcttcgggcgccataggaagctccgcctcgcccgacccagagctcggccccccgtctcagcctcggacgacgaactccgcctcgcccgacccagcgctcggactcagcctcggccccggaggacgacgaactccgcctctcccgacccagggctcggactcggcctcggctccggaagacgacgaactccgcctcgcccgaccccagggctcggactcagccttggcctcagacgatggtctccgccccgcccgacccggggctcggactcgacctcgacctcggaagacagactcgacctcgacctcggaggagcctccgcctcgcccgacccagggctcggaccgaccacgtcacaggggggcatcattatcctacccctagctagctcaggctacggggaacaagaccggcgtcccatctggctcgccccgggacccccggggtcgaaacgccgacactattaa

SEQ ID NO: 36499 - DNA, 127 bp, Zea mays
  Peptide Sequence Number=SeqID_79874
atggctggaccaggagcactgaaattctatctcaaccggttctgccgactgggtaacttgaattctaaagatggacaaataggtcagttgggtttgaattcctgcggtccggagaaacagttagcag

SEQ ID NO: 36500 - DNA, 267 bp, Zea mays
  Peptide Sequence Number=SeqID_79875
atgaacgtcgatgagcagggaggttttggcggtctcggcgggcagggaacggcgagcacgagctctggggctgctcggctcctaggcaatcaggtcgcggcatcgggtgcgtcggggtcggggcctgggtgcgcggctcggccgtggggcttcgatcggtcggtgttggtggctgcgctgctgggagcgggcggcttcgggctggcggcgcgcctggtgcaatgttccctggcggcgcgtgggaaagggaagggagaagaggaatga

SEQ ID NO: 36501 - DNA, 333 bp, Zea mays
  Peptide Sequence Number=SeqID_79876
atggctgccgtcgtcggcgctgaggtggtggcggctgaagaagtcctcgtcgccgacgagatcgccgccaccatccgcgctccgggcctccggctctttggctttgatagcttgtcctcgcccctcgagtggggacgtgggcgaggggctcgtcgcagcagcgtctgccctgaggtcatcgctgctgctgtttggccacccggagcggaggtcgttgtcgctgctgccggagcgggcgtcggcaagccacctggggttttgtcgccccgcaggccctccaatgtggggggttgttcgtacctgcggggggcggaaccggagttctgtttgtaa

SEQ ID NO: 36502 - DNA, 879 bp, Zea mays
  Peptide Sequence Number=SeqID_79877
atggttgccatccaagggggtcaccctccttttaaaggcgactctccgcacttgcgtcctcagacgtcgcagactgagtcttcaccaacacgctccaaggtcttccccctacgacatgggggctgggtcccacgcgtcatgcaagctggcccaggacagaagaggccaaaccgccgcgcgcgggaccgggaaaggggatactctgaaagggatccttctccacgaaggaagcgggccccgagccctcctactgatcagaggttcaaaggctggcccctcggaagggttcgacagccgcctcagagcactcgggctccgcgcctactactgatcagaggttcgaaggctggcccctcggaagggttcgacagccgcctcagagcactcgggctccgcgcccactactggtcagaggatcgaaggctggcccctcagaggggttcgatagccgccttagaccactcgggctccgcgcccactactgatcaggggttcgtaggctggccctcgaagggttcgacagccgcctcagagcacgcagagcgagggatgactctgggtacgtccgatacatggccgaggctcgggctacgctcccgagttggtaacccccatcagcacaaagctgcaaaaggcctgatgggcgcgattcaggtcaaggctccgtccgctcaagggacacgatcccgcctcgcccgagcccagccttgggcaaaggcagccgacccaggaggattcacgtctcgcccgagggtcccctcaagcaacggacgcaccttcagctcgcccgaggcccaggcttcacggagaagcaaccttggccagatcgccacgccaaccgactgtattgcaggagcatttaatgcaaggatcgcctga

SEQ ID NO: 36503 - DNA, 294 bp, Zea mays
  Peptide Sequence Number=SeqID_79878
atgttggacgaggccgcgagatgggacgacctcgtcacaggccttcgtccggcgacgcgtgagacgaaggcctctgccctctcccagcccgctcctccatctccggtgagacgcgaattgaatcgcatcgaatccatgggcagctcctcgaataccaacacgagcggcggggccagcgacaaggaggagaagaagaaggaggacaagatcaaaggcaaggactcgtcggggccatccttcaaggagaacgaaagggtcctcgcctaccacggccccctcctctacgaggccaag

SEQ ID NO: 36504 - DNA, 567 bp, Zea mays
  Peptide Sequence Number=SeqID_79879
atggcacccaacagagctagctcgaaggctgacgaggctgcgaaggcagcactgctggccgagaaaaatggcaaggccctcgtcgacaccacccaccaagaggccaccgaagacgacgctctcagcaagcggcagcgcaacgaacaacctactcccgaaggcagtcttcgcacctgcagctctggaggacaaccgcaacttcccccaggcttcgctccaccagagggcgcggacgtcatcgaggacggcgaagtcatcggcgtttcagcggaagagcagctacagctgcgtgccttcgcatcaagaaccgtaacctccagaagcgaaaagaaatccttgaggccaagcgccaacgcgtgtctgcacaagctaagggttgaagtagattacatcggatatgactggagagatcagttcgtccttctctgttgtatgcgcgacttgcccctaccggctggaatcaccatcggggctaactgcgaacacaaccagcagattgacgtaacagatcaacgtcatgagtgtaatctccttcgggtcgaaagtctcggatttgggttgatttga

SEQ ID NO: 36505 - DNA, 210 bp, Zea mays
  Peptide Sequence Number=SeqID_79880
atgggattaccactagacgcgcagagcagcggaagacgtctcgatgtagacgaacgcgtcgagcagtgccgtgcagtcgccggcgtccttcacgtcctcgcacggttcgtccaagtgctccagatgcagcacctccgagggcatatttctaacaacggcgtggccgtgctgagggaagtacatgtcttcgatttgtgcgcgctgctgtag

SEQ ID NO: 36506 - DNA, 318 bp, Zea mays
  Peptide Sequence Number=SeqID_79881
atgttccctggcggcgcgtgggaaagggaagggagaagaggaatgagaggagggcgcgggtgggtcccacgcgtaagagagaaggggaaagtggagaatgaagtggtggcggctgggaggagggagcacgcgggtggggaccagggtcgcggcggcggctccttacatggtcccctaatgggccttagggttaggtgttacaacattgcgcgcaggtttgttgaaacagctccgtcagtggtcgccgggggatggtttcccttgtccgccttctccgttccgatcttctggtcgggattcgctcgccttggtgaataa

SEQ ID NO: 36507 - DNA, 861 bp, Zea mays
  Peptide Sequence Number=SeqID_79882
atgacattcaacaaagaattacttacagctgaatgtgtggaaataaaagcactgaaaatgttgcatagttcatttcaaagtgttggagctatcatagtaccgattcaggacaaggaaaaaagatcatcacatagtctactagtgttgcagtttcctttgccactgaagaagcaacttgtggatgattgggagtttgttacgcagatgggtaagcttgtgaagctaccacgatcacctactgttgatgatattctaaagaagtacttggaacaccgggcaaagaaggatggcaagataaatgactcctatgctgagattctgaaaggattacgctgctactttgataaagcattgcctgcaatgcttttatataagaaagagcgagatcagtatgctgaagaagttaaaggtgatgtctcaccatcaactgtatatggagctgagcatctattgcgcctttttggctcgtcgggctgtgggtcggcttgtagaaagcggggatgggaacaatttcaaattgaaaagcaacaacccttccacttgattcaaattcttcttccacttctcatccttgagttgcggcgacatgctcgcggattaaatgaaggtcaatctctacgtgctttgtgtgttgatgctgccgggattggtagagaggtagactacgctgacgttgtcgcactagacgaaggtggcatgctcgagggggctgcggagctcttggagaagctggcggaaccagaaggcctcgaccacactgttggccacaacgcggtactcggccttagggaaggagtgcgagacaacgggttgctgcttcgcgcccaggagacgaggttggcgcctaggaacacgacgtaa

SEQ ID NO: 36508 - DNA, 201 bp, Zea mays
  Peptide Sequence Number=SeqID_79883
atgggcggggtgagcgtgacaggtcaatgtcaggttgaagccattgactctatagtgaggcactaccagaatccgagcctttaccgagtgctcggctctttgttgagtgctttttgtcgggcactcgacaaagaagcctttgccgagtgccgcactcggcaaagtcctgctctcggtaacgagtttgtttaccgagtgtag

SEQ ID NO: 36509 - DNA, 402 bp, Zea mays
  Peptide Sequence Number=SeqID_79884
atggcccactttgcccacatggtggcgccgcccctggaggcgacggatggaggacaaggaggggcggcggcgatggaggcggatgtggcgcacagcaggaggggcgaggcggaggatgaggaggttgagagggatcatggcacggtcaggggtggtgtccccgtgatggtcatcgggaggcacgatgggggtgagttgtcctgcgcgtcatcgacgccgaggcacctcatgtggccaagttcccatgtcacgccgattcgcgcatcactaggggctggaaatttggctcgggctcggtgtggctcggctcggctcgagccggctcgccagccaaaacgagcccgagccgagccaagttttgcagctcaccagaaccgcgagccggctcatgagccgagctaa

SEQ ID NO: 36510 - DNA, 522 bp, Zea mays
  Peptide Sequence Number=SeqID_79885
atgttgttgttccctatcacaagccacaggcaggtggaccaaagagacgacaacatggaaccatttttatggtgtaaaactcaattaccatctcgaaccatatttatggtatctgcaacacaggagggattcgaggtcacctatctccccgtgcgcaaggacaggctcatcaacctcgcgcagctcgaggacgccatctgcctggacaccagactagtgtctgtcatggccatcaaggcatcaacaacgagatcggcgacgtccagccgctcgaggaaactgggcgcatctgcaaggagaaaggcgtgccgtttcacacaaatggtgcgaaggcatagatccagtgctcccacgcgatgtcggagcttgcactctagtgcgggacagtggccgagtggaggtgggctggccatgatgggctatcggctagacgatgggctgacagcgatggcaggcgagccgcaggctagcgacgatgtcctatggttggcagtgacatttgggtggatggctgagcggtag

SEQ ID NO: 36511 - DNA, 687 bp, Zea mays
  Peptide Sequence Number=SeqID_79886
atgaacgggctcgccaaggacgtgccgacggtgaacgggatgcacgaggagcccacgaccgcacatcccagattgctcatgccgcccactgtgcatctgaaaagcctgtcaccggtggatgcaagtgctgggagggaggacgtggagacgctggcgcaatgccagcggatgattgcgtgcggggagtggctaccgctggccgtggcctatgaccacgtggaagggtccaccatggaggccggtgggatgcaggtgcttgttgatcagatgatggcagttaccgagtcatcaagatttcacgtgtcattaaagaaggatgatgtgtacataagaaggctcatcataaatcaggtgttgccaccgtctgcgtccttctgcaaattctgtgctgcaaaatggaggaagttggagcacaagatgctggacaatttcttctctgtgctgtcatgtgttatctccgtgcccttctacacgggattcctccctctcctgttctggagtggacacggcaggctggctaggcagatgaccctcctcatggctttctgtgactacctcggcaactctgtcaaggttttgccatctgcttgtatacaattgaaggatatggtgtcagcccctcggccatgctctctgcccattagaagagtgacagctacagaagatgagaaggaaaatgccatgtaa

SEQ ID NO: 36512 - DNA, 1944 bp, Zea mays
  Peptide Sequence Number=SeqID_79887
atgaacaaaagcactggcatttggagtgccatttcaaacggaactccggttccgtctccacggaccctcgctgtcgtcctcgccgcgaatgcgagggagagggcggaatgttgcatcctagctgggcggcaacagttcgccttccccggcatggctggaggatgtctccgtcgtagggctagagggcgattgccaccaccagaagctggaagaagaggtggtccgcgacccgcgcaggaggtggagccccggctcgcctcgctccccgccccagcgaggatgacgaacgccctcaacactgggggcgagatcgggatcacagcctggtttgcctctccccatccaggagctggagaccaacgggcgaaagaggcgggcagccatgcaggcggcatgccaccgtgccaagtggacgcgcttctccgactcccgacacgccagcatgggggcccaggcccacgcgtcgcgcaaaccggcgcgccggatgctgcatgcaagcaactgcaccgccacttgcgccaccaccgcgtctcctcaattgcggaaccaataccgcgactcgaggcgacccagcgcgcgacccagcagcgccagcctgacgcggcggtcaacgtggccaaaagtgggccggcagtaatgacggaggcaggcgcgcgggagcagcggtcacgtcgtcagccaagctcacgtcccatccgggggcagcaagagaaccccctctcacggcgtgaagacaacgcgcccgtgatccgttcctcgaacggctcgcgcacgcgcaacggccgccccgccaactactcgccccgtcgctttaactccgcggctggacaggcggcgtttctggcaggagcagcgggcaacgcttcgccttcgccgaaacaaccacgccaaaaaaggctccgagcctccctactgatcagaggttcgaaggctggccccccgaagggttcaacagccgcctcagatcgcgtgggccctacacccactactggtcagaggggttcgaaggctggcccccgaagggttcacagccgcctcagaatccgagcgagggatgaccaggggtacgttcgatacataaccaaggctcgggctgcgctcccgaggtacttttgggcgtgcctctgggcccctagccgacccctaacgaacggggcacggacgtccactcggattacccgcttgcagctcaccggagacaccatgttcggcgcccatcgaggaggctcgagggctgctctcgcaaacccggctctggccaaaccgttgacagcgtcaacataccagcccgagaacttgggccccgaccggctcggactcgggctcagccccggaagacggcgaactccgctccgcccgacccagggctcggactcgggctcagccccggaagacggcgaactccgctccgcccgacccagggctcggactcgggctcagacccggaagacggcgaactccgctccgcccgacccagggctcggactcgggctaagacccggaagacggcgaactccgctccgcccgacccagggctcggactcgggctcagccccagaagacgacgaactccgcttcgcccgaccccagggctcgggcaccgtcctggcctctgccgacgacctccgcctcacccgacccaggggctcggactcggcctcggccatggaagacagactcgacctcggcttcggaggagcctccacgtcgcccaacctagggcgcaggccagccacgtcaacaggaagcgccatcatcaccctaccccgagctgactcgggccgcagagaacaagaccggctccgccactcctccgacggccacgacatcacactagttgggttccaggatctctccggctgccacattggcattgtgaagaagcacaagggatacgaaggatggaacgaagccgaagctgtgcgcaaggaagcttcggcgtga

SEQ ID NO: 36513 - DNA, 66 bp, Zea mays
  Peptide Sequence Number=SeqID_79888
atggcccagaaagtttgggtatacagaggagaagggcaatgtgacaacaacgacattgcatactaa

SEQ ID NO: 36514 - DNA, 519 bp, Zea mays
  Peptide Sequence Number=SeqID_79889
atggacggcggcgtccccgtcgaggtggaggcggacagggtggatttggaggagcacaaggaggccgtgttggagccacgcgacacggtgggcgtgcgtcaccggatccatctccctcctctcttccatgggcatcacggggatgtgcgggcgggcatcgcgtggaggttatggccagggcgggtatcggttggggcggagatcagggccaaggagggcgggaggcggtggcatggtagcgtgtgtggattggaggagcgcgggcaaggatggaaggggcgggctaggacgggcgcgacggctgtgctcggctgcggcctcctcctcctctgtctacggcctcaacgaccgcgtcccttctcggggctcaaggggcgggggcatcgcgggaggtcgcggggcgaggcacggagcctgggatccggggccgccccacccaccgccctcgccgatccgccatcaacaccgatcccgtcgatggaaggttgtggtgtcccaatggacaagggttgcgtttaa

SEQ ID NO: 36515 - DNA, 192 bp, Zea mays
  Peptide Sequence Number=SeqID_79890
atggcgcctttggcaaggcctgactgcctgtcagtctcactctgtcaagtgtcactgcagtcggagtggcgcaggcggcgctgtccttctgtcagaccgctttatgttgatgggggttaccagctgagaattaggcgtcttgagggtacccctaattatggtccccgacaccatccttcactgaaatcctag

SEQ ID NO: 36516 - DNA, 2919 bp, Zea mays
  Peptide Sequence Number=SeqID_79891
atggcgagagaagcgtcgacctcccatccatcgccgccgccgccgcggagcagtttcccggcgctcgtgccacgcggcggtagtggctactttgctggcatcgttgccgaagtggcccctagagatgggagccgcggcggccgcttggggaggctctggctctccgaggccgctatggtcggcgccgggatgcggcctgggtgctttgtctccgtctcactaatttcgtcaagcagtgatcagttagatggttttccattaattaatttatttgaggagtgcaacagattctttgatcttgatctggacaatgatctcctttatggtgaagctgggaaaaactttgtggttgctacagttctcccctcgcgtgaggttccaaagaatggtatcaagctctcttgggatcttgcttgtgttttgggacacccttttgtaggtcgatcattgtttatttgccccttatgtacacttcaggccccaaagcgtagtgatgatgttcatattttacgggtaatgaaatgcaagaatctttatcttagcctagttccacctaatgttggatcttccaaaggcattgaatcagagtctgactaccatcctgaaagaagcgcaatggttatggagacacctaagaggggtccttcaactccactgcgtaagaaggaatcgcatcactttgcttccaacaatggctcttcaatgtgcttggatccaaccactgcaagatcagcactagcagatgagaaaatcaatgagttgttgcatacttcagcattgtggtggctcaatggtagacacttgcttaaaggaaactttgttcctctctcaatatgcggaaaactgtctctatttgtggtcatgggagcagaaccagatagttcttctcaagatgttttgtatgagaatgggaatacactgtctaatgcagaggattcaactaaatcccaggaaaacccagttttattccttgttgacagaaccacaaaagttcatttatctgattctgtctgcacaaagcagcttgactcagataaaccgggtttaccatcagaacctcacgagtatgatgataaaagaaatgcagatttcaatcattctccaacacttggtgggttatctaaagagtcagcaaccataaaaggaataatttcattttcactagctgatcaaattggtctgccaagatacaaaggtattcttctttatggtccacctggaacagggaagacctctcttgcttcttcctgtgcctatgatgcaggggtcaacctttttacaatcaatggaccagagatcattagtcattattacggagaaagcgagcaatctttgtacgatgttttcacttcagccaagcaagcagcacctgctgtggtttctgactctgttaccaagttgtctgattcatcatctctgaaacattgcatgagtcagatatttatcgatgaattggatgcgattgctccatcaaggaaggatgggagtgaggcgttatctattagaatggtagccactctgttaaaactgatggatgagattggccctagtgaccgtgttctcttgattgctgctacgaatcgacctgatagcattgatcctgcattgcgacgtcctggaagattggataaagaaattgaaataggagtgccatccccaggacagaggatggacatacttcgccaccttctaattggagttcatcactctctgaccaatgaagaagttgagtctgttgctctagcaacccatggatttgtgggtgctgatctagcagcagtgtgcaatgaggctgcattgagtgctctccggcgttacatcagcctaaaagaaaattcaattcaacaacttggtcatcctggctgtagtttttataagtgtaatagtcaagatactgaagattcaagctcattatcgtcatctttctcaaagttgaccatgtcatcatatgttgcttgcatgaacggtggtaacataaaaagtagcgagtcttatgatgatacagatgaaataccactatatgtaaccaataaggattttgacaaggctaaaacaaaagttagaccgagtgcgatgcgcgaggttattcttgagcttccgaaggtacgttgggaagatgttggtggtcagtgcagtgtcaaggagcaactgattgaagctatccaattaccacaaaaatgcccagaagcatttgaacgtttagggatccgaccccctagaggattgctaatgataggaccaccaggttgcagcaagactttgatggctcgtgctgcagcttctgaagcaaaattgaatttcctggctgttaagggtcctgaacttttcagcaagtgggtcggtgactcagaaaaggcagtgagatcgctatttgcaaaggcgcgggctaatgcaccagcaatattattttttgatgaaatagatgggcttgcagtaactcgtgggcaagaaaatgatggcacgtctgttgctgatagggtcctcagtcagttgcttgtggaaatggatggtttggaccagagagttggtgttactgttattgcagctacaaatcgccctgacaaaattgatcccgcacttctgaggccaggtcgtttcgatagggtgctggatgtgcaaccacctgatgaagctgaccgtgcagatattttccggatccatacacgcagcatgccatgcagtgccgacatgaatctaaatgaactcgctagactcacagaaggctacactggcgccgacataaagctcatctgcagggaagctgctgttgccgcacttgatgagaggtttgacattcaagaagtagcaatgagacatttcaattctgcgatcgacagaacaaaaccttcagatgtcaagttcttccaagaacttgcaaagcaattccgcagatcgttgacttcactgaggaagcaataa

SEQ ID NO: 36517 - DNA, 1014 bp, Zea mays
  Peptide Sequence Number=SeqID_79892
atggctcgtagaagatcccaaaagaacaagaagacccaggagaacaaggaggaagaagaagaaaatgaacgatggagaccaaacgatgaatccacctctccaaaaggtttgtcttcccattttgattcccacatatgttgtgtggctaataaaaatgatagcggaagaacaaatgaggatgaggaggaagaaagaagcttcttgcaactctatgctcgcctaagccaagaagataaggcggtcatgctcaaacttctaaaaagagcaagagagcaaagcgaagctcgtcaaaggctagaagatattctctccataaaaatgctaagctttgacgagttgactaaagaacatgaggagctaaagtgctctcatgttgatttggtccaaagcaaatcttcctttgagatagaatttgcaggaacgaaagatgatacatatcaaaagctcaaagaaaaaaatgagaggctaaaaatgagcttgacacaactaaaagggaagtgcattgctcaaccttctcaagataattgtgatcacatggtgaagaagcttgagacggaaacaaccatagcatgcactaaatcccttgaagaaaatgtcaaggacttgaggattgccaagaggaaggaacaaaagatgaaaatcaatgcctcctccaaaagcctcaaccacgcctccataaaaggtaacatccaaggcaacccaaaattgcaacttgtgctagaaagatatagagagatattccaagttcttaagagaatatggtgtcatagagtaagtgcaagccacaagcctcaagggtttctcttcacccaaaggaagaaagtttggaaggaaaaagaaacaactacaagggaggacactcacatgaaagagaaggacatcaagaacaacaccacctacttctacaaaacaatcaatgttgcggttgtgagtactctaaatccttttcattgtgagaatatcaggcataaggtgtttattgcaaatcttataagccttgatcaagttgtataa

SEQ ID NO: 36518 - DNA, 1161 bp, Zea mays
  Peptide Sequence Number=SeqID_79893
aaaaaggagatcggtgtaagagttacgactgttccccaaccttggcctggtgggctgttggaccgcttgatttgcttccctgcgtatatcgagctgcttcagccccactctgatgatatgtctcgagttgtggaccaactcttaaagttgtttatcacctttgtaggattggggacgcttcaggtggtatcggagctgttaggttggccgcaggacaatgaagatggtttccccaagttgctgagagcatgcacagtccacctcggaatccagagccagtcagaattcaaagacacctgccaagtcgtcgctcgcaaggcattgaggaccctgtgtcaactttatgaagaagaagtggccgacaccccgctcagattctttccgccctttcagagagaccgtcctgcttggatggccaggatgcgtgcattggaagggaagcagctgcttgaggacgaccccacagtcgtgtaccacactgcatacctgctcaccctggatgcgcaatatgattacatggctcggcaccaccgtcagatgattgctcgagcagaagatgaagagaagctcaaacgtaagctccatgtggatctcaccacagctcaagcccgtgtagctgccttggaaagtcgtgaagtcattgctgttgaagccctgaagcaagccaaggatgagcatgtccagaagttgatggaggcctacttggtaacccataaccaacgtagatccctacggatccaagagcccgctccatccaacccagttcaacccaggagagctgaagaccctcagattcttgaaggtcacccggtctctatcagaggagataagaaggcttgggaactaccggaaggagccatagtcttggaaggaattccagtctcccctaaggctatggataagcaagagcaccccgagtcctcccaagatcccccgccggagttgtgtgagcccctcaccatgaagaagattccagcaccatcccttgaggtcaaggaagaagctgcaagcaccccgccaccaccgccgcccttagaggagctacaagagccagttccgcttgaagaagagttcgaccctgtcctgccatctcagtcgccgccagaagaagtcatcaacatcagctccctcttgacccatccaggagatgtctcagattga

SEQ ID NO: 36519 - DNA, 189 bp, Zea mays
  Peptide Sequence Number=SeqID_79894
atgacgagccacaccaagaggcaggtcacactacacctgtgctcgcatggttttgtgccaggctataagaaattgggaggacctgttcctttgacggcaaagggacaccacactcaggttaacctttatgtttgggttctctttgccgccttcactaccctggttatagtgaaggtgtcaaacgggtga

SEQ ID NO: 36520 - DNA, 1026 bp, Zea mays
  Peptide Sequence Number=SeqID_79895
agggctagctagctcatcccccacagtccttatgctgaatctagcaccatttgagacgccgcctcttggaaggcaggagagaccaactaataccatcgtcaccgcaacagcggccatcgccaggggaaacgaagaaagctccagcaacacttgcctccagcacggacatctggacctcagccttggcatctccttgtctcatggcggcggcggcggcggcggcagctgcgacgcgtccagctgtggcggaaacaagcaggatagctatggcggtgggcagggcagccgtgacgacaaggacaacaacgtccgtcgcatgaccagctgcatcggcggcaccgccactgccaacgtgattaccgcagggcacagcagccttgctggtgatttgacagcagcaccaggaggaggaggtggtggcggctgggcagcggcgttcatgccgagcccgaccgggttcatgcatccatggagcctcgccgcacggcagcagaaggctgctgccgagcaagaccggacgcctcctgccacttacctgtcaagcagtgatgaccgcgtggtcacttcgccgtcggccgtcggctggccgccggtgcacacctcgcggcgcaacatcgtcagcgccatgcacgtaataaccaacaagcagaccgctggcgcctccagcgccgtcgccggaaacggcggcacaccacccggaagcacgacgacagccacgcacaccggcggcggcgagacgaacggggcggcggcggcggcgctggcggcacggccagcgctggcggccagcagcatgttcgccaaggtgcacatggagggctacgcgatcggcaggaaggtcaacctcagggcccaggacggctacgactccctctcaaggacgctcaccaatatggcaaccaacttcttctgccccgcagactgttcaggcgcggcagaaaaagacgctccaaagagtgacaagttcatattcctgtacgaagacttcgagggcgaccgaatgttggttggtgacgtcccatggga

SEQ ID NO: 36521 - DNA, 486 bp, Zea mays
  Peptide Sequence Number=SeqID_79896
atgcaggcggcatgcaaccgcgccaagtgggcgcaccccttcaactccaacgtgcccagcatggaggcccaggcccacacgtcatacaaccggcgcgccggttgctacgtgcgagcaactgcaccgcccctcgcgcccctatcgcgcctcctcgaatgcggaaccagtaccgcgactcgaggcaaccctgcgacaggcggcacctttggcaggagaagcgggcgacgcttcgccttcgccgtaacgaccgcgtcaaaaaagggatcgggaaaggggataccccgaaagggatccttccccgcgaaggaaacgggccccgagccccctactgatcagaggttcgaaggctggcccctcggaggggttcaacagccgcctcaaagcgctcgggctccgcgcccactactggtcagaggttcgaaggccggcccctcggaagggttcaacgaccgcctcaggccactcgggctccgcgcccactactga

SEQ ID NO: 36522 - DNA, 1050 bp, Zea mays
  Peptide Sequence Number=SeqID_79897
atgggtcggcgcgagacggagcgcgaaggggggaagaagccagagggagacagacgtaaaaaggggaaacccgcggccttcgtgcttatcccgcgcccaggtcggggtaatgatggccccgcctgtgatgtggtcggtccgagccctgggttgggcgaggcggaggctactccaaggtcgaggtcgagtctgtcttccaaggccgaggtcgagtccgagcccctgggtcgggcgagacggagaccgtcggctgaggccagggctgagtccgagccctggggtcgggcgaagcggagttcgtcgtcttctggggctgagcccgagtccgagccctggggtcgggcgaagcggagttcgtcgtcttccggggctgagaccgagtccgagccctggggtcgcgcgaagcggagttcgtcgtcttccagggctgagcccgagtctgagccctggggtcgggcgaagcggagttcgtcgtcttccggggctgagcccgagtccgagccctggggtcgggcgatgcggagttcgtcgtcttctggggctgagcccgagtccgagccctggggtcgggcgatgcggagtttcctatggcgcctgaggccggacttggctgctgtcagcttcactctatcgagtggcacagctgtcggagcggcgcaggcggcgctgtcctcttgtcaggccacctttgcattaaatgcccctgcgatacggtcggtcggcgtggcgacttggccaaggttgcttcttgatgaagactgggcctcgggtgagccgaagctttgtgctgatgggggttaccagctgagattaggagtcttgagggtacccctaattatggtccccgacagcggggttgctgtacgcctcgggcccatcatccgggttgtaggtgacaccggacttgtgatctttgccgagtgtattcctgtgctaagagtcctgcgctcgacaaacgtcgtcgttatcgagagcaggactttgccgagtgcccgacaaaaagcactcggcaaagcgccgagcacttggcaaagacccggattctggtag

SEQ ID NO: 36523 - DNA, 519 bp, Zea mays
  Peptide Sequence Number=SeqID_79898
atggtcgcctttcaagggggtcaccctccttttaaaggcgactctccctacttgcgtccccagccgtcgtgggctgagtcttctccaacacgctccaaggcgggcaggagcagcggtcacgtcgtcagccaagcttacgtcccatccaggggcagtgagagaactctctctcacgtcgtgaagacggcgcgcccgtgtcccgttcctcgaacggctcgcgtacgcgcaacggccgcctcgcgaaccactcgccccgtcgcattaactccgcggcgggacaggcggcgcctcagtaggagaagcgagcgacgcttcgccttcgccataatgaccgcgtcgaaaaaggccccgagcctccctactgatcagaggttcaaaggctggcccctcggaggggttcaacagccgcctcagagcgcttgggttccacgcccactactggtcagaggtttgaaggccggcccctcggaagggttcaacggacgcctcaggccactcgggctccgcgcccactactga

SEQ ID NO: 36524 - DNA, 606 bp, Zea mays
  Peptide Sequence Number=SeqID_79899
atggcctcagggcggacgccactgcaaccttgccctcgcccgcgccgacgcacgaggggcgaggacaagtacaaagagccggaggcctggagcacggatggtggcggtgatcccgtcggcgacggggacttctcgagccgcatccaccccgacaccgacgataggagccgtcagcccatcggcggatccccactcggatcctcccggacgagcggggcaccgacctccgcgcgaaggcgccgtaccggtgcaaaggcaggacagccccagaacatgaacgccgccctagcagcgcgcaacgtcttgggcggagggggcaccgagagccaagcgggcgagcccaacgcgctgaagctgacgacgcccgccgtcgaccagccccgcgttgtcgaagtccgcccctctcgcagggccagtgagcgccctctccctcaaatgctgaaggagaggctgacccacgaacccgcgcgagaggtagagctccggctaagcccggcctccgccccagcaaggatgatgaacatccttgaagctgagggcgggaccaagatcacagctcggcttgcttctccccacccagaggctggtggtcaccgtcttgggtga

SEQ ID NO: 36525 - DNA, 414 bp, Zea mays
  Peptide Sequence Number=SeqID_79900
atgatggtcctcgcctcagttgccaccacctcgttcgccattctacttcttttctctcccctctcatgcctccacctccgtaccaccccattctcggcagagggcgtaggagcatgcacctcctccccgtattcgtccgacaccagccccgacaccgactcgcgcagtggctattgcacgtccacgaggatgttacacatcatgcgtgcaccatcattttcgccgtccggacatcccattcgtctttccggccttcgccctgttcttcctccccaacctactgccccctcgcccacggtcgcagccgcgagccgaccgacgctcgtcgatgcgagtacggggcgagtcggtcatgctcccgtgcgtgccgtcgaggaggacatggtgacgcctgccacgcttaggttatcttga

SEQ ID NO: 36526 - DNA, 942 bp, Zea mays
  Peptide Sequence Number=SeqID_79901
atggaggtccattgccaaaccagcttgtgccagaatgaagatggtttccccaagttgctgagagcatgcacagttcgtctcggaataaggagccagccagagtatgatggtcgtgaattcgtcgagcatgacatagagaagtgtgtcgtgattgtatacattggatccagtccacaccatgtggaatggagtgtcactgctgctgggcacagattcaaagacacctgccaagtcgttgctcgcaaggcattgagggccctgtgtcagatctatgaagaagaagtggccgacaccccgctcagattctttccgccctttcagagagactgtcctgtttggatggccaagatgcgtgcattggaaggtcagcagctgcttgaggacgacccctcagtcgtgcacctcactgcatacctgctcacccttgatgcacagtatgatttcttggctcggcaccaccgtcagatgattgcccaagcagaagatgcagagaagtgcaactgtcagctccatgtggatctcaccacagctcaagcccgtgcaactgcattggaaagtcgtgaagtcattgcggttgaagccctgaagcaagccaaggatgagcatgtccagaagttgatggaggcctacttggtaacccataaccaacgtcacccggtctctaccagaggagaaaagaagtcttgggaactaccggaaggagccatagtcttggaaggaattccagtcttccctcaggctatgaataagcaagagcaccctgaatcttcccaagatcccccgccggagttgtttgagcccctcaccatgaagaagattccagcaccatcccttgaagtcaaagaagaagctgcaagcaccccaccagcactgccgccctctaaggagctacaagagccagtctcgcttgaagaagagttcaaccccgtgttgccatcttag

SEQ ID NO: 36527 - DNA, 1869 bp, Zea mays
  Peptide Sequence Number=SeqID_79902
atggtttccggtgcgggtcatggtgggtacggcggcggcgacgacgggcaggccgtggacttccggggcaacccggcggacaagtcgaggaccggaggctggctgggcgccgggctgatcctgggcacggagctggcggagcgcgtgtgcgtgatgggcatctcgatgaacctggtgacgtacctcgtcggcgagctgcacctctccaactccaagtccgccaccgtggtgaccaacttcatgggcacgctcaacctgctcgccctcgtcggcggcttcctcgccgacgccaagctcggccgctacctcaccatcgccatctccgccacaatcgccgccacgggcgtgagcttgctgacggtggacacgacggtgccgagcatgcgtccgccggcgtgcctggacgcccgcgggccgcgcgcgcacgagtgcgtgccggcgcgcggcgggcagctggcgctgctgtacgcggcgctgtacacggtggcggcgggggccggcgggctcaaggcgaacgtgtccgggttcgggtcggaccagttcgacgggcgcgacccgcgggaggagcgcgccatggtgttcttcttcaaccgcttctacttctgcgtcagcctggggtcgctgttcgcggtcaccgtgctggtgtacgtgcaggacaacgtggggcggggctggggctacggcgtctccgcagtcgccatggcgctcgccgtcgccgtgctcgtggccggcacgccccggtacaggtaccgccgcccgcagggcagcccgctgacggcggtcggccgggtgctcgccgcggcgtggaggaagcgccggctgccgctgcccgccgacgccgccgagctccacgggttcgccgcggccaaggtcgcacacactgacaggctcaggggacacgatgacgtcctagcagtacgaccgatcgagctagtaaccgctgctgcagagatcacgcgcgagttgggcaggtggcttgacaaggcggcgatcgtggaggccgagccggcggggaagcagcgggcgagcgcggcggcggcgtcgacggtgacggaggtggaggaggtgaagatggtggcgaagctgctgcccatctggtccacgtgcatcctcttctggacggtctactcccagatgaccaccttctcggtggagcaggccacgcgcatggaccgccacctgcgcccgggctccggcgccggcggcttcgccgtcccggcgggctccttctccgtcttcctattcctctccatcctgctcttcacctcgctcaacgagcgcctcctcgtgccgctggccgcccgcctcacgggccgcccgcaggggctcacctcgctgcagcgcgtcggggccgggctcgcgctctccgtcgccgccatggccgtctccgcgctcgtcgagaggaagcggcgcgacgcggccaacgggccgggccacgtcgccgtcagcgccttctggctcgtcccgcagtacttcctcgtcggcgccggcgaggccttcgcctacgtgggccagctggagttcttcatccgcgaggcgcccgagcggatgaagtccatgagcaccggcctcttcctcgtcacgctctccatgggcttcttcctcagcagcttgctcgtcttcgccgtcgacgccgccaccgcgggcacgtggatccggaacaacctcgaccgcggcaggctcgacctcttctactggatgctggccctgctcggcgtcgccaacttcgccgtcttcgtcgtcttcgccaggcggcaccagtacaaggccaccagcttgccggcgtcggtggcgcccgacggcaccgggcacaaggagatggacgacttcgtcgcagtcacggaggccgtggaaggagtggacgtgtag

SEQ ID NO: 36528 - DNA, 1797 bp, Zea mays
  Peptide Sequence Number=SeqID_79903
atggtgagaactctcaccgagtctcaccagataaaagagaaagacctggaatctttggtgcatgttaagaagataaaggaactagaagagcaattgcatggttcacaaaatgctatggcctcgcttaaggttgagctgcagagggcaattactgaattagagctgacaaagaaaactttagctgatgaaagaataaatagccttcccacatctaacaacgtttattctaataaaaatggtagccctctttctaagatacatcaacaaggaggaaatatattgttgaagaataaaaagtttgctgacaaaagtgatgatacttgccttgttccaatcaccgagaaggagaatgaagcagtggaaaacttggaggacatggatcgtcgcagtcctgatcttccatcattaatggtaaggaacaagaaaccaaagttctatcataatgggtgtacacagcgaatccatgcacttaaacagcagactcaaagtacagatgcattctggaagcaaaatcagaagcaggtcactgcattaaatagctgctcaaaggccagaatgaacaatgctgcaaaaaacccaaggtccatcatggaacaaatacttcaaacaaattttttgggtaagttcaagcgcaagagaggcagaagaagcaggcctagttataagcatgataattctagtgagcatggggaagcggaatataagttatctgatagatctgaatctgatggaaatggctgcttgctgctacttcaggcacttgaacaggatctttcaccttcaaagatgtcagctgaacatgatggggaggctttaactgacctgaaggaagacttcaaaatgagcaggagggatgctgagttaagtcggtgtaatgctttcccagaactgattgatgtacttgcagtcaacaacatgcaaatgaaaagaagaaaaagaacaaagaccgtcagggttttggaagatgatttttccgataccaaaagtgttcctgagccagataacatccagcttatgaccagtgagaaaagcatgtctggtaatcaattggtttctgggatgactaagaatcgctctgatacacccaccagaaacagtgaccgtttcttgaaatgtgctactggaaacatgatgcatcagactgatgctggtaatggtcaatttgatcctgaaatcagctctgcagtgtttcttcagtctatcaaaagtgaaactacagattatggtaacttggcggtggaccagcaggagctgataacaccaaataataatactgcaagcttgaaagaagttaatgaggatggaagctgcagtttggcttcacctaagactgatacttcgactcttagctccgtagacaaagaaaatttgaaggcgtcttctggagttcccgtgcaagctttagagaaacaagatgtttcagttggcagctccctgaacaaaaaagatcatacaaaggcatcttctggagcttccatgcaagctgaaggtgccagacacatcaaatacacattcaatcgcagaaagcgcaagggtatgtctattaacagcacccctcaacgtgctgttcctgaagagagcagtgacctgtgtagtccaactaacaagcaaaagcttcatccagatcatgtggaactgaatcatctgatagattctccacaaggcgacagtcttctagtccaggttgccgaacagaattcagaagggaaagaattgctccctgcacagatgtatttaaattttgaatcaatttctatcactttaatctcctttccctcaagctacagtggaaagtga

SEQ ID NO: 36529 - DNA, 1437 bp, Zea mays
  Peptide Sequence Number=SeqID_79904
atgtccgtagtgcatatagtattaatatgctgcgctgcttccttggatggtttggtcgccgcccgccagcggagtggacaaggctcattaaatgctgaggcggcacatcgcctgccagtggagtggatagggctcattaaatgccgaggcggcacatcacctgccgacaaagtggataggcggcgcgtcttatccgcaataaatgcagaggctgcgcggcccagaggccttacatcaggctccgcccgctggcttacgtcatgggcagtgggccacgtggcagcatcgggtctccgcctgtgcggggagcagaagcgtacgtggcacggttcggacacgtgtcagctccggacccccgcctggcctttgattaaaggcttgggtattttttgtcttggaatcccgggaccctgctgtgagtggtccgggcaccacacagcggggtccgggacccatcccaggtgtccggtttgcacccacggaggtcctggaccttgcccggaggtccggttcgtatacacaggggtccggcactttcccatggggtccggacccagtgttgacaccttggaggatattgtcttctctggccacgtggcggccccggagccgtccacgtggcggggtcgggtgctgttttaccacgcgactagagatagccgtgcgggcaccgcaccttcatactgtagtaaggggtacccctgttttagggtaccgacagtggcccccaggcccacctcaggggaggatacgagcctgcaggtggggccaaagtttgattggcgattggcatgccacttccgcgcgtttgctgacgaggtggcactcaacctggtgcgcaacctgctcggatggggcgcgccggtgttcgccggaaggatccatgctggcacctctcccctcggcgatctcgccaccggggagttcgtgctcttcgtctcctacctctcatgcgagttggcactgccgatcccgcctttcttcctgctgctgctagaggagcttggcctccaacttcagcacttcacgccccactccatcctccaggtggccatcttcgcccacctctgcgagatgttcgtgggggtggcgcttcttccgccagcgctcagacgaaagggtgttgcgcagcgaccttccagagaaagcgagttgagctgcggctccatcttcgcctccagctctgtcttcagtggccaggccgccgagtgccgtgcactgtcgtgcctccatctctttagctttaatggcctcgacgtcgcctccaacgatgagggctccttcaccttgacgcatgcatcgaggaggccgccgccgttggcaagctgtagcaccgggttgccgctagcgctgctgttcccaatggagacgccgtggagacggcgaccgcgcgcttttagcgcgaccctgctgatgtcgagtagttcatacctgtag

SEQ ID NO: 36530 - DNA, 534 bp, Zea mays
  Peptide Sequence Number=SeqID_79905
ggacaaacgaccgaggataagcaggaagtggcggacatagagagcggcagcggtggatcatttggaaagccaactttgctgttacgcagggacactttcctgttccgcggccgctcctccgcctccggcggcggtgccacgacgcggctgctctccacctcgggcacgaacgtgtccaggtctgagtggtcggacttcgacttggccggcgcgcccgtgcctgccgacggacgcgctatcaacgccgacgagaaggacaacatgccctcgttcgcggtcgtcgtcgtcgggtggtggttggtgttgctcgccagggaggcattgctgtcgatgccgaagttgaggatctcgccggactcaggcttgaagaacggcagggccgccgccaaggaaggattagacgcgaaatccgagaagttgagctcccggcatcagcgtgatcctcatcgcgaaatccaagaagctaccctaccgaaggggaaagaaatcaagaactgggaggccacgggagatggggtggaggcggagcactga

SEQ ID NO: 36531 - DNA, 198 bp, Zea mays
  Peptide Sequence Number=SeqID_79906
atgccagagccacagtgcttcctggccgcctcagccacccacaccctcctcctccatcgacctattgaagctttggaactcacattttttgatatgaggtgtagcgatacaatatgtctactaacagagtttgtgttcttgatagttcatttaggattgaatgaagttactggtgtgaccttgtcgagactgaagtaa

SEQ ID NO: 36532 - DNA, 1155 bp, Zea mays
  Peptide Sequence Number=SeqID_79907
atgcgtatattattgacctccaagcaaggagttgctggaccaaacagattttgggtcagatcgcatgtcataaatcaagaatctcagaagcaccagcaacacattccatctatggtccaaaggttagctcgtcaaatggataagtggttgaattttcttaacaaattggcataccttcacgtatcgctggtccagtgtgcgtactgcgactcagaggtgatgcacatgctgacgcagatcctgctgtccggcctcgctgtcggtgtgggatctgggcgccgagggagggggacggggctgggccccaatgcaggattgaacttcacctcccgctaccgggacaaacacgagcacggaccacatcgtgttggccacagcgaggggatctggcggcgccgtcgacgcaacacggtggagcacggaccgagccatccctgcgcatgcattgagacgcgaaggggggcgttaccactggctggacggggaagaagagaggagccagggggcgccaaaaccgccggctggacaaggaagaagaacgtggatccagggctggtgcaggcgtcagtttcttctcccaaggactgctgcgacgacgacaacttctccgataccggcgatgacgcgtgctacagtgacacaagactcatgcggagggtggggcaagatctcgaggaggaagagggcgagagagaggagtggggactggggagcgagtggagagaatggaggcgagagagaggtgtggggagcgagtggagagaatggagaccgaggcagatgcctaggaaggggcggtccctttggatgtactcacggagtgcgtcggccatgcccggtcctgttgaggacatccatggcggagccgaaggcgccgacaccgggaaaaacgagccgttccgcggtgtcgatgtcctccgggctctgcacgtcgcggatgtcgaagccgaggtagcgaattgcgtagtggagctagcggttgggcgcgacgtcgtgcggacggaggttgccgaagaagactgctgcggtcgctggagtatgggccgccccaaacatatgggccgcaccaaaaattcagcccagaacgccggtactgctgtggtgttgtgtcttgcaaaaaaattagtaccatactggctagtaaaggagacatag

SEQ ID NO: 36533 - DNA, 702 bp, Zea mays
  Peptide Sequence Number=SeqID_79908
atgacaatcaacaaaagtcagggacaaacactctcacaggtcagcatctacctcaaaaagcctgtatttactcatggccaactttatgttattgtttctcgagtaacttccaaatcagcaccgcataagatacatgcaaagattcaagtacatgtatctagaaagtgtcttttccgaggtgctactgacagtggaccactacaacatgttgatatggttttgtctgatcgagagggtaatgttatttatgctgaaatccctggaaatttagctgaacaaaaagcaacaaacattgaaaaaggaggagtttatgacatcaacagatttagagtgtgcgcaacaaaaactgtgttcaaaatagtggatggggacaaaatgatccagttcacatttcataccatagtaaaacgtgccacaagccctccaacaacatttccattatatgtttatcggctaacatcgttttatcaaattgagcctcatgttcaaaccacgaatatctttgttggtgtctacctaagtggtggtcctgcctgtagatggtacttcaatccagcaattccagaggcagaaccttatcttaccagtgcaaacaagagtaatatcaatagcccagaaaaagatgatggcgataaggataccgcacaggatgtcattgttggaacttgctctcctgggcgagtcaatccaaccggggaatga

SEQ ID NO: 36534 - DNA, 234 bp, Zea mays
  Peptide Sequence Number=SeqID_79909
atgaggagggctagtggggtggtggggatgtggggagagagttctagcggggagatcttcaatcgcggtaatggagggcatggagatctgcatgcgcggttcttgcgacgcacaacaagagctatggaggcgtgcggcggggtcgcacggggcacgggtgcaggcgggggagcgcggggctgtggtgtcgccctgcgcctactggtgacgagatttggagatggcggcggatag

SEQ ID NO: 36535 - DNA, 453 bp, Zea mays
  Peptide Sequence Number=SeqID_79910
atgaacctcttctcccagactggacgtctgcagtctgcactctgcacccccgtgccaatcccgtttctattcagtcggttcccctctcccccaagccaaacaccaccatccttccctccctccctacgcatcctctccccctcgacgctttccccacccaatccgaccgccggggcgggcgattccctggagattcggcgcggattcggggctcctctcggggtttctcggcgaatcagcggggatcgggactcccggctgaaggtagtagaggtggcccttgtcatttgtgaatcctctatctgtttcggtaactgtttgcaacagtttgtgtggagattgcataccatcaccttccctgaagtgaaaaatatatgggctgatcttggcatttcatgggaggttctgaagatgacgagccaccctcaaaacgcgcaagaacatcctcagtag

SEQ ID NO: 36536 - DNA, 390 bp, Zea mays
  Peptide Sequence Number=SeqID_79911
atgtgcaaatactttttttctaaacaaatccctaaatcccacaaaccccatcctcttcccagtcctttcccactccccagcatacgccctagcacggtgttcatctttgatatgagctcaccgctgtgcagcatgtgggccgccgttcgtgtgggcagagagcggtggggacgagaatggctggtcgaggtcctgcgcgtcgctgcggcgctcgagctcggctccgacgatgggatcgatggcgcgaccgaggccctcgcgctgccacatccccaatcctctgcatccacttttcgctcctctccggcgagtgaactgccgtggttctcggcgagaaggatgctggagcgtggcgcgaacgcggatagcgagtgcaagcttgtttgctag

SEQ ID NO: 36537 - DNA, 2349 bp, Zea mays
  Peptide Sequence Number=SeqID_79912
atggcgcaggcctcgtccttggtggcggtgctgcgccgccgcacccccgccgctgcccgcctgcttcctcaccggctcgtctcctccgctcccgctccggcgttcgcctcgtcctcattggtcccgctccccttgccaagcctgatcgagggagacagatgcggcggcggcctctccgcttcgttcggctcccactcacgcctccggcttcctcggcgacaccatgcggttgctatggctaccaggacagcgcaccaagttgcttcgagccccgagagcccagcggcggtgacgtcgttgtcgtcaagtgaggctagcactagcactgctgcttcagagcactctgagttggtcgattttatcaagtcagcgtttgggaagcttgaaggtcaaaatcattgttggttcaacatcatgaatgacacttggatgaacttgaaccatgaaggaatatatcttcttcttttgtatcaatcttgtggaacattgaacaacgacggcaaacatctaattgcttttgagagcttgaaacatctgcaacagaggtatccacgcctgaatgtttttgctttgcaacatgggagtgatgttagttctttagcttctcaaagccaagctttccgcacaatagtgaaggagtacatcacatttcctatcttgatctcagacaaaaacttctccaatatgacaaatggtgcttgctacttgctatttgaaggttctaaggaccctgtactattcacaaactgggttgaggagcctgatgtcatgattaaggccatagatgaacttaccacgtctaaagaaaaaccttctgaaaatgttctgtcaagagtttcttggcagaaagaagaggttgtcaaagagccatctgttggttccttcagaaacttgttactttaccacccagcatgtgtatcagttgatgaagatggggatcgcatttttatctctgacagtaaccatcataggatcatcattagcaacagcaatgggatgattttagattataagattggatcttccccaggctatgaggatggagagtttgagtcagccaaattcttgcgcccagcttcatcattttatcacgctgctgaagactgtctatttattgtagattcagagatgtttcttacatttcatattagattaataaaaactgggaaggtgtttggaaatataggaatctttgtctggagttataagaatcatgcagtcagaaaagcagatttgggaagaaggactttacaaacagtttatccagtcttcaataaaagcaatggcatctggagctggattaccgataagcttggtatgagaaaagaagctactccaactattcaagattttcatgcagactccatggcacttccatggcatttgatacaaatttcagaggacaccttattagtcgcagaccgcagctttgaaactccgtggaccctgacaatatcaactggcgaaaagcaggatattggaagagtgcagaagattcccaacaatgagcttatatcatctatagcaagatttcagaattacattgtcttctgtgatacagatggtcaaagggttctgaagcacgacttggataccaagaccacctcaaccattcaattttctgactgtgaggtacttgggttgccatattggtctgtttgcaatctcgagagagtgtcaacctgggggtattcatctggacagttacaggagcatgcgcagcaagtagacgtgcttcctggaagatgcaacatcaccgtctacgtggacattccggttggcactgaacttgccgcgcctttggtggataattgcatctggcgccaagtaaggggatctggcgctgaggtctctggttctgatgggccagacacggccacagagaaggtcggcatcgcgcagcagtggtatgacgagctggacaacctggccttctctgaggtggcggaggagcctactgccgctgcgcatggagacggcaacactgacgatcaaagttaccaggagcagagaagagtgcaattcacctgcacagtgaacgtcagccctgggacgtgtgagctggtggcctctgtcgcgctgtatctgaggctggctggaaagagaacgacgaccgacggcgtggagctcgtcaagcgggtgatgggcgggtgccagttccgcgaggagcaggccggcgtggagctgctggcgcggtgccgcgaggacgacgacgcgacgggcctggtggtggtgaagccggtgcacctgcggctgcggctggtgtgcggcgaccacccggccggcgccaccaacaaggagaccatcagcaccgagtccagcctcaagatcaatgtcaccttggactag

SEQ ID NO: 36538 - DNA, 1962 bp, Zea mays
  Peptide Sequence Number=SeqID_79913
atggcgcggcgggtgcggccgtcgcacctggtgctggcgctggcggcagcctacctcctcctcatctccctcaagttccgccgcgtgctggacctggccgccaccgacctcgcggacgaccctgccgccgccgccgccgccgccttctcttctccgtcctccgccgaccacctgcccccgcccgggtccgcttccgccacctcctcctcctcctcgcccccgttcccggtccgccccttctggcaccgctacgaccgtgtgtccctccccgacctcgcgtcccgcaaccgctccgcgctcgaccgcatggccgacgacgcctgggcgctcggcctcaccgcctgggaggacgccgccgccttcgcaggggacccctgggcgctgctcgccgccgccacctcccgcgcctccgacgccgccaagtgcccctccgcggtctcccagcgcgcgcggggccgggtcgtcttcctcccctgcggcctcgccgcgggctcgtccatcaccgtcgtcggcacgccgcgcgcctcgcacagggagtacgtgccgcagctcgcgcggatgcgccagggggacggcaccgtcatggtgtcccagttcatggtcgagctccagggcctgcgcgccgtcgacggcgaggacccgcccaggatactccacctcaaccccaggctcaggggggattggagccagcaccctatcctcgagcacaacacctgctacaggatgcagtggggcgccgcgcagcgctgtgacggcacaccacccgacgacaatgacgacaaagtcgatggattccccaaatgtgagaagtggatacgcaatgacattgttgacaccaaggagtccaagacgacatcatggttgaagagattcatcgggcgtgcgaagaagcctgcaatgacatggccattcccctttgtagaggagaggctatttgttctgactatacaagctggagttgaaggtttccacatttatgttggtggtcgacatgtgacatcttttccttatcggccgagcagacacttaggggtaccaggtgatcgttttcaggggttcactcttgaagatgcaacagggttatttgtcaagggtgatgtagatatacattcagtttatgccactgcacttccttcgtcgcatcctagtttttctcttcaacaagtccttgagatgtcagaaaagtggaggtctcggccactaccaaaaggccccgtttcccttttcattggaatactgtctgcatcaaatcatttcgctgagcgcatggctgtgaggaaaacatggatgcaggctccagaaataaagtcttctgaagccgtggctcgattctttgttgcactgaattcaaggaaagaggtcaatgtaatgttgaagaaagaagcagaatactttggagacattgtcattttgccatttatagaccgctatgagctggttgttcttaagacaattgctatctgtgagtatggggtccagaacttgactgctgcaaacatcatgaaatgtgacgatgatacatttgtgagagtagatgtagttctgagacgcatcaagttgaacaatggtgacaaaccattatatatggggaaccttaacctcctgcacagaccattgaggactggaaaatgggcagttacagacgaggagtggcctgaggatatctacccgccatatgcaaacggaccaggctatgtgatttctggtgacatagcaaaattcatcgtgtcacagcatgccaatcagagtttaagactgtttaagatggaagatgtaagcatgggcctatgggtcgagaagttcaattcaacaaatcctgtccaatattcccacagctggaagttctgccagtacggttgcctggagaactactacacggcccactatcagtcacccaggcagatgctgtgcttgtgggataagttggttcgtggtcaggcatcctgctgtaactacagatag

SEQ ID NO: 36539 - DNA, 129 bp, Zea mays
  Peptide Sequence Number=SeqID_79914
atggcgggtaatctttatgttggttcattcatttggattaggcaaccataccaagatgtggcaggtggagcaggagtgatcactaccagaatcgtcgcctatgccgagtgcctggtctacatagtgtag

SEQ ID NO: 36540 - DNA, 309 bp, Zea mays
  Peptide Sequence Number=SeqID_79915
atgtccattggagatgtgtgtcctaaggaatccgaagagcctccacaagcacaagatcaccgtcatcttccaatcaagcatctccaccaactcaagatgaggaacaggctcaagacaatgttgatgaaaatcaagaggttgagccacctcaaaaggaggacaaggatcaagggggagatgaagttgatcaaggcaaggaagatgatcaagaaattcaaggacaaagaccgccactcccaagagtccaccaagcaattcaacgagatcaccctgtcaactccatcctcggtgacattcataagtgggtaa

SEQ ID NO: 36541 - DNA, 150 bp, Zea mays
  Peptide Sequence Number=SeqID_79916
atggagtcggcctacgcctgctctggctcactcaaaaccgcagagaacccgctgcaatgcgttgtgtctgaacttgccactgttcctatagttcatgatcatcgtgatgctgagataagcttacacttactgaaagagaaatcgggttaa

SEQ ID NO: 36542 - DNA, 435 bp, Zea mays
  Peptide Sequence Number=SeqID_79917
atgggagaaatttggggagtagcacagtccatcgagactcgagagacgccggaggaggggaaggatgatgtggccgccgcgtccttcgcgttgccgggcgccgtcgagggcgcgcgcgccgaggtgctgtgcgtgcatcggtacagcgggagcatgccgctgggcacggcggccaccatctcctgcagctatctggtcagcacggccaccatggtctacgcgcaacacctcagccgcggactcccggaccccgccgttgacctgctctgtcccggcgtgctcgtcttcgccgtcggcctcgccggcaacaagcccttgtggcggtcgcgcgatccagtggcgagcgaggccgggagctccgcgcagcccgctgcggagccatcccctgggctgcggtcccacgcgattgagacggagagcgggcgcgaggaatag

SEQ ID NO: 36543 - DNA, 912 bp, Zea mays
  Peptide Sequence Number=SeqID_79918
atggtcagcccgagccgaaggtcgggcgaggcggcgactcctccgaggtcgaggttgaggccgagccctggggtcgggcgaggcggagaccgtcttccgaggtcgaggttgaggccaagccctagggtcgggcaaggcggagaccaccttccgaggtcgaggttgaggtcgagccctggggtcgggcgaggtggagaccaccttccgaggccgaggcggggccgagccctggggtcgggcgaggcagagcttcctgttgtgcctgaggccggacttagctgttgtcagcctcaccctggcgggtggcacagcagtcggagcggggcaagcggcgctgttttcctatcaggttccaagttctcgggctggtatgttgacgctgtcaacggtttggccggagccgggtttgcgagagcggcccccggcatggagcaagaggacggtcaaggactgactcggcttttatcatacaccccttcgttgcctttccgcaaggaggaggggggggggaaagcgccatgttgccctcggagggcgccgaacatggtggctctagtgacgagtgaggtatccatatcccggaggcgtaggagtccctcggctcggtcggccttgccactcaaggcttctcttgctcagttaaggaaccctcagctgctctgtgatgagccggagctggaggcagcggtgtcagcatggacagaggcggagttggctcgaaaaggggcttcgtcggcccaggagcaggcggcttcccaggccgaggaggtgcagcagcggcggcccgagcctagccgggctgatgtcctcgggggacagctggctgaggctatggagcggccggacaagccatctgctcgggccgggttcctggtggagaccctggcggcgatggcccaggcgcggtgctga

SEQ ID NO: 36544 - DNA, 72 bp, Zea mays
  Peptide Sequence Number=SeqID_79919
atggggaagcctgtcccatcactcctcatgctcatcctcagccgagtacaatggatcaagcagtctcattag

SEQ ID NO: 36545 - DNA, 573 bp, Zea mays
  Peptide Sequence Number=SeqID_79920
atggcccgcacccgcgcctataaaaccctcccagacttcggttgcactcttccgcgcaccctcaaacctcaccggagtctagctcgccgccgtttgcccgtgcgcagcgtgtccgcggccgcccaatccctctgtcaccgtagaccggccaatagagccattcccaaccccgtccagccctcggagaagactgtgcacacctccgtgaagctccccgagcgaggaatcggagtttgcttcgccggagaggccagtccacgctcgccggagctctcaaccccgccggagtacgtggaccgggtaaaccactcaaccatccttcgattccttgtgcacacggtcactacgttaccccgtgaagctcaccgtgcccttggattgacccagttcgccgtggtttggccggataacttagaaaaaccctacaaaaataacccccaagactgtaaccttgctgacggagagtacatcctcgtaccggagcaaggagctgctcaggaggtagccccggatccagcaccagaggacctgcctgccactgctttggaaggcaagccccggttttatgcataa

SEQ ID NO: 36546 - DNA, 729 bp, Zea mays
  Peptide Sequence Number=SeqID_79921
atggcccgtgcccgcgcctataaaaccctcccagacttcggctgcactcttccgcgcaccctcaaacctcaccggagtctagctcaccgccgtttgcccgtgcgcagcgtgtccgcggccgcccaatccctctgtcaccgtagaccggccaatagagccattcccaaccccgtccagccctcggagaagactgtgcacacctccgtgaagctccccgagcgaggaatcagagattgcttcgccggagaggccagtccacgctcgccggagctctcaaccccgccggagtacgtggaccgggtaaaccactcaaccatccttcgattccttgtgcacacggtcactacgttaccccgtgaagctcaccgtgcccttggattgacccagttcgccgtggtttggccggtacactcgccgccgacgagaacacccgcctgcgcgcgtggaccgggcgattccggccatccccgacgtcaagccgtacctcgacgtgaccgccagagtctccccgagccaaccccacccttcgccggacctccctcgccgccggataacttagaaaaaccctacaaaaataacccccaagactgtaaccttgctgacggagagtacatcctcgtgccggagcaaggagctgctcaggaggtagccccggatccagcaccagagtctgcaccagaggacctgcctgccactgctttggaaggcaagccccggttttatgcataa

SEQ ID NO: 36547 - DNA, 432 bp, Zea mays
  Peptide Sequence Number=SeqID_79922
atgcggagttcgtcatcttccgaggctaagcccgagtccgagccctggggtcgggcgaagcggagttcgtcgtcttccggggctgagcccgagtccgagccctggggtcgggcgatgcggagttcgtcgtcttccggggctaagcccgagtccgagccctggggttgggcgaagcgaagtttccaatggcgcctgaggccggacttggctgctgtcagcctcactctgtcaagtggctcggcagtcagagcggcgcaggccacctttgcattaaatgcccctgcgattcggtcggctggcgtggcgacttggccaaggttgcttcttggtgaagactgggcctcaggcgagccgaagctttgtgctgatgggggttaccagctgagatttaggagtcttgagggtacccctaattatggtccccgacagtag

SEQ ID NO: 36548 - DNA, 924 bp, Zea mays
  Peptide Sequence Number=SeqID_79923
atggagcaccgtctcgggctggaaaggttgctggagactgcccatctggagcttgacgggaagctattcatcaacacgcagcaggcccctacctggcgcgccaactgtcggcgtttcgaacccagggggtccctggaccgacgagtaaattgtcgccgcgtgccccagcccagatgggttggcgcgagacggagcgcgaaggggggaagaagccggagggagacaggcgtgagaggtgaaacccgcggccttcgtatttttcccgcgcccaggtcgggtgcgcttgcagtagggggttacaagcgtccacgcgggagggagttgggcgaggtggaggctcctccgaggtcgaggtcgagtctgtcttccgaggccgaggtcgagtccgagcccctgggtcgggcgaggcggagaccgtcggctgaggccaaggctgagtccgagccctggggtcgggcgaagcggagttcgtcgtcttccggggctgagcccgagtccgagccctggggtcgggcaaagcggagttcattatcttcctgggctaagcccgagtccgagccctggggtcgggcgatgcggagttcgtcgtcttccggggctaagcccgagtccgagccctgcggtcgggcgaagcggagttcgtcgtctaccggggctgagcccgagtccgagccctggggtcgggcgatgcggagttcgtcgtcttccggggctgagcccgagtccgagccctggggtcgagcgaagcggagtttcctatggcacctaaggccggacttggctgctgttagcctcactctgtcgagtggcacggcagtcggagcggcgcaggtggcgctgtcctcttgtcaggcctgtcagtggagcggcaaagtgactacggtcacttcggctctgtcgactggagggcgtgcgtcaggataa

SEQ ID NO: 36549 - DNA, 240 bp, Zea mays
  Peptide Sequence Number=SeqID_79924
atggaccaaaaatcccttgatgacacaagatataaccattgcatcattgtgagggtaatctttaagctgaaggtcttcctgagagaagaacttgagccgcctgtgattgggaacacctgcttcgtagccgaagatgccacagcttggttgctttgtgaagccatcgtcgcagttgtggaagtgagttcaccggaggtgggcgccaatgttggtcacttgttctcagatgctataaattaa

SEQ ID NO: 36550 - DNA, 589 bp, Zea mays
  Peptide Sequence Number=SeqID_79925
cggagaaaagggcggaggggcttaccggcggcgagactgctccggtgaagtggtcgaggacgaaggggaggtcgcggggatcacaacgatgggtcagggaggtccacgggatgccagagaagctatgagcgcaaggaattggtcggagactcactggatagcttggtccacacgcggcggcggaagaccgaagtccggtgaggtcgatctcgggcctccgttgaagtccggccgggtccgagggcttggcaagcttcacgggctactggcggagctagccgaagcactggcttgcccagggaatggctggagtgggctggccacggtggccgaagctctggcggcaatggcgggcggaattgagctcgccggagctaagggaaagtggctggccggtgagggtgagtgcggggcgaagagagggagttgtagcgtcaccaaggtgccagtgtcagaatgcctggtcccgaggttaagctgcgccaaaaccatgccaaacgaatttggtttgagttcaaactttcccagaatgtgttcaagggaatttggcacgactttgatatttggatcttctggctttgagttttga

SEQ ID NO: 36551 - DNA, 291 bp, Zea mays
  Peptide Sequence Number=SeqID_79926
atgaggtcttggtgcttaggaatgctcaagggatgcttggtgtgctccttcatgcgcctaggggtcctttttatagcccccaagtgccgcaggtgggaaggtgaattatcaaggtcttccgcaccagataaacagccacctgcactcactgaacggtgggcaacagagtccgagaagcatttgagaacaagtccccaacaggcaccggacccctgcacacaccagggtccttctcgctccgggaccctgctggagttcgagaagggtgggcaacagagtctgagaaggtga

SEQ ID NO: 36552 - DNA, 1029 bp, Zea mays
  Peptide Sequence Number=SeqID_79927
atgcaggcggcatgcaaccgcaccaagggggcgcaccctttcgacttcgacgcgtccagcatggaggcccaggcccacaagtcatgcgggcggaagcagcagtcaagtcgtcagcaggctcatgtcccctcctgggacagtgggagagccctctcccacgacgtgaagacgacgcgcctgtgttccgttcctcgaatggctcgcgcacgcacaacggctgccccgcgaaccactcatcccgtcgcattaactctgcggcaggacaggcagcaccgttggcaggcgaagcaggcgacgcttcacctccgtcatgacgaccgcgtcaaaaaagggaccgggaaaggggatactccaaaagggatccttctccgcgaaggaagcgggccccgagcccccctactgatcagaggttcaaaggctggcccctcggaagggttcaacagccgcctcagagcactcgggctccgcgcccattactggtcagagctgcctcagagcacgcagagcgagggatcaccatgggtacgttcgatacataaccaaggctcgggctacgctcccaagggctcggcccccgtctcggccttggaagatggacttcgcctcgcccgacccaagggctcggactcagccttggctccggaagacgacgaactccgcctcgcccgaccccagggctcagactcagcctcggctccagaagacgacgaactccgcctcgcccgaccccagggctcggactcagccttggctccggaagacgacgaactctgcctcacccaaccccagggctcggactcagcctcggctctggaagacgacgaactccgcctcgcccgaccccagggctcggactcagccttggcttcaaaagacgacgaactccgcctcgcccgaccccagggctcggactcagccttggctccggaagacgacgaactccgcctcgcccgacccagggctctgactcagcctcggaagacggactcgacctcggcctcggaggagcctccgcctcgcctgacctag

SEQ ID NO: 36553 - DNA, 486 bp, Zea mays
  Peptide Sequence Number=SeqID_79928
atggcggtgtggccggaacttgggtggccaggatgtcgtgcggaggtgatccgccagagcggcgcagcctactccggccaaggggacacccgtctaggaccgggtgcccattggcgtctgcggtgccaccacagcgaagtcttgatcgaggtagaatgcgccatactgagcagccggtcgacgtcgtcccgccactgcttcatggctcctagtgatgtcgtggagcttggagggtgtcacaataactccctggttgctgacaacgccctcggagacacccttgatggagtccgggatgtttgcaccaccgtgtgccgccgtgtggcgtgcacaacaggagtgactggtgtcgggcgactgggagcctgcggtgtggaggaagcagcttctccctccaccgcaaaatctaccgaagtctcggcgcagtgctctatgatctgcaccatcatgattgggcaagaaatcaagcgaaaacctaatgcctag

SEQ ID NO: 36554 - DNA, 438 bp, Zea mays
  Peptide Sequence Number=SeqID_79929
atggcgccccgcgtgctccatgacgacggcgactctcagccccttacggaagcaaggagacatcagcaaggactcgacagccccgacagttgtccttccgcaaggctccagcgctccttcgacggccacgacatcacacgaacagggtgccaaaacctctccggctgccacgacgacatccgcccggggcggaggtcgttgtcgctgctggtgcagaggtggtcgacatcgttggtggggctatccggagccagcttccagcgtggctcttgctggtgtggaggttttagtctgggtggccaagttgcgtgtccggacccccttgggtcgcggttccagatactaggacacttgtcgcagggcggtggagcgtgcaggcccatggtacaggaccaggctgagcggctacatgggctccggaccaccccaggagactag

SEQ ID NO: 36555 - DNA, 1557 bp, Zea mays
  Peptide Sequence Number=SeqID_79930
atggcctactcgaagccttctctaactcctccggtactcctcttggtaagacgtactgctactcatgtcttcttccctgcatatatgtacagtactactaatataattaagaagctcgatcgagtgcactactggatgtttttatttgccaccaccgcacgtatgtactcagcgatcgtcttctccatgcatgtgcgttctcatacacaagtaggagacgagcagggcgcagtggaggagtccccgaggacggtggaggacttcctcggcggcgtcggtggcgccggcgccccgccgcagccggcggcggctgcagatcaggatcaccagcttgtgtgcggcgagctgggcagcatcacagccaggttcttgcgccactacccggcggcgccagctgggacgacggtggagaaccccggcgcggtgaccgtggcggccatgtcgtcgacggacgtggccggggcggagtccgaccaggcgaggcggcccgccgagacgttcggccagcgcacatccatctaccgtggcgtcaccaggcaccggtggacggggagatatgaggcgcacctgtgggacaacagctgccgccgggagggccaaagccgcaaaggacggcaaggaggctatgacaaggaggagaaggcggctagagcttacgacctcgccgcgctcaagtactgggggcctacaaccacgaccaacttcccggtgtccaactacgagaaggagctggaggagatgaagtccatgacgcggcaggagttcatcgcgtcgttgcgcaggaagagcagcggcttctcacgaggcgcctccatctacagaggagtcacaaggcatcatcagcacggccggtggcaggcgaggatcggcagggtggccggaaacaaggacctgtacttgggcactttcagtactcaggaagaggcggcggaggcgtacgacatcgctgcgatcaagttccgcgggctcaacgccgtcaccaactttgacatgagccgctacgacgtggagagcatcctcagcagcgacctccccgtcgggggcggagctagcggtcgcgcccccgccaagttcccgttggactcgctgcagccggggagcgctgccgccatgatgctcgccggggctgctgccgcttcgcaggccaccatgccgccgtccgagaaggactactggtctctgctcgccctgcactaccagcagcagcaggagcaggagcggcagttcccggcttctgcttacgaggcttacggctccggcggcgtgaacgtggacttcacgatgggcaccagtagcggcaacaacaacaacaacaccggcagcggcgtcatgtggggcgccaccactggtgcagtagtagtgggacagcaagacagcagcggcaagcagggcaacggctatgccagcaacattccttatgctgctgctgctatggtttctggatctgctggctacgagggctccaccggcgacaatggaacctgggttactacgactaccagcagcaacaccggcacggctccccactactacaactatctcttcgggatggagtag

SEQ ID NO: 36556 - DNA, 333 bp, Zea mays
  Peptide Sequence Number=SeqID_79931
atgaggaaggaagaaagcgatccaagcaacaagagcataaagaacacgaacaaactctctctcaagtcactaagtggttggagtggatttggcactaggagaggctttgattcttttgatttgtgtctaggagtgaatgcactagctcttgtattgaatgagaaccttggaagacttggatgcttggagtggtggtggttggggtggctgctgtcgatgggtgcaccggacagtccgtgttgcagtgagccgttgcagtcgaccgttgcgctggatagccgttactccgctggtgcaccggacagtctggtggcacaccagacagtccggtga

SEQ ID NO: 36557 - DNA, 1965 bp, Zea mays
  Peptide Sequence Number=SeqID_79932
atgccatcctcttcttcttccgccgatgccacgccgccggccgccgcctcgtctgaggagacgttgagtaacgtgatggtggaggagttgcgcgccggcgactctgttgaatttgatgtgtcacggatgacgtcagcccgtattgaagatatgcagcggttgggctactttggcggcggagtcgctcgtgctccggggacggaggaagtccccgagccggagggcgagttggttgttttcgaggcgttcttcgtcgccggactccgcttgactgcgcaccgggtcttcgaattaaatcaactgccgtacgacggctaccctggtcaagacgaagcggaccgccgtgggaagaaaccggcggtggagactggaggcgaccctgcgctggtggccgccgcctcctcgaaaaagagaaaattagtgatggacaaggatcgccaaggggcggcgcgaaaacgccaggcgactgtgagggttcacgaagctcagccgaaaaggcagcggggaacggcgaaggctgaggcctccggcggaggcaagccgccgctgccggcgaaggtgggcgcctctgcgcctggcaaggcgccggaggtgacggtgggcgccggaggccccaagctgacgaaggtggtgccgtctgtcagcggagtggcggaggctgcgaaggcggcccgaacgttaccgccgcccggcaaacgcgttgccgacttcggcaccgagattaatgtggaggattatcttggggggtcggacgagggcccgcttgctctagttgtgcctggcgcggcgatcgcgacggctgcgccagcgccgaaggcggggggagagacccttggcgccgggggcgaggtgtctgccctcgcgctggtcagggacgaggcgggcgtggcgacccgccggctgaagggagcgacggaggcgttgagtcgagcgacggaggcgctgagtcaggtggctgacttcaccagccgcaccgcgtcgggggcccttccggcagctttgtctgccgagtcggcctccgacagcaagtgccgcaaactggcggagaaggtggccgccctggagaaggagaaggctgacctccggcgccagctggcgggggagaggagggaggccaacgaagccatcgccaaagagcaggctgctcaggcggaggccaggctggcgcgggcggaaggcaatatcgccaaggagctcgccggagagctgcagcggcggcttactgccctggagagccgcgcggagggggccgaggccgcgatgcgagcggaggccgaacggacgcgcacgcagctcatgactgcatatcgcgagctgggtgtgcggacgggtgacttcgaggtgccggagcgagaggccggacttcgctgtctggaatgggtgcaggaggaactgcaggagctccccactgtcttggcggggttgatgtcgttcacctccctggtcacctgcgaggcagcgatgaacgcgctctctcgcgaaggctgccggcactttgaggccctcgaccaggcagatgaggattttgggcgagatatctttgaggtcgaagaccctgtggtgaaggaatccgccggggccctctatgaccggatgtggggttcatacggttgtgaggtggtccgggcgcgggccgaggctgcgagggctcaggcggagcgcggcgagcgggtggacgacttcggggcgctgaacagcgcgctgcctgacccggagacgacccctgcggaggccgcgactagagtcgccccgggaccgaccccggagactgcggaagatacaccaggcgcccctgcacctgctgcggccggcgaagaccttcccccaaaggtggccgaaggcgcgcccgatgcccccgcagctgctatgccgagcgctgaagatccagcggaggtgggggcggaggcagcggcggaggcctcggcggaggctcccgcagcggcagggccttcgcaggtggcatag

SEQ ID NO: 36558 - DNA, 141 bp, Zea mays
  Peptide Sequence Number=SeqID_79933
atggggacccctctggcggattctttgccgagtgctgtcaggcagacactcgacaaagaatgtaagaattggtctgacactagggagttagaaagtgtgacggtcacaaaaattgcccggagtaaggtttctttaatctag

SEQ ID NO: 36559 - DNA, 300 bp, Zea mays
  Peptide Sequence Number=SeqID_79934
atggaggagccgcgcccgcacacctgtggtggaggggaacgaggcaggagaaagctacgtggcaggggtgttgctggcgccgagcgcagccgcgtgacacacagccctcatcggcggtggtattccggcccaacggtggcggctacaggtctcacctggttcgcgatgagggatgagaggagggatgtggcatggagtgcgcaaagcccaggatttatatcctacagagagggtggagtccgcacggaaggagagagcggtcgatccaatcctggcggcgaactcttaggaagacgctag

SEQ ID NO: 36560 - DNA, 580 bp, Zea mays
  Peptide Sequence Number=SeqID_79935
tagccgcggcggagaaaagggcagaggggcttaccggcggcgagactgctccggtgaagtggtcgaggacgaaggggaggtcgcggggatcacaacgatgggtcagggaggtccacgggatgccagagaagctatgagcgcaaggaattggtcagagactcactggatagcttggtccacgcgcggcggcggaagaccgaagtccggtgaggtcgatctcgggcctccggtgaagtccggccgggtccgagggcttggcaagcttcacgggctactggcggagctagccgaagcactggcttgcccagagaatggctggagtgggctggccacggtggccgaagctctggcggtaatggcgggcggaattgagctcgccggagctaagggaaagtggctagccggtgagggtgagtgcggggcgaagagagccacggtcgaacacgtgttcccgttgcctctgcccctgttcaagcgccgattgggagcaaatcttcgcgaatttgggcaagatcactgcaagggatttgttcaccagaccaagctttgtcttttgtgtatggacgacgtgcggttttag

SEQ ID NO: 36561 - DNA, 2706 bp, Zea mays
  Peptide Sequence Number=SeqID_79936
atggaggtagttgagttagttccttgcgcccacaacaagtggggcaattggcatgagttttggttctacgtcgcggagggtaccgtcgaagaccatccggggctccccgtgtccgagatgtgctcgcatttttactcagcatacccgccttttgaagtggcggaggaggatgcgaacgaaggggcccttcggtgcgccgtcggcctgagcagtgggcgcgatttggttgaggaatttgtggcgtacggggtatggcctttggcgcatggctgggcgttgggcgaagtgtgccctcgccaaatgccttcccatggtgggaagctggtgcgaagtcctgtcttcgcgctggatccgcgtagccgcgatccggccgcctttatgcgtgaggcggaggatggggcggtgcggatcattggtcgggtttttgaattgaatcgactgccgtatggcggttatcccggccaagacgatgtggatcgtcgcgggaagaaaccggtggtagagtctggagacgaccccgcgccggcggtcgccccgtcctctaagaagaggaaactaggtactgctatgggagtacttggggtttccgatggttttgctagagaattgatgaggacatgcgcggccccgggaggaaggatgtctttgcccgagctccgggagtcttcggcgcggatgctgagggttaccgggggttggtggcctaggaatgttcctatcccccgcgcggccggcgaagacttttttacatctcgcatggttcgtgaatggaaagtgtttccttacgggcggaatattgctgctattgtgtcggcagtgatggacaaggatcaccaaggagctgcacagaagcgtcaggcggtcgtcaggcttcatgaagccaggccgaagaggcagcgggggggcttgcgaaggctgctgcccccgacggaggccacccgccgctggcggcgaagtcggccgtccctgcatccagcagggcgccggaggctgcagctgccgccggtggttccaagtctacgaaggctgcaccggcgtccagcagggtgccggagggccgcgaaggcggcccgagggttgccgccgccgggcaagcgcgtcgccgacttcgccaccgacattagtgtggacgactatcttgttgggtcggacgaaggccaacttgtcgttgttccgcctgccgcggcgaccacggcggctgctgtggtgccaaaggcgaagagcggtgctcttagtgccggcggcgagatgccggcactcactgctgtgagggatgaggcgggtgctgtgtcccgccggctgaaggagatgaaggaggcgctaagtcaggcggctgacttcgcagaccgtgcggcgtcgggggccctcacggcagttgtgtctgccgaagtcgagagacttcggacgcaacatgctgacgccgtccgggagaagtcggccgccgacagtaagtgccgcaagctgcggacaagcgccctgaagagccgtgtggagagggtcgaggccgcgacgcgcacggaggctgagcggacacgcaaacagcttatggattcgtaccatgagctgggcgcgcggaccgctgacttcgaagtgctggaccgagagcccggacttcgctgcctggagtgggtacaggaggagctgcaggcgctccccaccatcgtggaggggttcatgtcttatgcctccctggtcacctgcgagggggcgatgaacgcactctctcgcgaagggtgccggcactatgaggtcttcgaccaagctgatgaggatttcgagcgtgatatctacaaggttgaggaccctatagcggcgcgtggcgagagggtggatgacttcggggctttgaacagcgcgctgcctgacccggagtcgaacccggcggaggctgtgtccgaggccgccctagagccgcccccggaaaccgccaaaggcgttcctgatgcccccgcagccgctacgaccggcggaggcccgcccccggagaccgccgaaggcgttcctgatgcccccgcagccgctgcggccggcggaggcctgccgccaattgctgcgccgagggctgaggatcctgtgacggtggcggcggaggcgacagcggaggctcccgcgatggctgggtcttcgcaggttcaagattttgggcctgcgcacgcaaccgccactactaattttttggcggcttcgaccgtggatgatggtaataaatcagatgggtctgcgtttaagttttctgattttggtgactctgggagctcggttgagtggactaaggagtcgtcggatgaggacttggactacttcacggccttggatgtggcagcggtggaggcttcatcgcacgctgcggatgcagaagatgtgcctggtcctagtactgggcgtaggcggcgaagggcggttgcaaagcgtagagtgagtggggcggacggcggtcggcttcgtgtgagtagggctggccggcaggaactgttgtccttgccggccgccatgagtacaggagtgctccaggtcttcgtcgtttggcgttgtgagcctgtaagcgctgggggaagccttcgtcttgacaatgaaagggccctcccacttgggctccagcttgcccctggactctgtccgagctgtttggacgagtacgagagcaaagactcagtctccatcgatgagatccttcgaagtgggctcgtccacgtcggggacggctga

SEQ ID NO: 36562 - DNA, 1125 bp, Zea mays
  Peptide Sequence Number=SeqID_79937
atgccggctgccaaccaccagccaccacgcacaccagtcagattgataaggcaaagtgcagccatgccttcgcctggaggccgcccgccacctaagccaagacatcccttgcctcctaagaccacttcgaaagccacccctaaaagaaatgccatttccagtagtacccaacaacaggtccaggccagtacaacaactactgagaccactgaaactacaaacccagtgtcttttcctccaaaaatgaccaggtccactcaagcaatgtcttcaccagttcgaaacacaatgcctagacctactagacacaccatgcatagtcctcctagattcactagggctagtgcagccatgtcttctcctggtgcaaaccctcaccatagtcctcctagattcactagggctagtgcaaccatgtcttctcctagtgcaaaccctcaccatagtactcctgcagccactgctatcgtatctcatcaacctagtcccacaactagtgttaacaaaacagttcctacggacaactcaccaggtgggcacaactctaggcaaagcaatgccatcattgagtcagctaagcaatttgatgctactacttcagagggtaatccgaatgaaggagaaccagttggtgacttagttccagcccttttagcgcccaaaaagaatgtccacaagaaaaccatgggtcatggcttagagaagatgcttaataggggaaaccagttggctatccacgtggctgaagggaagaaaagaccggaggtcccacttcaagcagcgaagctggcatcgaaaactggtgttgcccttagagacaacctacctatctacaaatcttggaagctttatgacaatgccgtggggcaggaagaatcaaggttggatgtcgatgttaagaatgagggaccaagcaaagatgcatgcacagatatcataaagaggggagtgaggcagacgaggtataacctaaaaaggaagtacttcgacgagtcactgacaaaagaacagttgttggccatgcaacctccacctaaaatgaagaaagaggattggactgggctggtagagtattggtgtgacccaaagaatcaggaaaaatctgctaagaacaaagcaaactga

SEQ ID NO: 36563 - DNA, 1455 bp, Zea mays
  Peptide Sequence Number=SeqID_79938
atgacgatgtcgtcacaagaggtaactgtagaacttcttttaggcgatggctctaattacaagtcttggtctgtctctatttataatgctttcatgagtgttgatcctgatttgagacaggtctttagtagaagtatttttccctctaatgttagtaaaaatccttctaatgatgaactaagatgtctatctctaaatcaccacgcttgcaacatcttagttgattctctttctagaggtgcctattttgccatcatgagtagtgatagtgacttatttgttgatgctcatgatctatggactaaacttaagttgaaattttttaagtccatatgcacttcctctgctccctttattgctggtgatactaacttgtccaagggagaagaacaagaacgatggcaaccaaacgatgaatccacctcatcaacaggtttgtcttccactagtaataaatgtcttattgctaacaatgatggtggagacaaaagcgatgatgaggaagaatatgaggatgaggagtctacatcatcacaaggtacattttcctgttttgcttccactgataataatgacagggaaaatgagaccgacgatgtggaagaggagattcgtcgtttctacatccatctcaacaaagaagacaaagcgctcttgattaagctgttgagaaggaacaaggaacaaggcgagacgcttctcaggctagaggagactctcatcaaaaccaacgacatcctggagaagatgaccaaaaaacatgaggagctaaagtactctcatgagaatttggtccaacgatatccacgggcgcgtggtaagaagcttgagaagggaaaaactgaagcaagtgttaagctccataagaaggatgttcctaaagatgaagaaatcaacatgagcttggaaaaaggtaaagattcaattaatcatgttgtttgcactgaccatttctctatgtcatccaagaacaaaaagagaaaagggaaaagggggtgctttaagtgcaataaggcaggacacctcattgtgtcgtgtccatacaacgacaagggagaagggataaggagatgcttcagatgcaatgacaagaaccacacaatcacttcttgtcctctattgatgaatcaagcatgtgaattctccaagatgactctcaccaaggaaaatgacaaacagcaagcgtcatgtcaggttgagcgacgcttctactacaagtgtggtgagcagggtcatctatccaagtctcaaggtggaaaagagaagatgagcaagaaatggagcaatcaggacttgggtacctctgtgcgtagctcggagacaactgatcaagccaaggatggaggcaagaagagcttcgaggtaccaagtgcacgggagaaggtcaaagaggctgaggaacccaaagccaagggtgaagaagaaggcttgcaaagtcaagggtggtcaagttga

SEQ ID NO: 36564 - DNA, 495 bp, Zea mays
  Peptide Sequence Number=SeqID_79939
atgggaggccgcgtgactcttcccctcggccatcgagaaacaccagggattgagagagagggtgagggtgtagctcgtgagcgttcactggcggaaaaaaaggaagccgcccgcgaccaaactcgtgccccgccatcgccaagacctctagatggggcccagggtgaccgccagggcttgtggatgattgtgtggcgttcgcgggcacagtcgaccgatcgaggcagtggaatttctcatcgggacaacggatccaccgcattgccgccatgcttcgtggccggggcttatggctgtgtgattcacgttatggcacccaccctcttgctcgcatggctacccgcttcgtatagcgctgttcgatttggtgtttggggagactggggagctcagctatgcctcgccggccatggcgccgccggggaatactcatgcgccgccgtccgggtggctagggaaggagggaaccctgtgcgaccgtccgatttcgagtga

SEQ ID NO: 36565 - DNA, 183 bp, Zea mays
  Peptide Sequence Number=SeqID_79940
atggatccggaacggggaaagaagaagcttctgacgccccgggcccgcatgttgatcttttcttctccagtcttggtttcattgattcgagatgtaattgtggacattactccacaactcatcacattcaatcaaagatccaaatcaaacaagtatcataagaacaaacagtcaaatgcctag

SEQ ID NO: 36566 - DNA, 1323 bp, Zea mays
  Peptide Sequence Number=SeqID_79941
atgaaggcaacaagaacgctggtgcagcccgtctactccacccctcacccgctcgccggcgagaaggtccccctgaccgtcttcgaccgcgccgccttcgacatcttcgtgcccaccgtgctcgcctaccccgcgccggcgccgtccaacgaggcgctcaaggatggactccgcagggccgtggctctgtaccctcacctcgcgggccgactcgccgtcgacgaccggggccgccggttccttcacgtaaacgacgagggcgtgcttgtggtcgaagcagcaatctcggctgacctgtccggcgtgctcgccggcggtatgaccgacgcaaacgtcgtcgtcgacgagctgtacccgagtctcccagaggacaacgttggcgcggcactcctgcagatcaagctcaaccgctgcaggtgcggaggcctcgtcgtcggcatcatctgccaccaccacgtcgccgacggccactccatgagcgccttcttcaccacgtgggccagcgcggtgcgcgcgggcaaggacttcagcgttccagcgccgcccttcctcaaacgcgcggccaccgccgtgccccgcgccacgccgacaccgattttcgaccaccggtccatcgagttcatgggaggcggggacggcggccgcacctccaggatcaagtcgtacgccgtcgtgcccatggacgagatcaagagcctcaccgtgcacttcaccgacgagttcatcgctggcctcaaggcgcgcgtcggcgtccggtgcagcacgttccagtgcctcctcgcgcacgtgtggaagaagatcactgcggcgcgggacctcaacctggaggagttcacgcaggtgagggtggcggtgaactgcaggggcagggctatccctgccgtgccgacggacttcttcggcaacatggtgctgtgggcgttcccgaggctccaggtcaaggacctgctgaactcgagctacggcagtgtggtagacgctatccgcgacgctgtggcgcgcgtcgacggcgagtacatccagtccttcgtcgacttcggggctttggcggacaggagcggtgaggagctcgtggctacggcggcggcggccggtacgatgctgtgcccggacctggaagtggacagctggctggggttccagttccaccagatggacctcggcaccgggccgccgtgcgcgttcctgccgccggacctgcccatcgaggggctcatggtcttcgtgccgtcgcgcactgccaagggtggcgtcgacctgttcatggccgtcgcggagtgccacgtcgacgcgttccagcagatctgccactcgatcgattga

SEQ ID NO: 36567 - DNA, 402 bp, Zea mays
  Peptide Sequence Number=SeqID_79942
atggcgctcgcctcaattgccgccacctcgttcgtcatcctgcttcttttctctctctcatgcctccgcctccacgcattctcggcagagggcgtgggagcaggcgcctcctccccgttttcgtctgacaccagccccgacaccgacccgcgcagtggctattgcgcgtccacaaggatgtttcacagcatgcacgcaccatcgttttcgtcgtcgttggacgccccgttcgtcttcccggtcttcgccctgttcttcctccccaacccgctgtccctgctcacggtcgcagccgcgagccgaccgacgcccgtcgacgcgggtacggggcgagtcggtcttgctcctggcttttcttcgtgcgtgtcgctgaggaggacacgatggtgctgccacgcttag

SEQ ID NO: 36568 - DNA, 372 bp, Zea mays
  Peptide Sequence Number=SeqID_79943
atggatattgatccatttgtgaggaggatgaccgacttgaggcacataacgaggagcatgatgcacatgcctttatcgtcattggcaccaatgatgctagctcccggcactagaacatggataggctccactagcccctctactactgatggaagtggtaccggtggtagcaccggtgccaacgcctcaaggaagagatctgaagatcggaatgacttcgataaggtgactaatctcgtcaatgataagagggtaaactcggtaccactgggatgtctaggccaactgtatggcacgacccgcatgagtacctaccaggccatatctgggtcgaaaggttggcacagcgagcaggcccgacacgacccgtag

SEQ ID NO: 36569 - DNA, 2967 bp, Zea mays
  Peptide Sequence Number=SeqID_79944
atggccatccaccgcagcaatctctctagacgcttcaagatctcaaggatctggcatcaatcggagcaatatcgcgccaaatccttcgcctcctcatctccaacgagcgagactacacccctcaaggtcctaaccgggctcctgcgcgacgcctattcgctgaaatgcctcagggagttgcacgcgcatctcgccgtcgcgggtgcgatccaggacacattcgtcgtcacaggtcttgtcgaaaggtatgtttattttgggaaggccgcgtctgcggcgttgctatttgccgaaacctaccgcagccgccccgctgtgtactcactgaatctcgcggtccggtgcttctcggaccatggcttccaccgggagcttcttcatctttaccgggagctatgttgctttggctcggacaacttcaccttccctccggtcatcagggcgtgcacagctgtctcttgccttcggctggggagggagatgcactgcagggttcttcgtacaggtcatggtggcaatgttggcgtgcagactgcgctccttgacctgtatgctaaggctggccagattgatgtgtcaaggagagtctttgactgcatggtgctgagggacttgatttcttggaatgctatggtctcagggtactcactcaatgaatgcttccgagaagctgttgagatgttgcaggagatgcagcagggtggcatgaggccgaatgcaagcacttttgttggcatagttggcatgtgcggaagtgtcggagacagggatgttggtgattcgctgcatgcatttgcactgaaaggtggagtgattaatgacgaatctcttacatccgcattaatcacaatgtatgctgcatttgatgatctttcctcatctcgaatggtattcgatctgcatcctgtgaaagatttggtatctttcaattccatgatatcagcatacatgcagcaccacatttggaaggaagcttttgagatctttcgattgatgcattgtgtagctgtacggcctaacctggtcacagtggtgtctgtccttccttcttgcagtgatttctttggtataaaccatggggagtctgtgcacggcatgattatcaaacttggccttgcagagcacgtttctgttgctagcgctcttgtgtccatgtattcgaagcttgggaaattggactcatcgttgctccttttctgctgttgtactgagaaaaacaatatcttgtggaactctatgatttctggataccttgtgaataatgagtggaacatggctcttgatgcgttctgcaaaatgcaaattgcaggtgttgctccagatgctacaactatcatgaatgtaatatctggatgtagatacacaaaagatttacacatggcaaagtcaatacatgcatatgctgttagaaataaatttgaatcatatcatagcgttatgaatgcactcctagccatgtacgcagactgcagagatatatcaacatcccatacattattccagaaaatggaagtgcggatgttgatatcttggaacactatgatatctggttttgctgaaattggagattcagatacttgtctaatattattctgccagatgttccacgaagaagtgcaatttgatctagttactctgattggtcttatcagtagcttttcagtacccggggatgccatagttggagaatcagttcattctttagcaatcaaaagtggatgtaattcagatgtttctcttactaatgccctcattaccatgtacgccaactgtggtattgttgaagcaggtcagcaactttttgacagttgctgttctaggaatacaattacttacaatgctttgatgagtggatatcgcaaaaacaacatatctgcgaagatattgccattgttttaccaaatggtcgagaatgacgagaaaccgaaccttgtaaccttactgaatttattgcctgtttgtcagagccagttgcaggggaagtgtatacacagctatgcagtacgtaatttcaccaggttggaaacacccctcttcacatcagccatgggtatgtatagtaggttcaataatatagaatactgcagcaaaattttcagtttgatcggtgcaagaaaccttatagtatggaatgccttcttatctgcatgtgttcaatgcaagcaagctgatatggtagttgattgctttaagcatatgctcttccttaatgtcagacctgatgcagtaactatgctggcactcatctcagcatgttcacaacttggaaatgcatattttgctgcatgtattatggctgtcatacttcagaagggctttagcacgaatattttggttcttaatgctcttattgacacacattcgaggtgcggaagcatatcacttgcaagggagctctttgatagctcagtggagaaagattcagtcacttggggtgcaatgatcaacgcatacagtatgcatgggaatggtgaggctgcccttgatcttttctcaatgatgatagattcaggagtggatccagatgatataacttttgttagtatattatcggcctgcgctcataatggactcgtagagcaaggaagaacattgttcaaatcgctacaggcagactatggcattacaccgcgaatggagcattatgcatgtatggtggatctattgggccgaactggccacttggatgaagcatatgatgttgttaggtcaatgccattcaggccatcagataacttgcttgaatcattgcttggagcatgcagattccatggtaattataaaattggcgagtctataggaaaattactcatcaaatctgagtatggcaagtcaaggtcttatgttatgctctcgaacatatatgcttcagctggcaaatggagtgattgcgagcagctaagattagacatggaagcaaaaggattgcggaaaaatgtgggggttagctctattgggatgacatag

SEQ ID NO: 36570 - DNA, 2859 bp, Zea mays
  Peptide Sequence Number=SeqID_79945
atgccagacaagaagatcgaaggggctgattcatctcacattgtctcttcaacaaaatctttggaaagttcagtagggcctaatctaattgaaagtactgatggagattattgtaataaccttcacaagacagcagttgccaattttgtggcatcaatgctgcaagaacatcctatgagccttatattggctgagaacaaaagcaatttgcaagaaatttcagttgaacagaagattcctatctttgtttctatcaacctttcaccaaaagtggatggcagtgaattgccatgccccattgaagttcatgatggtattacatcttcctctagcaaaactaacgaaccaatggaagcccaagattattcgaacacaatgaaatcaaacacagctagttgcatgttcgaggcatcaaagcggcaagaatgccctataagcctcatattggcagacaagaaaggcagtttgcaagaagtttcagttgaacaaaatgttccttgtggtgattatgttgccctttcacaaaaagcagacggtagtgaattgacatcaacccgtgaagctcctgaaggctttctaacttcctctagcaaagtttatgtattaaaggaagcccaagatggttctatcacaacggaagcttctaaagtaaatgtttgtgcagcttcacactccatgcttaggttaattgaaggagtccaggatgaggcttcttgtattgattctgataaggttacttgtgaaacaccacctgccatcctgaaaaagttgaaagaagataagccactggtcgtccatagatttcataagcaccaaatgagcctaggagacacacatcaaaaggtgcctgcacctgtgagcagatcaaacaccagcaaatacttaagaatggataaaaacattgttgatactacgactcccattgaatcagtaaaggctgttgcatcaaaatttggtggcagcatgaactggaaaactcgcaagacacagacagcacaggtgagtgaccgtatcgtacttgagcttgataagctgaagaacgaaatttcagaatgtaaacatcaagcagaagctgcagaggctgcaaagttatcagtattaaaagagctggagagaacaaagaagcttatcgacgaaatgaaacacgtcctggagagggaacaagctgaggaggtggatgccaaggatgacttggagttatttcaaattatattacaagcgatggagggagttgactgtaatgatagtgttgtggttagagagaagctgaataatattcaagaacgacacaaagcattggatgccaaagtgatttcagtgaaatatgtgttgggaaaagtgcaggaggattatgattctttgttgatcggaactgatatttccattaacaaagctcaggcagccttcacaatgtccaaaggtgcagagaaagaagtagaggagctcaccatagagctccaaagactaaaggaagtgtttgatttggctaacgccaaattccaggacgtggaagaacgcaagaacacgttgatggcacgtgatgaggatcgtcttgcatgggaagaggatctcaggcaatcagacaaagagctgaatcagatcagcatggacctttgttcttttcaagaattgcaatcaaagcatgatacgtcagccaccatgttgctcaatctgaagaatgaggtagccaattatttggaggcaaagcgaatcgaggaagcacgagaacaagaaagtggaactcataaacccgtgcaagaagtcatcattatgttaaagagcgagctcgtggagcagaggaagagcatagcgagggtgacggatgaattatgtgttctgaaagccacagctgaattgctaaaatcgcaattgaagaaagagaaagcagcacttgctgccgctcagcagatggaagtgatggcatccatgtccactcagtctctcaagatggacatcaaactgtcacagcaggaacttgaagcacttcatgccaaggcaaaggagtgccgagatagatcgggcaaggctctgcaagatgcgtcccatgaagctgacgaggcgaaggttattgctaccaaggctcagggggagctaaaaaagacagaggaagaagtggcgcaagcgaaggctgctctgagcactgtggaatccaagctcgaagcagttctgagggacatacaggcagcgaaagcgtccgagaggctggcgctcgatactctgacgacgacgacactggaggagcacagcaaggtcggcgctcgatactctgagacggtcacgcttgacctggatgagtacacgtctctggttcagaggtcacgtcaggcagaagaggctgcgcacgagaagacaacagctgcttccaccgcagaggttgaggcggcaaaggagtccgcggcgcgcaccatatccagactgaacgagatcttgcaggccttggaagagcagaagcaggcactggcagccgccaccgagcgggcgggcagggcgagcgaaggcaagctggccatggagcaggagctgaggcaacggagagaggaggagaacgggaagcgccgccgcatggccagtgaagctccaaagcctgtaaccgggcctcggagcgctgcagagatcgcgggtagagtcgacatgacgttgacgtgcacgggcaaaggagatagtagctgtcccgccgcgtcggtccatccggtgtcggacgcgtccgggaccgggaccgggaggagcagccccagcgatgcggccctgccagtgccagtgccagcgaagacgaagaaggcaaagaagctgccgttcttcactcgcgtcgtcatgttcctggggggcaggaggaggaggaggctcagagctgccaggtga

SEQ ID NO: 36571 - DNA, 1254 bp, Zea mays
  Peptide Sequence Number=SeqID_79946
atgcccggcggctgggcgagttcagagggggcgaggacgcggacggatctgagcgaggatggaggtggtggccggcggctgggcaaggacgcagacgctagggatcggatcagcggctgctgcgcttcagttgccgccggcggcatgagggtggtggtgacgggcgcgacggggtacctgggaggccgcctgtgcgcggcgctggccggcgcgggccacgccgtgcgcgcgctcgtccgccactccagcgacgtctccggcctgccccgcgacatcgagatgacctacggcgacgtcaccgacgccgagtccctcgccgtggccttcgacggctgcgacgtcgtgttccacgtcgccgcggccgttgagccgtggttgcccgacccctccgttttcttcaaagttaatgtaggtggacttgagaatgtgttgaaggctgtcaagagaacaccaactgtgaagaagataatctacacatcttctttctttgcaattggtccaactgatggttatgttgcagatgagacacaggctccttttattgaattggcttactggctcatacatgtatatgcagacttggtatacactgctgcagattatagaatcgcactgcaggcagcagcagataaggtgccaatcaccattgtctacccaggtgttctctacggccctggaaaacttacgactggaaatcttgtctcacgcattctaatagagaggtttaatgggcgcttgcctggttacataggagatgggtatgatagagaatcgttctgccatgttgatgatgttgttaacgggcacatagcagctatggagaagggcagagtgggccaacggtatctcctcactggtgaaaacatgtcgttcgtgctgatttttaacatggttgctaatatcacaaacacaagggctcccatgttccacgtacctctctggttgattgaagcgtatgggtggatttcagtttttgtttctcgcatcactggaaaactcccacttatcagttaccctgtatgtccactgttccttcctttaaatacatttgagctcgttattcatacattaggcgtcctttgggttgacagtttgccctcacacctttcgcagactgtgcgtgttctgagacatcagtgggcatactcgtgtgacaaagcaaagatggagctgggctataccccaagaaacttgaccgaaggtttgtcggagatgctcctgtggctcaaggaagaaaaactaatcaagttttag

SEQ ID NO: 36572 - DNA, 696 bp, Zea mays
  Peptide Sequence Number=SeqID_79947
atggatcgctacatcaagtaccatgtccaggagtttgatagggccttcagggagaggttccctgcctgcacattagctgctaagaggcacattgactccaccactaccatcttggatgtccagggtgtgttcagctttgcttcaggtttctgctttggtgcacatggttctgggagggactcggacagtgctgagagatctgaatattttgcagttgcaaagggaatctcaattaaaaggattgacgagcttaagtttcttcgtgaaccagaggcagacgatccttcagagttcatcactcatcgagccaaagattttgtgtcaagcatgaaggacattgaaacccggtttatgatgaggaagttgctggactttgatgaacctaaaactcttgcaccaacttgtctttttgttggaggtacaaaatacatggtgatccaaggtgaacctagagtggtcatccgaggaaagaagaaagcgcctttggtggacttgcgagggcttgctctgcttcctaagaacaacttgaagagttggtggcatctgaactgtctgcaggttccacttgtcataaattatgatctcccaaataatcgtgagctttacatccaccacgttggtcattctgatcgttttgggcgcaagggccttacacaacaaaattgcatgatcaatataatactattgttacggtga

SEQ ID NO: 36573 - DNA, 216 bp, Zea mays
  Peptide Sequence Number=SeqID_79948
atggcgggtcatcgcctcacgccgccggattttgcgggtcgtggagatgtgcggcggtgtagtggaggggttcgcggcagcgggcgagcgggcctgagggcgtgcgagatgcgcggcggcggatttcgcggcgggcatgggattgcgcgggggctggcaggcatgcggcaactggggaggggggcgttgggtagcggcgggggcggtctacactaa

SEQ ID NO: 36574 - DNA, 1143 bp, Zea mays
  Peptide Sequence Number=SeqID_79949
atggcagcagggagttggaaggacgtccacgctgaccgaaccttcgttcgtccgtggcggacggactggggaaaatgggcagcagcacgagtgaaaaaggagcaagaggaggaagggagggagggcgggtacccgttcgacatccggccggacctggtgaagggcgactccgccgtgctgccaccggagttcgcgttgctgacgacgtggtggccgcaggaggcggcgctccagcatgagaagcctaatgagcagcagcagccggagttgattcagaaggagctgaagcagtgctatctgtcactggagaaggggttcaactcgatgacggtgagccagccgggcaccctgttccacgaggccatgaaggttcgcaagcgactgggcgccatcgtggaccacatcagccaggaccggcgcgagcgaccgcgagagcgcgacctcctgctcctggccttcattctagatagccgcgagacgctcaccgacgcccagatctccgacaacgtgatcgatgtcaggttcgccgcccgcgaagccaccgccagtgtgctcacctggatgttcatgttcctcgacgaccacaccgcgttccttaaggccgtcaccgagggcgtcaaggcgttcgagcccgacctgatcgccaaggccaacagcttcgtccatggcggctgtgtttccgagctgtaccacctcgcgtccatcgtctgcgccagcgtcaacgggaagacatgcatgcaggcgtgcacaacaacgagcatggcggacgagttggtggtgtccgaggaggtggacgaggttctcaacgccttgcccaacaggcaaccatggccgccacccaggcagtttgcgatacttgctgatggtgttcaagttagacctctaccgtggccatccttttactgtcatgcaggaggagactaccacggtgatgtctgcatcactcctccttcagtacacggcacaaatcctgcaagtgatgctatggttggaatgaagattgtagcaattggaactgatgacaaggattacatacacattgaggaaccgaggaaagcggtagaagcaaacaaggacacattggctggtgattctcctttctctgatgctactcctgctcctacgcggctacgccgatggtga

SEQ ID NO: 36575 - DNA, 735 bp, Zea mays
  Peptide Sequence Number=SeqID_79950
atgggcagacgaagagggagagggaagaagcaaaccactgtcaggagccatgaagacaaaggtagcagcggtgaagaagtcgtgcctgcaaagaagaggaggggaaggccccaaacgcgcttcgccagtaagatcgatcaagcagatgttgaaaactttgtagaacaggtcgatgccgaccaagaagaagctgacgatgccaagctaaagaacagtgctgcagctggtggtcccaagagagcagattgggagccgacggaaaaacaagcccaggcgagcatcggaggcagggctagaatgcaactggccgagacacaggccagtggcgacggtggctgctgcgtagacaatgggcacgactggacgaagacacagggagatggtcagctgcgacgagtgcagctgtgggtgcacacgcggtgcgcacgctatgtccgcagcgtccacacatccttctcctgccacaaatgccggaggtccaagcgcgtgtcttcctccaccgacgaggccgaggttgctgagctcctcgccgagctgccaacccactgcccgcctccgttgtacaaccgctgggccgaggtcccgctcctagcccgcgtccgcgtccacgggcttcctggctggggcaacgacactctttttcgcggcgccccgaccttttccgccgccctgtggcgctgcaccagctacgtccccaagagaattggcttccgctactgcgagttgccctcctag

SEQ ID NO: 36576 - DNA, 1611 bp, Zea mays
  Peptide Sequence Number=SeqID_79951
atgcagcgcgttctcgacgaactggcgcgcatggagctccgcttgaccgatgtgttggctggccgcggtggcaagcaagcccctgcatcctcctccttcgccacgcccttcgactcgttcaaagcctccacaacttcctccaccgccgcgccacggtacgacgacgacgtgattggctcttcggcgggcgcggcgtacgacgacgcgttcgccacaagcgctcgtgaacgcacttcctcctccttcggtgacgaccgcatcgaggagctcgacgtgtgggatgaggacgccgcagggctgccgcgcctcgaattcctgctgttccgcttcctcgcctccgtcgaatccccgtgccgtatagccgccgcagcattcagatcggccgacgagttggcagatcgggaactgcggttcgacgaattgtccttcaacgacgaatcgacaccgcatcacctcgcgcccacccacgaagtcctcttcttctccgacggcgctgaccccttcttcggcgaggagctcgacatccttcctacctccgagttcgacgaggtcgagcgcatcatcgcgctctcgtctgactgcaccgccaccaactccttccgcgtcggctcctgtgacgacaaccacatcggagtcaagcagtcgtctgtggacacccagtctctacgcacggcatcctccgcaggagagttcgaggcgccataccgcgatcggcgcgagcagccacgcaggaacgaggccctcgacgtcgtctgcgagctgtaccgcgaccggcacgagcagacgcacgggtacgaggcccctgatgcgccgtcgttctcgtcaggcatcgatgacgacatcgacgtcgtggaggagctccacgtcctggtgagaggccaccagagggacgctgcgagcgccaacgtggttgacttcgcctccacggtgggggacgccacaccccaggccaccgagacgcggctcaatgccggatgggtgcgctggctggaagggcggactggcccctacgacgacatcgcagcagcacaaaccctcttcttcgatttctccgacgacgacagcgccaggacttgcgatgtcactgacgtccccgttgtgcactccgcgctcaaagtgttcgaccaaatgtccagccgtggctcgaacgccagcccaggctttcgggatctggttttccttgccgcgtctgcctcctcgtcctgcagcatggaggacgagcgccccaaggtgccttcctccatcggcaacaacatacacttggtctccaggttcctgtcctcaaggctcgatggcggcgtgaagaagccgttgcaggagtacctgctggcgctcaagtaccagagtactaagctgctcatcagcaacaccctagacacgatggtcaagcttcaggcggcgctgctcctcgcccaagggtgcgtctctgagcagcacccagacacaccgtaccagcagaccaactcgcagctgctcgagttcacgtggggcctggccaacagcggagctttttgggattatgatcctcccgtccgctggcttcgccccgctggtactccgcagcgtgtcgtcgctcctctggtcttctcgagctcgccaactcgccggtaa

SEQ ID NO: 36577 - DNA, 195 bp, Zea mays
  Peptide Sequence Number=SeqID_79952
atggcccacatatcagatattaaactgataagaacagatactacacttgatcttagccaaaaggccgagaaaggcgatgtggtgctaacctgcaacgctttcctctccatccgacaaacgctgcggcttcaggatcgggcaaccatagcgatgagagtgaaagtggcctgtgttgtgttgctgggcttcacgtag

SEQ ID NO: 36578 - DNA, 2409 bp, Zea mays
  Peptide Sequence Number=SeqID_79953
atggccatggcggcagcggggagggaaggaggtcgccgcgggcggcggcggccggggccggtggacgctgggggcggcaaccgggggcggaggccggggaccggattggctggtctatcaacagcgaagtatctggcagatgctggacataaacccatattgcttgaggcaagagatgttttgggtggaaaggtagctgcttggaaggatgaagatggagattggtacgagactgggcttcatatcttttttggagcttatcccaacatacagaatctgtttggcgagcttaggattgaggatcgtttacagtggaaagaacactctatgatattcgccatgccaaacaagccaggagaattcagccggtttgatttcccagaaactttgccagcacctataaatgggatatgggccatattgagaaacaatgaaatgcttacctggcccgagaaggtgaagtttgcaatcggacttctgccagcaatggttggtggtcaaccttatgttgaagctcaagatggcttaaccgtttcagaatggatgaaaaagcagggtgttcctgatcgggtgaacgatgaggtttttattgcaatgtccaaggcactcaatttcataaatcctgatgagctatctatgcagtgcattttgattgctttgaaccgatttcttcaggagaagcatggttctaaaatggcattcttggatggtaatccgcctgaaaggctatgcatgcctattgttgatcacattcggtctaggggtggagaggtccgcctgaattctcgtattaaaaagatagagctgaatcctgatggaactgtaaaacacttcgcacttagtgatggaactcagataactggagatgcttatgtttgtgcaacaccagtcgatatcttcaagcttcttgtacctcaagagtggagtgaaattacttatttcaagaaactggagaagttggtgggagttcctgttatcaatgttcatatatggtttgacagaaaactgaacaacacatatgaccaccttcttttcagcaggagttcacttttaagtgtctatgcagacatgtcagtaacctgcaaggaatactatgacccaaaccgttcaatgctggagttggtctttgctcctgcagacgaatggattggtcgaagtgacactgaaatcatcgatgcaactatggaagagctagccaagttatttcctgatgaaattgctgctgatcagagtaaagcaaagattcttaagtatcatattgtgaagacaccgagatcggtttacaaaactgtcccaaactgtgagccttgccggcctctccaaaggtcacctatcgaaggtttctatctagctggtgattacacaaagcagaaatacctggcttccatggaaggtgcagtcctatccgggaagctttgcgcccagtccattgtgcagacggtggttcctattcctatcaatcggttaatccatcccacatgggaggatttgtggacaagcggcggcgggtcccaggtgcagatcttttcccgctaccctttccctgttgcggcggcaaaggagagagactgcgagcggacggagaggccaacaaatatccgaggcccgatattttccctgcccctgccacgtgtcggacgtccacgtggaaaagcgccggcacgtaggcgtaaaactatgtccaaggagcctgaagccaaatctagggggcttgcttcatctgctgtccgagcgtggtttggtttctcggggctggcgcggtcaagagctcacctgagttccaccgaaatctgccacggtagttcttgcctagagaacccaatgggggatgtgtccttgaatggacccgttaaggccgagccaactgccggtggcattgccaagggaaaccgagttctggacacgatgtccgccgggtggacggacgagagacacatgctgtatataagctccatggaggcttctttcgtcgaccagctatacaaccatggaaaccatccgcaggacgcaaatggtgctggcttcaaggttctccgcaggggggtgtgggagtacatcgagtatgagaagaccagtgcccctgtgcgaagtggggctaaatgctgcgtccctgcaaatccttggatccggcatttcaggccacgtgactgcggtagtaacgcacagagtgacgcggtcgaggcctcagtgggcgaccatgagtcgggtactcaggcaagccgcaagagcccttcagtgtctcatggaagggaacggggagcttgtaagggagaaccccagattctacatgaaagtacagaggtctctgatcaaaattttgctgacgatgaggctgaagctgaaacagaatcaatgaaagcatgcaagaaaaggagactaagcagggctttgcactccggtgctgaatga

SEQ ID NO: 36579 - DNA, 534 bp, Zea mays
  Peptide Sequence Number=SeqID_79954
atgcccccatggccccacaccgacgcagagctcgcccatgccaccgtgcacgtgccccggcggcgtcgcgatgcccgtgtatccccgccgtcgcgcgcctacgtcagcatgtacctggagcagaagcgatttcgacagcattgccgaggagctcaccgctgtgaaagtgtgttagtcccgtcccctccaggtcctgactctacaattcacttgtgtattcccccgaagcattacgagacagtctgcacggctcctatcaaggattgtgaattactaaaccttggcgataggccacagaaactaattgtgacagtgccacctatttctatacggccttctgttgttgttggtaatagtagaacaaggagcttgaagtatggtgatagaaggactactgctcagtatttaaagtgtggatgtatagttgaaaaacatttagaagatggagacgttgtcctctttaatagacaaccgagcttgcttttgtacttgaacacatgcaagtataatgccatggagaacactcagatttga

SEQ ID NO: 36580 - DNA, 3249 bp, Zea mays
  Peptide Sequence Number=SeqID_79955
atgcagcacacgtggacggcagcgcgggtgctctggaagtcgctcctgtccgtgctctcgtccgccaaccatgaggtgcggtccgggttcgagctgcgggtcgccgcgctgctcgccgacatcgcggccgccagcgccgctcgccgcacggccatcgtttctgcgggcggcggcgccgtcctcgactggctgctcgagagcgtcgtgcggggggccacgcaggccgaggctgccagggcgctcgcgcacctgctggccgacccctgggtcgcgcccgccgttctcggccgcccgcacgctgtgccatgccttctccacttcatcttctcattccagcccacgcgcggcaagaagaaatcttcatttgatggtttagatcattctaaagggaggagcatgcttgtggctgcacttatggatataatcacttctaactgcgataatgcagactattcgtcctttaagcctttgttgcctgctgatgctgatacaagagatattgcaacagcaattgaagttattgagcaaggggggatgcattttgatgaccatgaggataatagcagtaatgatggtgactctggattaaaggggatagggattaaggtgcttggtggaaccacggtattggggttctctagaggaaataactcattggagttggataactcagactatgatactatggatgtatcatatgatagtagtagatccgtggtggaacagagtactgccgagtctccactacttaggaaattaagctcctctgctgttccagggctttgggatgacttacagagggaacatgtagctgtaccttttgctacatgggctcttgcaaactgggctatagcatcagatctgaatcgcactcttgttcaagaacttgatagtgatggacatgcagttgcaactgcgttgaaagcagccgaaagaactgttaaatggcatggaactctggtggctcgagctcttttagaagaccagaatttggccttggctccatcagttcctgattggtgctctagtcttctttctacagcttctcaggctactgcaaatgatgacatgccattgggtcaactgtcattatcaacattcctattatctatgatgcgatgtaatgagtcaaaatttgtaataaggcagaagggccttcatcctcttcgtagtattgcaaaaaagatagaaaatcagaatggccagaacagtatgaaagaatcaatagcaagtgctctaagtttgctttatgctggtgaagttcctttatcacttgaggaatctcaaagatggtctggcattcttcttagatggctttttgataaatctgtatcaaataaaacacatcttacagccatgaaaatcctttcatgcatacttgaagattatggtccagcttctgtgccaatttctcagggatggttagctcttgtcctttctgagattcttggggacaacaaggcccaaggttcaaaaggaacgacacagcctgaaccagagaaagtgaagaatccggttgattaccataatgcttcaactgcaactcaggtcctgaatcaattaggtagtgctgttgttaaattagcaagcacccaatcgaactgtgagcctgggtctgatgacaaagataaaggaccactttctgattttctatctcttgagccatttgctacagttctaaagaatatgaacaaaaagaatctgcccaaatttgatgccgctgactcagcatcagcaacgctcaagggaataaaagctctagctgagctttgttctgaggatggtgcatgccaaaagagaatagctgatttaggagctcttcccttgttgaggcacatcctcttgggtgatgattatgagaaacttgctgcaattgaagcatatgatgcatctcgtactcgagaagtgcaagacaagaacgtggctcctaatgtttcgtctactgatgctaccactgatccctcaagtgtacgggttcctcctgcagcacatatccgaaggcatgctgggaggctgcttaccattctctctcttctacctaattcaaagaaggaaattatttctgatgctgtatggtgcaaatggctcgaggattgtgctagtgggcgaattccctgcaatgatataaaactaaaaagttactgcaggttaacattattgaatatattatgttctgagagtccaaatacaagaaaagcctctgatgaatatcctgactcagaaagtgagtataaaagaaactgtccccagtttggagatgcacttttcttgctaaatccagagttacctcttgaagttcatgtggacaacagtggttttgggattttaagagtttcaagagataattgtaaggaagatggaggtattggaggctctggctctgaaactgtgaactctgtagatgatgctgaagctgcatccaaaagtgtccctttgatggatgttgtgtttgttcatggccttcgtggcggcccattcaactcatggcgaattgctgatgacaaatcatcaactaccaaagctggtttagtggaaagcattgacgaggatgctgggaaagagggtacatgctggccaagagaatggcttgcggcagattttcctcaagcacgtttttttacagtaaaatacaagacaaatttgacccaatggactggagccagcttgcctcttcaggaggtgagctctatgctgctgaggaagttggtggctgctgggattggtagtcggcctgtcattttcgtgacacatagcatgggaggactggtggttaaacagcttttatatcaagcaaagctgaataactatgacaagttcctgaataatactattgggctagttttctatagttgtccgcattttggcagtaaacttgcagacatgccatggcgtatgggtttagtgtttcgtcctgctccttcgattggggagttaagaagtgggtctccaagactagttgaactgaacgattttgtgcgtcaacgacacaacaaaggatttcttgatgttcttagttttagtgagacccaggtcacaccgattgttgaaggatatggcggttgggcacttcgtatggagatagtgccaattgaatctgcatacccaggctttggggagcttgtcgttctaccgtccactgatcatataaattcatgtaagccagttaacaagaacgatccttcttatgcggaaaccttggcatttttggagaagaacttcaaattatgcctggaaagagcagagtcctag

SEQ ID NO: 36581 - DNA, 330 bp, Zea mays
  Peptide Sequence Number=SeqID_79956
atgactgtggaggtagagaaggcaatggtggaaaaagagaaggcgatagtggtagaggtgagggaggtgaaggtgatagtgatggagggaataagagaggttagcggggacaaggtggtagaacgaggtggaaccaaactgaggaaatcaacaaactcagaggaaggggaagaagaggacaaagcggcaatgaagaagggacaagactcatcaaagatcatgattgccgtatcattcttgagtctgactcttgctttgttcaggatcagtatatgggaccctgctggccgctggtttcgtgatcttcttcttccttcaacttccacttga

SEQ ID NO: 36582 - DNA, 147 bp, Zea mays
  Peptide Sequence Number=SeqID_79957
atgcctgctgcttctcttcagggcgacggtatgaagatagcaacaacaataaagatatcacaatggctcgggatccaacgatccacgaccaagaacaaagtcaagaaaagtaacagaaacgcagaacgagttagggttcaaccttaa

SEQ ID NO: 36583 - DNA, 543 bp, Zea mays
  Peptide Sequence Number=SeqID_79958
atgcacgaccctacgttctggacacatgtcccaccagtcctcgactacatcggtgacacgatcctgagagcacctagaagggagggaactgtgcccattggcgtcgatctggaggcgccgatcgatgatgtgaccgggttgccgttgataatgtgcccagattgcaaggatgtgagggtgtttgctgctaataccacgtactccaataacgttggaaagagatttttcaagtgtcctaggaagaaccgtagaaatgggacatgtgataggttttggttcgaggaagaatatttggtgttccttcaggataatggatatctaccgtcaacatcctccaccattgcagcaggttcgacaaccaaggttcctgagctcgtgggaaaaattgatagcttagagcaaaatctgaacaaggtgacggaaatggttagcaagaacagagatggcatgggaagcttgatttgtctcgtgtgtggatgtgtgaatgtaacagtactcctggtgtttgccatcttcttggttgtagcttttgtgttgaagtag

SEQ ID NO: 36584 - DNA, 270 bp, Zea mays
  Peptide Sequence Number=SeqID_79959
atggacacggattcacgtgcgccagtgcccttcctctcctccgaccgccgcgcgtccttcttcaaattcctggccaccgtcgaggccctctataaattgatggccgaggtagctgtgctatgtcatcgtgaagccttagcacccactcccacccgtaatcgttcacccgagctctggaatttcaaacttcccccaaatcaagtctccgccaccgcgaagaacacctcgccgtggctagcccttttctgtagagctttggaaatttgttaa

SEQ ID NO: 36585 - DNA, 2140 bp, Zea mays
  Peptide Sequence Number=SeqID_79960
ggaaccaaaggtggcggcggccatgctgcaccaccacggtggcgccgggtccccgtacatggccccggagacggctggcacgggcacgggcacggccccgttctcgccgacgccgacggggctcgccgtgtctgtcaccgccgccatcccagccctgccgacgatgcagttgcagccggcggggtcgagcgctaatttcgaggaattggcagcgggcggctccggcgccggtgtggcggtcagactccaggacgaagacatgcaggccgacttgggcgccagcggcgcgggagcgtccggcaaccggtggccgcgcgaggagacgctggcgctcatcaggatccggacggagatggacgccgacttccggagctccccgctcaaagcgccgctctgggagaacgtcgcaagccagcgcagccgcaggcatcacgataaggatctcggcgcccgggcagccggaaagaggaagaatgaaagatactcctccgcgcacacaaccaagtcatcacctcttcatgactcctgctcgttgagacgtgaacgcgagaaagagctaacaggcgcggccgtgctggggcacattcttctgcaggaagcttgcagggctgggttaccaccggagcgccaagaagtgcaaggagaagttcgagaacgtggacaagtactacaggcgcaccaaggacgcccgcgccgggcgccaggacggcaagagctaccgcttcttctcgcagctcgaggcgctgcacgcctcggcgccgcctctgccgcccccgccctcgggcatgacacggtgcaagctggccctcatcagccgatggaaatggcatggacggcgggccctacggtgctgggccctgccgccgtcgccggcctgccggacctcagcttctcgtcgatgtccgagtccgactcagagtacgactcggacgacgacgacgacgactctggtgcgggggaggagggcctcagcgggggcgagtgcgacagggagatgatggccaccttcgagaggatgatgaagcagttcacggagaagcaagacgccatgcagcgcgtgttcctggagacgctggagcggtgcgaggcagagcgcacggcgcgcgaggaggcgtggcggcgccaggaggtcgcccgcatgaaccgcgagcgcgagcagctcgccagggagcgcgccgccgcggcctcccgcgacgccgcgctgatcgcgttcctccagcgtgtcggcggggggcagggcgagcccgcgcggctccctccgcacggcgccggcgtcgtgcccccgccgcctatgccggactgcgcccctccgtcgcctcggcgccacgcggccgccgcctcgcttcagcagctggtgcccgtaccgcccaaggcggtggaggccttggcgcgcgctggaggagagggcggcgggtccacgccgtcgcggtggcccaaggaggaagtggaggcgctgatccagatgcggaacgagaagggcgagaaccggagcgccaagcggtgcaaggaaaagtgggagaacatcaacaagtactacaagaaggtgaaggagagcaacaagaggcgccccgaggactccaagacctgtccttacttccaccagctcgacgccatgtaccgcaacaaacaccgcagcggcacaggcggcagaacggcacccagaacgaacatggcctccgccgtcgccgtcgcagcaaccgtgcaggacaatccgagcaagcgcgagctcgagggaaagagcagcaacgatgccgacaaccggaagaatgacgaacaggggaacgtgcttacttctcccgctagcggcgatacagcaccaggtggcgccgccaaaaacaagacggcagagggcaatgtggatgatacagatgtgcagcaccagcaccagcagcggttcagtgcggacgagacagacagcgacgacgacatggacatggcaagaaactacacagtttacactgaagaaggcaacaacgaagacaaaatgaagtacaagatgggcgtccaggagcgtgatgtgatcgggagcagcggcaacgtgcttgcgccaccaccatcaccagcagcagtagcagcgacggctgcggcaccgacgagttcagctgccccaacgagcagcaccttccttgccgttcagtag

SEQ ID NO: 36586 - DNA, 798 bp, Zea mays
  Peptide Sequence Number=SeqID_79961
atggggtggttcggagcctgtgtggccggaacgaactacgctgctccagcaggagttgcgctagaagctagctccgggcaacttcaccagtggcggtggccacctctaaatcaatggatcgccggcggcagcgaccacctctgcaccagcagcgacaacgacctcggctccgtgcggcttgctagcgacagtggccacctcagggcaggagaaggggtggatgtgccagacccacacacggcgcaaccgtcgcccgtgcggtggatggacatccacgccccggccagagcggcaggaggcagcgtcagaggcggcgccgaagccgtccagcccaaagggccggacacgctgcagctgatggcttgcagccggctggccctgtgtagccagggtttgtctcctctgcaaggctgcgactcgaggcaccccgcgcacgacccatcagtggcgaaggtcacgggcaggtcaaccgtgggaacgggcatgacaatcggcatggccataggcgcgccggcagtaattgcgccagcaggcccgcaagagcagcaagcagatcgccaatcaggctctggccccacctgcaggctcgcctcctcccctaagtcgggcccgggagccactgtcagtaccctcaatcaggggtaccttcttctactgcataaaggcgccgcacccatgcaacgcctcaagaccacgtggagaatggcgcccaatgggcaggtccaggagcgccgcgtggcaaggaaagggagtacatcccggtgtttgtcgctaggaccggacccctatacatactag

SEQ ID NO: 36587 - DNA, 405 bp, Zea mays
  Peptide Sequence Number=SeqID_79962
atggtcaccttccaagggggtcaccctccttttaagggcggttctccctactcgcgtccccagccgtcacgggctgagtcttctccaacacactccaaggtcctcccctacggcgcgggggctgggtcccacaagtcatgcaagccgactcagggcagaagaagccaaaccgccggactgggaaagggggataccccgaaaaggacccttccccgtgaaggaaccaggctccgagcctccctactgatcagaggttcgaaggctggcccctcggaagggttcgacagccgcctcagatcgcgtgggctctacacccactactggtcagaggttcgaaggccggcccctcggaagggttccacggccccctcaggctactcgggctccgcgcccactactgattag

SEQ ID NO: 36588 - DNA, 1721 bp, Zea mays
  Peptide Sequence Number=SeqID_79963
atgagggcgagggctccctcatcagacgcagatgggaacccagggtcgggacctagtcctacggcaagtaccaaaccaagaagagctctgcgactctcccccagctgggaaggacccttcaaggtgacgggaatgcgccgacctgggggtggctatcttgctacgactgaagaagacctctctgcgaaagcaggagggctcgacagcctaggagccggttctagagaacgggagctcgttccatggggtggtccggagcctgtgtggccacttagcctggtcccgtacccaaaagcctgcacactccaccactacgtgatgggtaccctagtatttggaactataaatcctgtgggtccgacaacctggggtccaaaactagagaatggacacttgtctcctggggtggtccggagcctgtgtagccgctcagcctggtcccgtaccgtgggcctgcacgctccaccactctgcgacgggtgtcctacctcgataaatcgagcctacatcccaggggggccaggttccaaggaggaaccagttacaccacacacaacagggacaagtggtatgaactacctccacaccagtagggccgcgtgggtagctagctccgagcggctcgccagcggaggcgaccacctctgcaccgacagcaacgaccacctctgcaccgacggctcgccagcggcgatgactacctcatctctgagtggctcgccagcagaggcaaccacctctgcaatgggcagcctcaccagcagcggcgaccacctctacgtcgggcagcctccccagcggtggcgaccacctcaacgtgcgcgccattgtgaagaggtcctcgcctccgtccccctacggggcggaaggcggtgcttgcggtctggccgggaccgcgtagccgaagttcgcctccttcacaaggctggtgatcatccttttcctccgaatgctagaggaagaggcaggcaccagcccatgtgggaggcgaagccacagctcagctcgctccccaccaccgcgaggctgatgaacatccttgaagccaagcaccgatggaagagcgccgctcccacaacgccgcgcacctccagcaaaggggagacaagaccggcggtataccatttcgagcactcgctcagtctgggcgtgctcgggatgaagtcacaaggccatggcaaactacggcaacgtgaagcagagaccttgaaggcaaaggggcgcagggagctcggaggcgaaaggatgtcggcctcccccgatgcgcaccaagagaagtcgcaccgccactcgcaccagtaccacgcctcctcggggccgccgcagaagacggaggagttagattttcaaaaccaatgcaacgactcgaggcaccccgcgcatggcccaacaaagccattaagtgcggaggtcacaggtcagtcggccgcgggggcaggcgtggcactcggcgtgaccaagggcggaccggcagcaattacaccaacgggcgcgcaaaaacagcgaatcaatcgccagccagactttggccccacctgcaggctcgtatcctcccctgaggcaggcccgggggccattgtcggtaccctgaatcaggggtaccccccactacagtatgacggcgcggtgcccgatgtttcatttggaccggacctccgcaagagagcaccggacccctatacgcacaacccggacccccgattacggtctgggactcccaa

SEQ ID NO: 36589 - DNA, 1077 bp, Zea mays
  Peptide Sequence Number=SeqID_79964
atgcggaggggatccggagctgctgctgcaggcttgctgcagcattatgtcgagcacgccgagggcgtgacgcaaaggagattcacgtggctgcgcgaactggcgtcgcggctgctgcgggaggtacgccagggaggcagccatgggagtcctggacgcgacgcggccaaatcacatagtgtccggcgcagttggaaaaagcgacctgtggggagggtgctcagcgtcctgaaaaaaaagcaggggcagagggagcatgacggcgcagtggctagggagagaaaccaggcatcgcggctgttgggagcgcatgctcggctatgggaaaaaagagcgcttgctgcagccggacctggggcaggagtgctgagcgccacagaagcagaggggaggaagggggaaattgcagtgggaggcgccatgggagaagccatagcagagctccgagcggggaggagaaaggagaggaggtcggacgccctggatgggaggagcagaggcgccatcggagtgggtgcctgtgccgacccgccgccgtggaagagcaggggacgtcggcttcggccatgggggagcccgactggcgtccacccgacgcgcaggggggttgaggttggaggggaagacgctgggggcggccttcggagctccgacgtccgagcaaaggggagcttggctccatgcgaggaacacacgctcttggaagaagaggaggaaaggctctgcgcttgggagcttctgcagaaaactgggtgtcgaggggaggaaggaagggagctcgccgcggaagctggagccgaggggtcgcgcgcccatggaggccttgctattgcgctggggaaagggctccctgctgcaatgccgtggagaatgggagcaccagggaggaggaagaatgtcggctggggaaaaagacagggagaggagcggctggtcgttgatttaaccaagagaccgctggtaaccattggccaccgtgggcggcagccatctgttggccggctgcagccattggcgcagagaacggcgaccagctactggccaggggctggcagtggcagccgttggctggcgtag

SEQ ID NO: 36590 - DNA, 687 bp, Zea mays
  Peptide Sequence Number=SeqID_79965
atgaccaccagccttgtggtggagagaagtgagccgggctgcggcctccccctgtcctcagcttcaaggatgttcatcatccgtgctggggaggagggcgagccgagttggggtcccgccttccgcatgggctggtggtccccttcttcctccagcattcgagggagaacggcgttcaccagccttgcggaggaggtccgccacatccacggctcctcccgcgccggtggccgcaccgaggggcagtacaagatgtccactggtgcgcaagtggccgctgttgtcggtgctgaggtggtcgccgccgctgaggtggccgccaccgttggtgctgaggtggtcgcctccactggcgagccgctcggagctagctaccctgcggccccatcggtgtggaggcttgctttgttgaggttggataccagcgtgtctgaaaaggttgtcaataactcttgggaggcagcctcgccgagggcggtggagcgtgcaggcccacggtacgggaccaggctgagcggctacatgggctccggaccaccccaggagactaatgctttcgggtacggaaccaggctaagcggccacacaggctccggaccaccccatggaacggggtcccgttctctggagccggctcccaggctgtcggacctcccaactttcgtatcgggggccctaaactgctag

SEQ ID NO: 36591 - DNA, 465 bp, Zea mays
  Peptide Sequence Number=SeqID_79966
atgggtgtcgtagttggttcggagatgcggtcgggggcggaggcggcgcttgaggaggcagcgacgatgctccgagaggcggcggcggcgtttgtgagcgcgatgggaggcccggcggcgatgtgggcggtgtggggcacgacggagacgagcgagggcgggcacggccgcgacggacgggcaggcgtgcggcggggacgggcggccgggctcgcggcggctctgacgggcgcacggcggtggggcggctgggcactcggcgccgtgagaggacgggcggcggacgggcggcgccggggcggccgggtgcgcggcgtggacgggcggcgctccgaggggcggcgtcgggctcggccgggaaggcacgccggcggggaggggcggcggcggttagaggcggcggcgagaatagggcaggcggcggcggctaggaagaaagacagagaaatgagcccgcgcgggtga

SEQ ID NO: 36592 - DNA, 699 bp, Zea mays
  Peptide Sequence Number=SeqID_79967
atgcccattggtggtgcaggggacgcctccagcggggcacaggagagcaacgcctcacagattctacctcctgatgaggcgaggaagaagagccctaccgctctagctcctactcctcgtgcaggcgtcaccatttcctacaagtggccaccacacttcgacggcataaacttcccatactatagtgctagaatggcttgttacctagaggctgttgatctaggtgtttggagagtaactcgtgacaggatgaaaccacctaaaaatctcgggaagctcaccatgaaaaatgagcttgttagagatatgtattcttgtttaaatctaatcatcaatgagctccattatgttggaattaataagctaggtgatgcggacattgtgaggaagatcatcttcctactaccacaagaaagatatgggagcatcatcaccattcttcactacatggaggacatgagcacaatgaccccaacaattgtgatcgaaaaaattgcggcttttgaaatgtcgcgaaatatgggtcaagaggagccaacttctttaaggacatatgcttttgcatgtgatgaaaagaaaggaaagaagaaagctcacattccaaactcctcaagtgaagaagaagaagaaaaagaaagtgatgatgatgaagatgatcaacccacaacatcatcctccgaggacgaagaaacaatctga

SEQ ID NO: 36593 - DNA, 1008 bp, Zea mays
  Peptide Sequence Number=SeqID_79968
atggcacgtaagtcagtgatcccctttttgcctacttgccaggcggagcgtctactgcgtcgcatggtgccaggtcagtctaggcacctggagagactgcgtcgtcgcctgcacgaggagcaggagcgccgacgccaggagcaggagcaggagcagcactactcttccccctcgcctcagcaagaggtggagtctgggaggccgccttcccctacacctcagcccgagatgccccctgcaccacgacagggcatcccggctgctggaggagaccctgacggagacagagacgatgacgacgccggtggcagttcgagccacgacatagagctctcggaggagccggagccagaggggcggatcgctagagccatcactcgtgacgccgctcgcgggtgtcacttccacgacgctctcgacaccatgttgtgtcatgccttctaccgacacacttggtctatcgagtaccgttgtgtagtctaccagcactgtcgcgggttatacccgcaccagtgggaggctacttgcttggtgcgtcatccggacgatgatctccggggtgcagaggccttctcagagcactattctattactgagagggatactgctgaggcagccatgcaagatgcagcacgacgtgcactttctcagtattgctcgttgttcagcggggtagctgatggccttgacctgaagtactaccctcgtcgttcgaccggcagtgctagaggtgtgattgtcttgcctattggtgagggcaatcccaggctgaacagcatggtcaacctagtcgtcgtgcttaacaccgagctggaccacgcccttaacgagttgggcaaggttcgggcagaggttgtggaattgcgtgctgagtgcgcggcacaccactatctggatggtggttctcccgcccctgtcgggattcaacacccttaccgttcacctccccatggttgcttcgagtatggtacccctgactgtaggacccatatagatttggatccatag

SEQ ID NO: 36594 - DNA, 1032 bp, Zea mays
  Peptide Sequence Number=SeqID_79969
atggatcctggcacacatatgatggttcgtactctccaaattacccgcatcaacaccagctatgcccctcagccctggcagatcccggtctacccagtggtagtcgaagaagttccggcggatctccctcccatccgagtggagaatgtaatcaacctggaggacagctcggaggaacagctgccgacgcccaccccgttggcagagtccctggccttcgcagctgggtcatcgacgtcagcatcgtctgcaccagccttccaagcacctgcacctagaggcgatgaccccgacgactccggagacggcgatgacgaggatgacgacaacgaagacgatggagaagacgaacacgtcaacgaggaagctgactacgcccagcaggacaacttcatggggattggtcctgttgtcgaacattacacatcaatgttcgagacggggcacttccccaacctgctgcaagaggtgctgcacgcgctaggcacctatgtccgccccctgtacgagacgaggcgagtgagcgagcctccccgggcttgctattacatcactcgcatccacgtcagagtgatggatgcaggtgacaggggattcaggactctgtctgctcacgagtccctgacgccactatccacctacgctgcctcggtcagcgatgctgcccatcggaccctgtggtcgctcagccacacctaccagcagcagctgcagaacacgaggttcaggcatcttcctcagcatctacgtggggaaagccagaccaacatcgtcccaggagaagccggtgaggatcgcctcaacaccctagctggtgtagtggccggtctcaacaccgacctggacagtgccaccctggatctctacagggtgcacttggagctggagaatgcccatgccaggattgcagccctggaagcccaactgcaaggactggatccacccgaagctcgggtccctgccatggcgttgtctcctccccgcaagaggctgcgctatggagagcccggatccgtcactaggctgctttag

SEQ ID NO: 36595 - DNA, 153 bp, Zea mays
  Peptide Sequence Number=SeqID_79970
atgcgcaagtggccactctccgcaggaaataaactcctccaccaagtcacgattgttgctcgcattggaggcacgcgagtagaagagcctgtggctgaggataccagtattcagcagatagaagttgctgagcaggagctcattgaaggctag

SEQ ID NO: 36596 - DNA, 411 bp, Zea mays
  Peptide Sequence Number=SeqID_79971
atggctgctactcccaacctgagatccaccaatcttgtgtttcctatcctccatctctcgatgcttcctttcagtcataatagctctatcgatcaaatgctgaaagtggcatctggacttgcacctgaggttgaggtgggggtggctgctgttgcacctgctgcatcgctgctaaggtctgaccaattgcttggactgcttgggtctgcatcaggaacatctgctcaatggtcatcgggggtggcagtggcaactgctgctgagctgcatcttcctggggtgcctgctgctcctgctaagcacgcctggcacctctgcgcctgttctcagacgtctgtagaaagcacacacaaatcagatctgactctgcagtctttcagcataagaaaagatatatggaaatcttcatag

SEQ ID NO: 36597 - DNA, 815 bp, Zea mays
  Peptide Sequence Number=SeqID_79972
gcttgctgcggcattatgtcgagcacgccgagggcgtgacgcaaaggagattcacgtggctgcgcgaactggcgtcacggctgctgcgcgagcgtcctgaaaaaaagcagaggcagagggagcatgacggcgcagtggctagggagagaaaccaggcatcgcggctgttgggagcgcatgctcgactatgggaaaaaagagcccttgctgcagccggacctggggcaggagtgctgagcgccacagaagcagaggggaggaagggggaaattgcagggggaggcgccatgggagaagccatagcagagctccgagcggggaggagaaaggagaggaggtcagacgccctggatgggaggagcagaggcaccatcggagtgggtgcctgtgccgacccgccgccgtggaagagcaggggacgtcggcttcggccatgggggagcccgactggcgtccacccgacgcgcagggggttgtggttggaggggaagacgctgggggcggccttcgaagctccggcgtccgagcaaaggggagcttggctccatgcgaggaacacacgctcttggaagaagaggaggaaaggctctgcgcttgggagcttctgcagaaaaactgggtgtcgaggggaggaaggaagggagctcaccgcggaagctggagccgaggggtcgcgcgcccgtggaggccttgctattgcgtgctggggaaagggctccctgctgcaatgccatggagaatgggagcaccagggaggaggaagaatgtcggctggggaaaaagacagggagaggagcgactggtcgttgatttaa

SEQ ID NO: 36598 - DNA, 420 bp, Zea mays
  Peptide Sequence Number=SeqID_79973
atgaaggcacgcgtagcccagaggtatcacgtcgggttccacctgttggcttatgccgtgcgcagtatgccacgtggcagcttgagcggggagcaggagtgcgcagacaactcacccaaactggcggcggcgaagtgcggcaccacggcggatgagaggctccggcgagcaattcgtctgcgtcaggcgatggtccctgatcgcaacctgaggctgatacgcgcgataggactacgattctgcggtggcggcgttcggataactcgcgatgggagaaggagcgggagttcggctgaagcgcctgcgaggatacggttggcgaaaagctcggcaaggagctgttacggtttggggagcgatgaagtcggcgcgttcgttgcggacctaagagaagaaagtgctgacacgcagggcccctag

SEQ ID NO: 36599 - DNA, 111 bp, Zea mays
  Peptide Sequence Number=SeqID_79974
atggagagtcatgatctccgggcagaatgggaatcacgacttgtgggtaaagaagaaggcgtcgaggcgaatctccaggagttccaggacttcgacgagtttgaggattag

SEQ ID NO: 36600 - DNA, 243 bp, Zea mays
  Peptide Sequence Number=SeqID_79975
atgagccgcgctgagccccaggctatgaaggccagcggtaggcacaacctaaataatggtgcctgggacccatgcagccccacgtcgtccaccatagtaaatatgagacagccagatgttgatcctagggcaatagatcttgccatgagaatcgccgaaaggatgttcctcaaaatgaaggaagatgaggcgaagaacaaaattgaagaagaaaatgatcgatggaggctgaaagtcgcctag

SEQ ID NO: 36601 - DNA, 1548 bp, Zea mays
  Peptide Sequence Number=SeqID_79976
atgcgcatcgtggtgccgctgcagggggtggtgcagggccggggcggcctggtgctcggctccctcatcccctgcgcgctcttctacttcttccagctctacatcaagcgcaaccgccccgcgccggcgccggcgccggcgccggcgccgggctccccgccgcccgcggccgcctccccgatcctccgctcccactcgcggggcctcctcacgccgcgcgccgcgctgccgtcgctctccgcgcgcggggccgtcgtgcgggccggggacgaggactcgctctactacgccggtctccgtcggtgcgccgccgacccttaccaccccgcgtccaaccccgacggtgtcgtcaacctcggcctcgccgagaaccacctgtcgctggatttggtggggcggtggatggaggagcacgcgggggcggcgatgctggacggcctcgcggcagccggggacgaggtcagggacctcaccatcagggggctcgcaacctaccagccctacgatgggatacttgccttgaagatggctcttgctggattcatgcggcagaccatgcatggatcagtatcctttgatccatctcaaatggtgattacatgtggggcaactcctgcaatggaaatactgagtttctgtattgctgatccaggaaatgcatttcttgtgccatcaccttactacccgggttgggatagggacataaaatggcgaactggtgttgagttgatacctgttccttgtcgtagtactgataactttaatgtcagtgtcactgctcttgaaatagcttacaaacaggcaaaaaagcgaggaataagagttcgtggggttctcatatctaacccttccaacccaacaggaggcattgtgccaaaagaaatactgcatgaccttctacagtttgctgcagagaagaacatacacttaatttctgatgaaatatttgctggttcaacatatggaagtgacaagtttgttagcgtggcagatgttgtggatgaactagaggactttgataaaggcagagttcatatcatatatgggctctcaaaagacctatctcttgccgggtttcgagttggagtgatatattcctacaatgaacacattgtatcggctgctgctaagattgctcgattttcatctgtctcaagtccaacacaacgtttgcttgtttccatgctttcagatcaaaagtttatttcagaatacataaaggttaacagagagaggctccggaaaatgtaccttctgttttctgatgctttgaaacaacttgggatagaatgcttcaagagcagcggcgggttctattgctgggcagacatgagcaggtacatccgatcttacagcgagaaaggagagcgcaagctctgggataggctgttggaggaagcaaaggtcaacgttaccccaggttcttcttgccattgcattgagcctggatggttcaggtgttgcttcacaacattgagtgaggaggacattcctgtcttggtggaaagactgaggagggtcacagatagcttcaaatccaaacgttga

SEQ ID NO: 36602 - DNA, 1062 bp, Zea mays
  Peptide Sequence Number=SeqID_79977
atggacaagatttacagtggacccaggggatatctatcccccacacaggcggctgacttcgcagaccgcgcggcgtcgggggccctcacggcagttgtgtctaccgaagtcgagagacttcggacgcaacatgctgacgccgtccgggaaaagtcggccgccgacagtaaatgccacaagctggcggataaggtggccgtgctggagggtgagaagactgtccttcggcgccaactgacggaggagaggaaggaggccaatgaggccctcgccaaggcgcagtctgcgcaggcggaggccaatctggcgcgggcggagggcagtcttgccaagcagcgcgccgagcagttggaggagcggctcagcgctctgcaggctcgtgtggagagggtcgaggcctcgacgcgcgcggaggctgagcggacacgcaaacagctcatggattcataccatgagctgggcgcgcggaccgctgatttcgaagtgccggaccgagagcccggacttcgctaccttgagtgggtacaggaggagttgcaggcgctccccaccatcgtggaggggtttatgtcttatgcctccctggtcacctgcgagggggcggtgaacgcgctctctcgcgaagggtgccggcactatgaggtcttcgaccaagctgatgaggatttcgagcgtgatatctacaaggttgaggaccctatagtgaaggaatccgccggagccctctacaactggatgtggggcccccacggtcgagaggtggtcagggagcgggccgagacagcgaggggtcacgcggcgcgtggcgagagggtggatgactttggggctttgaacagcacgctgcctgacccggagtcgaacccgacggcggctgtgtccgaggccgccctggagccgcccccggaaaccgctgaaggcgttcctgatgcccccgcagccgctgcggccggcggaggcccgccgccaactgctgcgccgagtgctgaggatcctgtgatggtggcggcggaggcgacagcggaggctcccgcgacggctgggtcttcgcaggtggcctag

SEQ ID NO: 36603 - DNA, 708 bp, Zea mays
  Peptide Sequence Number=SeqID_79978
atgggtgcgattaagccaaggctcggtccactcaagggacacgatcccgcctcacccgagcccagcctcgggcaagggcagccgaccccggaggatttacgtctcgcccgagggccccctcaagcaacggacgcaccttcggctcgcccgaggcccagtctttgccaagaagcaaccttggccaaatcgccacgacgaccgaccgtatcgcaggagcatttaatgcaaggaagagtgaggctgacagcagccaagtctggcttcgggcgctataggaagctctgcctcgcccgaccccagggctcggactcgggctcggccccggaagacgacgaactctgcctcacccgaccccagggctcggactcgggctcggccccagaagacgacgaactccgcctcgcccgaccccagggctcggactcgggctcggccccggaagacgacgaactccgcctcgcccgaccccagggctcggactcgggctcggccccggaagacgacgaactccgcctcgcccgaccccagggctcggactcagccctggcctcagccgacggtctccgcctcgcccgacctaagggctcggactcgacctcgaccacggaagacagactctacctcgacctcggaggagcctacgcctcgccctacccggggctcggaccgaccacgtcacaggagaggccatcattaccctacccctag

SEQ ID NO: 36604 - DNA, 609 bp, Zea mays
  Peptide Sequence Number=SeqID_79979
atggctcagtggtgttggttatggttgtgctcactgaccggggttgaatcctggtatattgcacccaacaacctggcccatgtttcgtttggccctgtaaatggccatggaccagctgtaatgtcgtacgcttggtttctggttcgatttgaaaattggatctctagcagcagcgtagataacaaaaccgaagataccaggcatggtctgtttaaatttaaagcccgtccgttggatagaaagatgttagagaacaaaggtgatggtgtatttcgatgtgcaaaaaggaatacaactgtgcctaaggaatttaacctatcaacaggcaggaaagccaatccagctccgttgtctgaactatttaacaagcaagagataaaccatagtgtaggggcggctcactcggtggatctgcagccctgcgggctcccgcagagactccaaagtgtaacgtattgcaatcgtcttggcaaggtcgtgctcttcttttcgtctttggcatggtctccattccagatgcgctgtgcggtgcaggacaaaaatctcgttgctgctgacaacagcaccgccagcgccaggaatctcctggctggatcacagtcgatgtga

SEQ ID NO: 36605 - DNA, 300 bp, Zea mays
  Peptide Sequence Number=SeqID_79980
atggccggctcgccctggccgcccggccgcgccctggccagccccggccgcgcccccagccggccccggccgcgcccccagccgcccctggccgcccccagccgcgccctggccgcccgcccggccgcgcccccgccctgcgtgctcggccgcccagccggccggttcaaccgcccctggggccgatactttggtacaggtggttatgagattgttgattctggttatgattatggtgctggcgaagatgaagctgtggaaggagacttccaggagttccaagactacgatgagttctag

SEQ ID NO: 36606 - DNA, 393 bp, Zea mays
  Peptide Sequence Number=SeqID_79981
atgggcaagaacaacaagcgcaagcgtgagccgactcctccatcggaggagtttggtgactcggaatactcagaggaggagttctcctctgagtccgaggggtctccgactcccatccccctgcgtgagtcgtctgatgactcagacgactcccaggggcttgcggcggagggctcggatgagtctgagttctcctcggacgaggaggactcggacggcggtgagggcgaagatgacgatgacgacgacggcgacgacgacgacggaggcgacggtgatggcggcaacggcggcggaggcagcggtggcaagggcggcaccaagggcagcagcagcgtgggcagcaccggaggcggcggcggcaagggcagcggcggcagggccagtggctaa

SEQ ID NO: 36607 - DNA, 243 bp, Zea mays
  Peptide Sequence Number=SeqID_79982
atgccgacactcactgctgtcagggacgaggcgggtgctgtgtcccaccggctgaaggagatgaaggagacactaagtcaggctgtcggtgttttgggtccgatcgcacacccggggttgcccctcaagttttgtgcttgtgcctttgaggtcggcattttggattataagattctggactttattggatgcaccggaggtgcacccaatgggtgtagcccccgacctttgagtagattttag

SEQ ID NO: 36608 - DNA, 918 bp, Zea mays
  Peptide Sequence Number=SeqID_79983
atggaggtagttgagttggttccttgcgcccgcaacaagtggggcaattggcatgagttttggttctacgtcgcagagggtacagtcgaagaccatccggggctccccgtgtccgagatgtgctcgtatttttactcagcatacccgccttttgaagtggcggaggaggatgcgaacgaaggggcccttcggtgcgccgccggcctgagcagcgggcgcgatttggttgaggaatttgtggcgtacggggtatggcctttggcgcatggctgggcgttgggcgaagtgtgccctcgccagatgccttcccatggtgggaagctggtgcgaagtcccgccttcgcgctggatctgcatagccgcgatccggccgcctttgtgcgtgaggcggaggatggggcggtttttgagttgaatcgtctgctgtatggcggttatcccggccaagacgatgtggatcgtcgcgggaagaaaccggtggtagagtctggagacaaccccgcgtcggcggccgccccgtcctctaagaagaggaaactaggtactgctatgggaggacttggggtttccgatggttttgctagagaattgatgaggacatgcgcggccccggggggaaggatgtcttcgcccgagctccaggagtcttcggcgcggatgctgagggttaccgggggttggtggcctaagaatgttcctatcccccgcgcggccggcgaagacttttttacatctcgcatggttcgtgaatggaaagtgtttccttacgggcagaatattgctgctgttgtgtcagcagtgatggacaaggatcgccagggagctgcacagaagcgccaggcggtcgtcaggcttcatgaagccaggccgaagaggcagcggggggctgcgaaggctactgcccctggcggaggctag

SEQ ID NO: 36609 - DNA, 247 bp, Zea mays
  Peptide Sequence Number=SeqID_79984
atggatctcgacttggctcgacggcatcgacggagttgtggcactgcacggggaagggctgtgcgcctgcatggtggggagagggagaggcggggcgaccacgacatgactcttggagaggttttggagacgacttggagagcgcaggcgtggaggcacacgcgaaatggtttgcgggagaacgtgggcgagggggacgaggtgcttcgggcatggaggcgaggtagagttgatggagatagacggg

SEQ ID NO: 36610 - DNA, 791 bp, Zea mays
  Peptide Sequence Number=SeqID_79985
agaatactgacggcaccaacgactcaggcaacccagccctaaggcgtcgaagcaagtctcccttcgaaggttccctcgaaagcgacgcggtcgtcgccgtcctctccaacctcggcctgtccagcgccgagatcaccgacgtcgtgaccagggaccccaaagtcctctgctccgacgtggagagatccctcaccgctcgcgtcgccgagctcaccgacctcgggttttcacgtccggagatcgtccgccttctcatcgttggcatgaaccacttccgccatagctcgcttcgcctcaatcttgagttttggatctcggtctttggctctctcgacgagctcattcgggcgctcagaattaacgccgctctcctcagcacaaggattgaggaggtctgcaagcccaacttggagctccttcaagagtgtggtataaatgtttctgatatctccaacagcttcatgtcccgtgtgctcaccagggaccctaagagcctgcaggaagctttggctcgccttcatgagttcagaatccagccgggctctcaacctttcttccgtgggctttatacatttgcaatccttggcagcgggaagataaccaagagcattcagctgtttgagaagcttggatggtcaaaggaccatatagtatcagcggtgaagagagacccgactatattgggtttcaccgaggagagggttcgaagaaacatggaattcttgatcagggttgtcggattggaggttctatcttgctgcctcccttctgagaaagagcttctcatgtga

SEQ ID NO: 36611 - DNA, 156 bp, Zea mays
  Peptide Sequence Number=SeqID_79986
atgaccaaccatcgcttactatgctttattaatgtacaatacattagtaattctgaaaatatgaggcaaactgaccacaacagggttgagatgattccatcatacttatacaaagattttcctagcaaggaatggtttgaacaatgttgtgattag

SEQ ID NO: 36612 - DNA, 741 bp, Zea mays
  Peptide Sequence Number=SeqID_79987
atggtcctcctcgcccttcctctcatcatccctgcctgctccagttgctcatacgtggacacagatggccctgaccctgcatatgatgacccacataagccactcctgatcagtaacagtcatcagatggagtccaatgccatgatgcaaaagccaaaggagaaccagatgcaggtcaagggccgcctggagacgctcggtgaagaacacagtgcaaagaagctcattcggtgtgtggacttctggctctactacacagcctacttctgtggagccactgttggcctggtgtcacttgctcgcacagggtggctcgctgctgcattggtccccatgccaatggcctttttccttatgtggaaccaacaagatggaagcaccctggtagcaggaacgacactaattgtcctaagctcagggttcatctttgctgcagcagtgtcagtgacctccgagctctttggaccaaatagcgttggggtgaatcacaacatccttatcaccaatatcccgcttggctcactcctctatgggcagattgctgccatggtatacgacgcaaatagccaaaagatgacagtagtggataaccgcactggcattgttgacaccatgattgtgtgcataggggtgaagtgctactcaaccaccttcgtcgtgtgggcttgcatcacatttctggggttagcatcaagcatagttctattcataagaacaaagccagcttatgcccattcataa

SEQ ID NO: 36613 - DNA, 555 bp, Zea mays
  Peptide Sequence Number=SeqID_79988
atgcggagagacgagatcgggatgaatggtagacaggctagggtgacttaccagcagtcaacagtcgaggacgacaggatgcagcctcatcggagtcagatgacgaatctgtggcctgacagcgacacaagagacacatcaagggcgcgatgcgaggctagagaagggcatggcgtggatggtagggacctttcagcgaatcggtgcaacagagcaggaggtggtggtggtgggcggtgcggatgctgccgtcgcggtcgcagagaaagtgggagaggaggacctggcagtgttggagtgggattagggaaggagacggatgatgaagggtgcgagtcagagggcttgctcctccttcttcggctcctccttggttgtgcctctggcgcctccaggcgtgctgagggagctgccaacaacctcccccgcctcgcagcaagagcttgctcgtggatggggcgggcgcgtgcacggagggggaggtgggggcacagtgctgcctgttgtcctcttgggaggtggccggcacggggagcagcgtggacggcggcatga

SEQ ID NO: 36614 - DNA, 2829 bp, Zea mays
  Peptide Sequence Number=SeqID_79989
atgccgaggactgggaagacttcggcggaagttgtggaactagttccctgcgcccgcaacaagtggggcaattggtatgattattggttttatgtgtcgggaggcgaagttgaagacctcccaggactcccggcggccgtgatgttctcccactattatgtggcgttcccaccgtttgaggtggcggaggatgatagggacgaaggggcccttcggtgtgctgcccgcatgagtagtgggtgcgatttggttgaggaattcatcggttatggagtgtggcccttggcgcatggctgggcgctgggcgaagtatgccctcgccagatgccctctccgggcaagcagcaattgcgaagtccggccttcacattggatctgcgcggccatgacccagccgcattcgtgcgtgaagtggaggacggagctgtgaggattgtggggcgggtcttcgagttgaatcgtttgccgtacgacggctatcccggggatgacactgttgtggtcgtcgatcgccatgggaagaaaccagtggctgcggttggggaaggttcttcacgggaggctgcgccggccatgaagaagagaaaattaggtactgcagctgaagggttgggggtctctgatcgttttgctgtggagttaatgggtacttgcgcggccctcgggggaaggatgtcttcgcatgagatccgggagtcttcggcgcaaatgctgagggttaccgggggtcgatggccaaggaacattccgatcccccgcgcggccggcgaagacatatttacgtctcgtatggctcgtgagttgaagatttttccttatggacgtaatattgttgctgttgtatcagcagtgatggagaaggatcgtcaagatgcggcgcgaaagcgctgggcggtcactagggccagggaccctttccgcgaggtgaagaaggcgcggggaggcgcgaagtctgccgcccctagcagtagcaaaccaccgcccgctgcgaagccggccgcccccgggcctagcaagtcttcggtgggtgcgatggctgctgcctctggtgcgggcaagctgccctcggccaagcccgtgaaggagcgaaggctgccgtcgccggcgcgcactgacgtggtggcagtgcgtgttgctgacattgacatggacatctgcgtgggggattatctcgttgggtcggatgtgggacatctggatgttgtcctgactccggtggcggccacttcgccgacggcagcggttagtgcgaagggtgcttcgcaggacccgtggtccaccttctgtgcgagcggcgagatttcatcggccgccgccgctaaagatgtggcgggctctatgtcccatcagatgaggcatgcgtcgcagcagctaaagcatgcggccgacttcgccgaccatgttgcgtcgggtgctctgactttggagtttgctgccgaaatcgagcatctccggacgcagcatacagatgctgttcgggagaagtcggctgtggaaaacaaaagccacaggctgacggagaggttggatgctgcggaggccgagaagggggacctccggcgtcagctggtggaggagaggagggacgcgaacaaggccattgccgatgcgcaggctgctcaagccgaggccaaacttgcacgggcggaggccagtctcgcccgccaacacgccgaggagctggaggcgaggctcaacagcctgcgcaatcgcgtggacaaaaccgaggcctcgatgcacgcggaggtcgagcggacgcatgcgcagctcgtggacgcgtaccgggagctaggtgcgcggaccacagccttcgaagcgcccggccaagaggtgggcctccgcttcctcgagtggctacaggaggagctgggggtgctcccgataatcgtgacgggcctcatgtcctttgcctccctcgtcacctgtgagggggccatgaatgctctgtcccgcgaggggtgtgggcacttcgaggtcttcgaccagtcggacgaaggcttcgaacgcgaaatcttccaggtcgaggacccggctctgaagcggtcggtgggagcgctcttcgacaggatgtggggccctcacggccgagagacggtctgggggaggtccgaccgggcgattgatcagatggcgcacgacaaagaggtggaggatcttggcgatctagacagcacgctccctgaggcatcgggggtggagctggcaccgccatccgatgcgggcaagggcccctcgacgacccctgcgccgaccgcgccgactggagctggcgaagaccccgcgccagcccctgcgctgacgggtggggacgcttcgaaggcgatcggcgaaccagctgccgaagaccccgcggcggcggccgggccttcacaggttccgacgtttgggcctgcgcaagcatccgctgctgataatactgattttgtggcggcctcaaccgtagtgcctgccgatgatagtttgtttggttctgtgtctgagtgttttgagtccgatggtgaatctgggagttcgtttccttggacagaggagtccttggatgaaggcttggattattttgttgcgttggatgtggctgcggcggagacttcgccgcgtgtggagggtgccagggatcttcctagtgcgagtactaggtgtaggcggcgaagtgtaatgggaaaacatagtgtgggtgaattttcgcggagtggcaggcgccgtcgtatggggatggagcgtgaccatctccgagtagaccgggttggtaaacgagaattgttgtcctcgccgactggggcgagcataggcgaggggatcttcggaagctttttaagggtgagcaattga

SEQ ID NO: 36615 - DNA, 483 bp, Zea mays
  Peptide Sequence Number=SeqID_79990
atgggcatagattcacatttaagcacttgtgtttgcactcaatcaccaaaatacttagaaaaggcccaagggcacatttccctttcagttacccccgggttggcacatttccgtcaccttgaagggttcctcccagctggggggagcgtttacggaacccttcttggttcagtactagccatagggctagatcccgaccctaggttccctactatgcacgaaccgttagtagtgtctgggtgcctggttgcaacgtgcatttcaggtcgctgcttgccctctgcattcgtcgatggagtccacatccttacgctgtggccgcccctgcatagacttatcaaaagactggacccgtggttggcggcgaggtggggagccgtccttggaagactgctcgcgccgcccgatgacgcgcttcgcgagcttgatgatctcgcgacactccgcggtgctatggcgactgttggggtgtactgggcatga

SEQ ID NO: 36616 - DNA, 534 bp, Zea mays
  Peptide Sequence Number=SeqID_79991
atggaggatgactcgtgggcctgggcccccgtgtcagagactgggctattggtttcggcggaggtgaagaggcgcactaccgcagacggtggtgtgctccttacacgtcggtttgccttctccgcacacgaagaccgacgcccaaggagtatgactcatggacccgggcccccatgtcagaggctaggccgctgctttcggcggagacgaagaggcgcactaccacagatagtggcgtgctcctcacgcggcggtttgccttctctgcgcatggaggtcgacgcccaaggacattcggggggaaggatgttcaccagcctcatgaaggtggacagtgggctgagcagcgactccatccctcatgccccaactctttggggtgggaagcgagccgtgctgcggctccatctctttggctttgatggcttcggtgccgcctccaacgggggtcgtacaagacgtcgtacgtcgtggagatggcggccgcacgcttccagcacaaccccgctgatgtcgagtaggtcatacctgtag

SEQ ID NO: 36617 - DNA, 363 bp, Zea mays
  Peptide Sequence Number=SeqID_79992
atgtggcctactgcccgtgacataagccagcgggcggagccagacgtaaggcctctgggccgcgcatttattgcggaggaggcgcgccgcctgtcaagctggcaggtgatgtgccgcctcagcattaaatacaccatgtctactccgatgacaagcgatgtgctgccacagcatttaatgtgccttgtccactctgctgacgggcagtggccaggccatcctgcagacggtgtgcccgtccgctctggtggtaggcagtacgtctgtgctgcggcatacactgtgctcatcatcactcatatgttgctagtgaagcttctgtcgcacgccgatactacgcaggctgcgaatatcagggcgtaa

SEQ ID NO: 36618 - DNA, 258 bp, Zea mays
  Peptide Sequence Number=SeqID_79993
atgaagcagccaaaaatcgtgctgctgatttttgtttccggcaagattgttccgacaagagctaagattatatccaacctattctctttccagcccaaggtcgggcgaggcggtgactcctctgaggtcgaggttgaggccgagccctggggttgggcgaggcggagaccgtcttccgaggtcgaggttgagcccgagccctggggtcgggcgaagcggagatcgtcttccgaggtcgaggcgggggccgagccctag

SEQ ID NO: 36619 - DNA, 447 bp, Zea mays
  Peptide Sequence Number=SeqID_79994
atggcaattgctctgttaatccagcctctcaagggcactatacggggggcctattatagtgggtcgaatcccacgtgggcctctaggtcgggtgaggacgtgggatggagagacttcgtcgtaggccttcgtcttgcagtgaggaggacaaagggtgggccgcgccggtcatcttgcctccgttggtgcagcgaggtgacgaagatcttcaagagtgcccatggtgtatggatggaactcgaagacttctatggtgactcttccacatttgatgatggaaattttgtagaagaggatgatcacaaggaggagatagagctcgaagatgatgatcacattgatgacaaggaggtcattgatgggtgctccacctcaagtgagaactcaagcgatgatgataaatctaccacaagttcacttgagttgatggaagatgatgattgttga

SEQ ID NO: 36620 - DNA, 93 bp, Zea mays
  Peptide Sequence Number=SeqID_79995
atggcgaacaaggtggcgacaactgatcgagtcgagggccatcattatcgtgcagagctagctgccattgcaacacgtgcatgtgttcgctga

SEQ ID NO: 36621 - DNA, 474 bp, Zea mays
  Peptide Sequence Number=SeqID_79996
atgaaggatgctaaggccatcaagactccaattaggacaaatgggtatctcgaccttgacaaagaaggtaaatcagtagaccaaaaggggtggaccatccaggccaggagcgtggaccgtccgtggaggaatttggcaaaacaggtcgctgatcatgccaagcatattcttcgtatttgcaatgagaagctacccttcggtaaggggttgactgcatttgaggttaaagaacttcgtgaagcacttgaatttgtcgccgaaggattggaccaggactcccttttttgccaagaggaattggatgcaactgttaaggaggaacaattggagcatgacgagaaggtggctttagagaggattgaaagcccactaccttctcgtgattcggactgcttcctatcccttgaagagcacattgagaagttttggggcgttgattacaactcagaccagatgcctagctactccgactag

SEQ ID NO: 36622 - DNA, 516 bp, Zea mays
  Peptide Sequence Number=SeqID_79997
atggaggcaccggactgtccggtgcaccaatggctccaagactgcaacggtcaactgcgccatttttggaaggaaatcgggcaccggacagtgtccggtggtgcaccggacagtgtccggtggtgcaccggactgtccgttcttacttctgcacttcactgcttacttgtggcgacatccagatcctgttcccgggcaaagggaactttcaattggtatgacaaccactacgatgatctctcctcccactgcacccacctaaactcccgggtggaaagcctagagcagcaagtcaaagagcttaagcaagaaaaggcatctctccaggagtgtctcgacatagcagaaggcgaggaggccaacacccgtgaggcctatcgaaccttaaagatggactatgacaagaagctaaagaagcttgctcccaagaagaaaatccagaagaagaccaccaaccgagggtgccaaacggagaagaagaagaagacccctccagccccacctcccccaggatag

SEQ ID NO: 36623 - DNA, 588 bp, Zea mays
  Peptide Sequence Number=SeqID_79998
aaggcaaacgcggctgcgagcgcggcgcccctctcccactcccactccccagccgccgccagcccgcacacccctccctcgcgcgctcagggtttcggaatggaagccgaggccgcggccaagaggacgcggcagagcggggaggatgtcgtcgcggcggggatctccgcagtcatcccgggatggttctccgagattagccccatgtggcccggtgcgtcctgctgctctgcgcctcctattcgcaccgctcctctgctgcgcatcgtgatgctctcctgtcctgtcgaccacacacactctcccttcgaagctcggatattcttctttcgtcgctgcctgctcatgcggatccacgttatagagagggatgagtgtgcttaccaagagattatcactcacctgcccctttgctccatcaaagaccccaagaaggtgctggttattggagggggtgacggtggtgttcttcctgaggtttcacggcattcctatgtggaacaaattgacatctgtgaaattgacaagatggtggtagatcccttcgtctcaaggaatgtcgctatgccgaagctccctggatggtag

SEQ ID NO: 36624 - DNA, 621 bp, Zea mays
  Peptide Sequence Number=SeqID_79999
atggcgccccctgttgacgtggtcggtccgtgccccaggttgggcgatgtggaggcttctccgaggtcgaggtcgagtctgtcttccgaggccgaggtcgagtccgagcccctgggtcgggcgaggcggagaccgtcggctgaggccagggctgagtccgagccctggggtcgggcgaagcggagaccgtcggctgaggccagtggagcggcgaagcctttgcagctttgtgctgatgggggttaccagctgagaattaggagtcttgagggggaccagcctttcttggttacgttttgttccggtgggtgcgcacgagcgcacccgccgggtgtagcccccgaggcctcggaggagtggtttgactcctccgaggctggtatgttgacgctgtcaacggtttggccggagccgggtttgcgagagcagtccccgagcctctgcatagggcgagaggacggtcaaggacagactcggcttttttacatacgctcctgcgtcgcctttcctcaaggaggagggggggaaagcgccatgttgccctcggagggcgccgaacatggtgtctccggtgagctgctggcgggtaatccgagtgggcacccgtgccccatttgttag

SEQ ID NO: 36625 - DNA, 756 bp, Zea mays
  Peptide Sequence Number=SeqID_80000
atggctgaaaggtaccaacttccacgccgttgcgttcctccaacgacaaggcggaaggattgcgggtgtcccccatccgggggctcggaaggtggaaagacacgatgcataagggagcacgaagacatggtcgcctttcaagggggtcatcctccttttaaaggcaactctccctacttgcgtccccagccgtcgtgggctgagtcttctccaacacgctccaaggtcctccccctacggcacgggggctgggtcccacgcgtcatgcaagctggcccagagcagaagaagccaaaccgtcgcgcgcggtgcatgcaaccgcccagcggttacgagcattcctccactttcgcccagaccagcgggcgaaagggcgggcagccatgcaggcgacatgcaaccgcgccaagtgggcgcgcccctccgacttccaacgcacccagcatgggggcccacgcccacgcgtcatgcaaccgggaccgggaaagggggataccccgaaaaaggatccttctccgtgaaggaaacaggctccgagcctccctactgatcaaaggttcaaaggctggcccctcggaggggtttaacagccgcctcagagcgcgtgggctccacacccactactggtcagaggttcgaaggtcggccccttggaagggttcaacggccgcctcaggccactcgggctccgcgcccactactgatcaggggtttgtaggctggccctcgaagggttcacaaccacctcagacatag

SEQ ID NO: 36626 - DNA, 255 bp, Zea mays
  Peptide Sequence Number=SeqID_80001
atggataggtcgaggtttaggcgtccgatgtgttgggttataacccccctcgccccggtggagtcagttcggttagcggaaaattcggtggccgttgaggttgaggaggatgaacctaaccatgggtcccacatggtggtgacaaggcgagcgagtcgcaagcgtcctagcgagatcgatggaaacgctgacaacgtgggtcccggtggtcatcagaagacttccagcgtgcagactgttagaaatatgacctag

SEQ ID NO: 36627 - DNA, 222 bp, Zea mays
  Peptide Sequence Number=SeqID_80002
atggcgcacacccataggatgctgcgagctcgcctcttatcattcccatgccagaaccttggtgctgctttgcgttcacgccgttctcgcgctcaccttgtcgaggctcctcacttcgccgtgttcgctggtgtgtgtgatgtccgaagagaaattccaagagtttttgatagtgaggaaaagcatagctcgaacaatgctcacctggtgttcagtgaatga

SEQ ID NO: 36628 - DNA, 294 bp, Zea mays
  Peptide Sequence Number=SeqID_80003
atggcgtggcaggcagcacaggatgggcggtcagatcggcgtaagcaccaccgcccgagatcctcatccgacggcaggcatcgatttgacgtcgtcgactttcaagtcaaccacgccaaggagtttcattatattaagagccagcgcggcgtcacctccgagatagccctcgcccggataggagcgactagcgagaagccaagcggcttggcacctcagcctgctgcctctgctcgctctcttcgccctctttctgcactaatcctcggctcaggcagccaatattctgtctag

SEQ ID NO: 36629 - DNA, 375 bp, Zea mays
  Peptide Sequence Number=SeqID_80004
atgtgccaacttgcttatccgttgaggactggtgctgtagacggagccaaagctagtgtggatgccggtggcgaggtagcgctggcgtttgctagagagcgtgtcgtggactcgccgcagaagagcgccatattctcaatgcaggagacgaagggttgccacgatgctgctcagacgggcggacaacgaaacgaatggatgtgggggatggagctggaggctctgcggcaccacgaagatatggggggtaggcgaggtgtggggcacaggagggcgcccacgcgcaaggaagcttcgcggcactgcgacgatggcgggcgtcggtggcttagcgtgggggatggagctactagaagcttcccgacgtgttgctga

SEQ ID NO: 36630 - DNA, 591 bp, Zea mays
  Peptide Sequence Number=SeqID_80005
atgtccgaatcgactcggagcagggatttcgacgaggctatccggtttgaaccattcatcaaacaccatgagcgcacggccagcgggcacgaggaaacaacgatagcggggagcgagctcgtggcgcggcacgacgtgactgtggttgccggtgaactcggcaatcacgatgcaaggagcaggagaacggctggggcgagctcgacaggaaatagcagggcgagcgacgctagggagctcggcatggtggagcacgcgaccaaggcgaacgacaacgatgatggagtagcagctagcagtttaggcgatgttatgctcatgcttgaggaaagtttgtggcctggccacggcaagaaacgagtcgctggcgatgatagcgcccaccgacagcagtgcgcgagaccggcgaacaggagcaagatccgagctggggccgggatcaccaggaagagcgcggcggccaaggaaccgagctctgcaggggatccagccgggcgccatgggagctacgcggacctggcaaaatccgagcaaggagggagcgccgtggggaagagccgttcggcaggggagaagaaggagctgggctag

SEQ ID NO: 36631 - DNA, 405 bp, Zea mays
  Peptide Sequence Number=SeqID_80006
atgatttccggggtgcagaggccttctaagagcattactctatcactgagtgggacactgccaagtggggtagctgaaggcctcaacctgaagtactacccccgccgttcgaccagcagtaccagaggtgtcattgtctcaccagttggtgagggcaatcccaggttgagcagcatggtcaacctagtcgacgtgctcaacaccgagctggaccacgcccttgacgagttgggcaaggctcgggcggagattacggaattgtgtgctgagcgtgcggagcgccaccattatgaggatggttcccccacccctgttgggactcagcacccttaccgttggccgctccgtggtcatcatgcttatggcacccctgactgcaggaccaagatagactctgagccatag

SEQ ID NO: 36632 - DNA, 360 bp, Zea mays
  Peptide Sequence Number=SeqID_80007
atgctggaagactacacagtggtactcgatggaccaagtgtgtcggtcgagggcttgacacatcaaggtgtcgagaacgtcgtggaaatgacaaccgcgagcaacggtctcctccagcagctggggtgccctatggtggtgcaggggtcacctctagctgaggcgcagaggagggctgcctcccagactccacctcctgctgaggcgagggggaagagtcctactgctcctgctcctcgtgcaggaggcggtgcagtctctccaggtgactcgattgtcatgtcaccgtgcggcgcagtggacgcaccgcaaggcgagagggcaagaaagggatcatcgatttacgagcagtgcatctaa

SEQ ID NO: 36633 - DNA, 495 bp, Zea mays
  Peptide Sequence Number=SeqID_80008
atggccatgatgaatccaccatcaagttttatttttgaaaacatcccacccacttttgccacatcatatttgcaagcaagtgagaaagattttaaaaaacatcaagggaggtggcaaatgcaccggggcttgccttcgttaacagtccccgacggcgttcaagcacggccgcgctccggcgagcaactacgtcggccgattgaggctaagactggtgctaatcttcggctgagaccaaatccgagtccccatgaacgttttccccaacttaattgcactattggtggactagggagctccggccacggtggccgtaagaaaagcggcaataaggtcgtgttcccgacgactcatggcggtctagctcgattcaatggttcggctccaaggacggcggccggtgaatttcaaggagatgcgcggcggtcggaggtgacgaaggttatcggcttcgcgactacgtgtctaccgccgtggcgggctcaccggccttga

SEQ ID NO: 36634 - DNA, 255 bp, Zea mays
  Peptide Sequence Number=SeqID_80009
atgtccgccattaaagccacggccgaggacgccgcttcgtccgccaaggccggcgtcgccaaggccaaggccaccgctgacgagaaggttgagaaggccaagacgagagatccgttgaagaagcgggaggtcgaggaggacaaggaggaccgtaagctgcagatcgagtccgacgagcgggtcgagaaggccgcccacggccccgagaggaccgtggcgcacacggccgaatttaaaatagagattgcagagtag

SEQ ID NO: 36635 - DNA, 222 bp, Zea mays
  Peptide Sequence Number=SeqID_80010
atgggagttttatcatctgcaaccttgaggttgtgggccgtgttgacgacgcttgttgctccgccggacgacgaccccgtcggcgtgatgggaatgggggaggcgagaagacagatggactcgctggaggagttagatgaaaccaaacaccgtctaagagcttgttcaacagaaaagagagcttgtttaagagaaaaggttgcagaggattacaaagactaa

SEQ ID NO: 36636 - DNA, 459 bp, Zea mays
  Peptide Sequence Number=SeqID_80011
atgagtgaggcatcaccatgcatgatgtgcaagacctacccacagcaagccagcaccgtctgcaagaacgacttcatcatcatcaagaaccgtccctgtaaggtgagctttggcagcagaggcggcagcgaccccgacgcgtacgctgtggtgctcaagaggaagctcgacctgtactacgccaccgttggcaaatccatggtgtggaaccttcgagaattgttccacattgatgctacagattacatgatgtccatatgcgttgatgacaatctgaaagagctttcttcacctaggaaaagtggcaatattttctatctttcacatgatgaatgttttgtcacaaaaaccttgagaaaaactgagatgaaggttgaagaggatggttcgatcgttaagatcagtcatgaagagaagcgtgatgactacatgaagttctttgatagtctccctggttag

SEQ ID NO: 36637 - DNA, 651 bp, Zea mays
  Peptide Sequence Number=SeqID_80012
atggtgacctccagcttgatggtgggggaaagcgagccgggctgcggcctctgcccctccctcagcctcaaggattttcatcaccagggctggggaggggactacagcgtgcctggctttcgggcgcgagtggcttcggagccgctcgcagcgccggcgtctgccacgacagctggaagaggttcttccgccgacgagatagccagggtcgcccacggaccgacctccaactctacggtcttctgcccgtccttgcctcacaagtttgggcatgggcgggggcctcctggcagctgcacccgccctgaggttagtgctgccgctgttcggccccctagagcagaagtcgtcgtcgtcgctgctgctagagcaggtgacggcgcgccgttcgtcggtcttctgttgctccgcaggccctcccccatggagtggggttgttcgtacctgcggagggggaaccggagttctgtttgtaatggcactttgaatgccaactcgcctgttggttgtctgaaccgcttcaccaagcatgagtcaccccgtgtcaaggtgacgagtgaggccaggggtagcgatattagcacgaacagaggcagagttggctcaaaaatgaaacctggttggccggagcctagccgggtcgtccgttag

SEQ ID NO: 36638 - DNA, 495 bp, Zea mays
  Peptide Sequence Number=SeqID_80013
atggctgaaaggtaccaactcccatggagttgcattcctccaacgatgaggcggaaagacggcgggtatcccccatccgggggcttggaaggtggaaagacgcggtgcataagggagcgcgaagacatgggaccgagaaagggggataccccgaaaaggatccttccccatgaaggaaccaggctccgagcctccctactgatcagaggttcgaaggctggccccccgaagggttcgacagccgcctcagatcgcgtgggccctacacccactactagtcagaggttcgaaggccggccccccgaagggctccacggccgcctcaggctactcgggctccacaggggttcgaaggctggcccccgaagggttcacagccgcctcagacgccgagcgagggatgaccatgggtacattcgatacataaccaaggctcgggttgcgctcccgaggtaccctaggacatttccgagaccagcgggagcgatcttgtaa

SEQ ID NO: 36639 - DNA, 381 bp, Zea mays
  Peptide Sequence Number=SeqID_80014
atggctctggagtgcctcagcaatggcgaggacacaacgagagccctagtcgacggcggcggagacacgacagtacggcaagaagtccgatgcatcgagaaaaatagcttgcccttgactctgaaccttttgattcctctcatgggtaacaccttcagtttgcccagtccgtgctcaccggagcacttcttgcgcagccggagcccgccattgtcgacccgaggctccaccgcagccccgtcgtaccccaagcgctccggagttcgcactcgagacaacgagcagtctgtggttcctaagtgtgttgccgaagatcttcctgagcaacaacctggtgaaggcaagtgtcctctgacctattatgtcctacatacttcataa

SEQ ID NO: 36640 - DNA, 996 bp, Zea mays
  Peptide Sequence Number=SeqID_80015
atggctcatcttagatgcactgcacgtaagtcagtgatcccctttttgacttctcgcctggcggagcgtccactgcgtcgcacggtgctaggtcagtctagtcacctggagagactgcatcgtcgcctgcgcgaggagcaggagcgtcgatgccaggagcaggagcagcaggactcttccccctcgcctcagcaggaggtggagtctgggaggtcgtcttcccctacacctcagccagagatgccccctgcaccaccacagggcatccctgctgccggaggatacctagacggagacggagacgacgacgacgctggtggaagttcgagccacggcacggagttctcgaaggagtcagagccggaggggtggatcgctagacccatcactcatgacgccgcttgcgggtgtcacttccacgacgctctcgataccttgctatgtcgggccttcgaccgacacacttggtccgtcgagtaccgttgtgtagtctaccagcatcgtcacgggttatacccggaccagtgggaggctacttgcttggtgcgccatccggacgatgatctccggggtgcagaggccttctcagagcactattatattactgagagggatattgccgaggcagccatgcaagatgcagcacgacatgcactttctcagtattgctcgctgttcagcggggtagctgatggccttgacctgaagtactactctcgttgttcgaccagcagtgctagaggtgtgattgtctcgctagttggtgaaggcaatcccaggctgaacagcatggtccacctggccgccgtgctcaacaccgagttggaccatgcccttgacgagttgggcaagatgtctgagaacaggcgcagaggtgcaaggcgtgctcagccggaacagcaggcaccccaggaagatgtagctcagcagcagttgccaccgccacccccgatgaccattgagcaaatgttcctgatgcagacccaagcagtctaa

SEQ ID NO: 36641 - DNA, 120 bp, Zea mays
  Peptide Sequence Number=SeqID_80016
atggggctcggtgtatgcggctcgctctaccaaggtgttgatgaaaatgatggttttggtattgactttggtaatggtaagtggtattctttccgtttggaaagggagaattctgcatag

SEQ ID NO: 36642 - DNA, 414 bp, Zea mays
  Peptide Sequence Number=SeqID_80017
atgacagagctccagggcctaacctcatctctcctgccgcaggacgataaatacttgtcatctgatccaaataagctgaatgatatgaaacaagatgttttcggtagctacagaaacatctttggttactctagaaatactagggatgatatgttgccactttcaagtacttctgaggaatctcgctttatgaaaatgttggagaacaattctaggaaaacaagaaattctgtcactactctcaaagaactttgcacagttgagggatataacttagtttttcaagcctgtccatctccagcagatggtttagttgggaaagaatcttatgctcagatacaaattggtaggcaaattctaggcaaaggagatgcaggaagtggcatatttgctgctaggggcgagactgaatga

SEQ ID NO: 36643 - DNA, 720 bp, Zea mays
  Peptide Sequence Number=SeqID_80018
atgccgatgcttactctttgccgacttgtgaagaaactccggcgagccgtcatccgcgagttcatccgggcatgtcacctgggagttctcgacgacgaccgtatcggcttcgccatccagagtgccatcatgcagatgagcgccgacgatttcaccggcgtgtggcttcccacacttcgcagaaccgctcgccgtgaaccgccgcgccgtggatcgatgccgcgccacgcacgcgcgccagcggtggcggttgttcctccgtcttcgactccagtcgaggcgacgccgacctccaacccgtacccaccaggctactgcccggtccatggatacgggcagtgtgtgctgcgcgacgccggaatcctcgacaccacaatcatctctgccacctccaccgtcctgccgacgccaacccaggcagcagaggagaggcctcggtggaggccacctacgcctgcgccgcccggatttggccggcgaccaaccatggcggctcggacgggctgcccgccgttcttctccaatgccgttgtcaatttccccccaccttccgcgctcccgatgccgtcccccgcgcttcttccgccacgacgccatgccggagtagcggccgcgcgccgcccaggtctgcgccccgtcaagaatgaggccgacctccccaacggcagcagcagaggatggttctcctcggacgaggagaaggcagactcaatctcttaa

SEQ ID NO: 36644 - DNA, 363 bp, Zea mays
  Peptide Sequence Number=SeqID_80019
atggctgcccctcgagaggaaggcgccaccgagctcaaccaggagagccgatggccgatcctcgacgagatcgaggccaacgactacgacaacttcacccggagggcctacgttcctaagacgaagaagctgatggcgctgcccaaggcgtacctgagatcactggtgcctgtgtgggagaagctctccaagttctctggccatgctgctggcggcttctccatagagtccttgatgaagatgtcggagccggctgtgctttcgcacttcaagcccgcggactatgtcagcatactggctcagatacacaaggagctggagtgccgccctcctgacgacaaggcctccctgtacctcctatag

SEQ ID NO: 36645 - DNA, 1755 bp, Zea mays
  Peptide Sequence Number=SeqID_80020
atggatacatttgttaaaaaggttactgagctgaaccgcaagatgaacgaggtagacgaggagtccaagcaggtctcgtatcccgtcatcagggatgacaacggcaacgacaagctcgattgcccggcgcttggcaagcagttcgcagctgaggagatttccgcacagaatgttcgtaatactaacatgccgatggatacatttgttaaaaaggttactgagctgaacctgtatcttgtcctgcttccacttgatggtcaaagtgtgcctaaactggaaaagccctaccacagttgcctgccaacactatctattcgacatctctgccagtgttccttgcacaatctagcagacccggacgccagtggggaggcaacgggtgttcgtgtagatagagattggctgcattctcgacatgtacctggaccgcactgtgttcagagaaccaatcatctgcaaaaatgtcccatagattgttgtagatatggaaggaagaccacaatcataggaggtgtagttgttgatgtgcctctaactgacagctcatctgcaactgttgaagaaattagccagcccaatccgaaggatggttctcctggggctgcatctgctataccagaaacagatctgccagaaattgcccaggtgataagatcatgtcgagatggtatccataaggtggtggaattactgcagcacaagtttccaaatgtttcaaagactcagctgaatcgcaaagtgagagagatatctgactttgttgacaatcattggaagttcctggacaaggccgcggtggagacggcggacgacaagtcgcggcggcgaccggcgagcgcgtggtgcctgtgcacggtgaagcaggtggaggagctcaagtgcgtgctgcggctgctgccggtgtgggcgagcgacatcgtcttcgcggcggcgtacacgcagatgaccaccaccttcgtcctgcagggcgacacgctggacccgcacgtgggaggcggattccgcgtgccggccgccgcgctctccgtcttcgacaccctcagcgtcatgctgtgggtgccgctctacgaccgcctcgtggtcccgctggcgcgccgcgccacgggccaccgccgcggcttcacgcagctggcgcgcatgggcgccggcctcctcgtgctcgccgtcgccatgctcgccgcgggggcgatggaggtgccgcagtacgtggtggtgggcgcgtccgaggtgttcacgctcattggccagatcgagttcttctacgaccaggcgcccgacttcgtgtggagcatctgctcgggcctctccatcacgtccttcacgctggggaactacgtcagctccgcgctcgtcgccgtcatcgcgcgcgccaccgcgcgggccggccaggttgatgggtggattcccgacgacatcaaccgtgcgcacctcgactacttctggctgctcaccatgctctgcgtcggaaacttcggcgtctacctgctcatcgcgcgctgtgcgcatgagttttgtaatgtgggtgatgatgcttgtcttattctgtgggatgctcgaactggcactgccccacctgttaaggttgagaaagctcacaatggagatgttcattgtgttgattggaatccccttgattttaactatatcttaattgggtatgatggtattaaggttcaattcagcataatcgttgaaacaaattcgatctctatcagttccttatacgttcaagtaatgaatctttcaattgattaa

SEQ ID NO: 36646 - DNA, 270 bp, Zea mays
  Peptide Sequence Number=SeqID_80021
atgccggggtcccggtccgaggagaggaggcgggccgagggggtacttgaccccttggccgatataattggggtgactccgggaggccgctccctcggcgcctcgggcgtccgaggtggaagcggcgtcgaagccggctgcgggacaaccctcggcagcgcctacggagactggggcccgaggggtctccccgcaggcacgattggccttgccctagagcggcaagcggaggcagggctcggctggtctggcccccacgaaggcccttaa

SEQ ID NO: 36647 - DNA, 879 bp, Zea mays
  Peptide Sequence Number=SeqID_80022
atggcaggggatcgggaaaggggacatttcgaaggagcccttggcagcaaaagaaatgggccccgagccctcctactgatcaggggttcgaaggttgcgccctacggggttcggcaaccgccccagagcactcgggctctaagccctttactgatcaggggttcgaaggctggcccctcggagggattcgacagccgccccagaacatgcagagtcagggatgacccggggtacgtccgttacatggccaaggctcgggctacgctctcgaggtaccctaagacatttccgagaccagcgggaacggtttgtaatggaatcccaccaaagggaggcaccgagcccttggaccctatcaaatgggtccgggtccagcgaatcacctgcagggatcacctgacaccttatcctgacacgcgcgcctcagttggcaaggaaaacaacactattcaccctgttccgactactgtgccaaccaccagggtaagactaacaacagtaagtcacggcctctcccgagtttggcctcaggcgcaccagggagctccgcctcgcctgactctaggcctcggccttagcctcggcctcgggagaaggtctctgcctcgcccgaccccaggcctcgccctcagcctcggcctcgggagaaggtccccgcctcgcccgacctcggcctcggaccgactacgctacaagggatacatcattaccctacccctagctagccgcctcaggctacgaaggaacaagaccggtgtcacatctagattactccggcaacagctctctatgaaggcaaagaaacgtcagcaggacccagggccgcaccgccagctacgcttctacaaggctcaagcacttctccgccggccacgttag

SEQ ID NO: 36648 - DNA, 462 bp, Zea mays
  Peptide Sequence Number=SeqID_80023
atggaacgtgtcgctatctcaggtgcgagactaatgcccgacaagtctctcgcaagggtgctggcgtcatcagtccgcctggggttggcacgttgctgggaagcgacacccgtcgttgtcccagatggattgatgcaagtgaaacatgagaggggggatgaggcttatattatcttgcaccagggtgctcgtagtaggggttacaagcttcgcgggagagggtttggccttgaagataaggtgtcaggtgatccccgcattaaatgtgtatgcgatacggtcggtggtaaagcaatttggccgaggttgctatacgacaaagttttcccgagcttggcctcgggcgagccgagggtgcgcccactgcctgaggaggccctcgggcaaggcgtgaatccgtccgggactactgttcttgcccgaggccgggctcgggcgagacgagatcgcgtcccttggtag

SEQ ID NO: 36649 - DNA, 192 bp, Zea mays
  Peptide Sequence Number=SeqID_80024
atgaacacgggtgatttgttttaccgaggttcggccctcgaaggcctagtccccgttgaggagtccactcaaggacgggtgttggggaccttcggcgtccgaagagccgaaggtgttgagcaggaaagcttcggcgtaacggcagagagtgaaaccgacttaaagatgaaaaggctattcagacctcaatag

SEQ ID NO: 36650 - DNA, 210 bp, Zea mays
  Peptide Sequence Number=SeqID_80025
atggctaaagacttgttggccattgctatcctcgatggaggcaatagagttatgtcggtgcttaactgttgcgttggcatggaagactttcatgtttgtatctccacaggtggccgatttgatggtccctctttgtttccagtagattttttagagattcaggagagtttgcaatctgtgcaggaggagaccagggtcggcatcaactga

SEQ ID NO: 36651 - DNA, 885 bp, Zea mays
  Peptide Sequence Number=SeqID_80026
atggactccgacgccgccgtgctccccacgcacaccgcgaccacgccgggctcctccaaccactccaagaaccaggccgacgagcttcgcagccagatccgccggcgccggcgccgctgcgtctgcgtctgcctcctcgtctcactgggcgccgccctgctgctgggaatcaccctcttggtcctcttcctcaccgtgctccgcgtccgcgaccccaccacgcggctcgtctcctcgcgggtcatcggcttcgtcccgggtccgggccccgagttccagttcaacctcaccatgctcctcaccgtcgacgtgcacaaccctaacctggcgtccttctcgtacgcgtcggggtccgtccagctcttgtaccggggcgtcctggtggccgtcgccgccgtcgaccccggccgcatccccagcaagggggacggcaccatggagctggtgatgacggtgatgtcgggcagcttcggcgccgagctgacgcagctggtcaaggacatggaggccggcgcggtgccgctggacgccagcgccagggtgcccgggaaggttgcgatcttcagcgtgctcaagctgagcgcggtggcgtactctgactgccacatcatcttcggcgtaccagagatgaaagtccagagccaggcgcacacgacacaaattctcgtggaccttgctacatcaaagaaacataacttgtcagccgccaacttctttcacaagatcatgaggcttgccaccgagctcaccgctgtccctttacatgatgaggaggtcctcgcctatctgatggtggggatcccgaccaactacgagaagcttcgagcaggggtttggcgatcacaagggaggatcacatcacaagtgccatcgtgcgatagttag

SEQ ID NO: 36652 - DNA, 471 bp, Zea mays
  Peptide Sequence Number=SeqID_80027
atgacaaacaccaccatacaggacacccataagggcaacagtagtaattcaaggctgctaaaaaaatatgactgcaaggagagttctaccggcaagaacgatgcttcttcggtggtgtcattgaataggggctctggtggtaacgtggccttcaaaggcgtcgtttcggtgcttgggcgaggccacaaggatgaccaagtgacatggtggttgtattgtgggcgcgtggctagcaggggccctcaccggagacggaacgaggcgactggcaacgaggcacttcgccgtggtggagtaggcgcgaggcggcgagggggcaggagcaacattggcgtaggcacacagacaactgatcaagccaaggatggaggcaagaagagcttcgaggtaccaagtgcacaggagaaggtcaaggtggccgaggaacccaaagctaacggtgaagaagaagacttgctaagtcaaggttga

SEQ ID NO: 36653 - DNA, 621 bp, Zea mays
  Peptide Sequence Number=SeqID_80028
atgggggacttctggaccaacataagggctgatctcgcaaagatgcaagccacgctccagaaggttgagcatgggttgctgcatatcaaggcagcagtgcaacatgagcagcaccagctagcgttgtccgcacggctccaaacatcggcggctgtgggcatacaagttgctgctcttggcttccttgcacgacagagagtgcgggagatgcgccggcagatgctcgagacagccttggtgatggttgaccacggcacacgggggcatgacctcaccctgtcgaacggccatcagcagtggcaccaggccgctatctccaagtgcgagcatggtacgtgtcccgcgggcgacgaacttcaactctacggcagcggcggtagggaaggcacttccctcgtcatcggcaagggcgcactatttagcgccaccacattccactaccggctgccacgagggcgcctatgctggttattgttgcgacctactccaggtgcccgtccatgtgcttccctttcgtccagatggcgtccatgggatccaggtggctgcacatgtgcaagtccaatgcgcggagggtgtccgccttatcttatggggtcaaaaaaatcagattcggaataa

SEQ ID NO: 36654 - DNA, 195 bp, Zea mays
  Peptide Sequence Number=SeqID_80029
atgtcaatgaagatttacataagggctgaatactggttggagaagcatggaaatgctgcttttcaggattcttgggcttttacagaattggatagttctgtgcgccgcagacaaaaaagagatgctgaaggtttatatgagcaagatcaaggcatcgacaaggatggttctgtggttacccaatgtaacccatag

SEQ ID NO: 36655 - DNA, 291 bp, Zea mays
  Peptide Sequence Number=SeqID_80030
atgcccttcggctggctgggctctatgatcgaggttgtgttcggtctcctccccaacaccatctcaactatcgactctccaccactccattgtgctgaggagagtaagcgacccgtgtgcggcgtcgcacgtcgccaacatgagtgtgccgtggtgttcgacattgccgacagtcagagaagtaatttcgacggccccgacgaacttaacattaagaacgtgggtaccgtcgaacttaacattaagaacgtggataccgttgaacttaacattaagaacgtgcgtttttaa

SEQ ID NO: 36656 - DNA, 366 bp, Zea mays
  Peptide Sequence Number=SeqID_80031
atggccgccaccagctcccgggactgcgccacggtgctgctgtccatccacaagcggcaccggtgctctagccatggcctctcggctctcgccccctccgccgatgcccgatggccgaccccagcaagtacgtacgcgcggttactcttccaactgctgaatcaccagtgggcgatggacttcgacaccaacctccacaatgtcagggagtccatcgcgcgcgccaaggctgccgtgttggcgcaccggagtttggcggcgcggcgacgccggagcacggtcaccacgaggaagagaaacaggggcctgcttcagtccatagagggccttcttcagtttcctaaaccggtaaaccctaagccctaa

SEQ ID NO: 36657 - DNA, 282 bp, Zea mays
  Peptide Sequence Number=SeqID_80032
atgcagcagtggagcatggcggggaagacgatcgagacctattgcattgttatattatgcaatgaaatcggattacaaactgcgacagttcgcagactgaaaaacaactcacctgtttctcttcctcgtggtgaccgtgctccggcgtcgccgcgccgccaaactccggtgcgccaacacggcagccttggcgcgcgcgatggactccctgacattgtggaggaagaacattcaccacttccatggatcggcaatcgcgcagccacagtggtcggcccttga

SEQ ID NO: 36658 - DNA, 426 bp, Zea mays
  Peptide Sequence Number=SeqID_80033
atgagcgcacttctgcactctatgcccaaagagatgtggcaatctctaggagcatgcaagactgtgaaggaggcatgggaagcggtgaaggtgatgcgaattggcaccgatcgcgtgaaggagtgtgccgccgccgccagattagggtgccgcactgtgcgagtccatgctattgggggcaagaggacctactgccctgtcaaggattgctcggcgaagatgctggtggacaacgacagcgacttcgcggagtcagagtgcccgagctgtgcttgcgctgtggcacgccggcgttacctgcaccgagtacaggaacagaaggggggattccggctctcatcaagtgactcctcccctcacgctgactttgcggacagatgtctcaattctagtggtggagctacgaacaacaattcgatgtcctga

SEQ ID NO: 36659 - DNA, 309 bp, Zea mays
  Peptide Sequence Number=SeqID_80034
atgcgccgcgtacgtgaaaagaaacagcggaagcatcagcacaacaagcacatcggaacgggggaaggccgtcttgtttacgattttttcctttccttccagaatacgtgggcagtcatcctgcagtttctgctgcttcggcaagtcatcttcaggttttttcctgcagcgtcccgcctccacctccgccgcagcaaccccggcagccagaagggagccaatatgctgcacctcaaaagggacttcagagaacagtccgaagcccgcccggtccacagggccgtgccagagtcaaagcacatctattga

SEQ ID NO: 36660 - DNA, 144 bp, Zea mays
  Peptide Sequence Number=SeqID_80035
gaagagaaagaaatgattagagatcagcaggaaaaggctcagctagaaagaaacatgagagaaagagatgcagctaacacaaggaaggaataccatttagtaagcaatatatcaaagttcaggaaacatttctgcttcttgtga

SEQ ID NO: 36661 - DNA, 522 bp, Zea mays
  Peptide Sequence Number=SeqID_80036
atggccctagaacaacccttggtgtgcctctgtgacatgctccttccggtagaagtttggtatgctgaaagaaacagaaaattctcaaggcaagcgtacctgcaaaagcgacgagacaaaaaaattgaggaaattcgtgatgaaattctggaccaccagtacatttttcaggatctgaaactaacagaggcagaagaaaaggagttgagatacaagatgaagatatatgatcttgtcaaggaacatgttgagactcctgatgatgttggtgcgtacaaaatgcctgaagcttatgacatgggcgaaaatgtcaatcaagagaagagattcgctgtggccatgcaacggtacaacagagatcctaaggccaatgataaaatgaacccttttgctgaacaggaagcatgggaagaacaccaaatagagactgacagtgaagagatctatgtacttgttccaggaaaatcgaaactgcaatttggatccaaagataagaagccgtcttcagatgagtatcagtaa

SEQ ID NO: 36662 - DNA, 812 bp, Zea mays
  Peptide Sequence Number=SeqID_80037
gccatgcatggaaggatttcaagtggaaactaaatataaattacgtcaagaagaacaaaactccatttgaggactatccagaactcaagaaagagtggtggccaaactttgtggagtgtgttacctctgctgagtatattgctctaggagaaaagggcaagaaaagccaaagcatgaataagttccgtcaaaaactaggtcggcaaagctatactgtacaaaagagaaaatgggcaaaggaagatgcacaagcattaactgagggtaaatctattccatttcaagacatgccagatggtcgtcataaggattgggcaagggtgaggaatccttctggtgacggatgggtcttgctcaaggtgatgggcactagtaagaagaaacgtaaaacaacaaaagaatatgtcaagaggattgtggatgagtatgaggaagacgaggtgcctgattactctgcctctgatactgatttcctcctggttgactattctgacggtaccgctactgatgctgaggttactgtctctagaattgttgctgatgtggacgctggttcttgtgctgatatccctgaggggcatgctgctcttgctgggtacgcctccctcctcggcgcctatggccagacatctgcagaaggcattcacacatcagaactgatcttgccatctttcagcataagaaaagaggtgtggtccagcttcgtgttgagcacggcagctaggttgaccgtgctgctcaacctaggattgccctcaccaacaggtgagacaatcacgcctccaatacggctagttgaacagcgggggtaa

SEQ ID NO: 36663 - DNA, 186 bp, Zea mays
  Peptide Sequence Number=SeqID_80038
atggccgacctgggcgagggttgttgcgtcaggagatcatgtgggccctgggaaccttgcatcatgggtatatatgtgaacgacttggccatgcgcgacctagaagagcccgcgactgaggatcctggtgagcagcagatagaagtagctgagcaggagctcattgaaggcaagttgtgcccttga

SEQ ID NO: 36664 - DNA, 750 bp, Zea mays
  Peptide Sequence Number=SeqID_80039
atggcgggagacgcaaggggcgcgcccagctccatctcgccgcccattccagaggagccggaggagcgtgaggacttcaaggaggacctagagaagttgtttggccgggagcgggaggtgacccagaaggagaagaggctggtcaagaaggaagagcacttggaccagagggaggcggtcgtcacggaattccatgagaagctgaaagcctataatgtgatgctggagaagcagcgggatgagcagaccgcgactgaggcggccctgcaaaagctgcggcgggagctcgatgatagggctagcaacatctctctcgccaaggagaacctcaaggcgaaggatgcctccctagaggagcgggcgatggatctcgtctggcaggagaaagacctcacctggagggaggagatgcgggaaaggcgggacaagttgctagccgaacacgagctcaaggcggaggagaaggagaagaaactggaggagaaggagcggacactggaggagtgggtccaccggttccaggcgatgcaggcagcgcaggtagcccagacggcgcaggcggctccgggctcccaagcggtggaggcgatgaagaagatgcttgaagatctccggatagagcatcgcaccggggtccagcgtatcgctgcatgggccaacgaggcgagctcggctctggtgccgctaggggtgagccccatcccagtgtcgaagcaatcggtgtcatctccgacgtgctcccggtgctag

SEQ ID NO: 36665 - DNA, 192 bp, Zea mays
  Peptide Sequence Number=SeqID_80040
atgggaaagtgccggaccctagcatacatagcccggacctctaggtacgacccaggacctccacgttcccccggatgggaccagacccctctaagtgaggtccgggccacccacgacaaggcgatcgccgaggaggccaaggcgaggtacgacaaggctgtcttcaaggtggtcgagatatgggccaattga

SEQ ID NO: 36666 - DNA, 750 bp, Zea mays
  Peptide Sequence Number=SeqID_80041
atggaggatgaggcgagtcggggggctgcctccgcgtgggtcggctgcccttttcttcccccagcgtctaggggagagtggcatcctccagtttcgcggagacttcctccagccatgccgggatgggtgggccgccatcactcggctagggcgcagcactacgccctccgtccggacgacggttgcgctgcgtctcgcgagggcggcgcccacgctctgggcggttctgaccaaggcaaagacctgtcggcgcgcttcgaggcgtcgccagccggagatggcttctctaccgatgagatcgccaattccgccagtagccctgggtctccgtctcccggcctgaatggctggctctcgtcctctgcgggtgagagccctcctgtcgcaacacctgccccgaagccgctgccgaagctacttcgccgcccggggcgagggtggttgccgctgctgccggagcgggcggcggcgggccgcccgtcggttcgcgatcgctccacgggttccccgatcttgtggggttattcgtacccgcggggatggaactggagttccgttggtaatggcactttgaatgccagtgtttttgttcattgtggctgtcgaggcctgaacatgggtaaccggccgagccgcctgctcgggccggattcccggaggagtccccggaccgcgtcgtcgtccgaggctgggtcagacctcactgaaggtgtcgtcgatgccgagggcgctagcccccttccagcgtga

SEQ ID NO: 36667 - DNA, 339 bp, Zea mays
  Peptide Sequence Number=SeqID_80042
atgcaggcggcatgcatccgcgccaggtggacgcgcttctccgactcccaacgcgccagcatggaggcccaggcccacgcgtcacgcaaccggcgcgccggatgctgcatgcagggaccgggaaaaggggataccccgaaaaggatccttccctgtgaaggaaccgggctccgagcccccctactgatcagaggttcgaaggctggccctccgaggggttcaacagtcgcctcagatcgcgtgggccctacacccactactggtcagaggttcgaaggccggccccccgaagggctccacggccgcctcaggctactcgggctccgcgcccattactga

SEQ ID NO: 36668 - DNA, 480 bp, Zea mays
  Peptide Sequence Number=SeqID_80043
atgcctccgcctccacgtcacccattcccgacagagggcgtgggagcagacacctcctctccgtattcgtccgacaccagccccgacaccgacccgcgcagtggctattgcatgtccacgagggtgtttcacagcatgcacgcaccatcattttcaccgtcgtcggatgtcacattcgtcttcctggccttcgccctgttcttcctccccaacctgctgcccctgcccacggtcggagccgcgagccgaccgacgctcgtcgacgcggggctggaaggcactcgcattctgtcggcgtttcgagaccggggggtccctaagccgacgagtgagtgtaccgcgtgccccagcccagatgggtcgagcgagtgggagagcgcgaagggggaaggcgaggtggccggagacgggcgtgagagaggtggaaatcccgctgccttcgtgttcgtcccgcgcccaggtcgggtgcgcttgcagtag

SEQ ID NO: 36669 - DNA, 258 bp, Zea mays
  Peptide Sequence Number=SeqID_80044
atgaggaacaagctcaagaagaagatgatcaagttcaagacaatgagcaacctcaagatgatggcattgatcaagggggggatgaagctgagtaagaaaaggaggatgagccagagatttaggatcaaataccacctcacccaagggtccatcaagaaattcaatgagaccaccctgtcgactccattctcggtgacattaaaaagggggtaccaaatgggtattcctgagagcacctacagaggggtgaataggtga

SEQ ID NO: 36670 - DNA, 324 bp, Zea mays
  Peptide Sequence Number=SeqID_80045
atgacgttagcagggttctcgcgcgtgttggcaatagctctgttaatctggcctctcacgggcactgtgcggggggcccgttacaatgggccggatcacacgtgggcctctgagctggacgaggccgcacggtgggatgacgacgtcgcaggccttcgcctggtgccgaatcaagcgaagggtgtccttgcccgttttgtctccgtcggaccagcgactgcagcgaaggcctcgagcgaagggtggcgtctttgccttcgccccaacatttgccctccgagggaccagttcgacaaagtcacctggtgccgaagacgtcgctag

SEQ ID NO: 36671 - DNA, 72 bp, Zea mays
  Peptide Sequence Number=SeqID_80046
atggcgccattatgtcgtccagctcatcatccacctgaagcccaacctgccacgatcataaatggattatga

SEQ ID NO: 36672 - DNA, 219 bp, Zea mays
  Peptide Sequence Number=SeqID_80047
atgtcacatgagagcctgagaggagaccgtcgaggtaaggaatgggcgtacgtgtggtgcgaggaatgggctgggaatgagcgtgtgctgtgtgcacttgctggacaagtgagaattggaatgggttgtgtgggagagactgggtgggacattggaatggcgccacgggacatgggaatgagaatggcagaaccaggaatggggcagcctaccccttag

SEQ ID NO: 36673 - DNA, 1845 bp, Zea mays
  Peptide Sequence Number=SeqID_80048
atgggggtgtctgataattttgctgtggatttgatgaggacgtgcgcagcccccgggggaaggatgtcttcgcccgagctcctggagtcttcggcgcgaatgctggaggttaccgggggtcggtggcctaagaatgttccgatcccccgtgcggctggtgaagacttctatacgtcccgcatggcacgcgacttgagggtgtttccttacggacggaatattgctgctgttgtgtcgacagtgatgaacaaggatcgtcaagacgctgcgcagaagcgtcgggccatcgttaggatggcagatcctgcgcgcgaggcaaagagggcgcgggggagcgtgaaggctactgcctccggcagtagcaagccagtggcatctgcgaaggcaactgctcccagacccagcaaggcgtcggcaagcgcgaaggctgccgcctctagcggaggcaggcctcccctgggcgaagctacgaaagggcaggagctgccttcgccggggagacgtgttgctgacttcggcacgaatatcattgttgaggattatcttgttggtaagtttttttttgaccgaagatatgttgcagggtcgggtgagggacagttggttgttgtcccgccttcggtggcaaccacttcgccatcggcggtggtaagggcgaagggggtcacgcaggacccgtgggctgccttctgcgcgagcggcgagattccgacagccgctgcctctaaggacgtggcggacaccatgtcccaacggctgcgggaggtgtcgcagcagctgatgcagcagttgaagcaagcggccgacttcacagatcgcgttgcgtcgggtgtcctgactgcggacgtggctgccgatgtcaaaaggcttcggacgcagcatgcggatgccgtccgggagaaccgtgtggacaaggccgaggcctcgacgcgctcggaagttgagcggacacacgcacagttcgtgggctcgtaccgcgagctgggtgcacggactgctgacttcgagatacctgacggagaggcgggccttcgcttcctagaatggttgcaggaggagctgctagtgctcccgaccattgtggagggttttatgtacttcgcctccctcgtcacctgcgagggggccatgaatgcattgtcctgcgagggctgcaggcactacgaggtcttcgaccaatcagacgagaactttgagcgtgacatctttaaggccaaagaccccgtggtgaagcagtcagcaggggcactgttcgataggatgtggggtccgcatggtcgggagtcggtcagggagcgatccgaccgggcgagagaacagatggagcgtgccgaggatgtcgaagaccttggagatctggtcggcgcgccgcccaaggctgaggtcaacccggtgccgccttcgagtgccggtgaaggctcctcggctgcacccgtgcctaccatggccggtgaaggccctttgccagcccttgtgccgacagccgaagatcccccgaaggtggtggctgagccggcagccgaagaccccatggtcgcggccgagccttcgcaggttcaagattttgggcccgcgcacgcaaccgctactgtcaatgctaattttgtggcggcttcgaccgtggttgctgaggatgattctgatgattctgtgtctaagtgttttgagtctgatgattctgggagttcgattgtgtggacagaggagtcttcggatgaggatttggattattttgcggcattggacgtggctacgatggaggcctcaccgcgcgtaatgggtgatgacgatcctccgggtgcgagtgttgggcataggcggcgaagggcggtggcgaagcggagg

SEQ ID NO: 36674 - DNA, 237 bp, Zea mays
  Peptide Sequence Number=SeqID_80049
atggtcaagttcagcgtgacatggcgaagctccccgaccaagttgcagaggcgcaatgacaccgaatcggggtcctcccccgcgcggcggattccgcagtcaccgaatgaggcgcactcaagttctctccgccccgtgctcaacctggagtgtaaccatgccatccacgtggccccgcgaagatccgtaggtagagcagctggtttagtagatggctatgagtttaatgagatgtaa

SEQ ID NO: 36675 - DNA, 237 bp, Zea mays
  Peptide Sequence Number=SeqID_80050
atgaactccatggtgtttgaggttgctgaattggatgaagcaacaatgatttgtcacactaacagtaaaatgaaagacagcttcacccagtgtctctcgcccttgttccatcagggcatagtgaaagggaaatgtgcccttgggccatttctaagtattttggtgattgagtgcaaacacaagggcctaaatgtgaatttatgtacatggatgaacaaggtgaaaatcatgaagtaa

SEQ ID NO: 36676 - DNA, 450 bp, Zea mays
  Peptide Sequence Number=SeqID_80051
atggcgaacaatagacaggtctcaccagacaatggcgatggtgcaagggtcggccacgacacaaggcagtgcggccctgtttcagaactccgacgaggtattgtagggcttctggtggtcttctcattgcgccggggccacgatcaccaacagagtcgccctgtaaagctttctggccacctcccgaagtgcttgcgctggcgaaacggagttgcctccgcggcggcagtgttttcttcacgacgctccatgatctcatcgacgccctcggttcacgtgctctcaatttttggggtggccgaggaggggacggacgtagggcttgcttttatgctcggcgtggagcccggttgggtcgcgttcggttggggaggaggttcctcgggattgcgttggctgttgagctcgatttgggagggaagagtcttgagtgctaggtcccacgtgtag

SEQ ID NO: 36677 - DNA, 115 bp, Zea mays
  Peptide Sequence Number=SeqID_80052
acattgtggtacaggtggttatgagattgatggttctggttatgattatggtattggcgaagatgaagctgtggaaggagacttccaggagttccaagactacgacgagttctag

SEQ ID NO: 36678 - DNA, 546 bp, Zea mays
  Peptide Sequence Number=SeqID_80053
atgggaaaccgatcgaacttggttttgcgtgctccagtcctccctcttttcgccgacctgacggtgactgatttcccctccgcctgcattgttgcacccggcgaggccttcaccgtccgcaacatcgccgccatggtcccagcctacgacaagaccaagtacaccggcatcgggtccgccatcgagtacgccgtgtgcgcgctcaaggtggaggtcctcgtggtcattggccacagctgctgcggtggcatcagggcgctcctctccctccaggacggcgcacctgacaacttccacttcgttgagaactgggttaagatcggcttccctgccaagattaaggtgaagaaagaccacgcatcggtgccgttcgatgaccagtgctctattctagagaaggaggccgtgaacctgtccctggagaacctcaagacctaccccttcgtcaaggaagggctggccaacgggacgctcaagctggtcggcggccactacaacttcgtgtcaggggagttcctcacatgggacaataagcagccatcgtga

SEQ ID NO: 36679 - DNA, 516 bp, Zea mays
  Peptide Sequence Number=SeqID_80054
atgcgcacgctacccccacccacctcccattccgctgccaggatcatgcagctctgcgccgccacgcccaagcggacctcgtggcacatgcccacaccgtactggggcgctggtgccgccgcgttcccgcagacgcccgagcggagcccgaggttcacgggcgacgcccgactggggcactgcgttcatgatgtcgccgagcgctacggctgcgccgaggacgccggagaggtggcccgcgctgtccgcactctggagtacgcgcctgcgccgaggcgagagcaggcgaggtggggcggcgaatctgaggcagaagcgcctgcgctttatgaatccggagccgaatcgctccgtccagcttgcctcctcaccgttgcttttgcgctctgcttttcacttgccttgcgtggatctgctcaacgcgcgaaccaccgcctcgccgagaaggagatcgtcatcgtcctctcctctgcctccgtggtccccgtcgagagcagtgttgctgtcttcgactag

SEQ ID NO: 36680 - DNA, 747 bp, Zea mays
  Peptide Sequence Number=SeqID_80055
atggccctctcccctctctccgcagcagcacccgcgacaagacaaactcgtatgtgttcgaacatgtatcaaagttggggtacaatgagggtagaagaaggtgagcaaggtgtcgcctcgccttatgccttcatgcttaaaaggtactacaaatcacttccacctataagcaaggcatatgggacattgtgtttctttaccaccgtgctagttcagctccagattttgcacccattatttctttacttagattaccccttggtgttcaagaagtttgagatgagtgaatcgaggagcgtcctagcaaggtatggtgtcatgttggaaaagggtgcatttgataagcggactgcagatttcttatggatgatgatatttggtgccatctcactattggtgttgtctattattcccctattcaattcttttttcttaggaatacctatggtcagcatgctcctttatgtctggagccgagagaatccaaatgctcagataaatatatacggcctcgtccaattgaggtccttttatcttccatgggctatgctcttattggatgtgatatttgggtcatcattaatgcctggacttctgggtatcatggttggacatctctactacttctttgcagtgttgcaccctcttgccaccgggaagagctacctcaagactcctaaatgggtgtatccttttacatggtcatggtcaaaacattctctcgcagttttcatatacaacgactaa

SEQ ID NO: 36681 - DNA, 135 bp, Zea mays
  Peptide Sequence Number=SeqID_80056
atggctaaaaattttggcagcgaaacagtgcaaatagcaatgaatgctgtggtaacttcacacctactcgtctgtttatatagtgctgcaggtcttatagaaagaagtggtcctcggctgaagctgttagcataa

SEQ ID NO: 36682 - DNA, 984 bp, Zea mays
  Peptide Sequence Number=SeqID_80057
atggaggctcgggcccacatgtcatgtaaccggcacaacggttactgcgtgcaaggaaaccgcaccaccactcgcgccaatgccgcgtcttctcgactgcgggaccagtaccgcgactcgaggcagccctgcgccaacagacgtgtggaagcagcagtccaatcacctacaggctcgcatcctctcctgaaacggcaggggagccccctcccacggagtaaagacgacgcgcccgtgttccgttcctcgaacggctcgcgcacgcggaccgggaatgggggtatttcgaaaaaggacccttcccagcgaaggaaacgggccccgagccctcctactgatcaggggttcgaaggttgcgccctccggggttcggcaaccgccccagagcactcgggcttcgtgccctttactgatcaggggttcgaaggctggcccctcggaagggttcgacagccgcccagagcacgcagagtcagggatgaccctgggtacgtccgttacatggccgaggctcgggttacgctcccgaggtaccctaggacatttccgagaccagcaagaacgatttgtaacggaatcccaccggagggaggcatcgagccctcggaccctatcgaatgggtccgggtccggcaaatcacctgcagtcactttgcccctttactgaccgatctgacaggaaaacaacgttgttcgccccgctccggtgactgtgccaaccaccagggtaaaactgagtcacgatctcccacgagttcggactcgggcgcaacagggagctccgcctcgcccgacctcaggcctcggcctcggaagaagatctccgcctcgcccgaccccaggcctcggcctcagcctcggcctttgagaggagtcacaacctcgcccgagcccaccctcggcctcaggaaaagtctccgcctcgcccgacctgggcctcggaccgactgcgctacatgggatacatcattaccctactcttag

SEQ ID NO: 36683 - DNA, 507 bp, Zea mays
  Peptide Sequence Number=SeqID_80058
atgatcaccagccatgtggtggggagaagcaagccgggctgcggtctctgccccgccctcagcttcaaggatgttcatcatccgggctggggaggagggcgcaccgagttggggcctgcctccgcgtgggccggcgtcccgcttcttcctccagcattcgggggagaagggcatcctccagctctgaggaggaggcgttctccagccatgcgggggaaggtgaactgctgctgcctggccagggtgcagctgtccgtcctccatcaggacgacggtcgtgccgtgcgcaggcggctgctgtcaccggtgctgaagcggtggccgccgctggtgaggcttcccactgcagcggtggttgcttgcgccgacgagaccgtcagtgccaccaacgctccgggcctccggctctttggctttaatggttggttctcgtcccccgttaggggacgtgaacgagggccttccagtggtagcgtttgccctgaggccatcgctgctgctgtctag

SEQ ID NO: 36684 - DNA, 1266 bp, Zea mays
  Peptide Sequence Number=SeqID_80059
atgcgcggcccccgggggaaggatgtcttcgcccgagctccgggagtcttcggcgcggatgctgaaggatcggacgaggggcaacttgttgttgttccgcctacggtggcgaccacggtgtctgccacagtgcctggggcgaagggtagcgctctcagcgctggcggtgagatttcagcgctcaccgccgtcaaggacgaagcgggcactgtgtcccgtcggctgagggaggcgtcgcagcggctaagtcaggaggctgacttcgctgaccgcgtggcgtcgggggcccttacggcagttgtgtctgccgaagtcgagagacttcgggcacagcatgctgacgccgtccgggaaaagtcggccgccgatagcaagtgccgcaagctgacggagaaggtggccgcgctggagggcgagaggactgacctccggcgccagctggcggaggagaggagggaggctaatcaggccctcgccaaggcgcagtcggcgcaggcggaggccaatctggcgcgggtggagggtagtctcgccagccagcgcgccgaggaatgggagacgcggttcaacgctctgcaggcccgcatggagagggccgaggcttcaacgcgctcggaagttgagcagacgcgcaaacagctcatggactcataccgcgagctgggcgcgtggaccgctgacttcgaagtgcccgaccgagagtcaggccttcgctgcctcgagtggctgcaagaggagttgttggcgctcccgaccattgtggagggatttatgtcctttgcctccctggtcacctgcaaaggggcgatgaatgcgctgtcccgcgaagggtgccgtcactatgaggtcttcgaccgatctgatgaggatttcgagcgcgagatttacaaggtcgaggaccctttggtgaaggaatccgcgggagccctctttgaccggatgtgcggcccccacggtcgggaggtggtcagggagcggtccgaccgggcaagggatcaggcggcgcatgacgagaaagtggaggacttcggagctttgaacagcgtgcggcctaaagcggagtcgaacccggtggcggccggggccgaggtcgccccggcgccgcccccgaaaaccgtcgaaggctccctcgctgcccctgcggctactgtgtccggtggtggctcgttgccaaccgctgtgccgagggctgaggatcccccgaagacggcgacggagccggcagtggaggatcccacggcgacttggtcttcgcaggtggcttag

SEQ ID NO: 36685 - DNA, 390 bp, Zea mays
  Peptide Sequence Number=SeqID_80060
atggcggcgcaaggggcaggaagggcggtttcctcttctctggctaagtctctcgggttacgaaaacctaagaaggagacaggaagcggagcaaagaaccgtcaccagaccctctcccgggtatataaagaccaaggcgagaccggttcaaacgttccgcccagaccggacgcgggattcgaaaacgcaaagcgaacagtcgttccccggacgactcgcgcacgcgcaacgaccgccccgtcaaccactcgccccgtcgcatcaactccgcggcgggacaggcggcgcctctggcaggaaaagcgggcgacgcttcgccttcgccataatgaccgcgccagtaaagggaccgggaaagggggataccctgaaaagggtccttccccatga

SEQ ID NO: 36686 - DNA, 420 bp, Zea mays
  Peptide Sequence Number=SeqID_80061
gagcttgaatctgaaaaaggtaaactagtaaaggacttgacagaagcagaaaacaaacagagcatgcactacagttctctacaagaagctcaaagctctctttctatgaaagataaggagctggctgaagcaacagagtcgctgaaggagctgggttctgagcttgaaacctcaaaaaagaggattcaagaaattgaagctgaattggattcatcagcaaataagcttcgtaaacttgaagagctgaaggatgaaagaagcttgcatgctgcacaggaggcgaagagggcttcaaaacttgataagatgctggaactggcacagtcaaacatgaaacaaatggaaaaacatattagcagtcttcaagaggagcaagtgcatcagcagaatttgcaatccttgtcacttgttcttgcataa

SEQ ID NO: 36687 - DNA, 435 bp, Zea mays
  Peptide Sequence Number=SeqID_80062
atgggcaagaacaacaagcgcaagcgtgagccgactcctccatcggaggattttggtgactcggagtactcagaggaggagttctcctctgagtctgaggggtcttcggctcccatccccctgcgtgagtcgtctgacgactcagacgactcccaggggctcgcggcggaggtctggacttatatccgggccgtcgagcgctccgggctcactggctcggatgagtcggagtactcctcggacgaggaggactcgtccgaggagggcgatggcggcgatggtgatgacgacgacgacggcgacgacgacgacgaaggcggtgacggcggcgacaggggcagcagcggcggtggcaagggtgacgacggcggcggcagcaggggcggcagcggtgacggcggcagcagcaagggcatcaacaaggccagtggctaa

SEQ ID NO: 36688 - DNA, 171 bp, Zea mays
  Peptide Sequence Number=SeqID_80063
atgctggccggcgcgctgagggagcacgacaagcgggcggccatcatcgctccgatccacgacggggacgccgctgcaatcgaccacctcaacggaggtgcatatggacctgatctcaactttgctttgtcaaactatacattgtttcttgtgactgaggatcttgattga

SEQ ID NO: 36689 - DNA, 504 bp, Zea mays
  Peptide Sequence Number=SeqID_80064
atgatgaatgaagtgaaaatcaacaagaagaaaaagaaaaagattggaagagagtgcctgtgtgcagccaagactcagcacagtctggcacacctgtctgtccggtggtgcaccgggctgtccggtggtgcaccggacagtgtccggtgtgctaggctggtctccggcgaactggccactctcgggaaaacttcagcggtgtacggctataattcaccggactgtccgagacaaatgacggcttggtggcgttgggagctcggtgatcaccgtgaagatcttgttggtgacccgactcaagtttgtaagcggtctctagggatccaccgcgccggagtggcaaaggatcatctcgtagtgagcacttggttcttgcgaggaccaagggggagcgatacccttgcgcgggtgctccaacgaggactagtggagagtgccgactcttcgatacctcgggaaaaattggaggagtcttctaaaccttgctttacattccgcacttaa

SEQ ID NO: 36690 - DNA, 1191 bp, Zea mays
  Peptide Sequence Number=SeqID_80065
atggcgagtggcgtcaggagcgagagcgagagggacagcaccaggaagaccaagatgccggcggcgggactgaggagggccggcggccggtttcctcttgcgcgggacgtcgggagcagcggcgccaatgagcgctcctcctcggtccgccgcggcttcggcggcggcgttgcaatgccgcgcgcgttgctggaggactcggcgccggcggtggacgcccccgcgacgaccggcagggagccgccgcccccggcctcatccgcggcgtctagggtcacgccggcggtgctgttcgtcacggtggtcctggccgtggtgctgctcgtctccggcctgctccacgtcctgcgccgcctcttcctcaagagccgccacgccagcgcaggcgccggggagcgccagctgctgcagcacgaggacgccggcggcggcctcggccaggccgccatcgacgcgctccctgagttcgcgtacggcgagctgtccggcggaggcgccgccgcaagcagcaagggcaagggcaagggcaaggagaaggcggcccggccgttcgactgcgccgtctgcctctgcgagttcgacgaccgcgaccgcctccgcctgctcccgccgtgcggccacgccttccacgtcgcctgcatcgacgtctggctccgctccagcgccacctgcccgctctgccgcaccaggctctctgcgccatcatccgtcggaccggacgtcgaggagcagaaactgcagcaggaccatcagccaccagacgacgagagcggcgtcgtgctcccgctcccggttaggctcggccggttcaagaacgccgacgccgagtccagcacaggcgccaccagccgcatcgacgggcggaggaggtgctactcgatgggctcctaccagtacgtgctcgccgacggcgaccacctcctggtctccgtgcacctgcggcacggcaatgcgcgcggcgggtcgggcgcggtgtgcggccccagcgccgccgcgcccagcggcagcgacccgcgtcagggcaagaaggtgttcgcgcgcggcgacagcttctccgtgtccaagatctggcagtggcgcggcagcaagcggctgcccggcggcctctgcgccgacgacgacggcctgccgtgggcgccggcggccaaggatcggacgacaaacacgaggaggcaacatagcgacacttga

SEQ ID NO: 36691 - DNA, 378 bp, Zea mays
  Peptide Sequence Number=SeqID_80066
atggccagacctcgccggagcttacccccaagcactaatctacacgctggaccgacgctaaaccaagcaagagagatagagaatgcaccagtagacttaccaccgcgattaagggtgcagccgaagccgcccacgctccacagaggttccacggcggcaacacagcgccgatcatggacggattcgccacgaacccgcgatgctccacagcccgacaactcgcccagatcggcgaaggggaagacttgccccgtgcggcggcgctctctcccagatttgctttcactggtggcgaggaaagaccatgcggcgacaggggaagtggttgctagggttttggcgtgcgcgcgttttatggctgccagggagattggttga

SEQ ID NO: 36692 - DNA, 2094 bp, Zea mays
  Peptide Sequence Number=SeqID_80067
atgccgcgcacgaagaatgtgtcggcgccagggggaggcgatgatgaggatccccgtcgccccttcaggcaggtcaagggcaagaccgtttacttggagcagcaggaaggccgcaagaagcggcgtacggacagagcagcccgtgcagcggcagcggctgcagcggctgctgcgcaggccgagcttggagatcagccgcagactccatccgatcagattgcataccgtgttcgtcgtctcgcctcccggcctcgctcctcctctcaccccactgcttccactccgccacccactctgcctgctcccgtcacccctgttgcgccatctacctccacagccatacccgccacctccactacgccagcttccactgctcctcctcctcccgctcccgcttcagctcctcctgtccctccacctcgatttcgggagcacgatgagactgaggttcgacccctggctacggatcctcgtttgtttgaccttcagcgtgctacagcggcacgggtacataggttcagatacgtacccgtggagtcttggctaccacctcagagagaccctgcagcaggtgaccttttcagcacacgtattcagaagtcgtttttcagagctcagatgtctgctcagatagctctgcgagtgcaccgacttttggatcttctagcctttctgcttgcagccggtgctgactctgaggcgcacctcacctatctgcctggccttcagacccttctgactatcagcggcagcctctgctacggctcttctgaccctcctcgtcgccctcacggcggtgtggctccgggtacagctcacgtcgcggctctgttccgcccgcccttttcagatgggtcgcgacgttcaccggcagattttactacagcagcaaagtatttatatgagcttatcagacggactcttctgccgaggatgggatacagggaggctaccacacatattcagctttggctccttggtgccctggtctctcactcagagttcgatgtcgtagacttccagatttgtgagatcgaggacaccgttttggatgggattcgtgctcgtcgtcagttgccctatgctcactacttgtgccacatctttgcgcagctgattcagcctcctcggtttcagggcactcttgaggcctcacgcctcatttttgggtcctaccgtcctgcgcctgagattcctgtgccagcttctgctcctgtttttgactctcaggccgaggatgcagctcttcgtcagttcgacactcaggttacagcagctgatgatgatgatgatgatgatgattttggggttcctcctccgcctccgcctcctatgcctccacgctcacatgatcatgaggctgggagttctagtgctgcccctgctactcctcaggctatggaccctgctcttgcttcgattctccagactctctctctcagcagcaggctcacctggcagccgagcaggcccggttatccgagaggatgctctcgatgtttcagaacatgcaggacaggcaggatgcacttcagtagcagctacttcaggatcgggctgagagtagagcattcatggctcttatgcttcagcagactggtgtctcagtacctccggttcagtctgctccacctcctccgcttcacgctccagttgtgccatcgattttgtcaggaccccctgttgctcctgcagcgcggcctcagtccgagtcagtaccagctccagcttctaccgcagatcctggatccgagactgactctgaccctccgccggcgttcgctctgctacctcgaccgcgtccggatgcgcccccgccgcctcctcctgcttcagagacaaatgaaaagcccaattcacccccctcttgggcatcgtgatcctttcaacagctacagggactgtccggtggcgcaccggactgtccgatttgtgtgtgttgcttcccatccttactcttgtgctttcaccgtaatctttattgtaagggcgagagactccaacttgtggagattcctcgcgaacgggaaaagagataagcaaagaaaagttgtggtattcaagttgatcattggatcacttgaaaggggttga

SEQ ID NO: 36693 - DNA, 450 bp, Zea mays
  Peptide Sequence Number=SeqID_80068
atgttgtctcgcctgagcctggcctcgggcaagaacagtggtcccggacggattcacgcctcgcccgagggcccctcaggcagcgggcgcacccccgactcgtccgaggctaagctcgggcagactttgtcggtaagactaacaacagtaagtcacggcctctcccgagttcagcctcgggcgcaacagggagctccgcctcgcccgaccccaggtctcgacctcagcctcggcctcgggaagaggtctccgcctcgcccgaccccaggtctcgacctcagcctcggcctcgggaagaggtctccgcctcgcccgacctcagcctcggcctcgggaggagtcacaacctcgcccgacctcagcctcagcctcgggaggagtcaccgccttgcccgacctcgacctcggaccgactacgctacaggggatacatcattaccctacctctag

SEQ ID NO: 36694 - DNA, 1284 bp, Zea mays
  Peptide Sequence Number=SeqID_80069
atggcttgggcggaccgggcagacctgacgaccacggacaggccctccacaagagccccggcccgagcggtcgcctcgggcctcggcagccacagaaaacaaacacacatacttgggatgactatgctacatagacttagacgtcggcagcaccctcagcggaatgaactacctccacaccggaagggctgcaagataacaaactccaagcagctcaccggtgaccactgcaccagcagcgacaacgacctccgcctcgggcggctagacagcagcagcgattgccccagggcaaacgctactgtgaaaaggctctcgcccccgtccccacacggggggcgagaacaagtcattaaagccaaagagccggaggtccggccacaagtggtactgacggtctcgtcggcagaggcaaccacctctgcagtgggaaacctcacctatggtggccaccacctcagcaccgacgacagcggccacctgcgcaccgacgccgcaccggcgaatggcagccgccccagcgcgcacaaggaggtcctcgctcccgtcctcgctacaggagtgaggacaagaccatccaagaacgtgcacaccgccactgcggcgtacgacgtcttcaggtggcagttcgcctcctccgcaaggctggtgaacgcccttctcccccaaatgctggaggacgaagcagggggaggccacagcccggctcgctcttctccaccacaaggctggctgtcaccattctgggtgaccactggcggggaactgcagccgggctgcatgatgaaaatccttgaagccgagcgacgactaaagagcgccaacccccacagggtcgtgctcctccaacagcagcaagaagaaggcaacgccggtgcaccccatctggaggcccggaagatggaaagacgcgatgaatgcgagaagagcaaaggcatggctactgcccgggagatcgatccctttttaaagaagatctccccactcgcgccccaaagcatcacgggcaaagtctcccccgacgtgctccaaggttcccgcccaactgacccgaaacgcgaagatggcgaaccactgcacacgaagtatgcaaccaccccgcggttaagcgctctctcgtcctcgccaaaaccagcggtcggaaaggcgggccaccacgcaagaagcgggcaggcgccgtttcgcccctgtcatgatgactacctcaaaaaagggatcgggaaaagggacatttcgaaggagtccttcgtagtgaaggaaacgggccccgagccctcctactga

SEQ ID NO: 36695 - DNA, 513 bp, Zea mays
  Peptide Sequence Number=SeqID_80070
atggcctctcccgagttcagcctcaggcgcaacagggagctccgccttgcccgagcccaggcctcggcctcagcctccgcctcgggagaaggtctccgcctcgcccgaccccaggcctcgccctcagcctccgactcgggagaaggtctccgcctcgcccgaccccaggcctcagcctcaacctcggcctcgggagaaggtctccgcctcgcccgacctcggccccggcctcaggagaagtcaccgcctcgcccgacctcggcctcagaccgactacgctacaggggatacatcattaccctacctctagctagccgccttaggctacgaagaaacaagaccggtgtcacatctaaatcactccgacaacagggttttgattatcggtgggaaatatggctcaggctaattgcatgcgttgaggcgccagtccccacccgatcagggcgtggattaaagaaccaagatgaccgttggcccatctttgtgaaatcaatcaaaagtatcttttaa

SEQ ID NO: 36696 - DNA, 159 bp, Zea mays
  Peptide Sequence Number=SeqID_80071
atggcgagagtagcgtgtacccttcgtggcaagaggctagatgatggtgtatctgtgctctcggtgaagaagcagcaaacttttgttgcttccgttccaaggtcgtaccaaaagaagagaatcaagactaaagctgcgggaggaaaggtcctccgttaa

SEQ ID NO: 36697 - DNA, 564 bp, Zea mays
  Peptide Sequence Number=SeqID_80072
atgtcaaccgtccccattgattccccgttcgcgtccaggccttaccgccttggcatacaatgctccactaaccccggctgccgccgtgcagtgaccgcacttttatgcataaaactggggcttgccttcaatagctggggctgcgggaagatcctcgatggcagcctcgggagcttgctcctggtcttcctcttggacagttccatgctcggggatgagcacgcgggggagctcgtcggtggtgaggagttcggcctatccagggcaccattgaccaatcaaatgggtcagagagcttcaccagggatcaaggagggcgggcggccgaagtccggcgaggacaatcttggttctccggtgatgttctgccgggtccgagagcttgggaagcttcacaagctattggcgaagctaaccgagcggctggcgcggcttggaagtgactggggtgggctggccacggtggccgaggctcgggtggcaatggcgggcggaagagagctcgccagagctaaggaggtgcgtctagccagcgaaggttttgctgactggatcaagacatag

SEQ ID NO: 36698 - DNA, 1011 bp, Zea mays
  Peptide Sequence Number=SeqID_80073
atggggctcggtgtatgcggctcgctctgccaaggtggcaatgagattgatggttctgtttatgattatggtaatgctagtccactacagccaaacaggacacttgctgagtatgttgatgtgtactcacccttgctctacacaccaaccccccaggttgtctgcattgcaaccactgctcaggagaagatgaagccgtggaaggagacttccaggaattccaagattacgatgagttctaggcgtggatggctcgtcttagacacactgcacggaagtctcatccccttcttaccctcctgtcttgctgagcgtccacttcgtcatccgcaggagatagagtctgtgaggagctgctccttcgtgcttccgctggaggcgccccttgcaccaccactgagcaccccagtcgctggagtagctgctggaggagacccagacgacggaggtggcgacatcagcttgagccatgacaccgacctttccaccgaccaggagccggaaggatgggttgctcgacccatcactcgcgacgctactcgcgggtgtcacttccacgatgcgctcgacaccctgctacgtcaggcacttgaccggcgtacttggtccatcgagtatcgctgtgtggtcttccagcatagtcgcggggtctacccagaccgctgggatgcgacctgcttggtgtgccgttcggagaacagtctccggggtgcggaggtctgcttagagcactattccatctctgagcgggactcagctgaggcggccatgcaagatgtcgcacggcgtgcgctttcgcactactattcagtgttcggtggggtagctgatggtctcaacctgaagtattacccctgccgtccatctggcagcacaggaggcgtgattgtctcacctgttggtgaggacaatcctaggttgagcagcacagtcaacctagccgccgtgctaaacacggagctgtaccatgcactagacgagcagagtggggctcgtgctgagatcgcctag

SEQ ID NO: 36699 - DNA, 67 bp, Zea mays
  Peptide Sequence Number=SeqID_80074
atgacccccgaggccttcgtggaaagttcccggatggctttagacaccctctccaccgacttctccg

SEQ ID NO: 36700 - DNA, 489 bp, Zea mays
  Peptide Sequence Number=SeqID_80075
atgacgatcagtgcgcctacacgttgcaggtggtatccattggcccgctccatcactggcggccccgccctatgggagatggacgacgagaagggcttcatcgacgacctggggtactcgtggtatgacccccatcttcgccatgcatggggcgatgcacgctatgcacaacaacatgatcattctcgagaactagatggtcccctgccctatttatacgcccaagggagcgtccttggtgaagccgggtcttgtattcaaaggagagatgccctggcgcctgatgtgatggcggatcatgcagtacattcgcgcctactgacttcccgtagagagccgaggccaagggatcgtctatacgcccgagctcctgagggagacgccgcccacaccgtagtggttgtaacagcgccgggatatgggccaagggcggcttatgggaagtcttcccgaggtgctagcccagccatctttcgacgtgcgctgtag

SEQ ID NO: 36701 - DNA, 228 bp, Zea mays
  Peptide Sequence Number=SeqID_80076
atggccgcacgccgccggcgcctctcggtgcttgtcaccatgctcgccgtcgccgcgcctgtatgcctgtacacctctgccatcctcgtgatcctggagcttggctggggagacccagcagacagcatcctcatcaccggcaactaccgcctcggcagcggcgtcgagggtgtcgccaacgtacgaagaggggttttatgcaagatggtgtgggtggaccaaatttga

SEQ ID NO: 36702 - DNA, 515 bp, Zea mays
  Peptide Sequence Number=SeqID_80077
acctcgccttgactgtcggccagcttgttcgtttcgggcttcagaactttggtgatgacgaacagcccttcccaggggtgcgtgtagcccacgggtgccttctgcaaggggccgacgaggtccagaccccacacaacaaaaggccaggtgatgggtatcgtctgcagagcctgagcgggcaggagctcctagccttcggcgatggaaatggatcgctggaggatacctgtggggctgcggtggtacggggtctgctagtttcgattaggcgtgaccccgcttcgcttctcctcgacgcgcagtgcctcacccttgggggccgagggtacctcgggctgaaccgagggtctcgggagaagatgtccgggggaaccgttgttcgccccgaggctattttagccagcttctccgacagcggggggcaccaagataggcgcgtttgtgaggagcgccttcaggttcccgatggcttcctcggcctcaggggaccaagtgaagcactcggccttccttaa

SEQ ID NO: 36703 - DNA, 464 bp, Zea mays
  Peptide Sequence Number=SeqID_80078
gccgtatctgccccggcgtctcacagttgagtgacagccctaggtgccaggaagaggtctgcgccggacttttgcaaagattcgcacgtttgcgacctctagcgacatttgaacactggaagaaacaaaccgccacgtgttcgacgccgtctgccgcgccagagcacgcccgcgcgcgcgcccgcgccgcgcccaagccaagccagtgctctgccattcccaaccccgtccagccctcggagaagactgtgcacgtctccgtgaagctccccgagcgaggaatcgggctctgcttcaccggagaggccggcccaaggtcaccggacttcaaccgaccgccggcaaccgtggaccgaggttctctggaggagatggttgctgggattacttggccgaccaccctgccaccgggttggactgtcgagtgggaccctgcctcggctgaggaggagcatgaggagtga

SEQ ID NO: 36704 - DNA, 162 bp, Zea mays
  Peptide Sequence Number=SeqID_80079
atggggctcggtgtatgcggctcgctctgccaaggtggcaatgagattgatggttctggttatgattatggtaatggttgtccgcattgcaaccactgctcaggagaagatgaagccgtggaaggagacttccaggaattccaagattacgatgagttctag

SEQ ID NO: 36705 - DNA, 765 bp, Zea mays
  Peptide Sequence Number=SeqID_80080
atgctctccaaaagctcggagggttatggctctggtagtgaagaccttggtccgattcgggaatgcttccacgtcgacacagggctccccaaggaaggagatcacctcagcatgccactagagggcgaccagcttccatcatacaacccggacaggcccaaaccccaccgtggagccgtgaggctcacctcgagcaactccgggggttgcacagcaagctcggggaggaacgacaacacctacaacaactgcggcaagctttggagggttcttgaaacagcgcaccgagctccccaacggcaccgactccgacgtcattgggtcattcctcgttggaacctcctgccaggacctggtcagcaagctgcgtcgcaagaccccgaccaggaccaacgagctcatggacatcgccacaaagttcgctttgggacaggtggcggtcgaggcccttttccacaaggacaaggggaacaggaagcgaaaggagggcacccccaaggcatccacccaacgcaacccaaagaagggcaagaagaaaaggaagatgcacagggcccgcccgaggccctcgcagccgagctcgtcgccgctgcggagaagcgcaaccctctagcccccaaggatgaccacccaggtgacgtcccgaaccctaggaagtatccgctcatcatcgacccattgtcggcaacacgcgcctccccaaggtgctcatggatgggggcagcagcctcaacatcatctatgcagacactctggatctcctag

SEQ ID NO: 36706 - DNA, 507 bp, Zea mays
  Peptide Sequence Number=SeqID_80081
atgaaagagcttgtggacctcctcctcgatgaccatgtgtttctccttgtcaaaccggcgcgggggttgcttcaccggtctggagttggctcagatgtccaaggagtgctcagcgacttccctcattatgtctggcatgtccgagggacaccatgcaaatactttggcattcgcgcggagaaagtcaatgagcactgcttcctatttgggctcaagctggaagtcgatccgcaacgctttctccctgaagctgcttgggttgagggcaatggtcttcatggcttcggccggctcgaagttgccggcgtgcttcttggcatcgggtacctctccctcgagatctcccagatcggcgatgagggcctaggagttaatgagcgccttggtgtattcaatgcactcgacgtcacactcgtaggcatggtggtaggtagagccgacgatgatgatgcccatgggccccaggcattttcagcttcaagtacgtgtagtttgggatggccatga

SEQ ID NO: 36707 - DNA, 141 bp, Zea mays
  Peptide Sequence Number=SeqID_80082
atggcggcgatgatggcgcacagcgccgaggatgagatcgctcgggggcaggctgccgtgtgccaaaatgaaatattatatgtgaagtgctacaagaaatcatggtgtatgcatatggtgaatgaaatgctcatgatatga

SEQ ID NO: 36708 - DNA, 471 bp, Zea mays
  Peptide Sequence Number=SeqID_80083
atgcagcggcgggggctcctccttgggcggtggctctgtcttggggtgaggtgggggcggctccaggtccttgcgtgccggcggctggtattcctgttcgccgacggatgtgtgggggtggcgagccggggcggcggcgcggcccgctggtgctggcgcgaccagcggtcggtgtcgagccggggcccgctgcaggtggcgcggcggcggcgcggtcggccggcggtggagcgcggcagcgcggcgcggcctgctggtggagagaaagcgcgggcgggaggaatgtggcgcggcggcggcacggtcggcgggcggtggggcgcgcggcagcgcggcgcggcctgctggcttaagttcgacggtgcccaaatgcccgacgaacttaacttaagaacttatgactatggtgctggcgaagatgaagctgtggaaggagacttccaggagttccaagactacgacgagttctag

SEQ ID NO: 36709 - DNA, 924 bp, Zea mays
  Peptide Sequence Number=SeqID_80084
atggatcgcctagggttggcgattgtcctggagacagtcgcacaccgtgggcgccctttgcctggctcaaagtgggtccccggagctgagaggccgaactctcagcctgctagaccgccgcacattacagaagccccccaagtgttgtcgttcctccccgagcttgctgtgcaacccccggagttgctcgaggtgagcctcacggctccacggtggggtttgggcctgtccgggttgtatgatggaagctggtcgccctctagtggcatgctgagcctggagaagtccagggcgaagcttgggccatcttcctcctcggagtctaggcacccggaggggaatggcagccaggtgggagggcaagtgctgctgacgtcccctgctcgatctcgtgggggagtagtcgcccccatgtcagagcaggcgacaccaggaatgttggcgcattgccccatggggcatgattgcggttgctccgtcttcgcctcctgtgacgagaagggcgacgatgggtgccttgatcctcgggaggggcctgtcggcaccgatcccctcgcgcacgcgctcatcctctctctgccctgtggaccccacctatcagaccccatccctaacctcccgcccacacccccgccgtggactcacccaccactctcgccctctctctcccccagcgcgcgcacccagacagttccgccgcggctcactgacgtctaccgcgtctgttgccccgccggagctccgccaccgtcgccccgaggcgtccctgcgcctccgccgttgctccgggactccagtgtttcctctcgagcgggccccagcgcgctcgcgctctcgtctccggtggacctccgccgtggatgcgagcgacgccaccgctggtggccgatggacctggccgttagatcccaggcgtccgtctga

SEQ ID NO: 36710 - DNA, 2037 bp, Zea mays
  Peptide Sequence Number=SeqID_80085
atgggctcctcctccgtcctcctcttcccctcgtcctcctccgccgcaccctccgccccccattcctttccccactctcatgccaccgccatcgcctcctcccactccttattgccgccgctgccctgctccaaccccccgcctcctctttcctcgcaagaccacgtcctcatccactacatccaccagctagacgagcaagaagccgccaccatggtccgcaagcgccccgcgcccgacatggacctcccgccgccgcgccgtcacgtcacgggcgacctctccgacgttacggccgcagccgccgccggtggtggtcctggcgcgccgtcctccgctagcgcgcagctacccgcgctgcccacccagctccaccagctgccccccgcgttccagcaccacgcggcggaggtggacgtgcccccgcaaccgcacccgccggcccattcgcaggcgggcggcgaggcgcccgcgtccacgaccgcgtgggtggacggcatcatccgcgacatcatcgggagcagcggcggcggcgctgtctccatcacgcagctcatccacaacgtccgcgagatcatccacccctgcaacccaggcctcgcgtccctcctcgagctccgcctccgttcccttctcgccgccgaccccgccccgctgccgcagcagcagcgcgctctcctgcacggcgctccggccgccgccgcggggctggcgctccctctcccgccaccgcttcctgacaagcgccgccacgagcctgcgccgcggtgccagcagcaacagcaggaggagccgcatccggcgccgcagtcgcccaaggtcccgaccgccgaggagaccgccgcggcctcggccgccgcggccaaggagcggaaggaggtgcagcggcggaagcagcgcgacgaggagggcctccacctgctgacgctgctgctgcagtgcgcggaggccgtgaacgcggacaacctcgacgacgcgcaccagacgctgctggagatcgcggagctggccacgccgttcggcacctcgacgcagcgcgtggccgcctacttcgccgaggccatgtcggcgcgcgtcgtcagctcctgcctaggcctgtacgcgccgctgccgccgggctcccccgccgcggcgcgcctccacggccgcgtggccgccgcgttccaggtgttcaacggcatcagccccttcgtcaagttctcgcacttcaccgccaaccaggccatccaggaggcgttcgagcgggaggagcgcgtgcacatcatcgacctcgacatcatgcagggcctgcagtggccgggcctcttccacatcctcgcctcccgccccggcggcccgcccagggtcaggctcaccggcctgggggcgtccatggaggcgctcgaggcgacggggaagcgcctctccgacttcgccgacacgctcggcctgcccttcgagttctgcgccgtcgacgagaaggtcggcaacgttgacccgcagaagctgggcgtcacgcggcgggaggccgtcgccgtccactggctgcaccactcgctttacgacgtgaccggctccgactccaacacgctccggctcatccaaaggctggcccccaaggtggtgacgatggtggagcaggacctgagccagtcggggtcgttcctggcgcgcttcgtggacgccatccactactactcggcgctgttcgactcgctggacgcgagctacggcgaggacagccccgagcggcacgtggtggagcagcagctgctggcgcgggagatccgcaacgtgctggccgtgggcgggccggcccgcgccggcgccggcggcgccaggttcggcagctggcgcgaagagctcgcgcggtctgggttccgcgccgcctcgctcgccggcggcgccgccgcgcaggcgtcgctgctgctcggcatgttcccctccgacgggtacacgctggtggaggagaagggcgcgctcaggctcgggtggaaggacctctgcctgctcaccgcgtcggcgtggcggcccgtccagacgccgccgtgccgttga

SEQ ID NO: 36711 - DNA, 363 bp, Zea mays
  Peptide Sequence Number=SeqID_80086
atggcggtttggtatttacttacacttagtaactgtcggtgtttcgagaccggggggtcccttgggccgacgaggctgagagccgccgtcgtcacagagtatgcggggcgccatcattgcctatctggcggagctagccagatgggacaccgatcttgttccctgcggcccgagtcagctcggggtagggtgatgatggtgcctcctgttgacgtggctggcctgcgccctaggttgggcgatgtggaggctcctccgaagccgaggtcgagtctgtcttccatggccgaggccgagtccgagcccctgggtcgggcgaggcggaggtcgtcggctgaggccagggcggagtccgagccctag

SEQ ID NO: 36712 - DNA, 1386 bp, Zea mays
  Peptide Sequence Number=SeqID_80087
atgcccgtttacctgggaggtgtttgtgttctgctccccacgactccccagtccccatccagacaagggaagggaatacaggcctgctccgccctgcctcccctctcctcttcttctctccccgcgcccaacaccacgccggcctcgatccaggctgccgcagcccgcaggtgtcctggacgccgcccttcccgtccgccggcggttgattccttctctccttcctcagttgcagagatcgagcggcagatgtatatttcatcggaaaaacttgagaacgccgctgagctgctcggcacggcgccttcccgtgtgcaggttcctggcctgatcacaaagcaggcggcgacggcgcggatggagctcccggtggcggagcccggcacggagcgaggcgagggcccgctgatccagtgcccgtactgcgactcggaggcgatgcacaagctagcgcagatcctgctaccggggctcgccgccgtgtgcgtggacggcacgacgggggacccgttccacagcccgtcggtggtggccgtggacctgcgcagggagatggtggactacatcacgcagcggagcgagagcttcatcgcggacgcgctgatcgagtcggaggccaatcaggaggggcccgacgcggcggtccccgacgacccgttcgaggccgtgtccgtgttcatggacgacttcggcagcacgaagcgcaacatcatcggccacgtctccgggtggctgctgagcgacagccgcgacgacaagatcgacgacttggtgcaggagatggaggcgacccggttctggccgctggagcggcgggaggccgtcgccgagacgctgctcaagaacgtggacctcaggacccggttccactgccccgagaagtacgagagcgaggcgcgcctggcggaccacaagcagcagtgcagcttccgccccgtcgcctgccccaacgacggatgccgcgccagggtctccgtccgctgcgcgcgggaccacgacgccgcctgcccgtacaagccgctccagtgcgagcagggctgcgagaagcggctgctcaggcgcgacatggacaggcactgcgtcaccgtctgccccatgaggcccatgaagtgccccttcggatgcgactcctccttccccgaccgtgacctcgagaagcactgcgcccagttccttcggccgcatttgatcaaggtgctcaaggcgattcataagaaggcgcgttcggaagatgagctcaaggacctcgctctgaagctggaaaagtacgatggagatggtaaactggctaaagctctggatgcaaggcctctcactaacgctgtcaaggacctcgaggccaagatgaaagctgaacactcgagtcgaagggctgttttacactga

SEQ ID NO: 36713 - DNA, 1272 bp, Zea mays
  Peptide Sequence Number=SeqID_80088
atggggaagggacccataccgtcaatctcgcagtgcagcgccctgtccacggagatgcgcggatccacggcggaggaagaagcacggcacgccaagccaccaaaaccgggccttgcgggcgcggcggcgctaccggcgtggttcggcagcggcggtttcactcacgagcgaaaagcaacggcggcaacgtggtggcgcgattggtatggaatccacggagcaggggagaggtgccgcgggttcaacaactcgcccgagatgcgcagcgaggaagagaaacagaaagagaaatccttgcctgacaggtggggtcggcaacacgagcgagcgagcgcggcggaggtcgttggatcgcgtggcatttgcgctgagctgggagatgacaatgcgggcccgcacgacagcgttacaggcggggcgcgcgtgccagtgaatgacgaggtgggaccacgttacagcgactccagcaaaatgatgcggcaaaggatgacgggctgcgcggcaaactgtctctggtgctcggctgctcctcggacctcgactcccttccgtcatctctggtgctccggcttgaaaagccggagccgactgtccgttgtagtcgttctgccgttgaacctcctagccgtcgggttcgtgtccgttgtagctgttgggctcatggaccttgacgcggctgcagaggaggaggaggagggcaggctcgaggaccataatgaggctgaggatgctaggttcttcattggttttggtgagagtgagacccatggagatcctattgagatcgatactgtcaccggctctagaatagggactggcataggctccacgagcctgccagagttagtctctgatcctgatgctggtggtagcaactcgaactcgaagaaaaggtccaagtgctggaatgactttgatgaattaactaagattgtgaatggtaagaaagtcaggctgggcagcagagctagcagtggtccctggtgcttcaggcgaccggccatggtggagctggagcctagtgtgaagtcggagcatggtggaggagtcggcctggtcctgcctcctggcttcaggttccatcccacagacgaagaggtcatcaccagctacctcctgcacaagttcctgaaccctagcttcgcgccgcacgccatcggggaggtggacctcaacaagtgcgagccatgggatctcccaagtaagttgtcattacacacagctgattttcttcctttcttttcttttgacaagaaggccggtagctactag

SEQ ID NO: 36714 - DNA, 840 bp, Zea mays
  Peptide Sequence Number=SeqID_80089
atgcgcgcctaccgcaagaaaacagagtcagccacccgtgtcggggtggatcgagcactcacactttttgtggatgcgtaccgtgacctcggtgcgcaaactgctcccttcgacaagtcggggggaggtggggacccgcttccttgggtggttgtaggaggagctagagtcactcccgtccatagtgacgggccttatgtcctatgcgtcgctcgtgtcctacacttcgaggccttcgaccagagcaacgaggacttcgatgctagtgtattccaggtcgaggatgatgtgctgaagcgctcgactggggagctttacgataggatgtggggccctcacggtcgcggcgtcgttcgggagagggccgaccgagcacttgcacatgttccggcatctgggcctgcgcaagcaaattttggtgataatgggaacgatgaattattaatgtgtcacactttgatagttcttagtagtgatgaatctgaggatgaagctgatgttgagtcatggtctttggaaggtgaagggttgatgaccctgtttgctaagatggatgacgagtcttcggaggatgacctagattattttatggcgctagatttggctattgcacagtcttcgtcgaaggctgcccccactgaggcagagtcttctcctaggattgccccagctgagttgtggggtaagagaaggatcggagtgtcgaagcgaagtgtgggaatgttgggtgagtcttcgcaaatcactagggtccctcggagatgccaccgaatgggaatggagaggtcccgtcctcgggatgtgtcacacccgaatttaggggtccaaacccgggcctga

SEQ ID NO: 36715 - DNA, 408 bp, Zea mays
  Peptide Sequence Number=SeqID_80090
atgaacaagaatacaagagacacaagatttatcctgaggttcggtcacaccaccaaggtgccctacttcctcgttgaggcgcccacaaagagccgggtctctttcaacctaatcctccctttgccgaccacaaagtaccgaagctcgaatgaagaagagcaagaaggatttagagatgaagcaccaaaatcgcagctcttcaatctcactcaaagatttctctccaaagatttgaaatgggagaggcaagaggtgtgtgagagagagtgggaggtgtttctcaggttagaaatggagtttttgcgtgctctcatgtggggaagagtgtgggaggtgtatataaaggtgcccccaaaagctggtggccgttggggaaatctgactgaaattcggttgaaccggttctaa

SEQ ID NO: 36716 - DNA, 666 bp, Zea mays
  Peptide Sequence Number=SeqID_80091
atgagggcgcgggcgcgctgggggccacgggacgctgggaagggcacaggaaggttcgggtggcacagcggacatggtcgaaggcacgacaccggcgtgggggcatccaagagttgcagtatgcggcggtgcagcccaatgacggcgcaaaccactctggcaagtgtttgcacgaataacagggcagtacatgagaaattaagggcatggaggagttgcccacctcgagaggaaactctgaagcgcttgagcaatggtggggatgcagggttgccctgggtcgacggcagcgggcttcggctgcaaagggagaacaccggtgagcgcggaccgggcgaaacagaggggctgagggcaaaccagagggtgtcccacgttgctagcgaagaggcagagctcactgaggcaacggacgcggtagatgcccgacgacaatcacagaacggtgacggatcacggtggagatccacgggcacgcgcgcagagcgagatagagagagcgatggagtttggctgagggtgcaactgggcgaggggagtagagcaatagcaaaactacccaaatgttcagtggtaaacaaggtaaagaagagtgatcaagagcacaacttgcctgtaactcgaatttccaagtacttcaccaagttggtcttcggtgactcgtaa

SEQ ID NO: 36717 - DNA, 327 bp, Zea mays
  Peptide Sequence Number=SeqID_80092
atggcgcaaggcggagtcgcgacacagagtggtcgacggcgaggaatcccggtggagttggcggtcaatcccgagcagcacgaccaccacagctttaccccggccctagagaaggtcctaggcactaccgacgacgcggataacgacttaatcgaggattcccccgtggcggcgttatgctcggttctgcttttgctggcggcgagaaaggtgtgcacgacgacagagtttggtgcgcgttttatggttgccagggagattccaaagaaagcagctataacactccaaaatcctattatggataaattaggagaactcatttcatga

SEQ ID NO: 36718 - DNA, 345 bp, Zea mays
  Peptide Sequence Number=SeqID_80093
atgctggtagactacacaacaatactcaatagaccaagtgtgtcggtcgaaggccagacacagcaaggtgtcgagagcgtcgtggaagtgacactcgtgagcggcgtcgcgagtgatgggtctagcgatccatccctccgactcctgctcctccgagagctccgtgctatggctcgaactaccaccgtcgtcatcgtctccgtctccgtcagggtctccttcagcagcgggatgccctatggtgcgttggcgctcctgctcctcgtgcaggcgacgatgcagtctctccagatcgctagaccgacccatcaccatgcggtggagtgggagctccgcaaggcatga

SEQ ID NO: 36719 - DNA, 339 bp, Zea mays
  Peptide Sequence Number=SeqID_80094
atgccgtctttgggtgaccagatggtgcagagccctgccttcaccatcgctttgcgaaggcgggacacaactgccttcgttcaggaggtggaggtggaggcgattaagattgttggaaaatatgtgccaaagacagagatgttgaggagcctggatatccacggttccaacgttaggtttaacctggtttttgaattgaatagcttgtgctacggtccatacccggagggggactctgctgatgccggggatgaccgaggaaaacatgtgaagaccccgtctgaagagggcacctcaaagggaaagggtgtggttgcagcaactcgaagaggaaaatag

SEQ ID NO: 36720 - DNA, 147 bp, Zea mays
  Peptide Sequence Number=SeqID_80095
atggtcgcgtcctccctgatggtgttgtcgctgctcctcttcgtgtctctcacgaatagaaatgaccttaaattgcaagtgtaccttcggcttgaaagagagcaaaagtacaagtgtgacgcaaaagcaaatgccaagtcagcgtga

SEQ ID NO: 36721 - DNA, 1857 bp, Zea mays
  Peptide Sequence Number=SeqID_80096
atggcgtccgcggcggcgggcacaccgaagcgctgctactacgaggtcctgggcctatctcgcgactgctccccgacggacatcaagcttgctttccgccgcctcgcgctctcgctccaccccgacaagcagccccccggctccgacctcgccgccgccaccgccgccttccaggagctccagcatgcccactctgtcctctctgacccgcaggagcgtgcctactacgactcccaccgctcccagatcctcttctctgacccagcctccgccggcgccaaatccgcttccatcgtccccgatcttttcgccttcttctcttcgtccgctttctccggcttctccgacacgggccgcggcttctacaaggtctacggggacgtcttcgacaaggtattcgcgcaggagcttgcctatgctcgccggatgggggttcccgaccccgctgcgccaccggtcattgggaacctcgattccccctatgcgcaggtcactgctttctacagttattggcttgggtttggctcggtcatggatttcggatgggcggctgagtgggacgctgcacgtggggaaagtcgccgtgttcggaggctcatggaggaggacaacaagaaggcgatgcgcaaggcacggcgggagtacaatgacgctgtcaggggcctggctgccttctgcaagaagagggataagagggtggtggacatggttttaaagaagaagctggaggaggagaagagaaaggcagaggagaaggaaaggaagaaggaggaggacaagaggaagaaggagcgagccatggcatgtcaggaacctgagtgggcgagggcagaggaggtagaggagggactgtatgatgaagatgaagaagaggagatgagggccaagaaggaggagctgtactgtgtggcgtgcaataaaaagttcaaatcggacaaacagtggaagaaccacgagcagtcgaagaagcatagggataaggtttctgaactgaggatggcctttagggaggaggagtctttgaaagaggcagaggagggggaaggtgattggaatgaagttgatgtggggtttgattttaagcctacacaggagtcagatgatgagagtgcattttcagatgctgcagaagagttagctgaagaatttgaggaaggtttggaggtgcatgataaagagaacggtgataaggatttcgatagtgcagagcaggaggttgggtcatatgatgaggcaagtgtattggaggcaatgctatcaagctgcaagaacagaaagggtggttatgtggctcctccagaggaggctttgtctggtactgctgaggatgacgatcatcatagaagttctgaagttaataatgcaaaaaggaaaggacgcaggcgacgggcagcaaagaaggagcaagatgaaagtaattatgctggcaatgagcatcatggtaaatgtgaggttcagcctgagggttcggtccatggtaatgatgttgatgatatcatggaagggccatcctcttctaatgtcaacaatggttcagtaagcaaaggagataagcagaatggtgaaaacacgaatcctaaaaagaacaagaaaggcacaaaaaagaaaccaactgtttctactgatcagaagagtatgtcaaaggctgaccagaagagcacatcaaaagggaagaaacaaaaggaggtctcgaaggcacctagtaatgattgcgatacttgtggaggaacttttgagtcgaggtattgcagctaccattcccccctcccggaacaagttgttttctcacttggaagaaacaggtcacgcaatgctgaagacgcggcagaagaatcgtcgttgagggaaataagttga

SEQ ID NO: 36722 - DNA, 780 bp, Zea mays
  Peptide Sequence Number=SeqID_80097
atgtcgtcgattccaccgccggcgggcgggttgtcggccgccattgtcgttgtcgcgcggcggtggaaggagtatcatgtcgtagctgccgtcgaaggacatgaactcaagactcccgaaacggagcaccgtcccgggccggagaggttgttggagactgcccatctagagcttgacgggaagctgttcgtcaacacgcagcaggcccctacctggcgcgccaactgtcggcgtcttgagaccggggggtccctaagccgacgagtggagcggagttcgtcatcttctggggctgagcccgagtccgagccctgggtcgggcagagcggagtccgccgtcttccggggcttagcccgagtccgagccctgggtcgggcggagcggagttcgccgtcttccggggcttagcccgagtccgagccctgggtcgggcggagcggagttcgccgtcttccggggccttgcccgagtccgagccctgggtcgggcggagcggagttcgccgtcttccggggcctagcccgagtccgagccctgggtcgggcggagcggagttcgccgtcttccggggcttagcccgagtccgagcccttggtcgggcggagcggagtttcctatggcgcctttggcaaggcctgacgtcctgtcagtctcactctgtcaagtggcactgcagtcggagtggcgcaggcggcgctgtccttctgtcagacctgtcagtggagcggcgaagtgacggcggtcacttcggctctgccggggggcgcgcgtcaggataa

SEQ ID NO: 36723 - DNA, 1023 bp, Zea mays
  Peptide Sequence Number=SeqID_80098
atgttcgtggtcgaggacaagggcggcgccatcgcgctgatgctggcgtcgctgctgttcctgggcacgtggccggccgtgctgacgctgctggagcgccgaggccggctgccgcagcacacgtacctggactactccgtcacgaacctcctcgcggccgtgctcatcgcgctcaccttcggccagctcgggggcgccaggcgcggcatgcccaacttcctcacgcagctcggccagcccaactggccttccgtgctgttcgccatggccggaggcgtcgtgctcagcgtcgggaacctctccacccagtacgcttgggcctacgtcggtctctccgtcaccgaggtcgtcagctccagcatggtggtcgtcattggcacgacgctgaactacttcctggacaaccgcatcaacagggcagagattctgtttcccggcgtggcatgcttccttgttgctgtcatccttggctctgctgtccacgcctccaacgcagctgacaacgaggagaagctcagtgcctccacaaatgcctaccagcttggtaggacagctggggctgcggaaccaagcaagcatgtcctagacaaagatgttgccaaggacttggagaatggagtctctggaacaaagcaagctgacaaagcggaggcaggcaccgcagaatacctcattcaactcgaagagcggcggtcaatcaaggggcggcgtgccgcacctggtggtcctcccctcggggcctacctcggggactgggacggccggcactgggcgctcctcgccggcctgctctgcggcttcggcaacggcctccagttcacgggcgggcaggccgcgggctacgccgccgccgacgcggtccaggcgctgccgctcgtcagcaccttctggggcgtactgctctttggggagtaccgcaagtcgtcgcggaagacgtacctcctgctcggcttcatgctcttcatgttcgtcgccgccgtcgccgtgctcatggcttcgtcaggtcacaggaccacagagtga

SEQ ID NO: 36724 - DNA, 372 bp, Zea mays
  Peptide Sequence Number=SeqID_80099
atggccaggcctacgtacaaccgtggaaaggtaaaccacttggaggtcgaagcaatccaggatgcaccagatgtggcagtaggtgctcttcgcactgatgggtcgtcccctggagccgttgttgagatggtcgctgacgaaagccccgcccaagatgcagccaattcattcgacatccagaacgacctcgccatggaaactgctacatcttccaagattgcaaggctttttgcaaggcctcttaccaaggttcagatggaggaaatcatggagctggccaaccaaggaaaaggaaggaaaaccaacaacaagaaggggtgtaaggtggcgcccttcgtagcgccggtcactctgccggctatggaagcctga

SEQ ID NO: 36725 - DNA, 909 bp, Zea mays
  Peptide Sequence Number=SeqID_80100
atgaatcatggcgccgagctcggccacgtcgacgtcgtgtcagcatctctcgccagcggagcacgcacctcggcgccaagatctgtggcgctgagcagtgaggatgatccgacaaacaacgtgcccgacaatatcttttcgaagatcggcctgcagctgcacaggagggataaccatccccttgggattttgaagaacacaatttatgattactttgacaagaacttcactgggcagtttgacaagtttgatgacctttgccctcttgtttctgtcaagcagaattttgatgatgtcttggtcccttctgaccatgtaagccggagttacaacgacacatattatgttgatggtcaaacagtcttaaggtgtcataccagtgctcatcaagctgagctgctaaggcatggacatacacactttcttgtaactggagatgtttaccgtagggattccattgattcaactcactatcctgtcttccatcagatggaagggttccgtgtcttctctcctgatgaatggtcagggtctcgcatgggtgggacagcatatgcagctgcagaactcaagaaaacactggaaggcttggcaagacatctatttggtgctgtagagatgcgatgggttgacacttacttcccatttaccaacccatcctttgagctcgaaatatactttcagcgccttgcaatggtcctttttgacattccagatattcgactcttctggtcgaatgataaacggttcacgtcccagttctcagaaggcaagcttggtgtcaagttcaagccattttcaaagtttcctccttgttacaaggatatgagtttctggatcaatgatgcatttacagagaacaacttatgtgaggttgtcagaggaattgctggtgatcttgttgaggag

SEQ ID NO: 36726 - DNA, 1409 bp, Zea mays
  Peptide Sequence Number=SeqID_80101
gcgtccacactacgatggtgcactgttctacctgcgcccgcgccccgaaatctcgcaccgcgcgtccgcgcccttacgccacctcctcctctccccctcactgcgccgccacctcctcggttccgcgtgtccgctgcgccgccacctcctcggttcagcgtgtccgctgcgccgcccaccacctcctcctcctctcccccacgaatccgacctcccagctcgagcacgacatcgaccacaccgaaaagtacgctggcgactccgacctccagctcgagcgcatcaacgtctactacaacgaggccaacggcggccgcttcatcccgcacgccgtcctcatggacctcgagcccggcaccatggactccgtgcgctcgggccccttcgaccagatcttccgccccaacaatttcgtcttcggccagtctagcgctggcaacaactgggccaagggccactacactgagggcgccaagctcatcgacttcgtgctcgacgtcgtgcgcaaggagaccgagaactacgactacctccaagcctacatatctaagcgattcgtgacatttcgacaaattgcgctgagcctgcagttctcggttccaagtctgtcactcactgggaggaggtacaggttcagcaggacgcccagcccgcaggatcacgccgagaaggttgcttccttgaaggttgggatgcaagttacaacgacaatttcacgtgggaaagtgggagatcaagtcagtgttactgtggaaacagctcatccacgtgatgatatattatcagtcagagaggttgtagaggacaccgaggattcagatcttgtgttcctctgccgtttaccactgttcatttttgtggcagtggaacaccgccgaaggggacgacggcatgggcgccgccgccgaagccgagcgacgacggtagcggggcgaagtagcgagagaagggaggcgacgacgacggtgctccgtgcccgggcccggtcgtcgggcggggtcctgcaagcgccgaagctgagggagttcacgctcgccgagatgcgggcccccacgcacgtgttcaaaccggagatggtgcttggggagggcggcttcggccgggtctacaagggctgggtcgacgagcgcacctcaacccggccaagagcaatgccggcgtcgtcgtcgccgtcaagaagctcaccccgaatagcgtccagggcctgcaggagtggcaggctcctctcggtgtgcgacggtgtctggtccacctcgtcggcccttggtgctgtgacctccttcggggacaactctaagggctgtgacagcctattctggtggcaagacctcgcgcgctgctggtccacctcgtcggcccttggtgctacgacctcctccggggacaactctaagggctgtgacagctag

SEQ ID NO: 36727 - DNA, 297 bp, Zea mays
  Peptide Sequence Number=SeqID_80102
atggaggccggaagggtgtcagtgcacgagggacagagccaccgccagaagggggcaaagcgaggcgcgaggcgagctcggcgagaacccaagcccacccatatatcttgggtccgcgcaagtccgacttacccggctgggtgcggtgattcaacaggcgagcgcggagaattcggcatgcgttcgcaacggccggagcttgaagaatcagtccgcctgatgggtcccacgcgtgtgatgacaccgttggtacgcggccggcaccatcagcaagtggccgagcaagacccggaatga

SEQ ID NO: 36728 - DNA, 96 bp, Zea mays
  Peptide Sequence Number=SeqID_80103
atgaagggaaaaagaaaacttgtcggccgcaaggagataaatggagatgggccaagaagaggatataacttcaagggtaagaaacttctttcctag

SEQ ID NO: 36729 - DNA, 183 bp, Zea mays
  Peptide Sequence Number=SeqID_80104
atggccgccgccgtcgctcggaggctcctctcccatcgcgcctcttcatcctccctctccatggtccaggaggaggcagagaagaagatttacaccgccttgtgcgagcgccacttcgagtttggatgcgatattgatgaggagacatctaacaagctcgaggacccccctggtatttcctag

SEQ ID NO: 36730 - DNA, 1806 bp, Zea mays
  Peptide Sequence Number=SeqID_80105
atgtcgtcctcttcttcttccgctgccactacgccggcggccgccgcctcgtctgaggagacgttgagtagcttgatggtggaggagttgcgcgccggcgactctgttgattttggtgtgtcgcggatgacgtcagcccgcgttgaagatatgcagcggttgggctactttggcggcggagttgctcgtgctccggggacggaggaagtccccgagccggaggtggcagaggaggatgcagacgaaggggcccttcggtgcgccgccggtcagagcagtgggcgtgatttagttgaagagttcgtggcgtacggggtgtggcccttggcgcatggctgggcgttgggcgaagtgtgccctcgccagatgccttttcacggaggaagggtggtgcgaagtcctgccttcgcactgaatctgcgaaaccgcgacccggccgcctttgtgcgcgatgcggaggacggggcggtgcagctcgtgggacgttacgtgccgaggacggaaggccaacgcagctttgatatccgcgggtcaaatgaccgtttgaacagggtcttcgaattaaatcaattgccgtacgacggctatcctggtcaagacgaagcggaccgccgtgggaagaagccggcggtggagactggagacgaccctgcgccggcggccggcccttcctcaaaaaagagaaaattaggtactgcgatgggaggacttggggtgtctgatagttttgctagagagttgatgaggacgtgtgcggccccgggggaaaggatgtcttcgcccgagctccgggagtcttcggctcggatgctgagggttaccgggggttgctggcctaggaatgttcctatcccctgcgcggctgacgaggactgttttacatctcgtatggttcgtcaatggagagtttttccttacgggcggaatatcggtgctgttgtgtgggcagtgatagacaaggagcgccaaggggcggcgcaaaaacgccaggcggctgtcaggctacatgaagctaggccgaagcggcagcggggggctgcgaaggctgcggcctccggcggaggcaaaccgccgctggcggcgaaggcgggcgcctctgcacctagaaaggcgccggaggcaacggcgggcgccggaggcttcaagtcaacgaaggtggtgccgccggcgagcggagtggcggaggcttcgaaggcggcccgagcgttgccattgtcgggcaaacgtgttgccgacttcggcaccgatattactgtggacgactatcttggtgggtcggacgagggccagcttgctatagttgcgcctggcgcggcgatcgcgacggctgccatagtgccgaaggcgaggggcgaggctcttggcgccggaggcgaggtgtcggccctcgcggtggtcagggacgaggcgggcgcagcgacccgccggctgaagggagtgacggaggcgctgagtcaggcgacggaggcgctgagtcaggtggctgacttcaccagccgtactgcgtcgggggcccttacggcagctttgtctgccgaagtcgagagacttcggacgcaatatgctgacgctgtccgtgaaaaatcggcctccgacagcaagtgtcgtaaactggcggacaaggtggccgccctggagaaggagaaggctgacctccggcgccagctggcgggggagaggagggaggccaacgaagccatcgccaaagagcaggctgcgcaggcggaggccaagctggcgcgggcggaaggcaatattgccaaggagctcgccggacatctgcaggagcggctcaccgccctgtag

SEQ ID NO: 36731 - DNA, 297 bp, Zea mays
  Peptide Sequence Number=SeqID_80106
atggctgcatcgggtgtggccatgtccagcgtggtggctccggatgggacgcgtggtgtagccgtggccgcgcctgaggaggatgtcggtggaggcggagaagaggatggcggtggcggcgtcgatttctctggcggcgccgaccgagttagggcttgtggccaggtcccgtgccagttccaccgcacgacgcaggcgcgccgcggcgtggacgccgccgccgggctcggactcgggctaagccccggaagacggcgaactccgctccgcccgacccagggatcggactcgggctaa

SEQ ID NO: 36732 - DNA, 465 bp, Zea mays
  Peptide Sequence Number=SeqID_80107
atgcaggcggcatgcaaccgcgccaagtggacacgcttctccgactcccaacgcgccagcatggaggcccaagcccacgcgtcacgcaatcggcgcgccagatgctgcatgcaggcaactgcaccgccacttgcgccaccatcgcgcctcttcggttgtggaaccgatgccgcgactcgaggcgacccagcgcacgacccagcggcgccagcctggcgcgacggtcaatgcggccgaaaggaccgggaaagggggataccccgaaaaggatccttccctgtgaaggaactgggctccgagccccccctactgatcagaggttcgaaagctgaccctccgaggggttcaacagtcgccttagatcgcgtgggccctacacccactactggtcagaggttcgaaggccggccccccgaagggctccacggccgcctcaggctactcgggctccgcgcccattactaa

SEQ ID NO: 36733 - DNA, 1200 bp, Zea mays
  Peptide Sequence Number=SeqID_80108
atgcatcttgtctttccaccttccaagcccctggatgggggatacccgccgtctttccgcctcatcgttggaggaacgcaactccgcgggagttggtacctttcagccatcgttcggcttcaaggattttcatcagccagcgcgactgcaccccttcaccggcggtcacccgagacggcgaccaccagcccctgggtggggagaagcaagccgggctgcgatcttggtcccacccttagcttcaaggatgttcatcatcctcgctggggtggaggccaggctgagccggagctctacctcccgcgcgggttcgtgggttaccctcccctgtggcgttcgagggagagggcgctcgctggccctgcaggtgggtcggacttcgacaacgcggggctggtcgacggcgggcgtcgtcagtcccagcgtgtcgagctcgtcggcttggctcccggtggcccctcctgccggaaggcggctgccgcgccgtgtgcacgggaggaccgcccaagatgccgcacgcttctagggcggcgttcgtgttctggggtggtcctgcctttgcaccggcggaggcggctcgagaagtccccgtcgccgacggggtcaccgccaccatccgcgcttcgggcctccggctctttgtacttgtcctcgcccctcgagcgtcggcgtgggcgagggcaagattgcagcagcgcccaccctgaggcctgtgctgctgcagttcggccacccggggcgggggtcgttgttgtcgctgtcagagcgggcggcggcgagccgcccgtcagtcttctgttgctccgcaggccctcccccatcgagtggggttactcgcctgttggttgtctgaaccgcttcaccaagcgtgagtcgccccgtgtcaaggtgacgagtgagagtggagatcctcggaccacgtcgccgtccgaggctaggtcggacctcaccaaagatgtcgtcgataccgagggtgctgctgcccccttccagcgtcaagacccgagcctgcaggatcagattgctgtagcggatgtttatgcgagcgagagttgcttctcgcggaaggtgatgagtgagaaggtgatgagtgagaagagatcttttttcgaggaaaatttcgacgcagagggggttgccccccttttagcccccgagggagggtcgggctttgccgaggcgaggccgacccttccttga

SEQ ID NO: 36734 - DNA, 195 bp, Zea mays
  Peptide Sequence Number=SeqID_80109
atggcactgctacggtcgacaggcacccatgcccaggctctagatctacaagcggtagtaggtaccttcggacttatgtcaaagagggagaacctcaaaagatacgaaggttggcagtgccgaagctgtgaagcaggaaagcttcggcatgttcgcagaaaagggaaccgacttaaagatgaaaaggccatttag

SEQ ID NO: 36735 - DNA, 434 bp, Zea mays
  Peptide Sequence Number=SeqID_80110
agagcttcgccaccgcccgacatcgactgctgtcgttctgtggtcaccgtcgcgtccgcgccccgtcccatgtcatgtcagagccccgccgtcatcgccccgtcgcgtccttgcgcctccgtcgttgccccatgactccagcacttcctctcaagcgccttctggtgcccccgcgccagcgtgatgcccatggccgagtccgccagaccgccctgatcgcgcctgagctaaatcccaagcctctggatccccgccgtgaccagcctcctcgtctccggcgagccctcatcgcggggaccgagcggcgccaccgcgcctacaacgagcagctcgtggttcctgagtgtgttgccgaagatccctctgagcaacctggaggagatgttggcaacatggaggactttgaggagttccaggactatgacgagttataa

SEQ ID NO: 36736 - DNA, 942 bp, Zea mays
  Peptide Sequence Number=SeqID_80111
atggggttcgaaggctggccccccgaagggttcaacagccgcctcagatcgcgtgggccctacacccactactggtcagaggctggcccccgaagggttcacagtcgcctcagacgccgagcgagggatgaccaggggtacgttcgatacataaccaaggctcgggctgcgctcccgagctcaccggagacaccatgttcggtgcccatcgagggtaacatggcgcttccccccctcctccttgcggaaaggcgacgtaggggcgtatgtaaaaaagccgagtctgtccctgatcgccctctcgcccagtgcggaggctcgggggctgctctcgcaaaacccggctccggccgaaccgttgacagcgtcaacataccagcccgagaacttgagccccgaccgtgctcccgggctacgaccagttcgcatgagggaaccaccagaccagccgaagcattacgcaaggcattaagacctcaaaggagtgaaaccactcctccgaggcctcgggggctacacccggcgggtgcgctcgcgcgcacgcaccggaacaaaatgcaaccgagaaaggctggcccccttgcaaaaaagtgcgacgaaagcctccaagcgagtgctaacactcccttcgaggctcgggggctactgtcggggaacataattaggggtaccctcaagacgcctaattctcagctgaaggacagcgccgcctgcgccactccgactgcagtgccacttgacagagtgagactgacaggcagtcaggccttgcccaaaggtgccataggaaactccgctccgcccgacccagggctcggactcgggctaagcccccagaagacggcgaactccgctccgcccgacccagggctcggactcgggctaagccccggaagatggcgaactccgctccgcccgacccagggctcggactcgggctaa

SEQ ID NO: 36737 - DNA, 525 bp, Zea mays
  Peptide Sequence Number=SeqID_80112
atgtccggtgcaccagggaagaccgatttcaaactcttcaccttcgggaatctccagaggcaactccgctataattcaccggacatgtccggtgctccaaagaagagctgcctcaggaactcgtcagcctcgggaaatcggaacgtctgctccgctataattcaccggactgtccggtgcatccacggagcaacggctacttcgcaccaacggacacctgcaggcgcattcaatgcgcgccagaagcgcgcagaagtcaggcacgcccatactggcgcaccggacattgaacagtacatgtccggcaagagacaccaattttgtggtgatccttgtgggaactttgtgttccgagtgattgagaagagaaagctcactcggtccgagggaccgtttgagagagggggaaaaattgtgggaaaaagtgaacatttttttcgtgctttgtttgatgagtatagtgaaatatatggtcaaagtgacaagacaccacaacattctgattctcaagataaatcagtatag

SEQ ID NO: 36738 - DNA, 1221 bp, Zea mays
  Peptide Sequence Number=SeqID_80113
atggcagtccgccctttcacccactggtttgggcgaaagtggagcccagctgcatcccctcaccaatggtcacccaagacggtgaccaccagttcgatggtgggaagaagcaagccgggctgcgacctctgccccaccctcaacttcaaggatcttcatcatccttgctggggaggagggcgaggcgagccggggcttgccttcgtgtgggctggcgtcccgcttcttcctccggcatctgggggtggaaaccatcctccagctctgcggaggaggcgtcctccagccatgccggggaaggcgaactgctgctgcctagccagggacgggagtgaggacctgccggtgcgctttggggcggccggcgctcgctggtgcggtgttggtgggcaggtggatgccaccgtcggtgctgaggtggtggcagctggagaaagcttctccgccgacgagaccgtcagcgccactcgcggaccaacctccagctctttggctttaatatctggttctcgtcctccacgaggggacgcgaacgagagccttccagcggtagcatccgccccgggaccatcgctactgctgcataggtcaccgacgagtcacccggagcttgtcgtcccgcaggccctccgatgtggaggttgttcatacccgcgggagtggaaccggagttctgtttgtaatggcaccttgagtgccggtgtctgttcattgtggctgtcggggcttgaacatctaggagtccctcggctcggtcgggccttgccactcaaggcttctctcgctcagttaaggaaccctcggctgctctgcgatgagccgaagccggaggcagcggtgttagcatggacagaggcggagttggctcgaaaagggggcttcgtcgacccaggagcaggggacttcccaggccgaggaggcgtagcagtggcggctggaacctggctggatcctccgaccgtgtcgccgtccgaggccgggccggattccgccgaaggtggagtcgacgccgagggtgctactgctccccctattgatgacttgttcgtcggtagcagaatcgcttatccgagcgagagttacttatcgcagaaggtgatgagtgagaaggtgatgagtgaggatcccactatcgaagtagtcgaaaagcgtgaaagatgttctggtagaaagactttttccgaggaaaattttaacgcagagggggttccccccttctag

SEQ ID NO: 36739 - DNA, 612 bp, Zea mays
  Peptide Sequence Number=SeqID_80114
atggatgaaggaactcccctcggtggtctggagtctaaggatgacactaagccgagccacgggcttcacactgttctttctagtctatggggccgaggctatcttgcccacagacttagaatacggttccctgaggacaagggcgtacgacgaccgaagcaaccagaccagccgagaagactcactggaccagctggaagaggctcgggacatgaccttactacactcggcacagtatcagcagtctctgcgacgctaccacgcctaaggggttcggtcccgagacctccaggtgggggacctggtgcttcggctacgacaagacgcccgagggcgccacaagctcacacctccctgggaagggccgttcatcatcgccaagattttgaagcccgaaacatacaatctggccaacagtcaaggcgaggttcagacatcaatagggggagcagtagcaccctcggcgtcgactccaccttcggcggaatccggcccggcctcggacggcgacacggtcggaggatctccacctcgaaggaagatctcagcaccgcgcctgagccatcgccgctagggtctcctccaggaacccggcccgagcagatggcttga

SEQ ID NO: 36740 - DNA, 345 bp, Zea mays
  Peptide Sequence Number=SeqID_80115
atggagcaccagagctctgaccacgatgagctaacacacgcggactgcccgccatacaaggctggactattcgtgacctgggagttagtactatccgggctcaggccccggacagtccgtagtacatgtgcccaaaaacacacagtccctgcccaaacttatttggcacctgcggacggtccaccgaccccggccagacagtccacacaattatacagggactgtgcagagggcgaccctctctggtcaggactgaggatggtccgcccccaaggcccggacggtccgcagtacaaacatacaggaccagtccgaagtgaacatactttggacccctctgaatag

SEQ ID NO: 36741 - DNA, 64 bp, Zea mays
  Peptide Sequence Number=SeqID_80116
gcccgagttccgagcccctggggtcggggcggaagcggagttcgcccgtcttccggggttttaa

SEQ ID NO: 36742 - DNA, 252 bp, Zea mays
  Peptide Sequence Number=SeqID_80117
atggaatcccatcacggcggcgacgggaaggcgcgggacaagttctcggtgtaccagaacccgtccctcacccgcgccctagactcccgcagcgcccgcccctccgtcacagtcctcctcgtcctcgcggtcatatccgtcgcctccgcatcctccttcctcgccctcacctcccgggaggagcagctcaccaagctcgccggacgagcgggtatctctgtccttgctgctgattggtttaacaggtattga

SEQ ID NO: 36743 - DNA, 387 bp, Zea mays
  Peptide Sequence Number=SeqID_80118
atggatcctaagggcaaggggatggtggtcaatgataaggagaaggagtccttcatcaatgatccaaaggatgacaagctgtcggcgtttcgagacaggggggtccctaagccgacgagtgagtgtgctgcgtgccccagcccagatgggtcgagcgcgtgggcgagcgcggaggggggagaggcgaggcggccggagccgagcgtgagagaggtggaagtcccgcggccttcgtgttcgtcccgtgcccaggtcagtcgtaaggagaggacccaggtgtacaatggggatgtagcagagtgctacgtgtctagcggagggagagctagtgccctaggtacatgccgatgtggcagccggagagatctgggcatcctgctggcgtga

SEQ ID NO: 36744 - DNA, 615 bp, Zea mays
  Peptide Sequence Number=SeqID_80119
atggctgccgctgcagaggtcgctggcgagcctcccggcgttcgtcgccccgcaggcccgaggtcgctcgaatctctcggcccgttcgaccttgttgtctggggctcctctagcttagtcaaagagacccctcggccgcccttcgatgggccgaggccagggccgacgccaaagtcgatcagccgaggcctcgggtcgggctggcgcccttggaagccggttgaccgaggccccaggggtaaccggccgagccgcctgctcgggccggattcccggaggagtccctggaccgcgccgccgtccgaggctgggtcggaccttgctgaagacgtcgtcgatgccgagggtgctacggctcccttcagcgtgaagacccgagcctgcaggatcagaccgtcttgtagctccacggagtcgctttatccgagcgcgagttacttctcgcagaaggtgatgagtgaggatccgctttccgaagtagtcaaggagcacgaaagaaatcctgctaaaaagagatcctttttcgaggaaaaattcgacgcagagggggtctccccccttttagcccccgagggagggtcgggctttgccgaggctaggccgacccttccttga

SEQ ID NO: 36745 - DNA, 276 bp, Zea mays
  Peptide Sequence Number=SeqID_80120
atgaagacacgagatcttcgaggtactagagcaaggtggaaggtcaaagtggctgaggtacttaaagccaaggtaaagaagaggctctacaaaagtcaagggtgttggagctcatggatagctttagatatcaagttgtgtcaacttggtgcttcagagtccaactccaacctcaaacatgccaaaaaggagaaatcaattaaaaaggttaggtatgcaagatgcaagagagtccaacttatggagatccttgcaaggaaattgattatgatataa

SEQ ID NO: 36746 - DNA, 630 bp, Zea mays
  Peptide Sequence Number=SeqID_80121
atgccgaagtggcagccggagagatctgggcatcctgctggcgtgatgtcgtggatatcggagttgccgtggccgagcccgagccagggggtcgggcgaggcggaagtcgtccggccgaggccagggcggagtccgagccctggggtcgagcgaggcggagtttcgtcgtcttccgggtcttagcccgagtccgagccctggggtcgggcggagcggagttcgccgtcttccgggtcttagcccgagtccgagccctggggtcgggcggagcggagttcgccgtcttccgggtcttagcccgagtccgagccctggggtcgggcggagcggagttcgccgtcttccgggtcttagcccgagtccgagccctggggtcgggcggagcggagttcgccgtcttccgggtcctagcccgagtccgagccctggggtcgggcggagcggagttcgccgtcttccgggtcctagcccgagtccgagccctggggtcgggcggagcggagttcgccgtggcgcctttggcaaggcctaattgcctgttagactcactctgtcgagtggcactgcagtcggagtggcgcaggcggcgctgtccttctgtcagactggccagtggagcggtggagtga

SEQ ID NO: 36747 - DNA, 471 bp, Zea mays
  Peptide Sequence Number=SeqID_80122
atgggtgagagaagaggcaaggccgatggggacgaggtcagggaagagctcgggcgcgtcggcaaggaggcagaggtcggtctcggtgtggagcacgatctacgagttggcaaagcgggcagggtcgtcgatgtacttcttgtgcaccttgaggttgtcttagaggtagcactcgaagaccagcaggaggcatttggtggctcgggaatcgagcacctcgacgacgtcggtggcagagaggttgagctcctccatgctcggatcgacctcatcaggatggatccgcacgcgggtaaccagagacaaaccctaaggaggcagttgagtcgcaatccccccgatcaccgaagaacttgcgcgacacatcctaaaggagacgacggcgtggaggaagtccatggtggtgtacaccgcgatgagggaagtggcgacgacggggcacgggtcgcggcgatggggatgtctcagtag

SEQ ID NO: 36748 - DNA, 390 bp, Zea mays
  Peptide Sequence Number=SeqID_80123
atgatggaaaatttcggcagcaaaacagtgcaaatagcaatgaatgctgtggtaacttcacacctacctgcttgtttatatagtactgcagtggaccgcaaggatcaaacagtaactctgcaaggtgggaccgacacgcgctcggaagtcggatcgtttctccgcaacgagctcagggaaggtgttttttggaccttcggcttcccgaagctgaagaggcttttttcacgggtcaagctcgttacgaagaacgatctagcaccgcgaaaggggctactgttggggtcgtgcttcggtgcgccgaaggtctcacacgaagaagcagcttcggctgaagtcgtctccaagagatggccgaaggtcccttttcatggagcttcggcgttttaa

SEQ ID NO: 36749 - DNA, 741 bp, Zea mays
  Peptide Sequence Number=SeqID_80124
atgccgccgcccaccgtgcccgcgattccgccccaatcacctctggttctcaagtatggggaggaagggaaggtggtggagcgagtgaacctcgccactcggcagctgcgcctactgccgaagcccgttgtccggatctgcggtctcctcgcgctcgacgtctcccgcgaccagctaaagttcattttaccttcaatcaccccaaaacgccattcgtacatgaagtgtgaaccttgcatagaggctttgcttaggagctctaaattggtttactctaacatcactggaaaattatccgtatgtacacagtgtgaccaaaaagatttagctcacactatacagttttggatcaaaggctctattgctgctatagttaaatggtgccagtccttaagaggaacttatgatgtagttgcagcaaatatccttctaaatcctttactggagatggttgaggacatagttggttatgcaaaatctggtggaataattgttgtttctggaatattggaggagcatttcattttaccttcaatcaccccaaaacgccattcatacatgaagtgtgaaccttgcatagaggctttgcttaggagctctaaattggtttactctaacatcactggaaaattatccgtatgtacacagtgtgaccaaaaagatttagctcacactatacaggttttaagtggtgaagctattgatactgccaaggctcttgctttgaaagaattgaaataa

SEQ ID NO: 36750 - DNA, 237 bp, Zea mays
  Peptide Sequence Number=SeqID_80125
atggcaagacatgggcccgagcccagcagcaacaaccgtcacgtcgacaccgatgctgcctctcgtgtcgtcaacactggcgctgcctaccgaagcatcaactccggcgctgcattccacaacaccgactccgtcgccgcctcccgcggccttgaccatgcagtagcaccgctgggtgcacgtgctcgtggacaagctttgttattaactctactaggtcataaaggtggtggttaa

SEQ ID NO: 36751 - DNA, 231 bp, Zea mays
  Peptide Sequence Number=SeqID_80126
atgccgaagctcccctgcgcacagcttcggctctacgccaaccttcatattctttgtccttctttatattgtggttccgatccgagtctgaagggtccgaaccccaggattatgacggctggggagcaccgggaggataaggaaggagaatgttttgtccggtttgggcatggtgatggccttgttccttccggtataatcgctaagagaaggatatcgctgatcgggtaa

SEQ ID NO: 36752 - DNA, 231 bp, Zea mays
  Peptide Sequence Number=SeqID_80127
atggcacacgactgcgagattcatagctcaacaattgtcagcgtcggcaccggtgctgatggggaggcgtcgctggtgtttttactgaacaggagattcatatttggttctgatgcaagatccttgtttgtcaccatgttccttattgttgcttcagtatcaatcttctgtccattcgttgcgaacaaattgatggataagttctcttatgctctaagatgcttgttatga

SEQ ID NO: 36753 - DNA, 444 bp, Zea mays
  Peptide Sequence Number=SeqID_80128
atgaagcacaacgagttcactacaagaacggagctcaaatcactaacacggttgatcaagtgcgcggagacggagtgtggaagacttagaatgctcaaagtatgcttgggtgactcctccatgcgcctaggggtcccttttatagccccaaggcagctaggagccgttggaggcattcttggaaggcaaatcttgccttctgtcgggtggcgcaccggacagtccggtgcaccaccggacagccactgttcatgtctagtgcgcgatttccttccattcctggcacagccgaccgttgcaactccgggctggttggcgcaccggacactgtccggtgcacatcggatagtccggtgcccccagccgaccgttggtgcgggccacgcgttgcccgcggattgcgcggccgactgttgcgctggcggccgttggctcaccggatag

SEQ ID NO: 36754 - DNA, 309 bp, Zea mays
  Peptide Sequence Number=SeqID_80129
atggaggtgattgaggatccttcagcctcagaggtggctgttgcagaaaacccagcccccaagggtgatgctagcggttacccagcccccgagggtgtcgccggtaatgatccggctctggtgggtagcacaaactgcaacccagccctcgagggtgttgccggtaacctagctcttttcgttccgtcattcctcctgatatggcccgacggtattctgagcttgaggagaaacatcttcaacatcaagccgactcaacccggtgatactctgagcttgaggagaagtattcccaaggaggagaaataa

SEQ ID NO: 36755 - DNA, 108 bp, Zea mays
  Peptide Sequence Number=SeqID_80130
atggcgcccaagcggaagaaccagaattctgctgcggtggtcattcctcccatcaaccccaacagccagttgcccttcgcaggtttcgcctatccacccctcctctag

SEQ ID NO: 36756 - DNA, 117 bp, Zea mays
  Peptide Sequence Number=SeqID_80131
agacattatggtacaggtggctatgagatcgatggttctggttatgactatggtgctggcgaagatgaagctgtggaaggagacttccaggagttccaagactacgacgagttctag

SEQ ID NO: 36757 - DNA, 89 bp, Zea mays
  Peptide Sequence Number=SeqID_80132
atgacgcatcgggagccgagaagggtgggtgccagactgccagtggcgaaagagcgcagtgaagatgagagggggagaagactgggcac

SEQ ID NO: 36758 - DNA, 1053 bp, Zea mays
  Peptide Sequence Number=SeqID_80133
atggagcgacctcttgccctcgtgttgccgcgcgcggccagcgagcaccctcggtcgtgcttcttcccgcctccccgggtcgcgcgcagcagcttggcccagaaagctctggcggccgccgccgtcgccctcctctactccctcctcgccagcaggaacgccggcacggcgtcggcttccccgacgacccgctcgtgccggatcagcagcgacaccggcgccgcgcgccgcctcgtctcgtggcctgggctggcgcactccgccgccgccgtgctggagccctccgagacggacaggagggacaggcgctcccgcagacaggtcgcgcagacgcgcccctgctgccggtgccgcccaacctcgctgcttggggacctctcgtcgccggagccgccgccggcctcgagcgatagggatcgacagcgagcgcgcgagctcgtcccgcaacctgatctacgaggaccaccaggcgtccacattacgttggcgcacggttctgccgctgcgagatgcgcccccgcctacccctgcccccacgaggccgcgacgccccatccccacaccgcgcatcgtcgtctgctccccgcccatcccgccgccgcgtccgccccctcccccaccgaaggagacaccgcgcgatgcctccctccatcttccccatcctcggcgttgcccctcgcgctgtcctcggcgtcgcctaacgacccctccgtcgtcgcatcatgtggaagggggaggagccgcccgactcgcacccttgacccctccgctgtcgcatcgcctggaagggggaggagtcgcccgactcgcgccctcgaccccctccgtcgtccgctgtcgcatcgcatggtagggggaggagggctttcaccgtgcctccgccccggcgcccccggcctccaccgcgcgtctacgctcctgcctccccccctcactacacgttcacctcccctgcgacccgccccgctcgcccccaccgcggccgatgttgcgtgccatcaacgcctacgtccccttcctcagaagaaagtggtcggctggcatccctgcaag

SEQ ID NO: 36759 - DNA, 1050 bp, Zea mays
  Peptide Sequence Number=SeqID_80134
atggagccggattccgatcagccaaaggctgccgcccgtgggggccaccgcaagcacctggccatgctcgagcgcctctccaagcgctcctcctcctcggtcggcgccccaccctcggactcctctgatgcctcccccgtcgaagccttcctctcccgcttcgccgacgccaagctcgccgcggagtcagcactctccgcctgccgctcctcctcccccgaagacgacgcggccgcatctctggcggctgctgcggccgccatcgatgacatcgatcgcctcatcgccgaggcgtcccatgcactgcccccctacgagctccgcgccgccctcgccaccgccgccgacctccgcgcggcacacagtgttgccgcctctgagctccgtcccaagaagtccttctccttcaggaacaagagcaggaatccgaggaacccgcctcaggatcgtgtcaccgcatcaccaccgcagccacctcctccggagcagccgaaacctagtcttgacgcgatcctaccagggttcgggttccggggcaggaacggcgccaccttcgtgaaggatctgcgagtctccaacgacaaggatggggatttcacgctcgcggatttggtttcctgcgaggtctatctcaagggcaaatgccgggcgctgtacatccataagctgagagattgccgtgtgttcgtcggggctgttcttggttctgttcttatagaagacgtagatggctgcatatttgtgatggcagcacaccagatcaggatccatgaggcgagggtgacggatttctacttgcgggtgaggagcaggcctatcattgaggactgcagtggtgtgagatttgcaccatatgttttgaattatgaagggattggagaagatttgaaggactccggacttgaggaggagactggtaattgggctaatgtggatgacttcaagtggctcaaggcagtgcagtcaccaaattggcggttagttccagaggaagaacggttgcaaactgtgaacatttcggagcttcataaacaggaagatgatagctga

SEQ ID NO: 36760 - DNA, 273 bp, Zea mays
  Peptide Sequence Number=SeqID_80135
atggactatatgatgtttgaggttgctgaattggatggagcaacaatgatttgtcacactaacaacaaaatgaaagttaccaccacctcgtttatcattctacttcttttatctctccctgcatgccttcacctccgcgccaccccattctcggcagagggcgtaggagcaggcgcctcctccccgtattcgtctgacatcagcaccgacaccgactcgcgcagtgattatcttagtgatgaggagtccaggcctgagatattgggcaactaa

SEQ ID NO: 36761 - DNA, 690 bp, Zea mays
  Peptide Sequence Number=SeqID_80136
gcgccccctgcaccaccactgggcgccccagcttctggagtagctgctggaggagacccagacgacggaggtggcgacgacagctcgagccacgacaccgacttctctgctaaccatgagctggaaggatggtttgctcaacccatcactcgcgacgctgctcgcgggtgtcacttccacgatgcgctcgacaccctgctacgtcgggcacttaaccggcatacctggtccatcgagtatcgctgtgtggtctaccagcatagtcgcggggtctacccggaccgctgggaggcaacctgcttggtgcgccgcccggagaacagtctccagggtgcggaggcctgctcagagcactattctatctctgagcgggactcagctgaggcagccatgcaagatgctgcacggcgaggcgtgattgtctcacctgtcggtgagggcaatcctaggttgagcagcacagtcaacctagccgccgtgctaaacacggagctggaccatgcactagacgagctgagtagggctcgtgctgagatcgccctgctgcgggctgagcgcgcggaacgtcgtcacctggacgatggctcccccgctcccgtcgggactcagcacctgtaccgctcacctcggcgtggacaccagtcttatggcaatcccgactgcaagaccaagatagctctagaaccatag

SEQ ID NO: 36762 - DNA, 582 bp, Zea mays
  Peptide Sequence Number=SeqID_80137
atgatgtgcaagcggccgatcacgccggtccgggcggcgcgggcgacggcggcggcggcgaagaggcacgccgatacccacgccgcgagcgccgcgaacgccatgtcgacgacggacacggtcatcgcccatggcattgacatgatgccctgcctcgctctgccgctgccgacgccggaccctggcagcgcagctcgatcgttttacgtggccctggaagcaaccgatctcgccgggaacacctgccgctgccgtgcatggaccaacaagataatggcgtggaccgagggttggtttgttttggggaaaaaaagagatcgggcgtctgggcatgccacggcagtgggtaagggaggatgtgagtatacttttttgggaggagggggaattattcatcaacaatatgacagaagtgagtattattatggtgggtttccagtgtacagtcaagattttaaagcaacatcaagatggtctttactcggcaaggatagaggaagaaaagatgatggagagaggtataggtggccaatgggccgtgctgggctagcacagcccgagctcgtcatggaccgtgtataa

SEQ ID NO: 36763 - DNA, 123 bp, Zea mays
  Peptide Sequence Number=SeqID_80138
atgggggctcctgctgtctgcgtgagcgtctcctccgacgatccttctctagctagcgaccgtgatgagtacgtgcaaagccatgctcagattgtccagaactggatatatccaattgtgtaa

SEQ ID NO: 36764 - DNA, 816 bp, Zea mays
  Peptide Sequence Number=SeqID_80139
atggagttgtttcctgcaagtgctgcaagaattctgtgtttgttgggaggccttggaaggggtgcaggcgtgcagctacagccaggaacgccagataagcacttctggcggctctcctctgggcagtactctgttaaatcaggttatgatgcaatcatgcaaggtctcaactctattgtcatcctgggagcccggacattatggaggcataggaatggttgcttatttgatggcaaccccctcggcttgccgctgccttatctatggctgggagtgatatctggtttcgggggaactagaaagacgctaatactgcgagagatacctgaaggtgacgtgagatcgttactttctgacagggaatcgttggcgccatgtgatgtagcagtatttgtttacgatagctgcgatgaatattcatggcaaagagctagagacttgcttgtgcaagtggctacacatggagaaaatactggctacgaagttccttgcttgatagttgctgcaaaagatgatcttgaccaatcttcacaagctctacaagaatcgactagagtgagccaagacatgggaattgaaacaccaattccgatcagcgtgaagctgagagatttgaacaacattttctgcagaatcgtgcatgctgcgcagcagcctcatttgagcattccagagactgaaactggaaaagcacgtcggcaatatcggcaacttctaaaccgttcgctaatggttgtctctgttggagctgctgttgcagttgttggattagctgcttatcgggtttatgcagctcggaagaactcgtcctcttga

SEQ ID NO: 36765 - DNA, 498 bp, Zea mays
  Peptide Sequence Number=SeqID_80140
atgtgccgcctcagcatttattgtgccatgtccactccgctggcagacgatgtaccacctcagcatttattgtgccatgtccactccgctgacgggcggcaaccaggccactctgcgagcggcatgcctgtccattccattggctcgggggagcaggcgcgatgtgcgctaggggaagcgacgtcgggtccggcaatccggcttgtcctcctcttggccccaccctcctcgcccctcaccacccccgtgggctcgtcatctctctcccacatgaggacgacgtcgtcgaatccggctgccatgaattggcggtcgagtcacgcccagccgtggtcgagcaggttgccaaagcgttcggtgccatgggggggtaacagacgtggcagtggaggtggaggcggaggggtcatcgtcgtctttgtcggaggcgagactgatgttgtggaggcgatggatgatgcgatcgatggacgtggtcgaggatgggacgggggctag

SEQ ID NO: 36766 - DNA, 450 bp, Zea mays
  Peptide Sequence Number=SeqID_80141
atgagccacgattcgcttgagaccccgctcgacggtcgctcaaaactctgcctcgcccaagcctgtcctcaggcgagggtagcactcgaggaaatcctcgtcttacccaaggtcccctcttcacggagtggcggtttccgcctcgcccaagcccgtctcgaacaagaggacaaccctgagcccagcctcagtcaaaggtcatgggaaccacgaagacatgagcatttaatgcaaatacctaccccacgtgacaccgcagtaaaaaaagggagcgatgggaccgcgatcccatctactttcaccaactatgatgacacacgcccgggaataacgggcactgctcccccactccgtccgttgtactcaaacaactccggatgggacgtgcttatgacagagcatggtctcatcctcgagaggaaactccgcctcgcccgagctcggctttga

SEQ ID NO: 36767 - DNA, 297 bp, Zea mays
  Peptide Sequence Number=SeqID_80142
atggaggagagagcccgtaccttcgaagacgaagaagacagggggagaggttccttcgcgacggggctgcggcgaagaggttgcgcgaaccctagaaatgacgggaatgagacgccgctgagggaaacagacgggggatggagaggattcgcggatggaggtaggccgtacctgcgagacgacggcggtggcgcgttgggtgtatctgttagtgagaagttgttcataggaggtgacttcaatgggcttgtaggtacaagtgcaggttttgagggtgttcgtggaggttttggatga

SEQ ID NO: 36768 - DNA, 405 bp, Zea mays
  Peptide Sequence Number=SeqID_80143
atgtgggagaagatggtaacctgcattcgaaaggtggccccagagggaggatgggagaatgatgaaactgttgaagaggcagcagctcgagaagctatagaagaagctggagttcgaggtgatatagtgcattttctggggctctatgacttcaaaagcaagacgcatcaagatgcgtgctgccctgagggtatgtgcagagctgcagtgtttgcgctgcatgtaaaggaagagctggcctcatggcctgagcagagcacccgacagaggacctggctcacggtccctgaagctgcatcaagttgccgataccagtggatgcaagaggccttgctgacaggcttctctgactggcacgacaagtggagcagaggcggcggcggcacaaactgtgacccggcctaa

SEQ ID NO: 36769 - DNA, 462 bp, Zea mays
  Peptide Sequence Number=SeqID_80144
atggcggctacggcggcagaagagcgtggagagctcaaaggcgaaagggtgcagcaaaccagcccctggcacgggggcctgagcccacgagtcatactccttgggcgtcagtctctgagtgcgaaaaagaagacaaagaaggtgaaatttcaaaaccaaggcaacggtatagaggcatcctgcgcgtggcccgatgaaaccatcaagtgcggggtcacgggtcagtcagccacgggggcagacgtgacagttggcgtgaccgaaggcgaactggcagtgattacgtcagcaaacgcacagaagcagcgcgccaatcgccagtcaagatttggccccacctgcaggctcgtatcctcccctgaggtgggcctgggggccactatcagtaccccaaaacaggggtaccccttactacagtgtgaaggcacggtgcccatgcggctatctctagtcgcgtggtaa

SEQ ID NO: 36770 - DNA, 630 bp, Zea mays
  Peptide Sequence Number=SeqID_80145
atgggtcagtcagccgcagggacatgcgtggcagttggcatgaccgaaggcgtactggcagtaattacgtcagcaagtgcacggaagcagcgcgccaatcgccaatcaagctttggccccacctacaggctcgtatcctccactgaggtgggctcgggggccactgtcagtaccctgaaacaggggtaccccttactactatatgaaggcacggtgcccgcgcggctacctctagtcgcgtggcaaacaacacccgaccccaccacgtggacggctcccaggtcgccacgtggccaaagaagacgatatactccagggtatcaacagtgggtccggaccccaatgggaaagtatcggacccttgtacgaacggaccagacctccggggtccgagccactcacgacggggtcccgaggttctgggacaaagagtacacgggccttaatcaaggccaagcgggggtccggagccgacacgtgtcccgaccataccgcatacgcctctactccccgcttaggcggagacctgatgctgccacgtggctagctgcccgtgatgtaagccagcgggcggagcctgacgtaaggcctctggaccgcgcgacctctgcatttattgcggataagtga

SEQ ID NO: 36771 - DNA, 1068 bp, Zea mays
  Peptide Sequence Number=SeqID_80146
atgtctctaataacggggcgtgtatcaacgatagaagaacgactcggggtgacaatcaccatcataatcctgcaacttgtctttctcaagtttgactgcaagatattgcttctaattgattctccatctaggatctgggacatcaacactatcagttaccttgtcacgattatatgtttccttgtcacgagcaattgcgagaggcagcacgccttatccgcaataaatgcagaggacgcgcaacctagaggcctttacgtcaggctccgcctgctggcttatgtcaagggtagctggccacgtggcagcatcgggtctccgcctgagcggggagtagaggcgtatgcggtatggtccggacacgtgtcggctccggacccccgcttggccttgattaaggtccgggtactctttgtcctagaatcccgggaccctgccgtgagtggcccaaaccccacacagaggggtccgggactcatcccaggggtttggttcgtgcccgtgggggtcctggaccttacccggaggtccggatgcctctataccgttgccttggttttgaaatttcaccttctttgtcttctacggcggccccgaggaggcgcggtactggcgcgagcggcggttcgacttctctgcacccaggaaccggcgcccaaggaggatgactcatgggcccaggcccctgcgtcagagactgggccgttggtttcggcagaggtgaagaggcacactaccgcgggcgacggcttgttcctcacgcggtggttcacctttttcgcactcggagacaaacgcccaaggagtatgactcatggggctggggcccgtgccagagactgggacgttggtttcggtagaggtgaagaggcgcactaccgcgggcggcggcttgctcctcatgcggcggttcgcctttttcgcactcggagaccgacgcccaaggagtatgactcgtgggcccggccccccgtgccaggggctggtctgctgctttcggcggagatgaagaggcacggcaattcactcctcgcgtggcggttcacctttttcgcactcagagactga

SEQ ID NO: 36772 - DNA, 297 bp, Zea mays
  Peptide Sequence Number=SeqID_80147
atgccggtaatagaactggtgctgaacggtaatatcagtgagatgcatgcttactatcagatggacgatggaatgtttagtacgaaaagcttgccttttcttgctatggggtaccccttactactgtatgaagacacggtgcccgcgcggctacctctagtcgtgtggcaaacaacactcgacccaccacgtggacggctcccaggtcgccacgtggccagagaagacgatatactccagggtatcaacagtgggtctggagccccatgggaaagtatcggacccatgtacgaatga

SEQ ID NO: 36773 - DNA, 576 bp, Zea mays
  Peptide Sequence Number=SeqID_80148
atggccttgctagacccccccgagtgcttccagtccgaggtggcactcaacttggtgcgcaacttgctcggatggggtgcgccggcgttcgccggaaggatccacgtcggcgcctctcccctcggcgatctcgccgctgggaagttcgtgctcttcatctccaacctcccctgcgggttggtgctgccgatttcgtctttcttcgtgctgctactggaggagctcggcctccaacctcagcatttcacgccccgcttcatcctccaggcggccatcatcaccttcctctgcgagatgtccgtgggggcgacgcttcttccgccagcattcggacgaaagggtgttgtgcagcgaccttccgggggtggaaagcgagctgagctgcggctccatctttcgcgacctgcaggatttggcctgggaagccaagccgtgtgcctggaccccctgaatcatagttccagatacgaggacacccatcacagagtggtggagcgtgtaggcttacggtacgggaccaggctaagcggcaacacggctccggaccacccaagaggacgtgcgtccattctctag

SEQ ID NO: 36774 - DNA, 195 bp, Zea mays
  Peptide Sequence Number=SeqID_80149
atggcgcgcgtgttgggggggcttccagttcagccgcccttgagcctttgtttttctggttccgggagggaggaggagggctccctgcagtgcagagaccacgactttcttcgtgtttgcagcactggccactggagcaccgctaccagctggtcacgccatcaagtttatgtattaaaagccctgggctcctaa

SEQ ID NO: 36775 - DNA, 786 bp, Zea mays
  Peptide Sequence Number=SeqID_80150
atgtccggtgcaccagaggactccaactcgaactcgccaccttcgggaatttccagaggccactccgctataattcaccggactgtccggtgtacaccggacagtgtccggtgctccaagggaggtcgtcctcaggaactcgccagcctcgggttttcactccagccgctccgctataattcaccggactgtccggtgtgcaccggactgtccggtgcatctgcggggcaacggctacttcaggcgccaacggctacctgcggcgcatttattgcgcgccagcgcgcgcagagatcaggcacgcccatgctggcgcaccggacactctacagtacatgtccggtgcgccaccggacatcaaggcgggcccagaagtcagaactccaacggtcgatttccaacggcactggtgacgtggcgggggcaccggactgtccgtccaagattcccttggaggagcagtccctagcagcagcagcctcccgagctctacacctcgtcctggcagagttctggctcgcccttcttgttgacgacgtccttcctctagtgatccaacagcgcctccaaggaactcatggtctgaccagccttgacaccgaagacagagctaacagccatcactccgccactgctgaagcaggacgccgtgcggtgcactcaataaagctggagtccatgggaaaatggccaacgccctgtgggaggaaaccagggacaggcatcgaggagccgccgccccgcgcggttgacatagcgccgacgtccgagaccgccatagcctag

SEQ ID NO: 36776 - DNA, 141 bp, Zea mays
  Peptide Sequence Number=SeqID_80151
atgggccatggcccatggacagatggttttcgtggtctgcttgtggctcgtactttcagtgggcagtttgttgcaagtgatgatcagactttcatggcagggttgttgcaagtgatgaagaactggcaccatggaacatga

SEQ ID NO: 36777 - DNA, 144 bp, Zea mays
  Peptide Sequence Number=SeqID_80152
atggacactgcgcgcgggccgcgggccgtggcgtgcaaaggagatgcgatcggggccggagcgggcagccgcgaggaaggagtcgcctccctcgcctgtggtgggctagcttgtgactacgagaaaactgttgtgaactactaa

SEQ ID NO: 36778 - DNA, 1074 bp, Zea mays
  Peptide Sequence Number=SeqID_80153
atggagcaagcaacaggtgtaagtggtcctgaacacataattgatattccaagggaaattggtcctcctgcttcggtttctcgtagtgctggtagagagaaccatgaagaatcgaatcctgtggacaggccttcaacaagagctctagtacctgccttgcaggcaccatcagcaataggtgctgtacctattacagggcatacttcaggcactaggagaaatgacaactatgttcgtcggcacagaagcccattgaattctggactgtggatttcaattgaagttattgttaactttagccagattgttgctgccattgttgttctttgtgtgtcaagaaaggaacacccacaagctccattacttgagtgggtcataggttacactgttggttgttttgcaacgttaccccatctctattggcgctatatacaccgtaatattgtaaatggtgagcatgagtcatcacatacacctcaagggtccgctcataacaactcaaatgaagcgactcatgctgcaagtgcatcagaacgccgcagaaatgctgcccgaaatgctgtgcttgctaatcctaggatcaatgcgctgtttgaccacttcaagatggccctggattgtttctttgccgtctggtttgttgttggaaacgtgtggatatttggtggccgttcttctgctgctgatgcaccgaacttgtacagcttctttatcctgcagctgactttctacttcccaccaggttgtgcattgtgttcctcacttttagttgcattgggcagtgaaactgaaggtcaggaaggagggatattggctgcaggaactgacaaggagcgatcactctctgctgaagacgcagtttgctgcatctgtcttgcaaaatatgcgcacaatgatgagctccgtgaacttccatgtgcacactgtttccacaaggactgtgttgataaatggctcaagataaatgcactttgccctctgtgcaaatctgagatagtgagctcgtctggtacttctgatgcccgccaatcagaccagaacaccgttcctgtgcaggagatcgaaatgcattag

SEQ ID NO: 36779 - DNA, 1356 bp, Zea mays
  Peptide Sequence Number=SeqID_80154
atggtctccggctactgcatcgacgtgttcgaggcggccatcaaggcactgccctacccggtgtactaccagtacgcgccgtactacggcatcgggaacgcgagttcgtcttcttacgaccagatggtagagctgattcccgaggagaaagccgatgcggtcgtcggcgacgtgtcgatcacggtggtcagaatgggggatgcggacttcaccatgccgtacaccgagtcgggatggtcgatggtcgtggcggtgcaggcgcagacggccacgggcatgttcttcttcctcaagccgctcacgcccgcgctctggctcgtcagcctcgccgccttcatcttcaccggcttcgtcatctgggtgatcgagcaccggatcaacccggagttccgaggcacgccactgcagcagttcggcatcatcttccactacgccttctccacccttgtcttcgcgcacagggagaatgtggtgagcaacctgtccaagttcctgatggtcatatgggtgttcgccgtcctgatcctgacgtcgagctacacggccagcttgacatcgatgctgacggtccagaagctccggccggcagtgacggacgtgaatgatctcatcgacaacggtgactacgtcgggtaccaggagggttccttcgtccacggcgagcttctgcagatgaaattcgacccgagcaggctgaggagctacagcacgccggccgagtacgcggacgcgctgtccaagggatcggccggcggcggggtcgctgcggtgttcgacgaggtcccgtacctcaaggtctttctgtcgcagtactgcgacggctacaccatgtccggccccgtctacaagggcacgggcctcgggttcgcgtttgcgagaggctctcccatggcgacggaggtgtcgcgcgccatcgtggggctgacggaaggcgacgacatggacctcatcgagaggaagtggttcggcgtgcccgggtcatgcgtcgacggcgtcgacgcggacaacgccagcctcaccctgtggaacttcagtgggctgttcctcatcaccgccgtggcggccacgctcgtgctcctcgcctacctcgtcacgttcatctaccgggaacggcacgaggtccgggcggcggcggagcccgggtccgggagcgtgtcgctcaagcggttccgcgcgtggctgcagcactacgaccgcaaggacatgtctgcgccccacttcaggcagcagcagggatggagcgactcgccgtcgacgaacggcggcagcagccatgggaggaagagggagggggcggagcaggaggatgcccacagcccacgcgcgatttcggtgggccccgggcgtcgcctctga

SEQ ID NO: 36780 - DNA, 543 bp, Zea mays
  Peptide Sequence Number=SeqID_80155
atgaagccactggtggcgcgcctgctcctctgctactccctgctctgcctggcgcccgcggcagccccgttacgcctgcagcacgatcatgtccggggccacggccacggccatgcccacccgcctccgtacgcgcgtaacgcgacggcgtacggcgtctcggcggcgctgtgcccgggctgcggcgcgtgggcggacgcgctggagttcctctactaccacaacctgcgccgcggggactgcgcgctgcgccactccttccccgacggccagttcgcgctcggggagaacgtcttctggggcgggcccggcggcgcgtggcggccccgggacgccgtcgcggactgggccgccgagggcgccgactactcgtacgccgacaacgcgtgcgcgccaggccgggagtgcgcgcactacacccagatcgtgtggcgacgcaccaccgccgtcggctgcgcccgggtggcgtgcgacggcggcggggtgttcatcacctgcaactactacccgcccggcaacgtcgtcggcgagaggccgtactaa

SEQ ID NO: 36781 - DNA, 72 bp, Zea mays
  Peptide Sequence Number=SeqID_80156
atggcgatggtgcggggatcagtggttcgcttgtccatgccgcccgtgttcggtacgaaacacggcaggtga

SEQ ID NO: 36782 - DNA, 63 bp, Zea mays
  Peptide Sequence Number=SeqID_80157
atggagtgggacaacgattctgacgtcggtgttgacgaggaggaagaagaggtggctccataa

SEQ ID NO: 36783 - DNA, 1119 bp, Zea mays
  Peptide Sequence Number=SeqID_80158
atgggcaccgaacatggtgtctccggtgagctgcaagcggacccggtcccctggcgacggggtccgagggctcgatgcctccctccgatgggactccgttacaagatcgttcccgctggtctcggaaatgtcctagggctggcgccgctgggtcgcctcgagtcgcggcataggctccgcaaccggagaggcgcgacggtggcacgagtggcggtgcggttgctggcgcgccgattgcttgacgcgtgggtctgggcttccaagctggcgtgtcagaagtcggagaagcgcatccacctggcgcggttgcatgccgcctgcatggctgcccgccccttccgcccgttggtctgggcaaaagtgggggtcgcttgtaaccgctgggcggtcgtgcgcaccacgcgcggcggtttggcttcttctgccctgagccgggacgcaactccatgggagttggtacctctcagccatcgttcggcttcaaggattttcatcatgcagcccggctgctcccctccaccggcggtcacccgagatgatgacctccggcttgatggtgggggaaagcgagccgggctgcggcctctgcccctccctcagcctcaaggattttcatcaccagggctggggaggggagtgcgccgagttgaggtcggcccccgcgtgggcggcggcccgctccttcactcagtgatcggagggaagggcggccgtcgtccgtggcgctggcagctgcagcgtgccaggctttcgggcgcgagtggcttcggagccactcgcggtgccggcatccgccatggcagcttgaagagcctgaggtcagcgttgccgctgcttggccccccggagcagaagtcgtcgtcgtcgcccctgctggagcaggtgacgcaccaagtctcgcctgttgattatctgaaccgctttgccaagcatgagtcgccccgtgtcaaggtgacgagtgagtatgaacagaggcggagttggctcgagaatgggaacctggttggccggagcctggccgtgttgtccgtcagcagagccgacgccaaagtcgatcagccgaggcctcgggtcgggctggcgcccttggaagccggctggccgaggccccaggggtaa

SEQ ID NO: 36784 - DNA, 240 bp, Zea mays
  Peptide Sequence Number=SeqID_80159
atggttgccttcggagggatcccccagctcgatgtggaaacattcgcggcttgggccgcagctctcgtcgccaaggctgcggaagaagaagagaagaagaaagttggctgtgtacagccaaggggctggttcggtctggggcaccggactgtccggtggtgcaccggacagtgtccggtgcgccaggctgcctcggccgaagaggccgctctcgggaatttgctgacggcgtacggctaa

SEQ ID NO: 36785 - DNA, 486 bp, Zea mays
  Peptide Sequence Number=SeqID_80160
atgggcaagagtaacaaacgcaagcgtgagccgactcctccgtcggaggacttcggcgactcggagtactcggaggaggaattctcctccgagtccgaggggtcttcggctcccgtctctcccccggcgtcgtctgatgattcaaacgactcccaggggattgccgcggaagtctggacgtacatccgggccgtcgagcgctctgggctcgagggctcggatgagtctgagttctcctcggacgaggaggactcggacggcggcgaggacgaagatgacgacgacgacgacggcgacgacgacgacgacggcgacgacgacgacggtggcgacggtgacggtgacggcagcggcagcggcgggggcagcggcggcaaggacagcaccagaggcggcagcagcacgggcaacaccagaggcggcagcagcaagggcagcaccaggggcggcggcggcaggggcggcagcagcaaggccagtggctaa

SEQ ID NO: 36786 - DNA, 471 bp, Zea mays
  Peptide Sequence Number=SeqID_80161
atgactgggcactttttgaagcggtatctggctcaagaatatcccataagagttgtgcttttagccgcctttgctttccgtgccctagttcttgcattcccgcatccgaatcttctctgccactcgcctcctactctgctcactggtaaaaatcgagatggcgcccaagaggaaaactgcaagctcgtctgctgcggtgatccctcccatcgaccccaacagccagttgcctttctgaaagggaaatgtgcccttgggccatttctaagtattttggtgattgagtgccaacacaagtgcttaagtgtgaatctatacccatggatggacaaagtgcaaatcaagagtaaaggagaaatcgagtcagagaaaagttggctgtgtacagccaaaaggttgttcggtctggagcaccggactgtccggtggtgcaccggacagtgtccggtgcgccaggctgactcggcgtga

SEQ ID NO: 36787 - DNA, 1581 bp, Zea mays
  Peptide Sequence Number=SeqID_80162
atgggctggagagcaggagaaacagcgtctagggtttaccgagagcaggaatgccactccggccggatctccagccagataacacagcagggccacggggtccgcgcaagatcaacggccaccatcatttctcccaatcccgccctgaaacacggcggcgccgccgcacttcaacggcggagaagtccggcgagcaggcaacacggcgcaaaagcaggccaaaacccatacgggtgtgtacaaaacgcgtacagggtcgaggcggacaggatagggaggttctcaccgagaattttgccgctacgagctatgtccacagctgagcgtattgccgcggcggaggagaaggtgcgacgaggaattccggcgctccatgccaatagcgctgcaattccgggctttgggcgacttcagtgcaacccggagaccagccaggacgcatttccgagcccttcccgccgcgaggtgaggacacgccaggacggcccgagaaagggggaagaaaagatcggattcacgtcccgggagcttcggcggaggttgttccgaagccgcgcctgtgcccggattccgtccgtttcggtggagaggaaggagctgacgctccggtcccacccaacagcagctggagaggtcaacattcctctgataccacttctgtcacacccgggttttaggggtccaaagcccgggcgcgaacataatcaccagaggtggtaccctttacccacaagtcatgttacccatctgtcaagggatcgcgacttcccatacacctctaccgaggaggcgaggcaggggttcttgcctgaccgccatcgtagcaaaatcaaccaaggacctccctacactgaccactcccctactgcccttgcccctttcggcgcaagatcaacggccaccatcgtttctcccaatcccgccctgaaacacggcggcgccgacgcacttcaacggcggagaagtccggcgagcaggcaacacggcgcaaaagcaggccaaaacccatatgggtgtgtacaaaacgcgtacagggtcgaggcggacatgatagggacgttctcaccgagaatttcgccgctacgagctatgtccacagctgagcgtattgccgcggcggaggagaaggtgcgacgaggaattccggcgctccatgccaatagcgctgcaattccgggctttgggcgacttcagtgcaatccagagaccagcccggacgcatttccgagcccttcccgccgcgaggtgaggacacgccaggccggcccgagaaagggggaagaaaagatcggattcacggcccgggagcttcggcggaggttgttccgaagccgcgcctgtgcccggattccgtccgtttcggtggagaggaaggagctgacgctccggtcccacccgacagcagctggagagggtgcgcgtgttccagagaatggcaacgtgggcccacaccacagagaatacgcacgcgcgacgcgcgaggggagtcccaggtcgagcgactggaacgcgggtcccccacgccagtcacgagcgccgcgcggggagatgatgggccaccgtggtggctgggccgaatag

SEQ ID NO: 36788 - DNA, 2298 bp, Zea mays
  Peptide Sequence Number=SeqID_80163
atggcgtgcccagacattattccgccaggcccttccttgagaactatgccctatttcaaacctgcgccttcgttaagacaggaataccatgagtgtgcaacttgccatgcccctgcaaagactcgttgctccagatgcaagtctgttagatactgctctgggaagtgtcaaatagtacactggaggcaaggacataaggaaacatgccaaaaatggcttggtagtggttctagcagctttggtggatctagcactgaggctactgaacagatgccgttcttggctaacttgaattcacctcttccaggtggtgacattcacttgcgtgacatgaacttcgatactttatcagaaccatcctttcccacaactgatggttacaatctagatactgacccatttccggcagatagaagcaacatgaatagatcaaatcaaggtattcatatgagcgaaaatggtgctgttggtgtatcttttgaaaagaataattataatgctgctgatgaaatacactcttcggagattttatctggaaacaaggtgtcaaacaactattttggttcagatgcaatgagtggtaatggggatgcaacttatcctgccaaaagtaatgcacagcagcctagcagttgtgctcctgacgtgagaaaacaatcaaaagcaagcatcacagtttatcagcctgacatgagtgtctatttaacttctgacatggtcagttcttgtgagggatcatatgtttctgccggtgagccactgcaaaggagcttgtcatctggaagaactattgggaaagtaactgtggtgaataaaaggccttcttacccatcaagtaaggtggtctcagcacaaaagtcacaggataaggtgtctacatcatatcaaaatgatgcccatgagaagaatccttgcaacaaaaatgaccaaagatctacccccacatgtgaatcaagtcaatcaacaagcagcaatctactgaagtctggaacatccaaggttgaagttttaaagaagccttcaaaatttctcaaaaccagccttgtggcattgatcaatgataataagaggaacaaggtattgttcccatatgaagatattgtcaagttttttcagtatgaagcacggggtgtttcccctagaggtcttttcaattgtggaaacaggcatcttgtgatgtctatgcaagcagcttgcttggatgggctgggtggtgagaagcacgttgaaccaagtttgcaggaaacaacactgatacaacagatgtttggtggccgtcttaaatccaaggttaagtgcctcagatgctatcacgagtctgaaagatatgagaatataatggatcttactttggagattcatggctgggtagagtccttgcaagatgctttgacacagttcactgctcctgaagatttagatggtgataatatgtataaatgtggaaggtgttctgcctatgttaaagctaggaagcaactgagcgtgcatgaggtgccaaacattttaacagttgttcttaaaagatttcagtcaggaaaatatggcaagatcaacaaatgtgttactttccctgatatgttggacatggttcccttcgtgactgggtctggtgacaatccccctctttatttcttgtacgccgtggttgtacatgtcgatacagaaaatgcatcattctctgggcactatatatcatacgtcaaagatatgcagggtacatggttgagaattgatgattcagaggtccaggttgtatcagtgaatcaggttatgtcagaaggtgcatacatgcttttctacttgaggtcttttccccgaccaccaaggatatacatcgagaaggggctgccggttacatccgcaaagcggcacacgtcgaaatcttccaagggctctaaacacgatcgcaagcagacagagttactctttcctgcaaacgatcaggcatatggcgtctatgatttcagacccgatggcgaaggctatgcccaagatcagcatgcagagctgaggtccagagctttccatcacgccgacgatgcctttgcagactcggttagcgcggacttctcggaagcgacatcaagtgaatggtcgctgtttaccagctccgacgagtcctcgttcaccaccgagagcacaagggattcgttcagcgtcgtggactacggagacaacgccggcctggatccgatttcctccatattcgggccaagctatgctccggagcacggtgctcccggcagtttcgtctcgcgcacaaggttctcaccttccagtccacagacaagatga

SEQ ID NO: 36789 - DNA, 543 bp, Zea mays
  Peptide Sequence Number=SeqID_80164
atggggagcgccctcattgcttttgtcttgctgctgttgttggaggagcgcaacttcgcggaagttggtacctttcagccatcgctcggcttcaaggattttcatcaggcagcccggctgcatccccttgccgatggtcacccaagacggtcggtgctcgcccgtccgggaggacttgagtggggatctgctggcgggcaggcggctaccgtcgtcggtgctgaggtggtggcggctggagaagtcctcgtcgccgacgagatcgccgctgccatccgcgctccgggcctcggctctttggctttgatagcttgtcctcgctcctcgagtggggacgtgggtgagggccttatcgcagcagcgtctgccctgaggtcatcgctgctgctttttggccgcccggagcggaggtcgttgtcgctgctgccggagtgggcgacggcgagccacctaggattttgtcgtcccgcaggccctccaatgtggggggttattcgtacctgcgggagtggaaccggagttccgtttgtaatggcaccttga

SEQ ID NO: 36790 - DNA, 175 bp, Zea mays
  Peptide Sequence Number=SeqID_80165
ccgtgctcacggttatgagcggccaagggagctccagagattagtgatacttgatcagagacattgtggtacaggtggcaatgagattgatggttctggttatgattatggtattggagaagatgaagctgtggaaggagacttccaggagttccaagattacgacgagttctag

SEQ ID NO: 36791 - DNA, 876 bp, Zea mays
  Peptide Sequence Number=SeqID_80166
atgacttctcacggatcctcggaaggagggaacacacattcccacacagacggacttgcacgagggggttttccccgcatcttgtgggaggtgctgcagggagccggttacacgacgcctcccctatacacggtacagctgttcgagaagcaccgggtgccccgctgtagggtgaggatgaccctggagcctcatcccttacagccaggctggcgtttgttggactccgagtcttttggataccgggctgaggacacgatcgaggccattgctctccacgagctgaccaccttctatggttttcaccccttggagttgtccactcaccccattggtttgttccccgcggagaaggaggacgacccaatgtggaaggatcgagtggaacatgccaaggatgtgtgggctctatacccagggcagactgctcacctcacggtacggtgcatgaatgccatgtatcgtctgcaagtgatgcgaggagaggcaatgtctcagctaatggcattgttggaggctaccaagatgaccctagacaacagagaggaactgatggtagacctatccactgagatggtggaaaaggacctacaggtggaacagatggccaaccagatccaggagcttgaggagctagtgggagccagggagaacaccattgaggttctcgaggatcagctaatcaacactcagcagcaacttgaggaagctaaccaacatttggatatgcaccatcaggagattcaggacatggagaccaacgagaatgttgacatcaagggaggagtggagccggagcccgcatctagcctagacactgctggctcagggagacccccttcccccgagtcaagcgttgcctcatttgtccattaa

SEQ ID NO: 36792 - DNA, 94 bp, Zea mays
  Peptide Sequence Number=SeqID_80167
atggaggaagaagaaaagcgatccaagcacaagagctcaaaagaacacgctcttgtattgaatgtgttggctgaaaacttgggatgccttgaag

SEQ ID NO: 36793 - DNA, 114 bp, Zea mays
  Peptide Sequence Number=SeqID_80168
atggggagtcatgatctccgggcagaacgagaatcacaactcatgggtaaatgctcaggaggagatgaaggcaacatggaggactttgagttccaggactacgacgagttctag

SEQ ID NO: 36794 - DNA, 888 bp, Zea mays
  Peptide Sequence Number=SeqID_80169
atggggttcaacaaagagagcaagggacaaccgaaggcacctctggtctggtacaccggactgtccggtgtacaccggacagtgtccggtgcaccaccggacagtgtccggtgcaccagaggactccaactcaaactcgccaccttcgggaatttccagaggcactccgctataatttaccggactgtctggtgtacaccggacagtgtccggtgctccaaggaagggcggcctcaggaactcgccagcttcgggaaactgcatcggctgctccgctataattcaccggacatgttcggtgtacaccgaactgtccggtttaactacggagcaacggctatttcggcgccaacggctacctgcagcgcatttattgcgcgccagagcacgcagaagtcaggcacgcgcgtagtggcgcacccggacactctacagtacatgtccgactcaattatattgctaacgctaacccggcttgtagttgtgtttatatttgtaaatttcagtttcgccctattcacccccccctctaggcgactatcaaccacgataaacggtggcggagctccctgggtgtgcgcacggtgcgaggcgagtgctgagggctgtgagtgcacgagtgggggaaaggagagcgagtggggcactgggcacctagaaatgggccggggtggggacgagcgtggcctcgacgtgcgtcatgggcgaggagtccacgacgacgcgcgggtcgtgcgtgggcagtttgggagggaagggtcagacagacgggacccatgggtcagtgagggaaggtgcgcgtgcgtagaggagatcggcgccgacaagtgggccccactgggcagcgagagggataagggggagagagcatgcgcggatcggcgctga

SEQ ID NO: 36795 - DNA, 1401 bp, Zea mays
  Peptide Sequence Number=SeqID_80170
atgggtgacccgagcgcctccgccgaccccgccgccgcgcgccaccacctctcgccacagctcgcggggcagccgccggtgccgcgctcgccggccccgctcgacctggcctccgccgccgcggcgtccgggcaccgccgcctctcgccgtcgctccggccgccggcgcacccgcaggcgcgcctcccgtcgccctacggccagatctcttcgccaggcgccgccgcgcaccacgcgctctcgctctcccagccgctcttcttctcgctcgactcgctcccgccgccgccgccgccgtacgctgatctgggcgccgcgcccgccgtgccggcgccctccccgccgccgtcgacctcggacccgccgccgccgctcggcctgccgcccaggaggtccggccaccgccgctcgcagagcgacatccccttcggcctcgcgcagctcagcccgccgctgcccccgccggcaccggtcaagcgcgaggtcgccactgcggccgagggcggcgacggcgatgacgccgccttcttcgacctcgtcaacgcctacatggacctggacggtctggacccgctcaactcctctgaggaccgccacgacgaccgcgacagccgcgccagcggcaccacgcgcgccgggagcgcggcggagagcagcgagaacgaggcggagagccagtccacgtcggcggacaggaaggacgggggcaagtcccgccattgtcgcagcctgtccatggacagcttcatgggcaagctcaacttcgccgcaggggatgagtctccaaagctgccgctgccgtctcctcgtgccagtggcagcctcactaggagcgggagcggctcactggaaggtggtgctgtcgcgctgtttgacatggagttctccaatggagagtttactgagtccgagaagaagaaaatcatggcgaatgagcggcttgctgagatagctttgacggatcctaagagggtcaagaggattctggcaaatcggcagtcagcagcaaggtcaaaggagcgcaagatgaggtacattcaggagcttgagcataaggtgcaagtgctgcagacagaggctacgacactctcagcacagttgacaatgctgcagagggactcagctggactggctactcagaacaacgagttgaaaattaggctgcaagccatggagcaacaagcacagctgagagatgccctgaatgaagcgttaacgggcgaggtccagcgtctgaaactcgcaactggggagatgaccgatgggcctatgccgaagggcctgcagcagcagatgaactcccagatgctgcagctccagcagctgcagatccagcagcaggcgcccccacaacagacgcagcagcaaggccagcgacaacagccgcagaagtcggcgtaa

SEQ ID NO: 36796 - DNA, 483 bp, Zea mays
  Peptide Sequence Number=SeqID_80171
atgaccaccagccttgtggtggggagaagcaagccgggctgcaggctctgccccgccctcagcttcaaggatgttcatcatcctcactgtggcgaagggcaagccgagccggtgttctacctcccgcatgggccggcaagccgcttcttccttcggcatttggggggagaaggacatcctccagccctgcggaggagacatcctccagctacgcgggggaaggcgaactgctgctgcctggacagggtgcagctgtccgtcctccacccgggcgacggtcgtgtcgtgcgcgggccggccacgcccaggtcctccttgcgccgtcggccgcaccagggggtcgcacaacacgtcgtacgctgcgagggcggtactcgtgttctgggacggtcccgttctcgttcttgcagcgaggacgggagtgaggacctgtcagtgcgctttggggcgaccgccgttcgccggcgcggcgttggtgggtag

SEQ ID NO: 36797 - DNA, 450 bp, Zea mays
  Peptide Sequence Number=SeqID_80172
atgaccattggtgagggactgcagccgggctgcatgatgaaaatccttgaagtcgagcgatggctgaagagcgccaaccaccgcgaggtcgcgctcctccaacaacagcaagaggagggcaacacggatgcgccccatctgggggctcagaagggcaagcgacacccttggcaggcgaagcgggcatcgtttcacctccaccatgatgaccacgtcaaaaaagggaccgcgaaaggggatatttcgaaaaggatccttctcaacgaaggaaacgggcccccgagccctcctactgatcaggggttcgaaggctggcccctcgaaagggttcaacagccgccccagagcactcgggctctgagcccgttactgatcaggggtccgaaggctggcccctcggaagggttcgacagccaccccagagcactcgggctccgcgcccattactga

SEQ ID NO: 36798 - DNA, 510 bp, Zea mays
  Peptide Sequence Number=SeqID_80173
atggaggtcgttgccgcgctgctggtgcagtggtcaccggcgagccacctggagtttgttatcccgcaggccctctggtgtggaggttgttcatacccgcgggagtggaaccggagtcccaacctttggccgctctgcgatgagctggagccagagacagtggtgtcggcgtggatggaggcggagttggctcgaaaagaggcttcgtcggcccgggagcaggtggcttcccaggccgaggaggtgcagcagcggcggctggagcttggccaggtggagatccttccgcccgtgtcgccgtccaaggctgggccagattccgccaaaggtggaaacgacgccgagagtgctgttgctccctctgccgatgacttgttcgtcgatagcagaatcgcttatctgagcgagagttacttttcgcggaaggtgatgagtgaggattctattatcgatatagtcgagaaggcacgaaagtcgttttctacccgagcgttaggacttgttcggtag

SEQ ID NO: 36799 - DNA, 264 bp, Zea mays
  Peptide Sequence Number=SeqID_80174
atgccggagcaaggagctgctcaggaggtagccccagatccagcacccgagtctgcaccagaggacctgccagccactgctctagaaggcaagccccgaaactcagctagtgcttttggcaaccaaaccccacagccaaacagctgcatgtctagaggttctctcgaggagatggttgctgggataacttggccgtccaccttgccaccgggttggactgttgagtgggaccctgcctcggctgaggaggagcatgaggagtga

SEQ ID NO: 36800 - DNA, 369 bp, Zea mays
  Peptide Sequence Number=SeqID_80175
atggtgaccactcgccgcatcaacccgggagccgctggagcttctggtattggtaaccaggaggctttcagagggaactatatcccaccaggtctaatggcaatgaagaacaatctctatgttgtggcaaaagggcataagagaaccttggagtctggaatatcacagcccagaaccatagtagtggctcaaccaagtttcaggccgatgctaccaggagcaagatttcgacctcctcttccgaagacgattcaacagcaaggatttaggggtcagaaggctttcaaaatggctttacctcatgcgaagactagaccaggaagttcaacgggaagtaccactcaagtgaaagggctgaaagtcgcctag

SEQ ID NO: 36801 - DNA, 987 bp, Zea mays
  Peptide Sequence Number=SeqID_80176
atgtccgcggagcagccactgcgttttcccgaggctggcgagttcctgaggcggctcttccttggagcaccggacactgtccggtgtacaccggacagtccggtgaattatagcggagcgcctctggaaattcccgaaggtggcaagtttgagttggagtcctctggtgcaccggacattgtccggtggtgcatcggacactgtccggtgtacaccggacagtccggtgcccccagaccagagttctattctcactcttttggttacgatgtcttttgtagatggcctgtattagatgcactgcacgccagtctagccacctggagaggctgcattgtcgtctgcacgcgaagcaggagcgtcgacgccaggagcaggagcaggagcagcaggactcttccccctcgcctcagcaggaggtggagtctaggaggcagccttcccctgcacctcagccagagatgtcccttgcaccaccatagggcatccccggctgctgaaggagaccctgacgaagacgatgacgacgatggtggcagttcgagccacagcatggagctctcggaggagcaggagccggagggatggattgctagacccatcactcgtgacgctgctcgcgagtgtcacttccaagacgctctcgacaccttgttgcatcaggccttcgacctacacacttggtccattgagtattgttatgtagtctatcagcatcgtcgcagcgggatagctaacggcctcgaccttaaatactaccctcgccgttcgaccaacagtgctggaggtgtgattgtctcgctcgttggtgatgagggcaatcccaggctgaacagcatggtcaacctagtcgtcttactcaacaccgagctagaccacacacttgacgagttgggcaaggctcaggtggagattgcggaactgcgtgctgagcgtgcagtgcgccactatcaagatggtggttcccccgctcctgtcgggatttag

SEQ ID NO: 36802 - DNA, 141 bp, Zea mays
  Peptide Sequence Number=SeqID_80177
atggagattgcgcccgagggagagcccaacgtcaggtgtgccttatcctctttgcccgagactggctcgggcaagacggatggagcgatggtaggacaaggtgacttcgggcaaggaggagatgggaggcatgagatgtga

SEQ ID NO: 36803 - DNA, 144 bp, Zea mays
  Peptide Sequence Number=SeqID_80178
atggtggagagcaggctgggcgtggacgcgcccaaggtggaggtgcgcttcgagaggcttaccgtggaggcggacgtccgcgtcggccgccgcgccgtcccgacgctgctcaacgccgccatcaacgccgcccaggaaagttag

SEQ ID NO: 36804 - DNA, 2304 bp, Zea mays
  Peptide Sequence Number=SeqID_80179
atgccttttcacggaggaagggtggtgcgaagtcctgccttcgcactgaatttgcgaaaccgtgacccggccgcctttgtgcgtgatgcggaggacttggcggtgcggctcgtggggcgttacgtgccgaggacggaaggccagcacagctttgatatccgcgggtcaaatgaacgtttgaacagggtcttcgaattaaatcaattgccgtacgacggctaccctggtcaagacgaagcggaccgccgtgggaagaagccggcggtggagactggaggcgaccctgcgctggcggccgccccctcctcaaaaaagagaaaattagtgatggacaaggatcgccaaggggcggcgcaaaaacgccaggcgactgtcagggttcacgaagctcggccgaaaaggcagcggggaactgcgaaggctgcggcctccggcggaggcaagccgccgctggcggcgaaggcgggcgcctctgcacctagcaaggcgccggaggcaacagcgggcaccgggggctccaagctgacgaaggtggtgccgccggccagcggagtggcggaggcttcgaaggcggcccgaacgttgccgccgccgggcaaacgcgttgccgacttcggcaccgagattaatgtggacgattatcttggggggtcggacgagggccagcttgccatagttgcgcctgccgtggcgatcgcgacggctgcgctagcgccgaaggcaaggggcgatacccttggcgccggaggcgaggtgtcggccctcgcgatgccgtactgcgtcgggggcccttacgggcagccctgtctgccgaagtcgagagacttcgggacacaacatgctgatgttgtccgtgaaaagtcggcctccgacagcaagtgccgcaaattggcggacagggtggccgccctggaaaaggagaaggctgacctccggcgccagctggcgggggagaggagggaggccaacgaagccatcgccaaagagcaggctgcgcagacggaggccaggctggcgcgggcggaaggcaatattgccaaggagctcgccggagagctgcaggggcggcttactgccctggagagccgcgcggagggggccgaggccgcgatgcgagtggaggccgaacggacgcgcacgcagctcatggctgcatatcgcgagctgggtgcacggaccggtgacttcgaggtgccggagcgagaggccgggcttcgctgtctggaatgggtgcaggaggagctgcaggagctccccactgtcttggaggggttaatgtcgttcacctccctggtcacctgcgaggcggcgatgaacgcgctctctcgcgaagggtgccggcactttgaggccctcgaccaggcagatgaggattttgggcgagatatctttgaggtcgaagaccccgtggtgaaggaatccgccggggccctctatgaccggatgtggggttcgtacggtcgtgaggtggtcagggagcgggccgaggctgcgagggctcaggcggagcgcggcgagcgggtggacgactttggagcactgaacagcgcgttgcctgacccggagacgacccctgcggaggccgcgactggagtcgccctgggaccgaccccggagactgcggaaaacgcaccaggcgcccccgcatctgctgcggccggcgaagacctgcccccaaaggtggccgaaggcgcgcctgatgcccccgcggcggctgtgccgagcgctgaagatcccgcggcggtggtggcggaggcagcggcggaggcctcggcggaggcttccgcagcggcagggccttcgcaggttcaagattttgggcctgcgcacgcaaccgctactactgagtttttggcggcttcgaccgcggaagatggaaatgaatatggtgggtctatatctgagttttttgattttactgactctgagagctcggttgagtggactgaggagtcgtcggaggaggacttggattattttgcggccttggacgtggctgcggcggaggctgcgccacacgctgtggacgcgccagacgtgccaggtcctagcaccgggcgccgacgacgaagggcggttgcaaagcgtaggttcgactgcgcccttaggcggcttctgcgcggagtctttacgatagacttcgggtttttcgcatttgttgtgctagtccggctgcacccttgggtgacttctgcgcggatagtcttcgcgatagacttcggattttttcgcacttgttgtgctaagtccggctgcacccttaggcgacttctgcgcggatttgtcgcacgcgagggtggctag

SEQ ID NO: 36805 - DNA, 90 bp, Zea mays
  Peptide Sequence Number=SeqID_80180
atggcgtgctgtggtgtgttttctgcttactgggctcaacttgccttgcctcctaggtttgagatgtttgagggatacatgtatacctga

SEQ ID NO: 36806 - DNA, 408 bp, Zea mays
  Peptide Sequence Number=SeqID_80181
atggtgcagcaatctggtgtcctcctcaactccatgaagggggttatggcaaaagtggccagatctattttgagcagaagctatactacactagggcccacgtttgggtcatatcaagatgagaagatgtcgcacgaggttccacccatctacgacaaccaaacatgggcattcattccagagggatttgtgtcaaggctagaatataggtcaaagtgtgaggtggagcacgcccaccacagcgaccagaacatgccactcatgataagaacaagactgaagatcatgagctactccaatagcaggagaaatatgtatattttgatgtactcaccatttctttttgtctccctggtatcacccatagatgctatggttaaagaggagttcgttgaagatgatggctag

SEQ ID NO: 36807 - DNA, 1161 bp, Zea mays
  Peptide Sequence Number=SeqID_80182
atggttgtcgacacggtcagcgcgagcacctccataatagccccccacctgttcgaccacaggtccaggggcgccggcgcttcccaccaccacctccgccggacgttccatgtcgtcgcctgccgacccctgcccaccgccttcgccggccgccgcctcgtggcccgggtcaccaggcagccgtcgtcgcgcctcgccgattggccggtcagggcgctggctatgggggtcacgaaggaggtcagggccagccctcgcagggagtaccgggggatccccggggatggtggagacatgggggacgttggggtcaccagccccacgccgtcatggcctccgcggaacagggcagatgaccccaagctgcataacccgctgctccgcctcgagcgcatgggctgcgggtggctcggcgtcatcttcgagtgggagggggtcatcgttgaggatgatgccgaattggaaaggcaggcgtggttgaccctggcacaggaggagggcaagtcgccgcctcccgcttttctgttgcggagagtcgaagggatgaagaacgagcaggcgatttctgaggttctctgctggtctcgggatccctccgagcttaggagattggccctgaggaaggacgagatccacagcagccttcgaggtggctcctaccaccagatgaggaacggttccagggagttcatgagcacgctcgccaattacaagatccctatcgctgtggtgaccacacgcccacggaaggttattgaggaagccattgaagctgtaggcgtgcgcagcttcttcgatgcggttgtgacagcagaagacgtgtaccggggcaagcctgacccagaaatgttcctgtacgctgctcagcttctcagtttcatcccggagaggtgcatcgtgtttgggaactccaattcggcggtggaagctgcgcatgacgcacgtatgaagtgtgtcgcggtcgcaagcaagcacaagatctacgagcttagcgctgcagaccttgtggtgaagcaactagacgagctatccgtcgttgacttgaagaaccttgctgatattgagtccccggagtttggcatggaacctgaaccagagatggaggaggaggaagtgcccccaccatcgacgtctgtgggtatagatgatctattctggtaa

SEQ ID NO: 36808 - DNA, 615 bp, Zea mays
  Peptide Sequence Number=SeqID_80183
atggaggaaggacagacgaagaatctcggctggatgcctgacgcgtgctgcccacgaggagcgtgtgatggatacgcccgtgagcaggagagcaccggccgccgcggcgctctccagccggcggattggcggtcatggagggggcgcgaggaggagcctcagcgtccgcagcggtacagcttcaggaggcaccggtcgggcgcggcgaattgggcggcggtggtgctgttcatggtgctggcggccgtggtgctgctgggcgccgtggctctccttgtggtggtcaagctgctgcagccccgcgtgccgcgggctggcggtgctccgcgcctacccgttccgcgtcccgccaagggcgtcctccctctggcgtacgtggcgcgcgcgcagggcgccccgctgggcgacgacggcagcgccgccatggaggccgcgctccgcgacggcgtggtgtcgttccgggtggatggggaggcccggacgcgatggaaggtcgcgaggatcgtcgtcgtcgaccagtggacgcacatggcgtgccagctccgcttcttctggcccaacggcaccgtgctccccttcagatgcatctccaagtccaagttcttgttcttctga

SEQ ID NO: 36809 - DNA, 1359 bp, Zea mays
  Peptide Sequence Number=SeqID_80184
atgtccagggttgggcttcacctcaagaaaccggtcttcacttatggacaactttatgtggccgtatctaggactacatccagaggtggccttagaatcttgattgagaatgaggatggttcgtgcgggatgggagacgtgttgattccaagcctgcagtgtgggaacttgtctgtgacaatatgcgtctgtgtttctcggttttgggacttttctgatcctcaggatgatgcaaggctgctacgctgtgatatggtgttgctcgacgaagagttagagcaggttattgatattcctcctgcatttcctacacttacctactccctcactcacatagagcagatccatgcgcgcatcgaccataaagactactatacagatgggctttgtctgactggaagctcaccatgtaagtggtacatcaatccatccattcctgaggtagaaacccttatgtccagcgcacgcggtgatcataaaccagtgaagtggaatgcaactgttacttcgagccagcttatatctcctgttgctgaggagcaaaaggtgtcgtacatcaagtatctccatccctttgaaaacaagggaaaggaattcttgtttacagtcactataaggaaaattgacaacaagtggtggtataactcatgcagaaaatgtgcctgcacagctgtcactcacggagactcttacaaatgcacaaactgtgattgtgctaacattgctatgcccgtccaaaggtataaaatacttgtcactgcaggagacgagacagctgatacatacttcattctctttgggcgcatggctcaaagaattgtcaaaaggccttgcgatatgctcatagcgaacactccatcaggcttcattccagatgcaatcacaaagctgcttgaaaggacgttcatttggaacgttagcttctctgggcacacaattaactctggagacgtttgcttccaggtcaatgctactgtaaaggaactaggcaatcaaaatgttgacatttcaacatcaaccgtagggacacaccagtcttcacttatgttctcacaaggtgcaagcagcagcatggaagacactcctcacaagacagacaccttgtcttcacctctgacacctttgacgcctcagggtagcatcgccactacaaagtatttggaaaccgttgacattggagatgctgagcctttgattgaatccactaaaacttgtagatcatgctcttcgcctagcaaatcaatagcgaaaaaactgttcgttgctgacgatgaggaaggaagcattagtcaatccagtggaggtggtgttggtggatccaggtcaggttgtttgagctctgattattgcaactcatga

SEQ ID NO: 36810 - DNA, 204 bp, Zea mays
  Peptide Sequence Number=SeqID_80185
atggaaagcgctgatgggtgctttgatgtatcactatttgtcgttctggatgatttggatgtattttattctacagccagtgtgaccatcattgcaaggaagcattctgatgttttttgccagttaatctcatctaaaagtattgtcatggcgctaccaaatgaatggaaaatgaaaaagttagtgcagtcgcattattcgtag

SEQ ID NO: 36811 - DNA, 465 bp, Zea mays
  Peptide Sequence Number=SeqID_80186
atgccgcattaccgcgagaggagagcgaaaagagtacatggcccggggcgagatgcaaggaggagagtaggagaggaggggcaggatgtaggaagtgcgaggaggggtgtcgggcgaggtttctgcgagggtgtcagcgaagcgcagctcaccattgtgtcattgggctgccttcctccgtggttccggccgccgggtgtaaactggggcgcccttccaccgtgtccgttgtgctcccccatggcaaggaggtctgaagcacctagggcagggcgtggtggagacgaacctcccgcattgcttcttcaggttgggcatgtcgaggaggccgacacggcgggggaacgggagggcggacaaggagggtggatagggggagcgggacttgggatccaggcgacgggcgtcgcaccgccgccgcctagggttcgagcggaggatgtcgctttgttgatggaaggctag

SEQ ID NO: 36812 - DNA, 729 bp, Zea mays
  Peptide Sequence Number=SeqID_80187
atggttgtgaagcagtatgaattagcggacacatttgctgagatgatcgatgatgtccttcgcgcggagtctgtcgacccaggccagacaatgctgcggaagcgcctcaaccagctaaacctccagatatatctcatcatctatcatcaggtgaccttcacacattgtaaattttttcaatttatgtattttagttcaccattttcagttgtttctgttcaattactaaaaccttttccttacagaggcatgcattcattccggtacccaaaatactcaggacctgactatgccaacttcgcagccgctacggatttgacatgcacccagtttgaggaaatacatgaaatgcaacaacaaatgcgtcgtgcatttgagggctgccctaatgatttcgacgttactgtgcccatggagacgaactcatactcaaactctaaaaagcagggaggtgacattgatgcatctcatgacactcaaactaacacgggccccctatttgaccagacacctagtggtcattgttttcgcgaggatgatgtaaatcatcgcccgtccatgaacaacaacagacttgtactggacgtcaatgttggtgctctgctcaactttgaggataatgaatgccacaacaagtctcctcagagttatgatcaagctgtccttgatgattacctggacaagacactacatcagctggacaactatgttgagtacaaatcggtataa

SEQ ID NO: 36813 - DNA, 615 bp, Zea mays
  Peptide Sequence Number=SeqID_80188
atgccccatgcaccaccacagggcatcctggctgctagaggagaccctgatggagacggagacgatggcaacgctggtggcatttcgagccatggcacagagctctcggaggagccagagccagagggatggatcgctagacccatcacacgcgacgccactcgcgggtgtcacttccacgacgctcttgacaccttgctgcgttgggcctttgaccgacacacttggtctatcgagtaccgttgtggtgcagaggccttctcagagcactattctattacaaagagggatactgccgaagcagccatgcaagatgcaacacgacgggcactttctcagtattgctcattgttcagcggagtagctgacggccttgacctgaagaactaccctcgccgttcaaccggtagtgctggaggtgtgattgtctcgccatttggtgaaggcagtcccaggctgaacagcatggtcaacctggccgccgtgctcaacacagagctggaccacacccttgacgagttgggcaaggttcgggcggaagttgcggaatttcatgctgagtgtgcagcacgccactatctacatggtggttctcccgcccctgttgggatttag

SEQ ID NO: 36814 - DNA, 579 bp, Zea mays
  Peptide Sequence Number=SeqID_80189
atgccccatgcaccaccacagggcatcctggctgctagaggagaccctgacggagacggagacgatggcaacgctggtggcatttcgagccatggcacggagctctcggaggagccagagccagagggatggatcgctagacccatcacacgcgacgccactcgcgggtgtcacttccacgacgctcttgacaccttgctgcgttgggcctttgaccgacacacttggtctatcgagtaccgttgtgtagtctaccagcaccgtcgagggttatacccagaccagttggaggatacttgcttgtattgctcattgttcagcggagtagctaacggccttgacctgaagaactaccctcgccgttcaaccagtagtgctggaggtgtgattgtctcgccatttggtgaaggcagtcccaggctgaacagcatggtcaacctggccgccgtgctcaacacagagctggaccacacccttgacgagttgggcaaggttcgggcggaagttgcggaattgcatgctgagtgtgcagcacgccactatctgcatggtggttctcccgcccctgttgggatttag

SEQ ID NO: 36815 - DNA, 201 bp, Zea mays
  Peptide Sequence Number=SeqID_80190
atgaaagcgggatctaatgactgtggcttcttcgtcatgaggtacatccagtactatgactacatggatggttctatcaagcaatatatacaaccagatgactctcgtgatctacgatctcttgctctatactacctcactcccgttgcctccagaaattcaaagattcaagtttgcccgcaagtagtgtcgctagattag

SEQ ID NO: 36816 - DNA, 183 bp, Zea mays
  Peptide Sequence Number=SeqID_80191
atggaaatcctcataccagtcatcctcgctgacgaagccttcttggtgaagctctctgtactggggcctccgcatctccatgttcctgatttcttggtccaaatcgtcctcctgaggcgttggactggtggccttcctcttctggcttcgggcttcccgaagagaaagggtctcctagtttag

SEQ ID NO: 36817 - DNA, 660 bp, Zea mays
  Peptide Sequence Number=SeqID_80192
atggcgatggacaggggatcggtgcagtatggagaggctacagcgacgacgttaccctttgggtcagatggtcggtatgctgtaactccaccggctgcgttaccggcgctaggattccttgaagacagcaacgcagttcatccaagtttggtgggagcaactcaccggatacccatgaggacaattggtgatcatgagcaggacacaccacacattctccaaagccatatgctggaaagtatgcatgtgaatgcaagcattgggagcatacagattgatcgtattcctacggaatacatccttctgagatacacctactccgctatacaagatgtgactttttcaagggatgataagaatttgaagggtaaagacgatatagaaggtgatgatagtactagtgatggcgaaggcatccagggcgagggggatgatgtacgagacatgccaggagaaaatctaccgactagaagggctaaggatggtcacggtgctggacagtggaccactggcataccaatgagtgatgagtgcgcaacagaattggcgattaaaaaggaaatgaagctagattttaatgtgagtggagtaagcttgagaagaccagataacgcgaagccaaagggcagaacaatcagtgatatagaaaaaagttattaa

SEQ ID NO: 36818 - DNA, 921 bp, Zea mays
  Peptide Sequence Number=SeqID_80193
atggtccactccaacgccctgctgtggaagaagggaccggtccacacggtgtggaaggcgtcgttctgcaaagagtcagagctcagccgggacaaggtcgcgggcacggacatcgtcgcctccgttggcgagattatgttggatgtccgcagcccccatggacttcaccttgcagtactggcaaagcttctgtttggaattgttaggatattctccaagaagatggagttcctcctccatgatttcaatgagctttctcggtcatttcgactaagtcaacttgctgaacctactttgccaagtggaaggttgacactcggagttttgaagcaagcgaataaagatgtccgtgtaggaaggttagtggtaggccagcaaaacacctgcaaagtacaaaaaactgttcatgctgtgagaacaactgaagtctctagtgcaatatcaagtgaaggccactctgtaagggtagaaacagaagttactctagggatatctgtggtaatcaaagaaacacgtttgccagatggtctgccaaccttcacaattccaagatcatttgagcttgactctttcaatttggggattgctgaagatatagatgatgaaggtgatgaccaccatcagttggcacaccaagatattttattgagagatgagagacatcatgccccctatttttatgagccttatcaaagagtgtcatgttcatatgctgttgattctgctggttttctgccggaatacattgctcttccaaataatattctagacttcaccgaagggggtaaatctgaaatagaaaacaagaatgccgattctgcttggttcacaccattgaaggatgttcttccacctgagatgatgggtatggtggctgaagcaaaggatcttgcaaaggaaagcaaaactggggataattcc

SEQ ID NO: 36819 - DNA, 540 bp, Zea mays
  Peptide Sequence Number=SeqID_80194
atggctgaaaggacaggcggcgcttccggcggtagcagtgggcgacgcttcgccttcgccgtaataactgcgacaaaaaagcagggaccgggaaagggggataccccgaaaaggatccttccccatgaaggaaccaggctccgagcctccctactgatcagaggttcgaaggctggccccctcgaagggttcgacagccgcctcagatcgcgtgggccctacacccactactggtcagaggttcgaagctcaccggagacaccatgttcggcgcccatcgagggtaacatggcgctttccccccctcctccttgcgaaaaggcgacgcaggggcgtatgcaaaaagccgagtctgtccctgatcgctctctcgccctgtgcagaggctcgggggctgctctcgcaaacccggctctagccgaaccgttgacagcgtcaacataccagcccgagagcttgggccccgaccgtacacccgggctacgaccagttcgcatgagggaacaaccaaaccagccgaagcattacgcgaggcattaa

SEQ ID NO: 36820 - DNA, 594 bp, Zea mays
  Peptide Sequence Number=SeqID_80195
ctatatggcaaatacccaagcgtgcatgtatatgcatatggaccacttccttgtgtggactttgtaatagcggaagcatgttcgcattttgtcacaacgtatcatgataatggtcctgacgatggcataatccagggctatgctgatcatacaagaacagcagatacaacagtaccgaatgaaagacaaatttctcatcagattccattatgcaatactgaactagacctccacaatacgcaaaatggcttttttaggtataatgggtccagtgcatcaatagatgagcatctgagctatgaaggcataagcagtggccatgatatgcaaataattccacttgatggggctgattctggttttgaagggcaccagacatcttacagagaaataccagtggagcctcctgagatgtttcttgcaggcttaattgttcacatagtgcggcaaagaagaagtctctttcctctttggaaatgctggagcatccaggaaactgaaccaccatacaaagctgttttagcgaaaagggagaacttcagggatatagtggttactccttacatgtttacagatcacttaccatggaggtaa

SEQ ID NO: 36821 - DNA, 285 bp, Zea mays
  Peptide Sequence Number=SeqID_80196
atgacaagcgagcagctgagcatgaaggggcttagactcgtcacgaagcccgatcaagaagtagatatgtcgaagctcaagtgcaacattctgaacctggcaagacttacaagtgatgtaggagcagtaggacaagcaagacacaacagatcgcatccgtggaacccagtcacgataattggtgccattaaaagcatcgaacaccttagaactggaacaccaccagacgaagaggtcaaagaaggggccatagcagcagtcaatggtgagagcaaagtggagtag

SEQ ID NO: 36822 - DNA, 489 bp, Zea mays
  Peptide Sequence Number=SeqID_80197
atggaggcccaggcccacgcgtcatacaaccggtgcgccgaatgcttcgtgcatgcaactgcaccgccacttacgccaccaccgcgcctcctcgactgcggaaccgataccgcgactcgaggcgacccagcgcacgacccagcagcgccagcttggcgcgacggtcaatgcggccaaaaatgggccggcactaatggcggaggcaggcgcagcggccccgtcgtcagccaagctcacgtcccatccgggggcggcgagagaaccctctctcacggcgtgaagacaacgcacccgtgttccgttcctcgaacggctcacgcacgcgcaacggccgccccgccaaccactcgccctgtcgcattaactccgcggcgggacaggcggcgcctctggcaggagaagcgggcgacgcttcgccttcgccataatgaccgcgtcagaaaagggaccgggaaagggggataccccgaaaaggatccttcctcgtga

SEQ ID NO: 36823 - DNA, 570 bp, Zea mays
  Peptide Sequence Number=SeqID_80198
atggcgcctcctgttgacgtggctggtctgcgccctaggttgggcgatgtggaagctcctccgaagccgaggtcgagtccgtgcctctggttcgggcgaggcggagaccgtcggctgaggccagggcggagtctgagccctggggtcgggcgaagcggagttcgtcgtcttctggggctgagcccgagtccgagccctaggtcgggcggagcggagttcgtcgtcttccgggacttagcccgagtccgagccctaggtcgggcggagcggagatcgtcgtcttccggggcttatcccgagtccgagccctgggtcgggtggagcgaacccgagtccgagccctgggtcgggcggagcggagttcgtcgtcttctggggcttagcccgagtccgagccctgggtcgggcgaagcagagcttcctatgggcctcgggcgagccggaaatatgttcgccgctggaggggggcctcaggcgagacggaactcctccgagctttatgctgatgggggttaccagctgagaattaggagccttgagggtacccctaattatggtccccgacagtag

SEQ ID NO: 36824 - DNA, 273 bp, Zea mays
  Peptide Sequence Number=SeqID_80199
atgaggatcaatctcaagatgatgaaaatgaagatcaagacgagccaccttaagaggaggacaatgatcaagggggagatgctaatgatcaagacaaggaagatgatgagagtccaagaccgcctcaccccaagaccccaccaagcaatacaacgagatcaccccgtgaactccatcctcggcgatattcataaggggggtggaagacgcattaagggattcagattgggtgttggcaatgcaagaggatctcaacaacttcatgaggaatga

SEQ ID NO: 36825 - DNA, 264 bp, Zea mays
  Peptide Sequence Number=SeqID_80200
atgcgcattgctgtttgcaggaaaatagccagtatcctccatcagctattcctggatcagaagagaaaggagggaactactactttgagtctcagtcaagtccttgaagggacaaagaggaaaattgcagcattattcttctatgaaactctggttctgaagaaccgtgggcttgtagaagttaaacaagaacatcattatgatgatatcatactctcagagactccaaaacttaaagcagagcttcagcgctgtaggaactga

SEQ ID NO: 36826 - DNA, 1257 bp, Zea mays
  Peptide Sequence Number=SeqID_80201
atgacggccgtcgcgacgccgacgccgccaccgccgcggcagctgagcctggaggaccttaaggcaatatccgtgctcgggcgcggcgccaagggcgtcgtgttccacgtcgtgcacgcccatggagaaccggacggcgagggcgagggcggcgccgcggccgcggccatggcgctcaaggcggtctcgcgggaggccgcgcggcacaagaaggcgggcagcggggacggggacggacaccgccggatctggttcgagcgcgacgtgctcctgtcgctgcgccacccgctgctcccctccctgcgcggcatcctcgccaccgaggccgtcgtcggcttcgccatcgaccgctgcggcggcggggacctcaactcactgcggcggcggcagaccgagaagatgttctccgactccgtcatacggttcttcgccgcggagctggtgctggcgctcgagtacctgcacagcctcggcatcgtgtaccgggacctcaagccggagaacgtcctcatccaggacagcggccacatcatgctcgtcgatttcgacctctccacgcggctcccggcgccgccgcaggagcctgacgcgccggtcgccgctgtacacctcgcgcacggcctcctcctcctcgtcgtcgtcgtcctcgacggcgagcacggcctccttcgcggcatccgccggcgggcggactcccgcgaagtcgaactcgttcgtggggacggaggactacgtggcgccggagatcatcgccgggcgcggcccacgacttcacggtggactggtggggcctggggcgtggtgctctacgagatgctctacggccgcacgccgttccgggggcagagccgcaaggagaccttctaccgcgtcctcaccaagcagccggagctcgtcggcgagcagacgccgctgcgcgacctcatcgcccgcctcctcgagaaggaccccgagaagcgcatcggcgcgcgcggcgtcagggcccaccctttcttccgcggcgtcgactgggaccgcatcctgcaggtggcgcgcccgccgttcatcccgacgccgccgccgcaggacgagggcgaggacggcgacggcgacgaggcgcttgacgtcgagaaggtcgtccgcgaggtgttcgcgtccaacgacgcggagggcgggaaggcttggcctgtggcggacggaggccgtgtcggcggcgacggcgattgcgacgggaggggagatcaatctaaagatggcgatttctccgtgttcttctga

SEQ ID NO: 36827 - DNA, 198 bp, Zea mays
  Peptide Sequence Number=SeqID_80202
atgacgtggggcgaaccccccttcttcgtgggttggtctgcttcgaagatgaggcatttggcggaggcggggcggtggatcaaggttttggaagtctcgctggtgaagaatcgaagttgtctcgatttgggtgtctcgtggcttggcaacgacggcgcgccgcattcttccttctcctgtgccgatgtggcaaagtaa

SEQ ID NO: 36828 - DNA, 189 bp, Zea mays
  Peptide Sequence Number=SeqID_80203
atgcccgttcacgtgggagcatcccattcgtcgcgtgacggatgggacttgcagcagcaggggtcgccgtcgccggagcaggagccggagagggagggcggctctttcggaaggggtggcgtggcggtctacaatttcgtccttgacaccgccgcggcgccgctcaaggatctgaatcacagcacctag

SEQ ID NO: 36829 - DNA, 1071 bp, Zea mays
  Peptide Sequence Number=SeqID_80204
atgtgggatcctcagatgtggcagggccaaggtttcgacccaacccatccttctacattttctactcctacaaaccatatgaccaatcctacctggtcccagggagctaatgacccatctacatatacctttagtagtccatggaacccatttgttggtatgatcaatcctgggggtcctccacaacaaccatcattcggtcaaccccagtttgcaccacccattccatgtccacagggttctacccatgttcccaaccacactgacccaataacttttgaatccgaagcagaacatagtgtccaggaagtaaacagcccaaccaaaccttcagacacacctccgacatttagaaggacaaaggaacagaacttcaaaccagctgaagacctgttgctttgcaaaacatggctagagattagtagtgacccagtaattagcacaggccagagaaaggagaggttatgggctagaattgagaaaaagacttcaaaagcagcaactttgtatgcaacatcacagaaaaagccatttaatttcatgcactgctggacgcgactgaaagacgaacccaaatgggatgccatggttcatggcagcccatggagaggcaatgcggggaccgagcctgttcgtagtctaacaccaacaggttctgtgaatgaagtggaatctgatgacggaggttcgaaaggcaagagaccattaggacgtgactcgactaaagcatccaggaagaagtcaatgtcgagttcatcccagtctgctgactacctgtcaagactccatgacattcaaattgcaagattgaagcaaagtgaagaaaaatcagacctcaaacaacacaacattgagttcatgaaggaagttgaacttaagaagttggaggttcagtccaaggaaatagaagtgcaggagaaaaaattgatgatggaagataggaagcaaaaggttgaagagctcaacaaactttatgccatggatatggatgctttaccagaagagttgagagctgtatacatggcgatgagaaaaggtttaattgattttttcatcaacaatcctatctga

SEQ ID NO: 36830 - DNA, 801 bp, Zea mays
  Peptide Sequence Number=SeqID_80205
atggatggcgacgctacggcggagaagtgtctcgctgccgcttccttcccagacaagagcgcgcgctcggaatactccgaggaagacgcccgaggcgatccgcgggcgaccataccgccgccggagaaggtacgcgtcattccgccgtcgcccgcgaatcgtctgtcttcgtccgcccggcgagcagcagtgggcctcgtcgacgcgactccgccgtcaaccttcgcggaccggcgacccggccgatccgtgcgaagacggcggcgccgttcgtcgctgtccgccggaacgttagggttggggtcgacgtcgaagggaggtcatccaatcgccgacagatctacgctgacccgatctgcgtctttcgaggtacaaggtccaagatgtttcccaattaggtactggttgagtatacgaatcaagatgagcagtcaggatgccaaactgctgcaacacttggtcctcaatcttgcatcatcagtggaaactggtgctttcaatattagaagctttctagaagaggcttttcggcatttgggtgacgagcattaccttctcaatgctctacttgcaattcgaaaggaggtagaccagatggagcaggatgcacttgagagcaaagcaaggtctgacccagagaaggagaggatggaggaacaaattagccttgcggagcctgtgaggccagtgcctagacaaataactttcaccccaccttcctccccagaactgtatgaggccagtgacaatgactcctacgactcggacaggtccactaggtatagcatttggaacctgtaa

SEQ ID NO: 36831 - DNA, 1037 bp, Zea mays
  Peptide Sequence Number=SeqID_80206
ggcaagcgacacctttggcaggcgaagcgggcatcgcttcacctccgccatgatgaccgcgtcaaaaaagggaccgagaaagggggtatttcgagaaaggatccttctcagcgaaggagacgggccccgagccctcctactgatcaggggttcgaaggctggcccctcggaagggttcgacagtcgccccagagcactcgggctccgcgccctctactgatcaggggttcgaaggctggcccctcggaagggttcgacagctgcccagagcacttgggctccgcgccctctactgatcaggggttcgaaggctggcccctcggaagggttcgacagccgcccagagcacgcagagtgagggatgactctaggtacgtccgttacatggccgaggctcgggctacgctcctgaggtcaaaacctcgtctaccaagggactcaatttcgcttcgcctgagcccggcctcgggcgggaacagtagtcctagacgaattcacgacttgcccgagggccacctcaggcagtgggcgcaccctcagctcgcccgaggcccagctcgggcaggcttcgtcgagaagcaaccttggccaaatcgcctcacaaaccgaccgtatcgcaggcgcattcaatgcgaggatcgcctgacaccatatcctgacacgcgcgtctcagtcggcagggtcgaacctcgggcgcaacaggaagctccgcctcgcctgaccttaagcctcggcctcgggaggaggtctccgcctcgcccgaccccaagactcggcctcagcctcggcctcgggaggaatcgcgtcctcgcccgaccccggcctcggcctcaggagaagtctccgcctcgcccgaccttgggctcggaccaaccgcgccacagaggatacatcattaccctacccatagctagctcaggctacgagggaacaagaccggcgtcccatctggctcgtcccgggctcaggcacttctccgacggccacgttatcatgtacgcagagctcaagcacttctccgacagccacgttggcat

SEQ ID NO: 36832 - DNA, 135 bp, Zea mays
  Peptide Sequence Number=SeqID_80207
atgcaggaggtgtgcaaccgcaccacagttgtgcaccctttcggcttcatcgcatccgatggggaccgagaaagggggtatttcgagaaaggatccttctcagcgaaggagacgggccccgagccctcctactga

SEQ ID NO: 36833 - DNA, 201 bp, Zea mays
  Peptide Sequence Number=SeqID_80208
atgcaacttggagggccccatctgtcattgattgttgctcttctagcaaagggaaggcaccttcggacacaggatgaagctgtacacaatatgggaagcagggtcagaacgaaggctgaaccagcgccgaagctgcgcgcaagggaacttcagctcagtaccagaaaaaggaaccgacttaaggaggaaaaggctatctag

SEQ ID NO: 36834 - DNA, 1989 bp, Zea mays
  Peptide Sequence Number=SeqID_80209
atgaagtccgtggatcgtcctccggttaatcctaaacgtataaccattgagtcaagccaagaattcttcggtgttgagatacagcgttcggcctctactggagatcctccaaacacaaagcattcttttcatcggcctgcacacgtcgagagaccatctgttattcatgaagccaatgacaaaagtggatctggcgatgacgatgatgattttatgacacctacaaagaagcgtaatactactggaagtcctatcaaaatcttacggaagacatgcacaaagaggatgaaagtagtagaaatttcacggcagacaatgcagaaactcaatgttagatgcaaccctcaggatgttattataaccattaagatattgaatgagaggcaacgacaagccgttgctagaaaaggtttttccaatactctcgacatgacccttgatgcactgggtagccgatctcatcttcgttggttgatggataagttgggccacaaggatatgacaattcgccccggtcaaggcaaggaactaaagattatgaaagaaattgtccaccttatactaggcctaccgaatgctggcggtggtaagccactaggaattgatgaagcagtggcgagcaataacttgagggctgaacttggcttgtctaaggatgagttcgttgttgcatctcttcaggaccgattgagaaaagtagacgatgatgacctctctatcagatgcttctttttgatattattcaatagattgttgttctccacttctagctggggcatatctaaccatgagttgtattatttggaccacttgcatgatgctgcagccccccacaacaaacgtggcaaaccccgcataaaattctttgataaaaacattatccaagctctgacaaaagcagataggaggaagccacgccaaagcggtgaaccttttggccattgtgagcatagggacaggacaaacatttttgatgtccctcgtcccgatccttgtggtcatcataccattcatatccagctcccattgatcaaggatatgctttcaagtaagatcaagcagctccaaccacgtgaccggccgaaattcataaaaaagtttgttgagtacgattctgaagttggcaaagcgtgttccatcatacaaaatactcttaccaagatggttgtgaagcagtatgaattagcggacacatttgctgagttgattgatgatgtccttcgtgcggagtttggcgacccagacaatgttgcggaagcgcctcaaacagctaaacctccagatatatctcatcatatgtcgtcagagttgacaggcacccagtttgaggaaatacatgaaaagcaacaacaattgcaccgtgcatttgatgggtgccctgacgatttggacgttactgcgcccatggagacgaacacaaactcaaacgcggaaaagcaggttgcatctgatgaggaaacacatagcttgcacactacacatgtgcactcactgccacgtttaacagaattggattgtgctcggtcgcttcgtgattttttgtgctcctcaaaactcgacccaaacaggaaggtcatagaattcggtgaatgtattggaaattgtctcgatattcaacaatcatttgcagacgggatgtgtctggataatgttttcatgcagtgtttcattcagtgttttcgcgatgaagaaataaatcattgctcgtccatcaacaaaaatagacttttactggatgtcaatgttggtactctcctcaattttgaggagcatgaacgctacagcaagtctcctcagatttttgatcaaactgtccttgatgcttacctggacaagacactgccccagctggacaactttgttgactacaaaacggaaaactctcgtgacctacgatctcttgctctatattacctcacctttcatagcaagaacaagtgcctcccgttgcctccagaaattcaaagattcaagtttgcacgcaagtag

SEQ ID NO: 36835 - DNA, 1185 bp, Zea mays
  Peptide Sequence Number=SeqID_80210
atgtcagaatggggtatccgactgaatgaggtcggtagtcgggatccccagggcctggagtgttctagggtagtgggttctcctcctagtgggggagacagtggttggaagggtcagtcatggccgaatgagttcctgaagtccctgcagttccagagggtgtggcacatctccttgtggtacgggcactgggcgtcgaggatctcgtctagtgttcgtacattgcctcgtgggcgcaggcttcgcattgccgatgaggtcctaggcccgttcaacggtgatgtagttgtccgcctcttagaacaggtgttccgaggtggcgggagctttctagaggatggcccggacgaaggccgagtcattagacccgctgtagaagtcctcaatcatggcagcctccgtgacgtcggggatgcgattcctcatggtttgaaaatgcctcgagaacgagtggagggtctcattgctttagcgcttgatgaaattgaggtcctaaggctgcgtcggtttatcggtaagggattgaaaatttgcgacaaactggtggctgaagtcgtcccagtcatcgatgcagtggcgagggagatgttgaagccattgcggtgcatcttgcctgaggacgattggcaagggaaagggccaagaccctgcacgtccctcggtcctcccgacaatggtcgcgatgatggtccctgggaggttccgagggagaagcgggttctcgcatcgaaacttggtgtcctgctcagcttattcccgctcgcgttcttgggtgtggcgacgatcgtggtgtcaagaattgcggcgctcacggagcgctctttcgtcaggggtttcccctacttcagaggcctcgtcccgagagacgggttgagcaggatcccgttctcgggctttgtggtgacgctagatgttatggagcctattccgacgttgacgccttcgccaccccgctacaccatcagaggcaagatgacggcatggaccacccttcgccctcctcaccgcaagacgaaggcctacaacgaagtcttcccatcccgcgtcctcacccaacctggaggcccacgtgggattcggcccatttctgtaaccctctcttatgggaatattctggggataatccaggtgcctgagggcataaacgtccttacatcaagacgttgggcactcgagcacctataa

SEQ ID NO: 36836 - DNA, 861 bp, Zea mays
  Peptide Sequence Number=SeqID_80211
atgcctccgcactccccacatgcattgagcccttacaccttccgagcccccggatggggagcattcgtgttgccttcttcttgctgctgttggaaggagcgcgacctcgcgggggttcgcgctctccaacattccttcgggtttcagggattttcatcacgcagcccggctgcagtccctcaccaatggtcatccgtagggatgatcaccagccttgtggtggggagaagcaagccgggctgcggcctctgccccgctctcagcttcaaggatgttcatcatccgggctggggagggggggcgcaccgagttggggccaacctccgcgtgggctggcaacccgcttcttcctccggcattcgggggagaagggcatcctccagctctgcgagaggaggcgtcctccagccatgcgggggaaagggcgaactgctgctgccgctcgctggcgcggtgttggtgggcaggtggtcactgtcatcaccgctgatatttttggttgccggaggaggtatctccgccgacgagaccgtcggcgccacctgcggtcggacccccgactctttggctttaatggctggttctcgtgcccctggtcaccggcgagccacctggagtttgttatcccgcaggccctctggtgtggaggttgttcatacccgcgggagtggaaccggagtcccgtttgtaatgaaggtgacgagtgagaaccttcggccgctctgcgatgagctgaagccggaggcagcggtgtcgacgtggacaaaggcagagtcggctcgaaaagaggcttcatcagcccgggagcatgtggcctcccaggccgaggaggtgcagcagcggcggctagagcttggttag

SEQ ID NO: 36837 - DNA, 639 bp, Zea mays
  Peptide Sequence Number=SeqID_80212
atgagttgccctgtgcggaaggtgacgagtgagaaccttcggccgctctgcgatgagctggagccgaaggcggcggcgtcggcgtggacagaggcagagttggctcgagaagaggcttcgtcgacccaggagcagatggcttcccgggccgaggagttgcagcagcggcggctgaggcttggccaggtcatccgtgagcgggaccaaccccggagtcatgctgccgaggacgtgagccgggctgaggtcctcgggggacacttggctgtggctacggagcgaccagccgaggtgtctgctcgggtcgggaccctggctgcgatggcccaagcgcggtgctggcgtcctccttcgaggtggagatccttccgcctgtgtcaccgtccgaggtcgggccagattctgccgaaggtggaaacgacgccgagggtgctgctgctccctctatcgatgtctgaacctgaaggaacagtttgtctgtacagaatcgcttatccgagcgagagttacttttcgcggaaggtgatgagtgaggattctgctatcgatatagtcgagaaggcacgaaagtcgttctggcagaaaagtttttcgagcattaggacttgttcggcagcagaattgcttatccgagcgtga

SEQ ID NO: 36838 - DNA, 483 bp, Zea mays
  Peptide Sequence Number=SeqID_80213
atggcggcagcagacgagcggaagcagcggtcaaatcgccttcaggctcacgtcccctcctggagcagtaggggagccctctcccacggcgtgaagacgacgtgcccgtgtttcgttcctcgaacgactcgagcacgcgcgacggccgcccagcgaaccgcctgtcccgtcgcattaactccgcgacaaggcaagcaacgcctttggcaggcgaagcaggcgtcgtttcacctccgtcatgatgaccgcgtcaaaaaagagaccgggaaaggggatatttcgaaagggatccttctccgcgaaggaagcgggccccgagccctcattactgatcaggggttcgaaggctggcccctcggaagggttcaacggccaccccagagcactcgggcttcaggctcattactgatcaggggttcgaaggctgacccctcggaagggttcgacagccgccccagagcactcgggctccgcgcccactaa

SEQ ID NO: 36839 - DNA, 144 bp, Zea mays
  Peptide Sequence Number=SeqID_80214
atgttcggattgcaggtggcaatgagattgatggttcttggtattggctctggtaatggttgtcagcattgcaacccatgctcaggagaagatgaagctgtgaaaggagaccaccaggagttccaagattatgacgagttctag

SEQ ID NO: 36840 - DNA, 2766 bp, Zea mays
  Peptide Sequence Number=SeqID_80215
atggcagacacggtcacgggcagttcaaggaggtcacaagatgacactgcaacattaatcccacacagtggcaatttgggaggatcaagccggaagggcgtgaaggccgccaggttcaaagatgatgatgaggttgtggagatcaccatcgtacagcgcgattccatggcaatcgaagatgtcagggtagtcgatgatggcggctcagggcatggtggtgggtttgacggcctgtcacttgtgtcaccttcctcgtcaaggagcggcaagctagcatcaaagtttaggcaggtgaaaaatgggctaaagatgaataactcaagcaataaggcgccacagacacagttgggaaagaacgtgaggaagagattggacagaagcaagagcggtgctgctgttgcgctcaagggcttgcagtttgtgactgcgaaagttggtcatgatggctgggctgcagtggagaaacggttcaaccagctacaagttgatggcgtgctgctacgttcgagattcgggaaatgcattggtaatttcagtggtcctattgaattcgtatctgcatacagctatttgaacaacactaatacaagcattgctttggattgtgcagggatggatggatctgatgagtttgcaatgcaagtcttcgattcattagcaaggaagagagggataacgaagcaggtgctgactaaggatgagctgaaagatttctgggaccaactaagtgatcagggttttgacaaccgtctgcggacattctttgatatggttgacaagaatgctgatggaaggatcacagcagaggaggttaaggagatcattagcctcagtgcatcagcaaacaagctttccaaactcaaggaacgagctgatgagtacacagcactcattatggaagaacttgaccgtgacaacctgggatacattgagcttgaggatctggaggcacttttgctgcaatcaccatctcaagctgctgcaagatcaacaacacatagttcgaaacttagcaaagctcttagcatgaagcttgcatcaaacaagggcacaggtccattttaccactactggcaagagttcatgtacttccttgaggagaactggaagcgcatttgggttatgactctctggctctcaatctgcatttgcctctttatatggaagttcatccaataccgtaatcgagctgtatttcacatcatgggttattgtgtgaccactgcaaaaggtgctgcagagactctcaaattcaatatggccttggttctatttcctgtttgccgaaatacaatcacttggattcgatcgaagacaaagatcggagctgttgtgcccttcaatgacaacataaacttccataaggtaatagcagcaggtgttgcagttggtgttgctttgcatgcaggtgctcacctgacatgtgattttcctcggctgctccatgcaagtgatgctgcctatgaaccaatgaagcctttctttggagacaaaaggccaccaaattactggtggtttgtaaagggaactgaagggtggacaggtgtggtcatggttgtacttatgactatagccttcgtattggcccagccatggtttcggcgtaataggctcaaggattctaatcccctcaagaaaatgactggcttcaatgccttttggtttacgcaccacttatttgttattgtgtatgcactgctcgttgtccatgggatctgcttatatctaagcaggaaatggtacaagaaaacgacctggatgtaccttgctgtccctgtgctcttgtatgtaagtgagcgcattcttcggctatttaggagccatgacgctgttaggattcagaaggttgcagtgtatccggggaatgttttggctctctatatgtctaagccacctggattcaggtaccggagtgggcagtatatcttcataaactgccgtgctgtctctccatacgaatggcatccattttccattacatcagcaccaggagatgattatcttagtgtccacattcgcacaaggggtgattggacttcacgtcttaggactatcttctctgagccgtgccgccctccaactgatggagaaagtggactcctaagagctgacctttccaaggggatcacagagagcagcgccaggttccctaaactcttgattgatggaccatatggtgctccggcgcaagactatcgggaatacgatgtgctcctgctcattggactgggcattggagccactccattgattagcattgtgaaggatgtgcttaaccacacccagcatggaggatctgtttcaggcacggagcctgagggcagtggcaaggccaagaagaggccattcatgacgaagagggcctacttctactgggtgaccagagaagagggatctttcgaatggttccgaggggtcatgaacgaggtggctgagaaggacaaggatggagtcattgaactccacaaccactgctctagtgtgtacgaggaaggggatgcacgttctgcactcattgtcatgctccaagagctccagcatgcgaagaaaggggtcgacatcttgtctggaactagtgtcaagacgcacttcgcgcgtcccaattggcgaagcgtcttcaaacatgttgcagtgaaccatgagaaccaacgcgttggagttttctactgcggtgagcctgtccttgtgccacagctacggcagtggtcagcagacttcacccacaagacgaacacaaagtttgagttccacaaggagaacttctaa

SEQ ID NO: 36841 - DNA, 243 bp, Zea mays
  Peptide Sequence Number=SeqID_80216
acggagacactacaccaaggctctcttctcgtgcaagtcacccgcccggtgttggaacttgctctccggtgcaaggtatctgagtgcccagcgtcctgtgttaaggacgcatgtgccctcagtcacctaggttatccccggaatattcccataaagcgggcgagggcggctaaggcctcgagcgaagggtggcgtcttcgccttcgccccaacatttgccctccgagggaccagttcgactaa

SEQ ID NO: 36842 - DNA, 642 bp, Zea mays
  Peptide Sequence Number=SeqID_80217
atggaggcccgcattaacagagctattgccatctcgtgcgaaaaccctgtttacgtcactacacacccccgttggatcaccttgcaccggagagcaagttccaacatttggcgcccaccgttcgtgctacgaaaaaaccacccgcgatggcacccaagaaagctagctcgaaaggctgatgaggctgcgaaggcagcactactggccacaaaaaagggcaaggccctcgctcttaccaacaccactcaccaagaagccactgaagacgacgcactctacacctgcggccctgaaggacaaccgcaacctcccctaggcttcgccccaccggagggcgcggacctcaccgaggatggcgatgtcctcggcgtctcaacggaagaacagctacagccgcgcgccttgcgcatcaagaaccgcaatctccagaggcaaaaagagatacttgaggccaagcgccaacgtgtgtctgcactagccaaggtgcggcaaatgatacgcgacgaagagcagaaggcccaggacctcgagcaggagatcgcgctgatgcagcgcgaaggccacctcggcctgcagcacgggccacccctgcaacagcgcgcacaactggaagacatatgcgaaggccacctcggcctgtag

SEQ ID NO: 36843 - DNA, 231 bp, Zea mays
  Peptide Sequence Number=SeqID_80218
atggtgaagaagcttgagaagggaacaaccgaggcatgcactaaatcccttgaagaaaatgacaaggacttgaggattgccaagaggaggaagcaaaagaagagaatcaatacctcttccaaaagcctcaaccatgcctccataaaaggtaacatccaagacgagcaagccactatggattctgaggttcaacaagtagagatagctgagcaggagctcattgaaggctga

SEQ ID NO: 36844 - DNA, 300 bp, Zea mays
  Peptide Sequence Number=SeqID_80219
atggcgctcggtgtatgcggctcgctctgccaagtttgggttcgccccttggggaggagtggctatgagatcgatggttttggttatgactatggtgctggtaagtggtattctttccgtttggaaagggttgtcagcattgcaaccactgctcaggcgaagatgaagctgtggaaggagacttctaggagttccaagactacgacgagttctaggcgtgggttagcggcaacccccagtcggctgcctgtgaaggccgcggttatctacgtttcgttttcgcactttgatttattgtaa

SEQ ID NO: 36845 - DNA, 462 bp, Zea mays
  Peptide Sequence Number=SeqID_80220
atgtatggggcgctggaacttgctgttttggggagggcgtcgatagagagaggaggaacatggggtgtcggcatggagcaggggagcaggggcttgcctagaggatgctcgccatgggaggagcagagagctcgcggccatgggggggagaagaaagggcaccgtgggaagcttctgcaggggaacccgaccatggacagcgaggggcgagctgcagagggcgtccatgggagagggttggggtttcctgcacttgaggagtccctgcacgtgagcaaagagggagggcatgcgcgccgtggggaaggagaagcaggggctcgcgtccagggagctgaggaacagggagctcgcgctaggaggaggatagggagggtgctcggttgctcagctgccatgggagggggcgagcagagctgctgctcggccatgggagagagggggcgctgggggaggggatga

SEQ ID NO: 36846 - DNA, 246 bp, Zea mays
  Peptide Sequence Number=SeqID_80221
atgcccaaattaggagccatcgcacttgggccctataaattaagtgtgccatcaactccgctagaaaacgaagaagaagtgactgttgaagaagaggagactgctccatctacagaaaatccacctgctgggaactgtttctattttgatatttgtggaacagagcccgactctcctacaacacaaggcaagccccgatgcatttgccacctccttactgttttaaactctttatcacttgaatga

SEQ ID NO: 36847 - DNA, 444 bp, Zea mays
  Peptide Sequence Number=SeqID_80222
atggcagtcggggtcagtgaggcattgtacgccaaggcggtgatgtcctcatcactaatgacttgggaggttccgtcacaacaggggccgtgcgccgggggccgcgcacaccggggccgagacggccgcgcgcagggggccgagggcagccgctccgaggatctgggaacggctgcgcgcaggggccaaggcggtcgcgcgcaggggcgccgggggagccgcgcccgagggggccaggacggccgcgccgccgaggtcaggacggccgcgcccaagggggccgcgtcgctagagggccaagacggtcgcgcgccgggggccgtgtcgccggaccacgcgcaggagagaggagggcggggacgcacgcagggaataggggaaaggggaggaagaggaagagagagagagagggagaggggaggggagctcacctcggggatctaa

SEQ ID NO: 36848 - DNA, 117 bp, Zea mays
  Peptide Sequence Number=SeqID_80223
atggcgagagcagtttggggaagggtgatgttgctactgggcgccggcaagagcccttccctgcgtgatggcgaggccgagctgggagaggggagccgctggaaaaatggaggctag

SEQ ID NO: 36849 - DNA, 1002 bp, Zea mays
  Peptide Sequence Number=SeqID_80224
atggccgagttccctgggagcacgccgacgccctactctcctccatggccggcgctcgagctccactcctccccatggcgccaccccccctgcagtttcccctctacctcgccatggcgctggcgtctgctccctgcgcggcatgctctgctcgctagggctggagatcctcggccgagcctctcccatccatggggcagcggctcctccctcggcgccttccccttatgcaacagtcgtggcaactccgcgctctggccacgcctaggtccagccgccgttggccctgacaggcacctgggcaccagatctcccctatgcatgagcagtagcagccgcgacgccaggccacgcagccacgtggatctcgctgcgtctcgccctcggcgtgctcgacgtaatgccgcagtaagcagcagcagcgacgccctccgctgcgtcgcgctcgccaggtcgggctacccaccgtcaacctgcgcagccccgtcgtcgtcgttgttcaccccgaagaggaaccccgtgttttgcgtggagaagaaggcaagccgcttgacgctcgtcgatggggcaggttacgctacacctccccagtacgcggtgcagctgttcgaggagcatcgggtaccccgttgtagggtgaggatgaccttgaagcctcatcccttgcagcccggctggcgttctttggacttgaagtctttcggtttcagggccgacgatagtattgagtccatggctctgcacgtgctgacaaccttctgcggttttcaccccttggagttgtcaacccaccccattggcttgttccccgctgaaaaggaggacgacccaatgtggaaggatcgggttgagcacgccaaggatgttacgggcctagtggagtctaccaagatcaccctggataacagggaggaccttgttgtagacttgtccactgagctggtggaaaaggatctccaggtggagcagatggccaatcaaattcaagagcttgaaaattag

SEQ ID NO: 36850 - DNA, 264 bp, Zea mays
  Peptide Sequence Number=SeqID_80225
atggctggacttggctgccaaggaagaggagagagcagggggcgccatgggaagctccaagtagggggaacaagggagaggggcgccatgggtgggagctcggctagagcaggggctcggcccatcctgcgtggaggagggaggaagggaggaagttccctgcgctgccgtgaaggaagaaggagggtgagatgctgccgcgaggaagagagagacagggaaaaaaggaagtggtggctaggggaaagtgaggggtgggagtga

SEQ ID NO: 36851 - DNA, 435 bp, Zea mays
  Peptide Sequence Number=SeqID_80226
atgcccccaattggtgtgatgaaaagaataaaaaagaatgactacagggtaattcaagacggaaaagataccagccatgacgggtgctccatccggaatgtcagccaatgtggtgaagttcagcctgccctgcctcacttgtaccctttgtctcttaccttggttctgatttgcattctgcccctgcctctgctggttcttgggataatttttggcataatgtccggtgctgccacaactgaaacacctgttgtcattgccctgacgatacttgatatagctgaggtgcccgatctttcggcgagtggagataattccgatttggcagaagatgacctttgcgatccgactacgacgagcaagcccgaggcgccaatgcaaccgctgaaccaactccctgtggttaccgaccttgctgatgcgagatcggcctga

SEQ ID NO: 36852 - DNA, 297 bp, Zea mays
  Peptide Sequence Number=SeqID_80227
atgggaggagcagagagctcgcggccatggggggagaagaaagggcgccgcaggaagcttttgcaggggagcccgaccatggacaacgaggggcgagctgcagagggcgtccatgggagacggttggggtttcctgcgcttgaggagtccctgcactcgctcgccaggaggagcagggagggcgtcgcgccatggttggccgaggggaggagctcctgcgcgcttgaggaagaagaagagggagcgtgtgcacatcggctgaaggagaagagagggagagatggctgtggcggctag

SEQ ID NO: 36853 - DNA, 2529 bp, Zea mays
  Peptide Sequence Number=SeqID_80228
atgacatcatcggcggggtacgcggatggcggcacaggaggtctgggggacggggaccccccggtgccgccattgaggaagcagccgtcacggatcgcttcggggatgcgtcggctggcgtccaaggtatcggcggcggtgccagagatgcgtggcctcaagcgtacacactccggcacacagtcaggtttgcgcggtctacgcttcctcgacaagacgtctgccggcaaagacggctggaagtccgtcgagaagcggttcgacgagatgaacaccgaaggccggctgcagagggagaacttcgccaagtgcatcggtatggctgattcaaacgagtttgcaagcgaggtgtttgtggcattggctaggagaacacacatcaatccggacgatggcgtaacaaaagaacaactgaagcaattttgggaggagatgacagaccagaactttgattctcggctacgaattttctttgacatgtgtgacaagaacggtgatggtaagcttacagaagatgaggtcaaggaggtcattgtgctaagtgcctcagcaaacaagcttgctaaactgaagaaacacgctgcgacgtacgcctctctgatcatggaagagctggatcctgatcaccgcggctacattgaggtgcacctagctttgtttgcgtgtctctctaggagcagcatactgacagaagacagaaaacagatctggcagctggagaccttgctacgcgggatggtgaccgcctcagcgccgccagagaagatgaacatggcgtcagcgtccctcgcgaggacgatggtgccctctagccaccggagcccgctgcagcggcgcatcaacaaggccgtggactttgtccacgagaactggaagaggatatgggtgctctccctctggggcgtcctctgcatcgccctcttcgtattcaagttcatccagtaccggaggcgcgcggtgttcgaggtgatgggctactgcgtctgcatcgccaagggcgcagcggagaccctcaagctcaacatggcgctcatattgcttccggtgtgccggaacacgctcacaaggctgcgttccaccgcgctcagcaaggtggtgccgttcgacgacaacataaacttccacaaggtcatcgcgctcgcaatcgccatcgggtctgcgacccatacgctcgcgcacgtgctctgcgacttccccaggctggtggcgtgccccaaggacaagttcatggagaagctggggcccttcttcaactacgtccaaccgacatggccgactctgctggcgagcatcccgggatggaccggaatcctgctcatcctcataatgtccttctccttcacgctcgcgacgcactccttccggaggagcgtggtgaagctgccgtcgccgctgcatcacctggccggcttcaacgccttctggtatgcccaccacctgctggtgatcgcctatgtcctactggtgatgcactcctacttcatattcctcaccaagcagtggtacaagagaacgacgtggatgtacttggcagtccctgtcgtcttctatgcctccgagagaagtatcagaaaaattcgtgagcaaagctatcgcgtgagcatcataaaggcggcaatctacccgggaaacgtgctctcactttacatgacgaagccaccaggcttcaagtacaaaagcgggatgtacatgtttgtaaaatgcccagacgtttcgcctttcgaatggcaccccttctccatcacttcggctcctggagatgactacttgagcgtgcatatccgtacgttaggtgattggacatcagaactcaggaatctgtttgggaaggcttgtgaagctgaagtaacttcaaagaaggctacactagctagactcgaaacaactgttgtggcacatggtctggcagaggatactaggtttcctaaagtcttcatagatggcccttacggtgcaccggctcaaaactacaggaaatacgacattcttttgcttattgggctcgggattggtgcgactcctttcatcagcatactcaaggatctcctgaacaacataaagtccaacgaggagatgcatgacgccgagttaggttgcagtttgaagaccaatgggccaggaagagcctacttctactgggttacaagagagcaaggctccttcgagtggttcaaaggtgttatgaacgacgttgccgagagtgatcgcgacgatgtaatcgagatgcacaattacctgaccagcgtgtacgaggaaggcgacgccaggtcagccctgattgccatggtccagtcacttcagcatgctaagaatggcgtggatatcgtctcaggcagcaagattcgaacgcattttgcaaggccaaactggagaaaagtgttctctgatttggccaatgcccacaagaactcacgcatcggcgttttctactgtggatctccaacactgaccaagaccctgagagatctttcgatagagttcagcagtaccacgacgactcggttccatttccacaaagagaatttctaa

SEQ ID NO: 36854 - DNA, 948 bp, Zea mays
  Peptide Sequence Number=SeqID_80229
atgtcgcctctccaccttgccctctgtggggcgtttgggtcctatgcgtcggttgccttgagcccggcaaggctgacggtaaagattgtggccaggaacactatgatagataagataacggtcagttggtggagtccaaaggagttgcaggcgaagaccctgagcagcagtcggttggtgaaggtggtgacgaggatgatggttatgattatgcttatggtaatggttgtccacgttgcaaccactgctcaggagaagatgaagttgtggaggaggacttccaggagttccaagagtacgatgagttctaggcgtgggttagcggcgccccctgcaccaccactgggcgtcccggccgctggagtagctactggaggagaccccgatgacggaggtgacgacagtagctcgagccacaccaccgacctttcagaggagcaggagcggcagggatgggttgctcgacgcatcactcatgacgccgcttgcatgtgtcacttccacgatgcgctcgacaccttgctacgccaggcacttgatcagcatacctggtctatcgagtatcgctgtgttgtcttccagcacagtcgcggggtttacccggaccgctgggaggcgacttgcttgctcgccgtccgaagaacagtctccggggtgtggagcataggaggcgtggttgtctcacctgttggtgaggacaatcctaggttgagcagcacagtcaacctagccgccatgctaaacacagagctggaccatgccttacatgagctgagtagggctcgtgctgagatcgtccaattgcgggctgagcgcgcggagcatcgtcacctagaggatggttctcccgctcccatcgggactcagcacccgtaccactcacctcggcatggacaccatgcttatggtaaccccgaccgcttgaccaggataaatttagaaccatag

SEQ ID NO: 36855 - DNA, 186 bp, Zea mays
  Peptide Sequence Number=SeqID_80230
atggcgggcggaattaagctcgccggagctaaggggaagtggctggccggtgagggtaatttggcacgactttcatatttggatcttctggctttgagtttggaaaagcagagaacacagatgatccttgagaagaggtctgaaattcagaaattcagaaatctgaatttctctaagggttcatag

SEQ ID NO: 36856 - DNA, 915 bp, Zea mays
  Peptide Sequence Number=SeqID_80231
atggcgctgtcccgcgaggggtgcagtcactatcagggcttcgatcgatccgatgaagacttcggccgcaagatttttaaggtcgaagaccctgttgtgaaggacgccgcgagggccctcttcgaccggatgtggggcccccacggtcgggaggcggttagggaacgggctgatcgggcgagggatcagatggcgcgtgctgaggacgtggaggacttcgggcatctgaacagcgcgctgcccgaagcggacgtcaacctggtggtggccgaggctgaggtcgacccggcaccgctcccgaaaaccggtgaaggttcccacgctgcccctgcgtctactgtatctggtggaggctcgctgccagccactgtgccgatggcggaggatcccccgaaggcgccgatggagccagcagcggaggatcccgtggcggcgactaggtcttcacaggattttgggcctgcgcacgcaactgctactgctaattttgtggcggcttcgaccgtggtcgctggaaatgaatcgaatgagtctacgtctaagttttctgagtttgacgactctgggagttcggttgtgtggacggaagagtcttcagatgagggcttggattactttgcggccttggatgtggctgaggcggaggcttctccgcgtgttacggatgctgaagttttgcctggtccaagtgttgggcgtaggcggcgaagggcggtggcgaagcgtagagtgagtgaattggatggtggtcggcttcgtgtgggcaggactggcaggcaggaattgttgtcctcactggttggggcgagtataggtgagggggagttgcatagtctttttgagggtgaggagctgaggataatgctgtttaactatagggagatggggatcattccgaaggttgaaccaatgtaa

SEQ ID NO: 36857 - DNA, 483 bp, Zea mays
  Peptide Sequence Number=SeqID_80232
atggcccccggtgaggccgtggagcttggggggtggcacagcaactccctggccgcagacaatgcccctggagcagccctcgatggagtctgggatgtctgcgcagttgtatgctactgcacaatgtgcacagtagcagtgcccgacactgggcggttgggagcccgtggcgtggaagaagcagcttcctcctccaccaggaaatcctccaaaatatccgcggtctgcatagcattggcgtgcagcggaagcttccctggcaatgtacgagtcatgatgatcgtggcgcttgcggcagtacggacgtgccgcctgccacgggaatggacaggcatgccgcctgcggtatggtctggtcaccgtctgccagcacagggaatattaaatgtcgaggtggcacatccctgccagtggagtgaacagggcacattaaatgccgaggcagcacatcgcctgtcaggcggcgcatcttcttcgcaataa

SEQ ID NO: 36858 - DNA, 1617 bp, Zea mays
  Peptide Sequence Number=SeqID_80233
atggtggcattagcgaagtatgtctgggcaacaacgtcgtatgacggtcagccttcggtggaagtcttcgccaagcactactgtctgcactggcagaagagaaggattggacataagattgcgcagttcgaatcgtgcactttcacgccgaagtccgggaagacttcgatggaggttgtggagctggtcccctatgctcgaaataagtggggcaactggtgggactactggttctatgtttcagaggctgaagtcgaagatcatcctgggctccctgctgccatcatggtatggggtgtggcccttggcgcatggatggacgctgggcgaagtatgccctcgctgggtgggcggaaagtgcgaagtccgctttttgctttggatgtgcgaaggcgggatcctgtcgcggttgtgcgtgaggcggaggatggggcgatgcgaattgttggtcgctacatgccgaggacggaggcccagcggagctgggacatacgtggatccaacgaccgcctgaatagggtctttgagttgaatggtttgtcgtatggcggttatcctggagtagacgttgtcgaccgccggggaaaaaccagcagcattgatggggacatgcgcggcccccgggggaaggatgtcttcgcccgagctccgggagtcttcggcgtggatgctggaggttaccggggttcgatggcccaagaacgttcctatccccgcgcggctggcaaagacttttttacatctcgcatggctcgtgatttgagagtgtttccttacggacggaacattgctgttgttgtgtcggcggtgatgaacaaggatcgccaggatgctgcgcagaagcgtcgggcggtcgtcaggctccctgaggctaggccgaagagagcgcgggggagtgcgaaggctgccgtccctggctgtagccagccttcgctggctgcgaagccggtcgcgcctggatctggcaagttgcaggagagcatgaaggcggccagcgctggcggaaccaagtccgccccggaaggagctgcgaaggtccgggagcagccttcaccggggaaacgtgttgccgacttcggcacaaatattagtgtggacaactatctcgttgggtggcgctttcagcgctggcggcgaggtttcggcggccactgccgtcaaggaggaggcggccactgtgtcccaccggctgcgggaggcatcgctgcagctgacatagcagctgaatcaagtaagttgaggtatgcttcattgtgtgccgctttcatggcggccgacttcgccgaccgcgtggcgtcgggcgcccttacggcggacgtggctgccgaagtcgagagacttcgggcgcagcacgcggacgccgtccgggaaaaatcggctgcggagagcaaaagtcgcaggctggcggagaaggtggccgcccttgagggcaagaggatggacctctggtgccagctggtggaggaaaggagggaggccaaccaggccatcaccaaggcgcagacggcgcaggcggaggccaaattggcgagggcggaggagagtctcgctagcccagcgcgccgaggaatgggaggcgcgtttcaacgctctgcaggcccgcatggagagggctga

SEQ ID NO: 36859 - DNA, 336 bp, Zea mays
  Peptide Sequence Number=SeqID_80234
atggtggatcttgattcatccgaagatctatttctactcatatccttcattgtcgaggttaactttcttcttgggtctgatttagggaccattggtcgtggtgttagatgccattatctgagttgggataacaattgcgggtacatggggtatgtcagaatccctgttaggttaaacagagggggttatgcaaccatcggatggttaaggcctcatagtggatcccagccattcacctcggtagtgtctaaggttctagctaaccctggcaacatgggatacacgacttgtgggtatagggtacaacctctacagagtgtaaaactggtatactag

SEQ ID NO: 36860 - DNA, 420 bp, Zea mays
  Peptide Sequence Number=SeqID_80235
atggcgcacgagagtcgagaggaggaggacgacgacgaggcgtataaatataatagcggcgtccattctgcatctcactctgttgaggcccagccgcctccaaacgaagaaccgtctcgtcgccttcgcttccttctactcctctacgccatgtgcctggatgaggcctgcgcggcggacaacagccacctgtgcgcgccgctgcccctgcggaccctgttgcacctgacgggctgcctgctctcgttatgggcgcctggtagcaacaccggcatgctggcgccgtctggaggattcgaggatgccgcgtgcgacacccttggtgccttcaccagcgtctcgctacaggggagggggctcgccggcacgctcctgtccccatcacagttctccgtgcccactttccagtgctcctgttga

SEQ ID NO: 36861 - DNA, 1521 bp, Zea mays
  Peptide Sequence Number=SeqID_80236
atgcgcccgtacatccccaaacccaccttcgcattctgccactccctactcgcctcccgcctcctcccctctgccgcctccccaaccgcaccgctcctccccatccaagccctcctcgtcaccgccggcctgctcccgcgccacccggacctcgctctgctcgcgctcaactcgctgctccacgcgctctcccgccgcgccgcgcgcccggcccacccgcgcctcgcgctccgcctcctccgcctcatgctctctcccgccacgcccccggcgctccccgctccggaccacctctccttccctttcgcgctctccgccgccgccgcgctcgacgccaacccgtcctcctccgccgccgccgggaccgcacctgggccgcagctccacgcgctgctcgtcaggaacgcgctgttcccggccgaccactacgtcactacggcgctgctccagctgtactcgccccgcccggacctcgcgcggagggtgttcgacgagctgccgcggcgggaggcgatccactacgacctgctcatcggctcgtacgcgcgcgcgggggcgcccgccgagggtctctcggtgttccggaccatgctcgacgacgacggggtgaccccggacgcggtcgtgctgacgacggccgtggcggcgtgcgcgcaggcgggggcgctggacctcggcgcgtgggtgcatcgttacgtggagcgcgccgcgccggggctcctcgccgacgccttcctcgggtccgcgctcatcggcatgtacgccaagtgcgggtgcctggaggaggccgtgcgggtgttcgacggcatgcccgagcggaacgcgtacgtatgggcgaccatggtaggcgcgctcgcggtgcacgggatggcagcggaagctgtcgcgtgcctggagaggatggcgcgggaggacggggtgcggcccgacggcgtggcggtgctcggggcgctgtccgcgtgcgcgcacgccggggacgtcgaggaagggctgcggcttcttggggagatgcggccccggtacggcgtcgtgcccgggcacgagcactacagctgcgcggtcgacatgctctgccgggtcgggcggctggaggacgcggtggggctcgtcaagatcatgccgatggccccgctcgcgtccgtgtggggatccgtgctcgccggctgccggagccacggcaacgtcgagctggcggaggtggcggcgcgcgagctcgagaggctaggtggctccgccgatgagggcgtgtacgtgcagctgtccaacatctacctcgacgccaaccgcaaggatgacgcgcgtcgggtgcggaagctgatcggcggccgggggatcaagaagctccccgcgtatagcgcgttagaggtggacggcgaggtgagctcgttcgtcgccgacgaccaagcgcacccgcggcgcttcgagatctgggaggtgctccggctgctagccgaccagatggcgcagaaaccaaacgaagaagaatctgtcgagctcatttgcgtgctcgcagggatgtaa

SEQ ID NO: 36862 - DNA, 648 bp, Zea mays
  Peptide Sequence Number=SeqID_80237
atgcctgcgcggtcggtgtcccgcagcacccacaccgagtggcccgtcttcaaagtcatcctcgtcctctcctcctggctcaacgagaccatcaacgtctggatgttcatgcacctgctcgggttcatgctgttcttcgacctcaccctggtgcacctcggccagtacttcaccaaggcagtcaggcgggataacaagcagaggtttagtctattggaggaagatggcgagctgttgatccgggcgaaccagggacacacagtaatatgctatctttctaattctggccaattgccttacaagtggtctgtggagatcgatttctgctgctcgcggacggatgccgaaggatggggcaacctacctaacatctgctttatttttttcttcctacgatggtttcccaacaagacgtcgctgcggatggcggtggcccggatcaagctgctgcggaatcgcaaggaggtgcaggtacaccagatgcgtcacgaggtcgcgcagctcctcgaggccaaccaggacatgaccgcgcgcatcagggttgaacatgtcataagggaagaaaagttcatgcaagcatatgacttgattgaagtatactatgaacttatagtagcacgtctgtccattattgattcacagaagtaa

SEQ ID NO: 36863 - DNA, 546 bp, Zea mays
  Peptide Sequence Number=SeqID_80238
atggagcttggagggtggcatagcaactccctggccgcagacaacgcccccggagcagccctcgatggagttcgggatggctgcgcagttgtacgctaccgcgcagcgtgcatagcagcagtgctcggcactgggcggttgggaacccgtggcgttggagaagcagcttcctcctccaccaggaaatcctctaaagtcttggtgcggctccgcccgttggcttacgtcagcggcagtcggccacgtggcagtatcgggtctccgcctgagcggggagcggaagcgaacgagaccccacacagcggggtccgggacccataccgagggcccggttcgtgcacgtgggagtcctggactttacccggaggtccagttcgtatatacaggggtccggcacttcccatgggggtccggacctactggcgataccttggaggatatcgtcttctctggccatgtggcggcccaggagctgcccgcgtggcggggtcgggcgctgcttgccacgcgactagagatagccacgtggactcctcgccttcataa

SEQ ID NO: 36864 - DNA, 600 bp, Zea mays
  Peptide Sequence Number=SeqID_80239
atggccttgctagaccctcccgagtgcttccagtctgaggtggaactcgacttggtgcacaacctgctcagatggggtgcgccagcattcgccggaaggatccgtgtcggcgcctctcctcagggcgatctcgccgccggggaattcgtgctcttcgtctccaacctctcctacgggttggcactgccgatctcgtctttcttcgtgctgctgctggaggagctcggcctccaacctcagctcttcacgccctgcttcatccttcaggcggccatcatcgcctacctctgcaagatgtccatgggggcgacgcttcttcctctagcattcggaggaatgggtgttgcgcagcgacctttcagaggtggaaggcgagctgagctgtggctccatctttcgcgtgagcttcaccagcaccccatggtgggaagcgagctgagctgcgactccatctctttggctttgatagctttggtgccagctccaacggtgaccgctggcccggctacttatactgaagacgccacccaggaggttgtacaagatgtcgcggagatggcggccgcgcgcttccagcgcgaccctactgatgtcgagtag

SEQ ID NO: 36865 - DNA, 438 bp, Zea mays
  Peptide Sequence Number=SeqID_80240
atgcgaggagcgaaccaccgcgcctcttcatctccgtcgaaagcagcggaccagcctctgacacgggggcccaggcccacgagtcatcctcctttggcatcggtctccgtgtgcgaagaaggcgaatcgccacgggaagagcaagccgccgcccgcggtagtacgtctcttcacctccgccaaaaccaacagcccagtctctggcatgggggcctgggcccacgagtcatcctccctgggcaccggttcctgggtgcagagaagtcgaaccgccgctcgcgccaataccgtgtctcctcggggccacagcagaagacagagaaggtgaattttcaaaaccaatgcagcggtatcgaggcaccccgcgcgtggcccagcaaaaccatcaagtgcggaggccatgggtcagtcagccgcggggacaggcgtgacagttag

SEQ ID NO: 36866 - DNA, 648 bp, Zea mays
  Peptide Sequence Number=SeqID_80241
atgacaaatcccaggtggctcaccgccgcccactccgtcagcagcgacaacgacctccgctccgggtggccaaacagcagcagcgatgacctcagggcagacgctgctgcgacaaggctcttgttcgcgtcccctcgcggaggacgagaaccagacattaaagccaaagagccggaggtcggtccgcgagtggcactgacggtctcgtcggcggagaatctttctccagccgccaccacctcagcaccgacggtggcgtccacctgcccaccaacaccgcaccagcgagcgccggccgcccaaagcgcaccggcaggtcctcactcccgtcctcaccatgaaaacgagaatgggaccgtcccagaacacgagtactgccctcgtggcgtacgacgtgttgtgagaccccctggtgcggctggccacaatcgcccggacagaggatggaatgctgcaccctggctgggtagcagcagttcgccttccccggcatggctggaggatggtttccacccccagatgccggagaaagaagcgggacaccagcccacgcgaaggcgtcgcgggctaagtcttcaccgacgcgctcaaaggtcctccccctacgacacgggggctgggtcccacgcggcatgtgagctggcctag

SEQ ID NO: 36867 - DNA, 1680 bp, Zea mays
  Peptide Sequence Number=SeqID_80242
atgcaggcggcatgcaactgcaccaaggggatgcaccctttcgacttcgacgcatccagcgtggcggcccaggcccacacgtcatgtaactggcgcgacagttacttcgtgcaaaaactgcaccgccacttacgccaatgtcgtgccttctcgactgcggaaccggtgccgcgattcgaggcaaccctgcgcatggaccaacagtgccggccgagcacttcggtcacgggctcacgtcccctcctggagcagcaggagagccctctcccatggcgtgaagacgacgcgcccgtgtttcgttcctcgaacggctcgcgcatgcacaacggctgccccgcgaaccactcgtcccatcgcattaactccacggcagggcaggcgacacctttggcagggaccgggaaaggggatactccgaaagggatccttctgtgcgaaggaagcgagccccgagccctcctactgatcaggggttcgaaggctggcccctcggaagggctggcccctcggaagggttcgacagccgcctcaggccactcaggctccacgcccactactgatcaggggttcgaagtttggccccccgaagggttcgacagccgcctcagaacacgcagagcgagggatgactctggaggctcgagggctgctctcacaaacccggctccggccaaaccgttgacagcgtcaacataccagcccgagaactcggaacctgactatgcacccgggctacgaccactggtaaacaccatcaacacaaagctgcaaaggcctgatgggcgcaatacaggtcaaagctccgtccactcaagggacacgatctcgcctcgcccgagcccagcctcggacaggaacagtagacccaggtggattcatgcctcgcccgagggcctcctcaagcaacgggcgcaccttcgactcgcccgaggcccagctcgggtaggcttcacagtgaagcaaccttggctagatcgcctcaccaaccgaccgtatcgcaggagcattcaatgcaaggatcgcttgacaccttatcctgatgtgcgctcctcagttgacaaggccgaaccgccgagtccagcctcaggcgccataggaagctccgcctcgcccgatcccagggctcggcccccgcctcgacctcagacgacggtctccgcctcgcccgaccccagggctcagactcaacctcgacctcggaagacggtctccgcctcgcccaaccctagggctcggactcagcctcgacctcggaggagtcaccgcctcgcccgaccttgggctcggactgaccacgttacaggggcccacctgtcagtcatccccaacctctcgcccacgatctccccgccgtggacgctcccacatccgcacgttctccggccacgtccacgcccccacgccccttttgagccccgcgccctgctcgcccacccctcctctctcatttgcgccctctgcccaactctctcgctctgcccacgcgtgcagggagctccgccactgcccaccgacgtccgctgcccgttctgcggtcaccgtcgtgcccacgcctcgtcctttgccctgtccgcgctcaccgaagcaatcttcgcgtgtagggagccccgccaccgtcgcctgtcgagcccttgcgcctccgtcgttgcttcgcgactccagcgcttctgctcgaggtga

SEQ ID NO: 36868 - DNA, 192 bp, Zea mays
  Peptide Sequence Number=SeqID_80243
atgcgcgcgccaaccctggtctctttggcgtgccgtctttgctccactgccgtgtgggaccacactgtcagaccaggagaactgctgcccgaaagaccggaattcctcaccgtacctggagttccgccgcagatccgcaccgcgccgtggacagcttcagcggcccctccattcctggaattagaattgtag

SEQ ID NO: 36869 - DNA, 642 bp, Zea mays
  Peptide Sequence Number=SeqID_80244
atgccggggaaggcgaactgctgctacccagccagggtgcagcattccatcctctgtccgggcgattgtggccagccgcaccagggggtctcacaacacgtcgtacgccacgagggcagtactcgtgttctgggacggtcccattctcgttttcatggtgaggacgggagtgaggacctgccggtggacgccaccgtcggtgctgaggtggtggcggctggagaaagattctccgccgacgagaccgtcagtgccactcgcggaccgacctccggctctttggctttaatgtctggttctcgtcctccgcgaggggacgcgaacaagagccttgtcgcagcagcgtctgccctgaggtcatcgctgctgctgtttggccacccggagcggaggtcgttgtcgctgctgacggagtgggcggcggtgacgagtgaggtatccgtatcccggaggcgtaggagtcccttggctcggtcggccttgccactcaaggcttctcttgctcagttaaggaaccctcggctgctctgcgatgagccggagccggaggcagcggtgttagcatggacagaggcggggtctgctcgagaacaagcttcgtcggcccaggagcagggggcttcccaggccgaggaggcgtag

SEQ ID NO: 36870 - DNA, 984 bp, Zea mays
  Peptide Sequence Number=SeqID_80245
atggcgtattgctgcgacgacggctgcaactgcccccctgactgcgggtgcccatgcgactgctgcaatttgtaccctgaagtggagaccgccgccgccagcggcatcctcgctgcgccgaccaccaaggccagcgccggcggctgcaacacctgcaaggtcgagccgaaaaaatttgaggtcctcaaccagttgtcctctgggtcggtttctgctgaagtccctgcccatctttcagctttggaacagagggttcctgctacaaatgaaggcctgctggatgcttgcctgccggcgaggtccatgaggccttcttgcgtcttggcttttacgacggaaatgacgcgtgaagaagcagcattgcgaaaagccctgttcgtctcggtggtgggcaccaggcctgaagttcagggcgttgaggtgctggaggaagttgctctcagtttcggcatcgatgtggctgcaatggcgattcatcaggccatgccagaagacttcctcctgtttctccccgatgaggacacagtatcgagggtctacgggggaggcaggcttttcagaggtccgcgtttcaatctgcatttcaagagatggacgagatgtgctcatgcgtcgacagcaaccctcccggccctggtggacgtgaaaatccggggtataccgcctcatgcttgggcacgctctacggcggaacatctgctgcatggctcatgcctcatttctgaactgcacccggcgacggttgagaagtctgacctctcgtccttcatgttaagggcatggtgtttcaacccagttcttctccaccgtgacatggatctcctcatcgtggaacctgggccggcagcaacagagatacgctgtctgtcatacaaaatcagcatagaagccttcccggtggacttttcggcgacaggggggaccctctccctcccccatcgatggacggcaaccctcccggcggcgacgatggccagcctctag

SEQ ID NO: 36871 - DNA, 909 bp, Zea mays
  Peptide Sequence Number=SeqID_80246
atggcaaggcgagagacgaggcagcgcagaggacgcttctctgtttgggcacaggggatttatgggccaacgagccaagaccagaaggaagaagccaatgagccacgtccaagccagaaggaagccaacgagccgagtttctttgagatttgtgcggccaaacacgtggcgttaatcaagacaagcctgtacagacgttactttgcaggccgctgcagccaatttttttccgtgttgaaggggtccaggcggagagagatgcatcatgtccgcgtgaggggcctgttcaggtttcatccctacttatgtgttggaccactggagcagagggatgctacaagtccgcatgaagggcctcatcaggctgcagggtcgctggagctggtccatggtcaggctcccccactgaagtattattctagaaggcggatcaggagccagcatcaggtgcaagatgaatttgatcctagatcagattacagcaacaactctcaagctttggttcagcaaggtatcacaccggtgcaatcgtttgttgctagtgttacaaaaccaatctcttgcattcttccccatccgcccccacagaagagaaggtctgcgcagctgcctccggattttgttcctcgtcatagcagccgcctggcaagcaagggttctaaatccagcaaagatgcgcctatcagacatatccagcaagatctcattagaaggttgggtattgctagtggaaatgaggttgttagcactgaagctcatgataagtatggacgtttcttctccaatccactatcggagtcccacatcaaggctttggtagctttatttggttggactgttcctgaaaacgtggagaacctggagaccattcagctcctcgccggagatgccccgactgattttatttag

SEQ ID NO: 36872 - DNA, 397 bp, Zea mays
  Peptide Sequence Number=SeqID_80247
atggactatcctggaaagaaactcaatgtcatgttacaacccttgattgaagagttgaaagatctttggaaggagtcgaagcatatgatggcagccggcaccggcggaaccaagtctgcctcggccggatccgtgaaggcccgagaattgcctttgtcggggaagcgcgttgccgactttggcaccgatattagtgtggatgattatctcactggatcgggcgaggggcaacttgttgttgttccgcctgcggtggtccccacggtgcctcccgcggtgcctgggcgaggggtagcgctctcagtgctggtggtgagatttcggcgctcactgccgtcaaggacgaggcggactaacgtcccgccggctgaaggaggcgtcgcagcggctaagtcag

SEQ ID NO: 36873 - DNA, 396 bp, Zea mays
  Peptide Sequence Number=SeqID_80248
atggcgaggcgatgtacagtcacaacctcgtggagagggtttgaattcagggaaaaatgtttctcattttgggtgatcggcaaggcagttatgctcgatgaaatcataaactatgtgcagatcttgcaacgacaaatcgaggttcatcatgggttttattctgcatatcataatacaactctgctatatgagatcctgaagtctattaaatgggcaagaaaaatgtatggaaatctacctataaatgttgtgggacactccatgggaggggatctagcttcattttgtgcccttgatctatttctccatggacttgcattcacacatcaggaaggtcttgaggaagctatggctgatgatggtcctcaccgacataaccttttctttgcacactaa

SEQ ID NO: 36874 - DNA, 1035 bp, Zea mays
  Peptide Sequence Number=SeqID_80249
atgggtaaagacataaagacattccatctccctactatcatcgacagatatgacgattcacatggtactgatagagagatttacgaggaggaaagtatcgagccgatggcagaatacgttgctacgaaagaaaccctaaatgaggagcagaggtctgcctatgataagatcctatctgtcgttgacaccaataacggtggtgtgttatttgtggatgggcctggtgggactggaaagacctatctgtataaggcgctgcttgcggcactatgtagtcagtacaaggttgtagttgcaacagctacatctggtgttgtgacttccatattgcctgggggaggactgcccattcgcgcttcaagataccacttactattgatgacggtgatgctgccctttggtgggaagagtgtagtgttcgggggtgatttcagacaagtactccctgttgtacgcaaggggtcaagggctcagatagttgctgcctctctacggagttcttacctctgggaatccatgtgccacctaaagcgtgttcaaaacatgagggcacagagcgactcatggtttgctgaatatttgttgcgcgtcggaggtggaactgaggaagcgaacaacgatggtgatgttcgtcttccaaatgagtttaaaaggaagcagtttacgataagactaagttttgccatgacagttaacaaggcccagggccagacgattcctaatgttgagaataaatcaagtgcacctgaggcttgtaaggggcaatgccactctgattcatctgcatcaaagcttctagaatcccatatgatccatgactttgaagttgatggttgtgataattttgagattgggacacaatttagtgagctcattaacttgtgtatgaaggattccatagagggacagtcaaactttggtgcagctcccatggaacaaaacacgatagactctaagagactcagtttagaccatgaagcgaaatgccctctatgtggatcggatatttctgatttaagcgaggagctccggtag

SEQ ID NO: 36875 - DNA, 456 bp, Zea mays
  Peptide Sequence Number=SeqID_80250
atgggcaagagtaacaaacgcaagcgcgagccgactcctccgtcggaggacttcggcgactcggaatactcggaggaggagttctcctcggagtccgaggggtctccggctcccgtctctcccccgacgtcgtctgatgattcagacgactcccaggggattgccgcggaagtctggacgtacatccgggtcgtcgagcgctccgggctcgagggctcggatgagtcggagttctcctcggacgaggaggactcggacggcggcgaggacgaggatgacgacgacgacgacggcgacgacgacgacggtggcgacggcgatggtgacggtgacggcagcggcagcggcgggggcagcggcggcggcgacgggagcaagggcagcaccagaggcggcagcagcaagggcagcaccaggggcggcggcggtggcagcagcagcaaggccagtggctaa

SEQ ID NO: 36876 - DNA, 819 bp, Zea mays
  Peptide Sequence Number=SeqID_80251
atgatttgcgtcctcacactgtttcccctccatccgcgtgatatcctcgcccccgcgccccgctcggtcaatggcaggcgtgcccgcaacccgccgagcccccgcctcctcatcccctccatccacgcgctccgtgattcgtgtgaccgggaccgccacggggcgacggagtgcggggacctgggaatcgtcggcctcgcgctcagctccggcaatgctctctccaatcttttctcaaaccagaggaccaaggccgacagcattgtgcctgagtacattggtgacgacaaatgtgtttgggctcacggctcccctaggtgccttctagaccatgttgttggaactctgaaaaaggagatcggaagtcagatggaggtccgttgccaaaccagcttttgccagaatgaagatggtttccccaagttgctgagagcatgcacagttcgcctcggaatcaggagccagccagagtatgatggttgtgaattcgtcgagcatggcacagagaagtgtgtcatgactgtatacattggatccagtccgcaccatgtggaatggagtgtcactgctgctgggcacatattcaaagacacctgccaagtcgtcgcccgcaaggcattgagggccctgtgtcagatctatgaagaagaagtggccgacacctgtcggtgttttgggtccgaccgcacacccggggttgcccctcaaggttcgggccgcttagagatgcgtaacaccctacgtcctggtgagtatgtgagcgtggttacaagagggctctatggattgaagacacagagagttgctgtgggtggctaa

SEQ ID NO: 36877 - DNA, 465 bp, Zea mays
  Peptide Sequence Number=SeqID_80252
atggttgcaaacttatttctcatttacccaaggtggtatgccaaacaatttctgcatcctgacattgttgcccgctacgactacatatttatctgggatgaagatcttggtgtcgaacattttaatgcagaggcgtacattaagcttgttaggaagcatgggcttgagatctctcagcctggtttggagcctgataaaggtttgacatggcaaatgactaaacgaagaggtgatcaggaagtccacaagtttgttgaaataatggcaactgtattctcaagggatgcatggcgctgtgtatggcatatgattcagaacgacttggtccatggatggggccttgattttgctcttaggaaatgtgtggagatagcaaatgtccgagagtggttgctcgacttcttcatgaatgaggtgatagacattggtggatcatgcagggttgaggttgtttcacataactaa

SEQ ID NO: 36878 - DNA, 174 bp, Zea mays
  Peptide Sequence Number=SeqID_80253
atggggagtagctctctccgggcagaaagggaatcacggcttgtgggtggcaatgagattgatggttttggttatgactatggtactggttgtcagcattgcaaccactgctcaggcgaagatgaagctgtggaaggagacttccaggagttccaagactacgacgagttctag

SEQ ID NO: 36879 - DNA, 3431 bp, Zea mays
  Peptide Sequence Number=SeqID_80254
atggattgtggtatttacacgttccgtgcacatggcatgatgtaccacaatgtaaggtcgtttggtagggaagctgggacggaacataaacaccttgaactttacttctacgatgatgattctagcctcgagcatagatataataaatgtcgtcaagatcatcttgagaaagacaaggcagctattacacagttggttgaaatacttaagggaaacccatactctgagcaccttaggtatatggggcacattgataacgttgaagactaccatatcgccttgaaccttgaccagacgctgaaccagaaactatataatgcacctatcactttggagaacgacctagccatctatgtgtgtctgtacacgactattactgttatagattccaaattcgaccaggatcgtctagaccttgttgttcgcatattccgtccaaaactagaggaactgaagaagagattgactaagcatcatattcttggaaaaatccgggcttatgtctttgtcgtggagttccagaagcgaggtttgcctcatgcccatttcctactcatcatgcaaagaaagtacaagctaacttgccccgatcagtatgatctccttatcttcgttgagatccctaacaagaagaagtacccccaactgtacaagatggttatcaagcatatgatgcatggaccgtgcgggttgctaaatcctaaatacccatgcactaagggtcgtgcttcatgcaaaaaccattatcctagagattttagcgatgcaacgttgcaaggaaaggattcataccctatttataggtgtcgtgatcatgggagtaatgaaaaggttagaggttatgaattggacaatagatgggtcatcccttataacccttacctcctccggctcttcaactgtcacatcaatgttgaggcttctgggagcatcaaggctatcaaataccttttcaaatacatatacaaaggccatgatcgtgcgtctgtggctgtgagagatgcaaacaatgctaatggtgacgttgatgagatcaagcagtatagagatgctaggtgggtgacccctccagaagccatttggaggatattcagctttgatctaagtcaaaactctccacgagtgatgcaactgcagctccatcttgaaaacatgcacatggtatcatttcacgagtgtgctaaagtaaatcctgttgtccaacatccaggtgccgataggtcaacgttacggcatattttgaggcaaataggccacacgaggaggctcagggcatcctttatcatgactttcctgagtgctgagggggagcgcttttatcttcgacttctcttaaaccatgtgacgggtgctacctcctatgcggatctaaggacaatagatggtgacacactaccatcttttcgtgaggcagcacaaaggaggggactgcttgaagcagacgacacaatagatgagtgtctcaacgaagccgctctttaccaaatgccatcaacgctacgaaggttgtttgcaacaatactggtatactgcgagccgaatgatgtggcagaattatggcagagataccttgacgcaatgtcagaggactatcaccgtagtactcaaagcaaaccgcatgtgcaacatatggtcttgattgacattagaaacattttgcagtcaatgggtaaagacataaagacattccatctccctgctatcatcgacagatatgacgattcacatggtactgatagagaggtttacgaggaggaaactatcgagccgacgacaaaagacgttgctatgaaagaaaccctaaatgaggagcagagttgcaacaactacatttggtgttgcggcttccatattgcctgggggaggactacccattcgcacttcaagataccacttactattgatgatggtgatgacgaggcatcaatgactaagagacaagcaattgaggcgctagacaatagcatgtgtgatgtaatgggacggcctgggctgccctttggtgggaagactgttgtgttcgggggtggaactgagaaagcgaacaccgatggtgatgtttgtcttccaaatgaaatgatgtaccatagctttgacaccgcggtgcatgatcctaataacaattacccattagaatttctaaatacgctaactcctaatggactacccccacacgttctgaagctcaaagttggatgcccaatcatgttgcttaggaatatagaacctgctaatggactttgcaacgacacgaggttggtggttcgtggtttccaaaaaaacagtattgatgctgaaattgtccttggccagcttgctaaaatgcaaattttcttacctcgtatacccctgttcccctctaaagatgagatgttccctttccagtttaaaaggaagcagtttctgataagactaagttttgccatgatggttaacaaggcccagggccagacgattcctaaggttggtgtgtacttgccggaaccagtgttctctcatggccagctttatgttgctttatcaagggccaccgctcgatcgaaagtgaagatacttgtcattccagtcactgatgagatgaagaagaagaagggggttgaaaggaactcaacgataaatggcacaacatacacgaagaatatcgtttatacgagcttcctattgtttagtggtcatgtggctgatacgataaagaaagcagatgagcattggatagataagaacaatgttcagtatgcaaatctcgtttataaggaggtccttacccccgcacgttctgaaggtgtggagggacatcacgactccaggttgattgaatcgaggcttgttgaatcagatgcaaacctcgagtttgtaactgggattcttggctcactgactgataaacaggacacggagaaagcaaacggggtggtatctggatgtggtgttggatttcagaatgggaactatcacttggatgctctatattcagagcttctaatgtcgaactcaaagtatgatcctagagtttgtgttatcaatgaaatccaagaacctggtttgggagcctgtaacttgatttcacaggagaggaaagtagcagcaggacattctgcatgtgcaacccctgaaaatgtgactgtagagaacaaatcaagtgcacctgaggcttgtaaggggcaatgccactttgattcatctgcatcaaagcttctagaatcctatatgatccatgactttgaagtttatggttgtgataattttgagattgggacacaacttagtgagctcattaacttgtgtatgaaggattccatagagggacagtcaaactttggtgcagctcccatggaacagaacacgatagactctaagagactcagttcagaccatgaagcgaaatgccctctatgtggatcggatatttctaatttaagcgaggagctccg

SEQ ID NO: 36880 - DNA, 444 bp, Zea mays
  Peptide Sequence Number=SeqID_80255
atgtttgactattcacctaatatgatagctatttttcaggatgttggattatggctggaagaaataaatcttggtggctacaaacaagtatttcaagaaaatagtgtcaatggagaatatctagaaagcttgtccatgtttactactgagcagattctgcgctttattaggcggtgccatatgaaatggggagactttatcacactgtgcaaagagttgaggcgcattaaagagttgccacaaacactattggatgtagttagaaaaaagaattctgtagtggtccgtttgacacaatatgaacaccttaatgagaacaagtcagaccaggtggggtattgttcgaagcctcgaagcatagtgactagcgaggttttgtggcgtgccttaaaggggagcaagaagtccgcaggccatggtgggcgccggcatgcctctccgtag

SEQ ID NO: 36881 - DNA, 153 bp, Zea mays
  Peptide Sequence Number=SeqID_80256
atggggcttatctgcattagttccctgtctacaaaaagggacaaattggatatttggctggaattcccagaagaagaagatgaaattcaagaagtggtttctgaagaggagtctgctttagtgcctgctcaacaagtaatgggagccatctaa

SEQ ID NO: 36882 - DNA, 486 bp, Zea mays
  Peptide Sequence Number=SeqID_80257
atgactgaaggagcagtcgttgggatgcaacaacagataatcccggatgtcaccaccaatgatgccgatgaaggtgtgcactttgtagagaatcatgacgaggatgtactttttgaagaagatgatgacgaagaagatggatacctattcgctgggcaagatggtgaatctattgaggatattgagattgatgaaacccaagatgcatttactgttaccccagacgtacctaacacgtacgataaggtgtatagtaacatacctgaagaaacacattcactagacattgttgctgactgcgtctactacaaagcaaagaagtttcatatgactacaaacatggattgtggtatttacacgttccgtgcacatggcatgatgtaccacaatggaagcccatactctgagcaccttaggtgtatggggcatgttgataacattgaagactaccatatcgccttgaaccttgaccaaacgctgaactag

SEQ ID NO: 36883 - DNA, 735 bp, Zea mays
  Peptide Sequence Number=SeqID_80258
atggacttgcatggccgagatcccgccgcattcgtgcgtgaggcggaggatggggcggcacggattgttggtcgctacgtgccaaagacagagggccagcgtagttgggacatatgcggatccaacgatcgcttgaatagagtcttcgagttgaaccgtctgccgtatggcggttatcccgggcaagacgatgtcgaccgccttgggaaaaaaccggcggccgagactgaagacgaccccgcgccggcggccgccccatccactaagaagaggaagctaggtactgcgatgggaggactgggggtctccgatagttttgctatggagctgatgggtgtgacggaacctcccaagaacgtctcacccgtcttgcagacattacagaacatcggagataaagaattgcggaagcgattacataaacttacatttattaaaaaagcaatactaagcatagtaaaatctttttgtaaaaacagggtttcaaggaagcaagcaagtgagaaagattttaaaaacatcaagggaggtggcaaatgcaccggggcttgccttcgttcacagaaccgcgaaggccatgagcgtttgatcgcgttcccgatgattggtggtctctcagttcaaattggtgactcgaggcgtggcaacctcatcggcgatgatgggacgacagtagagaatcacggcggtgccgtggaaaggctcggacacgcagcgggcacagagatggcatga

SEQ ID NO: 36884 - DNA, 1557 bp, Zea mays
  Peptide Sequence Number=SeqID_80259
atggagagggccgaggcttctacgcgctcggaagttgagcggacatgcaaacagcttttggactcataccacgagctgggcgcgcggaccgctgacttcgaagtgcccgaccgagagtcgggccttcgctgcctcgagtggctgcaagaggagttgctggctctcccgaccattgtggagggttttatgtcttttgcctccctcgtcacctgcgaaggggcgatgaacgcgctgtcccgcgaagggtgctgccactatgagatttacaaggtcgaggacccagtggtaaaggagtccgcgggggccctctttgaccgtatgtggggccctcacggtcgggaggtggttagggagcggtccgaccgggcgaggggtcaggcggcgcgtgccgagaccgtggaggacttcggctctttgaacactgcacgacctgaagccgagacgaacccggtggcggtcgaggctgagatcgtcccggcgctgcccccggaaaccggcgaaggctccctcgttgcccctgcggctactgcgtccggcggtggctcgtcgccaaccgctgtgccgaaggctgaggatcccccgaagacggcgacggagccggcggcggaggatccgacggcgggctgggccttcgcaggtggcttagtgggtgttcaagattttgggcctgcgcacgcaaccgctactgctaattttgtggcggcttcgaccgtggatgctgggaatgaattggatgagtctgcttctaagttttctgattttggtgactctgggagttcggttgagtggacggaagagtcgtcggatgaggacttggattactttgcggccttggatgtggctacggcggaggcttcgccgcgtgctgcgggtgctgaagttgtgcctggtccgagtgctgggcgtagacggcgaagggtggttgcgaagcgtagagaatgctccaagtcctcgccggatggtgttgcgagcctgtatgcgctggaggatgccttcgttttgacgatgaaagggccctcccacttgggctccagtttgcccctggactctgttcgagctgttcggacgagtacgaggtccccttcgctgaattccctcgggatgactgcgtggtcacgccatgcttttgtttgggcttggtacttatttagagcctgtagggcgaagacgaggtctccatcgatgagatccttcgaagtgggtccgtccacgtcggggacagctgacgagactgtccgtggggacccatgttttatttcttgcggggtcatggcctccgatccatatagaaggcggaaaggggtgaacccctgcactcagtcgtgtttagcgcacagaccgcttcagttcggacggtactccgaagcggcaaacaatgttttgctagaagaatttctgtgcagtcttcgatgttattgtggatacagccctcgcctcgatccatttggtaaaatactcgacaacgacgaaggtgaacttgaggttcccctgagccgtgggcaggggcccgacaatgtccaggccccagcgctggagaggccatgtgtgggcgattag

SEQ ID NO: 36885 - DNA, 567 bp, Zea mays
  Peptide Sequence Number=SeqID_80260
atggcacccaagaaagctagctcgaaggctgacgaggctgcgaaggcagcactgctggccgcaaaaaagggcaaggccctcgccctcacccacaccacccaccaagaggccactgaagacgacgctctccgcaaatgcgaagacgacgctctccgcaaatgcgaagacgacgctctccgcacctgcggctctgaagggcagccgcaacctcccctaggcttcactccaccggagggcgcggacgtcgcagaggacggcgaagtcctcggtgtttcagcggaagagcagctacaactgcgcgccttgcgtatcaagaactgcaatctccagaggcaaaaagagatacttgaggccaagcgccaatgtgtgtctgcacaagccaaggtgcggcaaatgatacgcgacgaagagcagaaggcccaggagctcgagcaggagatcgcgctaatgcagcacgaaggccacctcggcctgcaacatgggccacccctgcaacagcgcgcacaagtcgaagacctacatttcccccagcgcgaccacgccatcccacacgccgcggcattctag

SEQ ID NO: 36886 - DNA, 216 bp, Zea mays
  Peptide Sequence Number=SeqID_80261
atggcctcgtcgtgggcgaagctcttggaattgcttgccatggatacatcatcgccgcggatccgcctgttgccgtggccagcctgctatgtcagtgaccaatgccggtgcttaataactccagaaattcataacttggtaaccgtaactccgaatttagtaattcttgttcctatgatctcgttacgcagtgtagaatattattatgtagtttga

SEQ ID NO: 36887 - DNA, 129 bp, Zea mays
  Peptide Sequence Number=SeqID_80262
atggctgaagctcgggctgcaatggcgggcggaaatgagctcgctggagctaaggaggggtggctggccggtgctggtttcgagttagggatcaaggtgaacatgcttgatctttggctcaaggtctga

SEQ ID NO: 36888 - DNA, 111 bp, Zea mays
  Peptide Sequence Number=SeqID_80263
atgacgaaggttaatgctttgccgaagattgtggaatgcttaggaggagatgctggcaacatggaggactttgaggagtttcaggactacaacgagttctatttatcttag

SEQ ID NO: 36889 - DNA, 733 bp, Zea mays
  Peptide Sequence Number=SeqID_80264
atgcaggtggcgtgcaaccgcaccacggagacgcaccccttcgacttcgacgcatccagcatggaggcccaggcccacacgtcatccgcgggaggaggcgtgacggtcgatatggccaaaagtgggccggcagtaatggcggcagcaggcgagcggaagcagcagtcaaatcgtctggaggctcacgtcccctccaggagcagcaggggagccctctcccacggcgcgaagacgacgcacccatgttccgtctctcgaacggctcgcacaacggctgccccgcgaaccacccgtcctgtctcattaacttcacggcagggcaagcgacacctttggcaggcgaagcgggcgacgtttcacctccgccatgatgaccgcgtcaaaaaagggaccgagaaaggggatatttcgaaagggatccttctccgcgaaggaagcgggccccgagccctcctactgatcaggggttcgaaggctggcccctcggaagggtttcgacagccgccccagagcactcgggcttcaggcttcattactgatcagagatttgaaggctggtccctcggaaggattcgacacccgcctcagagcactcgggctccgcgcccactactgatcaggggttcgaaggctggcccctcgaagggttcgacagccgccccagagcacgcagagcgagggatgactctgggtacgtccgatacatggccgaggctcgggatacgctgtcgag

SEQ ID NO: 36890 - DNA, 450 bp, Zea mays
  Peptide Sequence Number=SeqID_80265
atgccgccgcgcacaaggagaacagcgcgcaaacatactggaccgattggtgtgccgtgtcaccagctggccccaagacatgataatagtagtagtggaagcaatgatccgataggggatctcgaagcagaagtaagtcggctccaagcggaactccgccgcaggacggctatatgggtcgtagatggcgaccgcataaatgagttaagaagagacgtccgccatctgcaagatcagctcgcggatcgggatttggcactcgactgggttattcaatctcgttcgcttgcatgggacaaggagcaaaaagctcaagctcgagtagccgagctcaacttggtcgtggatgacctgcagacatattgcaataccttacatgaagaagttcatgtattatattcgcaactgcatcccaatgccttccaagactcgcgcacaggacagagctag

SEQ ID NO: 36891 - DNA, 288 bp, Zea mays
  Peptide Sequence Number=SeqID_80266
atgccggaagggatagtggaggatgtggacgtcgagtgtagtggaaaagaattggaggacatggtggaagggatggtggaggtggtggtggtgatagaggaggtgatggtggaggtggaggaggtaaataactgtagacagcttcagcccaaaactgaggaggaacagaaaatgtcaggagtaatacacgggcagtctcaagaagatggcggtgcttacgctcagcaacaccattctgagcctaagcatcaatacaagaatactgaggaagggtgtcttgatcagtga

SEQ ID NO: 36892 - DNA, 1016 bp, Zea mays
  Peptide Sequence Number=SeqID_80267
cgagagttcgggtgtgccagaccaaaaagggaggagaagagacggtgtacagacgagtgcgccagacggcgtctgcggaggcgaacgtgctgaatgctgtgatcagcagtgacgacatcggcttgtcgcccctcggaagtgtactgaaaatcagaaataaagatatcaactacagtctccagcacgggcacaatggtgttatccgcctccacgagttcctgtggtgtctttgtttggagttcaagcagcttcgggctcaactccttgctcgttctcctctcccatccatggttgaggtggtcaccttagcccggactgaagagattcgtcttcgtggtgtgctatcgtcttcatcgatggttcttgctactccaactgtgtcgcctgccccagctcctactactccagcaccagcagcggtccctcttgcttcaggatgtgctgttgttgtcttttgccgctactacaaggcgacgacacataccattgagaagtgcaggcgtcgtcctccacgtcaccgtggaagtgcctctacttttactgcttctgcctcgcctcagtcacctcctgactgggccctcgacctaactcggcgcatggagcgtatggagggcctttatgctatctcgtcagcttcctatatggtctcctcggttgttgctcgtgtgccccaaccagggccacctcaggccctagcgtacttgaccccaagtcaccaagaccctaaccctgttaccgcatcggcctccggttcgtcgtacgggggcctatgggggatggatatcccccaggtccacacgagcgcaaaaatacgcctagggccacatagcagtcgcccttctgaggcgtcccgctatggaccgggtaaaaggaatcagcagaaacgagctggtccagatgtgaaagaggcccacgtccgagtcagcagcggcataagcgcgaatatgccaggccgggtttgttaccacgcccgacatcctgaaccgccggtgatagctcgggcgcgggagcactag

SEQ ID NO: 36893 - DNA, 936 bp, Zea mays
  Peptide Sequence Number=SeqID_80268
atggagcggctgcagcggatctttggcgcctccggcatggggcagccgccgacggactcgccgctgctcgactcctccgagcaggtctacatctcctccctcgcgcttctcaagatgctcaagcacgggagggccggcgtgcccatggaggtcatgggtctcatgctcggcgagttcgtcgatgactacaccgtcagggtcgtcgacgtcttcgccatgccgcagagcgggactggggtcagcgtcgaggccgtcgaccacgtcttccagacaaacatgcttgacatgctcaagcagaccggcaggttccatgtctccctgaaagttatcggtgaacttatcttgttggtagttcagttaacctgcatgttttgttcatataaaagaaaaatggaagagagttttgaagctttgaaccccagggcagttgctgttgtgatagaccccatccagagtgtgaaggggaaggtggttattgatgcattccgcctaattaatcctcagaccatgatgcttggccaggagccacggcagacgacatcaaatgttgggcacctaaataagccatcgattcaggctcttatccatgggctgaacagacactactactcgattgcaatcaattaccgaaaaaatgaacttgaggagaaaatgttgctgaacttgcacaaaaagaaatggacagatgggctaattttgaagaggtttgacactcattcaaaaaccaacgagcagactgtccaggaaatgctaaacctagccatcaagtacaacaaggcggtgcaggaggaggacgaactgccacctgagaaacttgcgatagcaaatgtaggtcggcaagatgcaaaaaagcatttggaagagcatgtgtccaatttgatgtcatcaaacatagttcagaccctaggaaccatgctcgacacggttgtattttag

SEQ ID NO: 36894 - DNA, 345 bp, Zea mays
  Peptide Sequence Number=SeqID_80269
atggtgacaggaccaaccaaacaaggttgtattggtgcgatttgcccctgtttcctttttggaaagaatgcacaattcttgggatctggaactcttgctggatcatgcactacgcattgcatgttgtggggccttctcacaagtctatgctgtgtatttactggaggtctagtattagcagttccaggatctgccgttgcttgttatgcttgcggatatcgcagtgcactaagaacaaagtacaatcttccggagtacagggagatccgtgagagaacaggcagtggctcctcaccagctcctaatgtgactccacctccagttcagacgatggatgagctttga

SEQ ID NO: 36895 - DNA, 285 bp, Zea mays
  Peptide Sequence Number=SeqID_80270
atggcgataacaagtgggatccgcaacaggaacaccatcgatggcacgaagacgaaggtgaagatccatgggagtgtccacagaacggtgatcggtaagaccagcatgatcaaggaagtcctgaatgtatttgcgctgagagaggaacaaggtaaccaggcggaggatgcatgtagacttcctcatgcaactcaccatgaaaggaaagcattcttcacgtcaagttatgagatagcccaccggcgaacagaggcaacaacaagggtatggacagtggtcctatga

SEQ ID NO: 36896 - DNA, 1017 bp, Zea mays
  Peptide Sequence Number=SeqID_80271
atgaccgcgtcaaaaaaaagccgcctcagagcactcgggctccgcgcccactactggtcacaggttcgaaggctggtccctcggaagggtttgacagccgcctcaggccactcgggctccgcgcccactactgatcaggggttcgtaggctggccccccgacgggttcgacagtcgccccatagcatgcagagtgagggatgactctgggtacgttcgatacataaccaaggctcgggctatactcccaagaggctcgagggctactctcgcaaacccggctctggccaaaccgttgatggcgtcaacataccagcccgagaactcggaacctgactatgcacccgggcaacgaccactggtaacccccatcagcacaaagttgcaaaggcctgatgggcgcaattccggtcaaagctccgtccactcaaggggcacgatctcgcctcacctgagcccagcctcgagcaggaacggtagaccaaggcagatatgcgcctcgcccgaggggctcgggctcaaccccgactcggaagacggtctctgcctcgcccgatcccagggctcggactccacctcgacctcggacgatagtctccgcctcgcccgaccccagggttcagactcaaccttgaccttggacgacggcctccgcctcgcccgaccccagggctcaggctcaacctcgactcggaagacagtctccgcctcgcctggcccccgggctcggactcaacctcgacctcggaggagccaccaccttgcccgggccaaccacgccacaaggggggccatcattaccctacccctagctagcccaggctacggggaacaagaccggcgtcccatctggctcgccccagtaaaacaagtaatgatggcaccccgcgtgctccatgacaacgacggttctcagccccttacggaagcaaggagacgtcagcaaggatttgacagccccgacagctgtgcttctacagggctcaagcgctcctccgatggccacgacgccacatga

SEQ ID NO: 36897 - DNA, 1323 bp, Zea mays
  Peptide Sequence Number=SeqID_80272
atgcgatggccaggggactcagatgctgcggccagcagggaggcgcagagccgaaccaggggcgagctcaagggagctggcacggtggccggagatctagggcaccgcgagctgcacgacaggggaattctgagctgggagcgcggcaaccatggctggagcaggcgtggcgctgggcgttggagaccagagaggagagctgaggggcgcgtgaagttaaaggaaccagggcgctctgctccttcttctccacagcgagagttcgggtgtgccagagtgatggcgaggagaagagacggtgtacagacgagtgcgccagacggcgtctgcgtaggcgaacggaatgggcaaggacggcatccagtacgcagtggtcagatactgctctgtactcccttggaggagcgggagcgattcttcctcctctctggatacctgacatcgtcgccgtggtcgtcgcaggtggacgccttcacggcggagccgttcaagggcaacccagccgcggtgtgcctcctcgaggacgccgccaaggccgccgacgagcggtggatgcagtccgtcgccgccgagttcaacatctccgagaccgccttcctcctccgggaaaagtcctccgcggccggcgccgtcccgctgttccagctccgatggttcacccccgtcgctgaggtggagctctgcggccacgccacgctggcttccgcccacttcctcttcacatccgtcctcgcggagcacgagaagctcgtcgagttctcgaccaagtccgggattcttacggccaaaaaggtccctgcgccgcagagcacgggcgtgtcgggcgaggggaagctgttcattgagctggatttccccacgattgaccttgttgattgccatccttccgagctgccggcaatccccgacaccctcaacggagcctccattgtcagcgttcacaagtcaacgacggccggtgacctcattgtggagctttcatcaggaaaggaggttgctgatatcattcctaacattcatgaaattgaaaagtgttccggcagaggaattattgttacagggccagcgcctgctggatctggctacgacttcttcacgcgttttttctgcccaaaatttggaatagatgaggatcccgtttgtggcagtgcacattgtgttttagcaccttactggggtgggaagctggggaaacacaaactgatagcgtttcaagcatcccctcggagtggaatactatacctggagttagaagctacaggcaggagagtgcgaattcagggagaagcggtcagtgtgatgactggcaccctcttagcataa

SEQ ID NO: 36898 - DNA, 465 bp, Zea mays
  Peptide Sequence Number=SeqID_80273
atggcacaggggagtgttggtgaggctgggaagatgagcaggggaccggtgggcccggcggctgggcagctgtgcagggggagtggcttggcgttgcgcgcgctagggcgtggggcttggggcggtgcgcatgggagcgcgaggcgcgcaacgcggctgggcgagcgatcctgctcgcgcgccagggcgcaggccgaacggcgaagtgggccgccgcgcgcagggagccggagggagtgccgcgcgcaggggcgagccgccgcgcagggccccctggacgcgacgccgggcgggactgccgagagggtccgtcgaggggagagaggatgggtaagggaagagaggggagaggactcaccgggaaccgccgtgtgcagggacgacagcttctgcgcgatttggatctggggcgatttggatctggggagggagacgagaggttatgtgacggcagtgggtatataa

SEQ ID NO: 36899 - DNA, 429 bp, Zea mays
  Peptide Sequence Number=SeqID_80274
atggaagattgttacaatcagtatgttgacaaggatgcactgatatatctaattctagcaaatgaaatgttacatcgtcttcatccagatattgtaacaattgctgaagatgcaacattttatcctggattatgtgagccaactactcaaggcggattgggattcaactactgggtcaatctttctataccagaaatgtggttgtggcatcttgaaaatgtccttgaacaagaatggagcatgaataagattattaaactattaatcccttcggatggttcatcctcgcctctcacagcttcgcatcaacaggaccaggaaatccttcgtgggaactggcaacaagcttcggcctactatctgcagttcacccaaggttcgaaggatgagataaatcttctgtggctcaaaattatctgctggaaatga

SEQ ID NO: 36900 - DNA, 438 bp, Zea mays
  Peptide Sequence Number=SeqID_80275
atgggcgcgcctgacttctgcgcgcgctgcgcgcgcatttattgcgcagcaggcgagcaatggagcgccaggggttcatcagcagcagaagaggctgctctcagtgcttgtagcgcccaaggttgcagaaaccagcaatgttgtgtccctcaagctgatgggtggtgcccttattgggagacgcatgaatcgagtgcggcagcagttgactccacggacccgccagctgagaagcatgagtaccaggttgaggtcaacaggctcatggttttgatcgtacacaacctgtatagtaacaaggaagttttccttcgagaactggtcaggtatgactctggtgaaaccggtgggttgttactcatttgtattttattccggaatgaccattcttttgatggcaatgtctttgtaagcttgcagcttgcacatgctacatga

SEQ ID NO: 36901 - DNA, 363 bp, Zea mays
  Peptide Sequence Number=SeqID_80276
atggccgcgggcgggccgcggcgcctcccagccccgcccctaacccctccgatgacccctaacaacacggcggacagctcgtggacggtggactgttcctgctgcgtcacctcccacgacggcgacattccgccgctcatgtctcggcccccctcactggcgaccccggccccagcaacacacagagagcaaaaaggatgggtcttcgacacaccgtcggatcccttgggcaccgcctacctttgtcgccaccattcccgtccttatcccttcgcctactcaagaagcgaggcagggaggaggacgatgacaaccctggccgctgtttttgttaggctcgttatagatgtgaaagtcgcctag

SEQ ID NO: 36902 - DNA, 378 bp, Zea mays
  Peptide Sequence Number=SeqID_80277
atgggagagaggagagggtccctgctgccttttatagagagagggagaggcgccggcgtccttcactggccatcaatggaggcgttaccggagagaaatcagggagagggaaaaggaaactggtgtccgttgatgctaccattacggcaggggcgcgatacgtcaagggaaaacgacgaagatgcagctccccgtgctgttcaagaacataatggtaagaagataaaagacaaagagtggtatgttgaaagagctcggaagaagtcagaaacagagatggaactaaaaaggagatttgagcggatcttgaaagatgttgccaacaaggcaacaaatatcaaggacttcactgaacttatatatcatgaacttggatga

SEQ ID NO: 36903 - DNA, 849 bp, Zea mays
  Peptide Sequence Number=SeqID_80278
atggatcctggcacacatatgatggttcgcactctccaaactacccgcgtcaacaccagctacgcccctcagccccggcagatcccggtctacccagtggtagtcgaggaagctccagcggatctccctcccgtccaagtggagaacgtgatcaacctggaggacagctcggaggagcagctgccgacccccaccccgttggctgagtccctggccttcgcagctgggtcatcgacgtcagcatcgtcggcaccagcctttcaagcacctacacctggaggcgacgaccccgacgactccggagacggcgatgacgaggacgacgatgaagacgatggagaagacggacacatcaacgaggaagctgactacgcccagcaggaccacttcatggggattggtgacaggggactcaggactctgtctgctcacgagtccctgataccgctgtccacctacgctgcctcggtcagcgacgctgcccgtcggaccctgtggtcactcagccacacctaccggcagcagctgcagaacacgaggttcagacaccttcctcagcgtctgcgtggagaaagccagaccaacatagtcctaggtgaacctggtgaggaccgcctcaacaccctagctggtgtagtggccggtctcaacaccgacctggacagtgccactctggacctctacagtgtgcacttggagctggagattgcccacgccaggattgcagccctggaagcccaactgcaaggactgaatccgccagaagctcaggtccccgccgtggcgctgtctcctccccgcaagaggctgcgttatggagagctcggatcagtcactaggctgctttag

SEQ ID NO: 36904 - DNA, 345 bp, Zea mays
  Peptide Sequence Number=SeqID_80279
atggcacccaagagagctagctcgaaggcagccccatccgttgacgaagcagcgaaggcagcgctgttggctgagaaaaagggcaaggcccttgcagacaccacccaccaagaagcctgcgaagacgacgcactcagcaagagacagcacaatgatcaacctacacccgaaggcaccctccgcacctgcagctccggaggacaaccgcaagcacccccaggcttcgctccactagagggcgaggacaccactgaggacggcgaagtcatcggcgtttcagctgaggaacagctacagttgcgggccttgcgcatcaagaaccgtaacctccagaagcagaaatag

SEQ ID NO: 36905 - DNA, 408 bp, Zea mays
  Peptide Sequence Number=SeqID_80280
atggccaccgttcaaaaaccgaaggatgaaggtaacaagggcaacagaaagatctttatagatcatcctgtatccgacggttgttttgctttgatgaagaacttcttgcctccggtggagttgtcttctgtggcctttgctctttttgtgaaagcaagtgctgatgacgttaataactgcttacatcacgtagcactttacactagagagtttaccacactggagtctacactagctgtttcctgcttattggcgtttggtgctgccacccatgttgatcactgcgaagccctcctgtctaactttggcgaattcttgattagccttcctgtcagcgattcccttcaatatgtacaccatatatcaggccaattttttactgtttacttagatatgcgcctaatatag

SEQ ID NO: 36906 - DNA, 315 bp, Zea mays
  Peptide Sequence Number=SeqID_80281
atgaagtataggtacaacttctcaaataattgctacaacgataccgtgaagctggttattgatctcctctcgcctaagcataagatgctagagaacttgtatcagtctaaaaagattgtcttgggtctttgcatgaactatgagaagattgatggtgaaatattacagacccagctagaagaagagaggagggaacatatagagatggaggcgaggatgaggacggagtgggaggcagagcaggcggcttacttggtggatcaacagaggatggtggagatgtttcagtacatgctgagccttggctccgcatag

SEQ ID NO: 36907 - DNA, 84 bp, Zea mays
  Peptide Sequence Number=SeqID_80282
atggggctcgaactcacgaccacaagaatggagctcggcgccaagatctatggcgccgagctcgctaccacgtcggcgccatga

SEQ ID NO: 36908 - DNA, 848 bp, Zea mays
  Peptide Sequence Number=SeqID_80283
atggcagcaaactccaacctcttccgcgactacatcggcgccatcttcaacggtgtccagttcagcgacgtgccgatcaaccccgatgtcgagttcgactacatcctcgccttcgtcatcgactactccaccgaaaccgatcctccttccccgacgaatgggcagttcagcatcttctggcaggactcggtgctgacgccctccgcggtggccgccatcaagcagagcaacccgaacgtgcgggtggccgtcagcctcggcggcgccaccgtgaacaacagcccggtgttcttcaacgtcacctccatcgactcctgggtccagaacgccgtgtcctccctgaccaccatcatccagcagtacaacctggacggcatcgacatcgactacgagcagttccaggaggacccggccaccttcgccgagtgcatcggccgcctggtgaccacgctcaagagcaacggggtgatcaagttcgcctccgtcgcgccgttcgccgacgccgacgtgcagagccattaccaggcgctgtggtcgagctacgggattagcgtggtagactacatcaacttccagttctacgcgtacgacgcgagcacaaccgcggagcagtacgtgaactacttcgacgagcagatggcgaactaccccggcggcaacatcctggccagcttcaccacggcgccaacgacgacctcggtgccagttgacacggcgctcagcgcctgccagaccctgcagtcgcagggaaagctctacggcatcttcgtctgggctgcggattactccaaggaccaagggttcaagtacgaaacacaggcacaggcactgttggccaacagtacgta

SEQ ID NO: 36909 - DNA, 738 bp, Zea mays
  Peptide Sequence Number=SeqID_80284
atgcgcctaggggtcccttttatagccccaaggcagctaagagccattggaggcattcttggaaggccaaagttgccttctgtcgggtggcacaccggacagtccggtgtgccaccggacaaccactgttcatgtccggtgcgcgatttccttccattcctggcgcagccgaccgttgcaacttcgtgctggttggcgcaccggacagtgcggtgccctcagccgaccgttggagcgggccacgcgtcgtacgcggatttggcggccaaccgttatgctggcggccgttggcacaccggacagtccggtgcaccaccggacagtccggaaagcagcaccgctcgcccctctccgactgctgtgccacccgccagggtgaggctgacagcagctgagtccaagcctcaggcgccacaggaagctccgcctcgcccgaccttgggcctcggcctcaggagaagtctccgcctcgcccgacccccaggggctcggcccccacctcgacctcggaaggtggactccgcctcgcccgaccccagggctcagcctcgacctcgacctcggaaggtcgtctccgcctcgcccgaccccagggcccggcctcaacctcgacctcgggcagaatcacgtcctcgcccgaccccggcctcggccttaggaggagtctctgcctcgcccgaccttgggctcggaccgaccacgccgcaggaggcacatcattaccctacccctagctag

SEQ ID NO: 36910 - DNA, 954 bp, Zea mays
  Peptide Sequence Number=SeqID_80285
atggagctaaaaactcgcaagagacacaaaagaggatacaaccaagggagaataccagtgcccggcactgggcggttgggaacctgtggcgtggaagaggcagcttcttcctccaccaggaaatctaccgaagtctcggcacgccgcctgcaggatggcctggacgccgcctgccagcggagtggacaggacacattaaatgttgagaggcacatcgtctgtcagtgggatagacatgcgacgtgtcttctccgcagtaaatgcagaggcagcgtggcccagatgccttacgtcaggctccgcccgctggcttatgtcacgggcgatagtccatgtggcagcatcgggtctccgtctgagctgggagtggaagcgcactggataaagcctgggcacatggtattccctgtcccggaccttgctgtgggtggccaggacctcactcagaggggtccggacctcatccaaggagtccggcttgctcacttgggagtcccaggccgtactcggaggttcgggctatgtgtacaggggtccgacgctttcttgaggaggtctggatctactgatggtaccctggagtatatcacctcttctgtccacatggcgtcctttgggacggcccacgtgttggggtcgggtgttgttcaccgcgcggctagagcgacgactgctttgcccgagaggactagggtttcagcggcggcggctaccgagccccattcccgatctgaagcacctcaaaccaccgctctgcccccagatccagatccacccagctattgcggcgagcccatggggacggggacggaggaggactcgagtgcacggagatgctcaactacgaccaagtcttcatcagggacttcgtgccctccgtgctcgccttcctcatgcacggcgagaccgagatcgtccgcaacttcctccttcacaccctccagcttcaggtga

SEQ ID NO: 36911 - DNA, 156 bp, Zea mays
  Peptide Sequence Number=SeqID_80286
atggccttccatctcgcgcacaacccatttaagggtggcataggatcaataaataaatatgaacaacaaacatatcatcccttgcatgggactatgattggaacggatgaaccaatatttaagtattttcatggatccacgcaaccacatatatga

SEQ ID NO: 36912 - DNA, 414 bp, Zea mays
  Peptide Sequence Number=SeqID_80287
atgggcgggggcctcctggcagcggcatcgaccctgaggtcagtgctgccgctgttcggccccccggagcagaagtcgtcgttgtcgccgctgccggagcaggtgacggcgcgccgttcgtcggccttccgttgctccgcaggccttccccctcggagtggggtcgttcgtacctgcggaggtgggaaccggagttccgttggtaacgacatctcgaatgccagtgttttttgttcattgcggctgtcgaggcctgaacatgatccgctttccgaagtagtcaagaagcacgaaagaaatcctgctaaaaagagatcctttttcgaggaaaaattcgacgcagagggggtctccccccttttagcccccgagggagggtcgggctttgccgaggctaggccgacccttccttga

SEQ ID NO: 36913 - DNA, 420 bp, Zea mays
  Peptide Sequence Number=SeqID_80288
atggctaggatcaggtctactgctagactaacaaacgaaggtgaggatactgaagcaactgagacggccccgatctcagaagtaatgagacgttccgagttggttgttcaagagggagaaaagattattccagagaaggatgatgctattaccgaagctgctagtgatgatgatgaggatgatgagggctccctcgaagaaacagaaaatttcagaggatctgaagctttcggctcccaagaagcgaaagtcctcaactctcgcccctatcgaggcgaagtcaaaggagaaggggttgaaaaagatgcgaaagaggagaagaagtttgcttcggcgactggtggaaatgagggtggtcagaagaaacgacgcatgatggttgtgatgagggccatccataagaccccaccccggtcttga

SEQ ID NO: 36914 - DNA, 414 bp, Zea mays
  Peptide Sequence Number=SeqID_80289
atgtccctccagccagcgcgcccaccccgcgcggagctgcatcttagcggcctgggatgtggcgaccctcacgctgtggacgcggaggcgagagagtcagcctcggcgtcgtcggtgttggagatggaatcgacctcgacggtggcggtggtgacggatactcgaacagcccacccagttgtcggcgatgatgcagtcgtcgtctctaccgaagaggccgccccagtcgtcagcgaccacgtccagacactcgtccagacactcgtcggtcgcggcgacctgagcatctcgctccgccctcaacgccaaggaaggcacagtggccactactatctccaggtcgtggatcgacgccgaatgctatcgactcccgatcgtgccaccgtgcttcctgggcagcaaggcgggcactga

SEQ ID NO: 36915 - DNA, 768 bp, Zea mays
  Peptide Sequence Number=SeqID_80290
atgatgcctgcaagctgtccggcttccctgccacctgcgtcatcagctaccagactgctcccagctggagttcacagacgagatagtaccaatgaggagagaatattcatcatatctgaggatggcaaggttgatgatgtggttgatcgaccgatggatgaacagatcgtaactgcagtctttgtgccagcttgtatagaagctttacttaatgatgggatgaatgcaggcaaaaccagggaggccgttgctgatcatcagtattctgagtatgacaatggattgaaagataaggatcagaaaatattatttgaagatgacattgatttatcattgttcaactgcaagttcgattcccacataacagatagtcctatcattgatgctgtttatactgcactcaaagaagcagagcttcgttctacagatctttggccatactggaaggttgattgcttgtgcaagataattccaagacagctactagcagagaaggcagtgatgcttataaggaacactgttgacaagctgattatgaagcgtaaagaaatacaagttgaaattgaacagattgcgggcgaggattatgtaaatgaaggggattctagcattctacgcttcctacttgcaaatatgtcaccaaaaatagaagagccaaaaattcagtacaccctgaaggccattgcaggaagcgtaactgcagtttatggactttttgtgcaactgatgaccaatagtcagtttgcttgttttgcacaatatcagtaa

SEQ ID NO: 36916 - DNA, 288 bp, Zea mays
  Peptide Sequence Number=SeqID_80291
atggagagtcatgatctccgggcagaaagggaatcacggcttgtgggtaaagtggcaatgagaatgatggttttggtattgactctgatgatgatggctcgtcttagacacaccgcacgaaagtctgtcatccccttcttaccctcccgtctcgcggagcgtctgcttcgtcgtccagtgactggtcagtccagccacttggagaggctgcaccaccgcctgcacgaggagcagaaacatcgacgacaggagcaggagcagcagggctcttctttctcgctccagtag

SEQ ID NO: 36917 - DNA, 66 bp, Zea mays
  Peptide Sequence Number=SeqID_80292
atggcgcacgcggggcaccatcattacccgtcgctgggcctgagcaggctaggaatagggaaatga

SEQ ID NO: 36918 - DNA, 764 bp, Zea mays
  Peptide Sequence Number=SeqID_80293
cctcgggttggaacagtggtcccagacgaattcacgcctcacccgagggcctccttagacggcaggcgccccctcggctctcccgaggcctggctcgagcaggttccgttgtgaagcaaccttggccataccgcctcaccaaccgaccgcttcgcaggcgcattaaatgcaggggatgcctgacgccgtatcctgacacacgcgcttcagttggccaggctgaactgaccgcagtcacttcacccctcttctttattgtccgatatgacaggaaaacagcgtcgctcgctccgctccgactgccgcgtcagccacctcggcaacgactgacaacaagtcacgatcaaccaccgagttcaagcctcgggcgcaacaggaagctccgcctcgcccgacctcacgctccggcctcaggaggaggtctccgcctcgcccgacctcaggctccggcctcgggaggaggtctccgcctcgcccgacccctggactcggcctcgaccccggtctcgggaggaatcgcgtcctcgcccgaccccggcctcggcctcaagagaagctacaaggaacaagaccggcgtcccatctggcttaccccggcgacgggtaatgatggactcaggcgctcctccgacggccacgccatcacatgtgcagggcccaagctctcccccaacggctacgttggcatggccaccctgagggagaaaagcttcggcataatagcagagaaggggaaccgacttaaagatgaaaaggcaaattag

SEQ ID NO: 36919 - DNA, 969 bp, Zea mays
  Peptide Sequence Number=SeqID_80294
atgagggaccgggaaaggggatatttcgaaagggatccttctcagcgaaggaagcgggccccgagccctcctactgatcaggggttcgaaggctggccccttggaagggttcgacagccgccccagagcactcaggctccaagcccaggccgccctagagcactcgggctccgcgcccactactgttcaggggttcgaaggctggcccctcggaagggttcgacagctgccccagagcacgccgagagcgattttgtaacggaatcccaccagagggaggcatcgagccctcggaccctatcgaatgggtccaggtccggcaaatcacctgcagcctcgggcgcaacaggaagctccgcctcgcccgaccttaggcctcagcctcggaaggagttctccgcctcgcccgaccccagggctcggcctcaacctcggcctcgggaggaatcgcgtcctcgcccgacctcggcctcggcctcaggagaagtctctgcctcgcccgaccttgggctcggaccgacagcgccacaggggatgcatcattaccctaccctagctagctcaggctacgagggaacaagaccggcgtcccatctggctcgccccgggctcaggcacttctccgacggccacgttatcgtgtacacagggctcaagcacttctccgacagccacgttggcatggccttcctgcgggaggggggtcacacgggggacgagctaacgaaaaggctcactgtctctctcgcgacgcttatgggtcaagaagaatccacttcatcaagcaaagacataactgtcacatatgaagagcgcaagaagataatgggcaagaagcaaattgaaagctcaagctcgtcgaatatatgctcaaagaggattgcaaaggagaataaggaactcaagaaagaagtagctcaccccctaagtaaaaggcaagttgaagtcaactcaacgtcatcaagataa

SEQ ID NO: 36920 - DNA, 204 bp, Zea mays
  Peptide Sequence Number=SeqID_80295
atggcgacggcgctcaaatcgttcctgaacagccccgtcggccccaagaccacccacttctggggccctgtcgccaactggggcttcgtcatcgcgggtttggttgacatgaacaagcctcctgaaatgatatctggcaatatgacagcagagtttgattttcgcaggtacctggagaagaaagaaccagaggccaaacagtaa

SEQ ID NO: 36921 - DNA, 234 bp, Zea mays
  Peptide Sequence Number=SeqID_80296
atgtccggtgcaccaagaccgtacagggctgaactggccactcttgggtttcttcaggcgctctccgccataattcaccggactgtccggtgtgccaacggagtaacgactatccagcgcagcggtcgactgcaacgctacagtgcgcaacagtgcgcgggcagagtcagaggcacatcggacaatgaacagtggatgtccggtgtgggcgtccggactgtccggtgccactag

SEQ ID NO: 36922 - DNA, 671 bp, Zea mays
  Peptide Sequence Number=SeqID_80297
gtataagaaaattggaatcttgtataacacctcctatagaggcagcacagctaaagaagtttccagagagactatctgccattcctcccagaattctggagggtcaggtcccagacataacagaagaagtctatgaggaggataataagttgtggaagaagcatgttaatacttataagagggtgaacaagctgataggttcttcaaggtacaggaatattatggacatgaatgcaggccttggaagttttgctgcaactcttcattcttccagttcctgggtaatgaacgttgtgccctctatatcagaaaggaacactcttggtatcatatatgagcgaggtctgattggtatataccatgattggtgcgaagccttctcaacataccctaggacatacgacctgatacatggcaatgacatcttcagtttatatcagaacaagtgtgatgcagaagacattcttctggagatggataggattttacggccagagggtgcagtcatactgcgggacaatgccgatgtactgaacaaggttagaagtatggtggcaggaatgcggtggaagtccaagttactagatcatgaggatggcccgcacgttcccgagaagattctgatttcagtgaaagaatattgggttggcagcgaggaacagaacagctga

SEQ ID NO: 36923 - DNA, 765 bp, Zea mays
  Peptide Sequence Number=SeqID_80298
atgaaacggcttgctggcactccgaacccccgctcatggaaagagacgaaactcagcacataccccgacggtggggacggggcggctccgctcggaggagccatccactccggctgcgggtcactggagaggggacaaagcaagccatcggcaacaagggtctccagatcgtccattgtgacggtggagaaaggccacgggtcgcgcgacggaacgactcgtcccatcgcattaactccgcggcagggcaggcgacacctttggcaggcaaagcgggcgacgcttcacctctgccataatgaccgcgtcaaaaaggtgcgccacgccgttcaatttcgtatccttttcctcttcccctttctctctcttgctacagggactgggaaaggggatactccgaaagggatccgcgcccactactggttagaggttcgaaaggctggcccctcggaagggttcaacagccgcctcaggccactcgggctccgcgcccactactggtcagaggttcgaaggctggcccctcggaagggttcaacagccgcctcaggccactcgggctccgcgcccactactgatcaggggttcgaaggctgccccccgaagggttcgacagccgcctcagaacacgcagagcgagggatgactttgggtcaaggctccgtccactcaagggatgcgatcgcgcctcacccgagcccagcctcgggcaggaacaatagaccaaggcagattcacgcctcgcccgagggcatcctcaagtaa

SEQ ID NO: 36924 - DNA, 714 bp, Zea mays
  Peptide Sequence Number=SeqID_80299
atggcacaacttgccttcaatgagctcctgctcagcagtctctaccagctgaacctcggaatcctctgtagcttgctcgtctactcgcatcaacacaatacatacatgtttactgttccctgggctgcgcgcaatatttcagagaactccaagggcttatgcgcaaggattcctaagacccatagcactgttcctatggaccgcgggttctattgttcagaaccccgagggttcttatgtaaaaagcactgcgaagcggtatcagttgatctgcaccgtccgatcgaatacggagcgcccagattaaacccactaccctgcgaaccggtactcactcgtggctctcggatccaagacctacggtcacgatctgacgagaaacaagcgccaggatctaacctatccaagcgttattcctcatctaatctacgccgctcaatcaggatccgatggctgcgagccctcttccccaaccaagacccgcgcatggcggtgccatccttcacgcacggcggagcccacgctggtgcacaccaatttcgcgccccaacgctccccgcaccaattgccctagcgcaaaataaggtggaggtctgcgcaaatacagagggcaagtactcaccgacgaatagggcacggagtttccaggtgacgacaagctgctggttctggacggagctccgcttcggcgagaaatccgagcaccaccggtga

SEQ ID NO: 36925 - DNA, 681 bp, Zea mays
  Peptide Sequence Number=SeqID_80300
atggctaccacccaggaggtcgatccctttttaaaggtgactcaccccactcgcatcctcaggcgtcacgggctaagtcttcaccaacgcgctcaaaggtcctccccctatgacacgggggctgggtcccacgcgtcatgcgagctagccaggacagaagaagccaaaccgtcgcgcgcggagcgtgtaaccgcccagcggttacaagcactcctccaccttcgcctaacccagcgggtgaaagggcgaaccaccatgcaggcggcatgcaactgcaccacggggatgcaccctttcgacttcaacgcacccagcatggaggcccaggcccacacgtcatgctcacgtcccctcctggggcagcaggagagccctctcccacggcgtaaagacgacgcgcccgtgttccgttcctcgaacggctcgcgcaacggctgccccgcgaaccactcgtcctgccgcattaacttcgcggcagggcaggcgaagcgggcgacacttcacctccgccataatgaccgcgtcaaaaaaggtcaaggctccgtccaagggacacgatctcgcctcgcccgagcccagcctcgggcaagaatagcagacccaggtggattcacgtctcgcccgagggtctcctcaagcaacgggcgcaccttcgactcgcccgaggcccagctcgggtag

SEQ ID NO: 36926 - DNA, 996 bp, Zea mays
  Peptide Sequence Number=SeqID_80301
atggggagcgcccgcgttgccttcgtctcgttgtgggaggagcgcaacttcgtggaggttggtacctttcagccatcgctcggcttcaaggattttcatcaggcagcccggctgcatcccctcaccaatgggcgagctgagccggagctctacctcccgtacaggccggcagtccacctcctccttcagcattcagggaagagggcgctcaccggcctagcggagggggcggacttcaacaacgcggggccgattggccgcaagcgtcgtcagctccagcatgcctggttcgctggctcagctggctctggcacagcttccggtgccacctcccactgctgggtggagtgtggctatctgcccgctgtacgggcggctgttgcgccacacgcaccaggggaccgcccaagacgtcgcgcgctgctagggcggcgttcgtgttcttgggttgtcctgccctcgctctggcacgacgcctccgcgcggaggtcggtgctcgcccgtccgggaggattcgagcggggatctgccggtgggcgggttgacaccgccgtcggagttgaggtggtggcagctggagaaggcctcgttgccgacgagattgtcggcgccatctgcgctccgggcctccggctctttggctttgatagcttgtcctcgcccctcgagtggggacgtgggcgagggccttgtcgcagcagcgtctgcctagaggtcatcgttgctgctgtttggccgcccggagcggaggtcgttgtcgctgctgccggagtgggcggcggtgagccacctagaattttgtcgtcccaaaggccctccaatgtggggggttgttcgtacctgcgggagtggaactggagttccatttgtaatggcaccttgagtgcctgtgtctgttcattgtggctgtcggggcctgaacatctaggtattttgggtgcaataccgtgtttcttcctcatttcgagcaccaggtctcgcctgtcggctagctga

SEQ ID NO: 36927 - DNA, 165 bp, Zea mays
  Peptide Sequence Number=SeqID_80302
atgaggctgctgaggaaatgcgtcatctcactcaagatgaccaggaccaaagacctcaacgcagagagcttcgtcaggacaattcctacgatgatgatgagtggaacaatcacatcatggcagaagctgaaggacatgctgatcaccagtttccaagggttttag

SEQ ID NO: 36928 - DNA, 618 bp, Zea mays
  Peptide Sequence Number=SeqID_80303
atgcaggcggcatgcaaccgcaccaagggggcgcaccctttcgacttcgacgcgtccagcatggaggcccagacccacacgtcatgtaaccggcgcgccggttgctacgtgcaagaaactgcaccgccactcgcgccactaccgtgcctcctcgactgcggaaccagtatcgcgactcgaggcaaccctgcgcatgacccaacagtgccaaccaggcacatcggtcatgggtcagtcagtcgcgggagaaggcgcgacggtcgatacggccagaaatgggccggcagtaatggcagtggcaggcaggcggagcagcggtcaagtcgtcagccaagctcacgtcccctcctaggacagcgagagaaccctctcccacgcgtgaagacggacaggtggcacctttggcgggcgaagcaggcggcgcttcacctccgccataatgaccgcgtcaaaaaagggaccgggaaaggggacaccccgaaagggatccttctccgcgaaggaaacgggccccgagcccccctactgatcagaggttcgaaggctggcccctcagaagggttcaacagccgcctcagagcgctcgggctccgcgcccactactggtccgaggtttga

SEQ ID NO: 36929 - DNA, 2064 bp, Zea mays
  Peptide Sequence Number=SeqID_80304
atggcgtgtttgggcctcggcggccgcaggaaacacacgctacaagataatccgatcctgcaggctcggatcttgacagtcgaagggagcagcagcaccctcggcatcaaccacaccttcggcaagggatccggctcgagcagacggctcggccggtcactccgaggcctcggccagctgtcccccgaagacatcagcccggcccgaggcctcggcaactcaattccggcgtcggtcccgccagtggacgacccggccaggctctggccgaccaagtcttcttttcgagccagctccgcctctgtccgtgctgacaccgctacccctggcttcggctcatcgaagagcggccgaggggttcctttaactaagcaagagaagccttggacagcaaggccgaccgagccgagggactcctacgcctctgggatacggatacctcactcgtcacctttgcacggggcgactcacgcttggtacgaacaaccccacacgattggggggcctgcggagcaacagaagaccgacgggtggctcgcccgcgcccgcgccggcagcagcgacaacgacccccgctccgggtggccgaaccgcagcagcgatggcctcagggcggacgccgctgcaaccttgccctcgcccacgctggcgctcgaggggcgaggacaagggtcgtctgccctacggcagatccccactcagatcctcccggacgagtggagcaccgacctccgcgcggaggcgccgtaccggtgcaaaggcaggacagccccagaacacgaacgccgccctagcagcgcgcgacgtcttgggcggtcctcccgtgcgcgcggcgcgacaaccgcccttgaggcaggagggggcaccgggagccaagccggtgagcccaacgcgctgaagctgacgacgcccgccgtcgaccagccccgcgttgtcgaagtccgcccctctcgcagggccacctccgccccagcgaggatgatgaacatccttgaagctgagggcgggaccaagatcgcagcccggcttgcttctccccatccagagggctggtggtcaccgtctcggggaccgggaaagggggataccccgaaaaggatccttctccgtgaagggaacaggccccgagcctccctactgatcagaggttcaaaggctggcccctcagaggggttcaacagccgcctcagagcgcttgggttccacgcccactactggacagaggttcgaaggccggcccctcggaagggttcaacggctgcctcaggccactcgggctccacgcccactactgatcagggtcacttcgccgctccactgaccggtctgacaagaggacaacgccgcctgtgccgctccgactgctgtgcctctcgacagagcgaggctgacaaggctcggactcgggctcagccccggaagacgacgagctccgctccgcccgacccagtgctcggactcgggctcagccccgaaagacgacaaactccgctccgcccgacccagggctcagactcgggctcagccccggaagacgacgaactccgctccgcccgaccccagggctcggactcgggctcagccccggaagacgatgaactccgcttcgcccgaccccagggctcggactcgggctcagccccggaagacgacgaactctgctccgcccgaccccagggctcggactcgggctcagccccggaagacgacgaactccgcttcgcccgaccccagggctcggactcagccctcacctcagccgacggtctccgcctcgcccgacccaggggctcggactcgacctcggcctcggaagacagactcgacctcgacctcggaggagcctccacatcgcccgacctagggcacagaccaaccacgtcaacaggaggcgccatcattaccctaccccaagctgactcaggctacggggaacaagaccagcgtcccatctggctcgctccgccagacaagctccagcgctcctccgacggccacgacaccacacgaaccgggtgccaaaacctctccggctgccacgatggcatgtacttagggcgctag

SEQ ID NO: 36930 - DNA, 618 bp, Zea mays
  Peptide Sequence Number=SeqID_80305
atggcgaacggcacgaacacgcacggggtgaccgtaacgaggcacgacgagggtagacgaacggccagggcgagctgggcagcggcgagcgcgcagcaacacagctgcgacgcgcaggggcgaggttcgacggcgaacggctgctacggcgctaaacgacaatgcggctgggcgtgctgcgcgcagcaactcggccacggcgcgcaggggctaggctcaccggcgaggggacgctgctgctacgtcgacgtggctgcgcgaaggagcaaggcgagggcgcgcggggtctgcacgccggggcaccggcttgctgcgtgctgcgattcgcgacggcagggaaacagccgcgcgcagggcctgctggtcgcgaagctggccggaggtgccgcgattgtcgctgcgctaggcgccgacgagggactgcagagacacgacgaacttacacggcgggggaagagagagaacgggggcgagctcgcctcggcggcgtaccgcgaggcgctgcgcgcacgaatccgacgacggcacagtgcaggggggaaaaagggagagaggaggggaggacgagctcacctcggcggcgcgcacgacgacggccgcagcggggcgcggtggtga

SEQ ID NO: 36931 - DNA, 906 bp, Zea mays
  Peptide Sequence Number=SeqID_80306
atggtagtaattggaagattatgtgcctctacccatgatgcagtaatgaatgaatgtgttgctccagtatcaaataacacttctgcaatatgggagtcgactgggaacatacctactatcatgtcggggtctcctaaactgcttcaacctccaagtggttcagtctcccatgattatagcgcggctgagagcggttgcctgctccaggctgagacacattctgcttcgctggggcattggggcctgactgctgctgggctgccttcttcggacattgcatcacctagtggccttgctctccacagtggaaacatgctctatttccaacctgagctggtgctgcctgactgttctgctggtttgctggggcaggaagacgaggtgcctgttgattctgcctctggaactgacctcctcctggctgattattctagcgattctgatgctgatgctgaggatactgcctttgaaactgctgctgctgctgaggtggacgctggctggggtccactgatcttgcacttgcgatcctccatctctttgcgcttcctctctgtcatgattgctctgtcaatcaggtgctggaatgtcgggaagcacgcttgtccctgggcatctgaggcatctgaggctgaggtggtagctattgttgctgctgctgctcctgaatggcggccagagtctgaccaatggcttgaactgcctgagtctgcatcaggaacatctgctcgatggacatcgggggcgggggcgacaactgttgttgctggggtgcctcatcctactgagctggccgctcctgctgagcacgccttcctcctctgtgcctgttttctgacatctgcagaatgcaaccacacatcagaactgatcttgcaaatcttgcagcataagaaaagggtatag

SEQ ID NO: 36932 - DNA, 714 bp, Zea mays
  Peptide Sequence Number=SeqID_80307
atgtcttctcgctcccttatgcatcgcgtctttccaccttccaagcccccggatgggggatacccgccgtcttttcgcctcatcgttggaggaacgcaactccgtgggagttggtacctttcagctattgttcggcttcaaggattttcatcagccagcccggctgtaccccccccccccccccgccggtggtcacccaagacggtgaccaccagttcctgggtggggagaagcaagccgggctgcgatcttggtcccaccctcagcttcaaggatgttcatcatcctcgctggggtgggggccgggctgagccggcgctctacctcccgcacgggttcgtgggtcaccctctcccgcggcgttcgagggagagggcgctcactggccctgcgggcggcccggacttcgacaacgcggggctggtcgacggcaggcgtcgtcacctccagcgtgtcgggctcgtcggcttggctcccggcggccccttctgccggagggcggctgccgcgccgtactcgcctgttgattatctgaaccgcttcaccaagcatgagtcgccccgtgtcaaggtgacgagtgagagtggggatccctggaccgcgtcgccgtccgaggttaggtcggacctcgctgaaggcatcgtcgatgccgagggtgctactgcccccttccagcgtcaagacccgagcatgcaggatcagagtgtcttgtag

SEQ ID NO: 36933 - DNA, 939 bp, Zea mays
  Peptide Sequence Number=SeqID_80308
atgtgctctcattattactctgcatatccaccttttgaagtggcagaggaagatgcagacgaaggggcccttcggtgcgccgccggtcagagaagtgggcgtgatttagttgaagagtttgtggcgtatggggtgtggcccttggcgcacggctgggcgctgggcgaagtgtgccctcgccagatgccttttcacggaggaagggtggtgcgaagccctgccttcgcactgaatctgcgaaaccgcgacccggccgcctttgtgcgcgatgcggaggacggggcggtgcggctcgtggggcgttacgtgccgaggacggaaggccagcgcagctttgatatccgcgggtcaaatgaccgtttgaacagggtcttcgaactaaatcaattgccgtacgacggctatcctggtcaagacgaagcggaccgccgtgggaagaaaccggcggtggagactggaggcgaccctgcgctggcggccgccccttcctcaaaaaagagaaaattaggcccacgaaagaacgaccttacgatttattgggcccttgggcctctcgtgaggtcttttatctctttagtggacccgggggatatctatcccccacaagcccccgatctttgggttgatttagagacgactcccaggggattgcccgcggaagtctggacgtacatccgggccgtcaagcgctccgggctcgagggctcggatgagtcggagtactcctcggatgaggaggactcggacggcggcgaggacaaggatgacgacgacgacgacaacgacgacgacgatggtggcgacggcgacggtgacggcagcggcagcggcgggggcagcagcggcggcgacaagagcaagggcagcactagaggcggcagcagcaagggcagcaccagggacggcggtggtggcagcagcagcaaggccagtggctaa

SEQ ID NO: 36934 - DNA, 153 bp, Zea mays
  Peptide Sequence Number=SeqID_80309
atgctggacgaggccgcacggtgggatgacctcgtcacaggtcttcgttcaatgtcgtatggggcgaaggcgactacggcgaaggcctcgagcgaagggtggcgtcttcgccttcgccccaacatttgccctctgtgggaccagttcgactaa

SEQ ID NO: 36935 - DNA, 159 bp, Zea mays
  Peptide Sequence Number=SeqID_80310
atgaagaggcatccggactggttgtgggcctggccaactattggatgggcgcggaaaatagtggagctagagttcaaacgatgcctatctatctcgtgccgacgagattgtttgtctacgtgggctgaaagcaacaaacaggctgctagagtagagtag

SEQ ID NO: 36936 - DNA, 315 bp, Zea mays
  Peptide Sequence Number=SeqID_80311
atgaccgttggtggaggctgtctatcgtatggtgcaccggacagtccggtgtacaccggacatgtccgcggagcagccgttggaaattcccgaggctgccaagttccagagccgcgtcttcttggagcaccggacactgtccggtgtacaccggacagtccggtgaattatagcgtgctggctctgagaaatcctgaggctgaggagttcagcgcgaggccccctggtgcaccggacactgtccggtgcgccaccggacagtccgatgcgccagaccagggagtcttccgggatgcctttagctctctattttga

SEQ ID NO: 36937 - DNA, 345 bp, Zea mays
  Peptide Sequence Number=SeqID_80312
atgtcaccaaagccgttgcgattcgaccgttggagttttgacttctgggcccgcctggatgtccggtggcgcaccgaacatgcactgtggagtgtccgcggagcagccgttggaaattcccgaggctgccaagttccagagccgcgtcttcttggagcaccggacactgtgtggtgtacaccggacagtccggtgaattatagcgcgctggctctgagaaatcccgaggctgaggagttcagcgcgaggccccctggtgcaccggacactgtccggtgcgccaccggacagtccggtgcgccagaccagggagtcttccgggatgcctttagctctctattttga

SEQ ID NO: 36938 - DNA, 306 bp, Zea mays
  Peptide Sequence Number=SeqID_80313
atggcatgtgccctcgccgccagactcgtgcccacgtccgcacgccccgcccatgtcacccgagcactaggtaaagacaccgcacactccctcagcttgcccctgccccacattcactctcccccgccctcgcactcacccagccgcttcccctcgctgtcgcttcaccgttccaccgtcgccacaggacttctaccagcgctttggccacagtcggagttcgccgccgccgtgatccttcgacttccggccaactggagcctcctcgtgccgtgccaagccaccccaagcgtcgtctcagggtaa

SEQ ID NO: 36939 - DNA, 68 bp, Zea mays
  Peptide Sequence Number=SeqID_80314
atggataagaaggcgaagggaattgcgatcaacagcacggagaaggagtcctttgtgaaggaggcaag

SEQ ID NO: 36940 - DNA, 459 bp, Zea mays
  Peptide Sequence Number=SeqID_80315
atgcatgacgttcctacaaacgcggtaaaggtggttgaaggccatactcgaagggttgaagcgacgacgaagccggacccccgtgattccgcggctgccgcggcggtgaagtactacggcgagaaattgctcggccctgttggctctccgatcaccgcgacgccgcgcaagcaccacacggagaggcgaagtcccggccccgaattccgatggcggtgcggcaatggagacggtaatcaccgacggcggcaccctctgctcgtactggctatggtggcggcaacgtgggggcacgactggtctggtatagcccgagggccaactatatggaccccaggaggtcaacccgaggaactccgcaacggcaccgcgcagctcggaggtcgttccgccgagcgatttcgttgccgcgaagaccgggtcggtgaagacgatgagtctgccaagcgggtcccgtga

SEQ ID NO: 36941 - DNA, 993 bp, Zea mays
  Peptide Sequence Number=SeqID_80316
atgggccaactcaaatggtctagaagctcaactggaggaactagagaaagggctaaggcgtcgccttacgctttatcgcctaaagataaaaagggggtcggtcgccttaccgccttgataactatgcctacaactactactactcaggccaaatgcctgccaacccagcggctcccgtgctttgatctgattgatcccaactctttctatctctgttattccagatatgaacataatgatggcattcgttgggattcctggggtcgattcgttgagcacagtactgcataccagccatggatttggaatactggaaaccatgaaatagagtacaggcctgatctgggagaaacttctgtattcaagccatatttgcataggtacatgactccatatttagcatcaaagagcagttctcctatgtggtatgctgtcaggcgtgcatctgctcacatcatcgtgttgtctagctactctccatttgtaaaatacactcctcaatggctgtggctgaagaacgaattcaagcgcgtggacagggaaaagacaccctggcttatcgttctcatgcattctcccatgtacaacagcaacgaggcacattacatggagggtgagagtatgagggctgctttcgagaaatggtttgtgaagtacaaggttgacttggtgtttgcagggcacgttcatgcttatgagagatcataccgcatttctaatgtcaactacaacataacgtcgggaaatcggtatccagtgccggacaaatctgctcccgtttacataacggtcggtgatggaggcaaccaggaaggacttgcttcaaggttttataacccccagccggattactcagcgttcagggaggccagctatggtcactcagttttacagctgaaaaacaggacccatgctatctaccagtggaatagaaacgatgatgggaatcctgttccagcagacaccgtaatgttccataaccaatattggtga

SEQ ID NO: 36942 - DNA, 702 bp, Zea mays
  Peptide Sequence Number=SeqID_80317
atggccgcttcctccctctgccacgggcacttgctcctgtttctcctcgtgtccgtcacatcggcctgcctcggtaccgcggcagcgcatcaagccgggtctggagagggttacacgatcgccggccgcgtcaagatcgatggcatgagtgagaagggctatggtcttccagccaagacatcaaacacaaaagtgatacttaatggcggccaaagggttacatttgccaggccagacggctactttgcattgtatcctacaaatgattcattaccccacaacgtgccagctggaactcatctgattgaggtctcctcaattggttacttcttttcccctgtccgagttgatataagtgcaaggaatcctggatatattcaagcagcattgactgaaaccagaagggttctgaatgagcttgttctggaacctctgaaagaagagcagtactatgaggttagggagccgttctccatcatgtcacttttgaagagccccatggggttaatggttggttttatggtcttaatggtctttgtgatgcccaagatgatggagaacataggtatatttcacctcttttacatcgaatggatacaagctttcagttattatgtttcactaaagcttgcaactagcaaacagcagcttctacgagcagtgttgcatgatacaatggtagagtttagttctatttactga

SEQ ID NO: 36943 - DNA, 348 bp, Zea mays
  Peptide Sequence Number=SeqID_80318
atggcggagaacctttggccgctctacgatgagctggagccggaggcagctgtgttggcgtggacagaggcggagtcggctcaaaaagaggcttcgtcggcccaggagcaggtggcttcccaggccgaggaggtgcagcagcggcgactggagcttggccaggtcatccgcgagcgggaccaaccttggagtcacgctgccgaggctgtgagccaggctgaggtccccgggggacagctggctgaggctacggagcggccaaccgaggtgtctgctcgggctggggccctagcggagacccgggctgtgagggcccaagcgcggtgctggcgtcctccttcgaggtga

SEQ ID NO: 36944 - DNA, 276 bp, Zea mays
  Peptide Sequence Number=SeqID_80319
atggaggtcctgaaccttacctggaggtccggtctgtacatacaggggtccgacactttcctgtgggggtccggacccactgttgacaccttggagtatatcgtcttctctggtcacgtggcggccccggagccgtccacgtggtgggattgggtgctgttcaccatgcgactagagatagccgcgtcttcatactgtatggatctagatgctcattactgcaagtctgtaagcaatgacctacatgaggaatcaattgatgccctcaacaaatag

SEQ ID NO: 36945 - DNA, 387 bp, Zea mays
  Peptide Sequence Number=SeqID_80320
atgagttatccccatgctgatgatccactggtacatcaagatggtgccgtcgcggtgcgggatgtgatctgcccggtcggtcttcgcccgaatcactggtccggccttggtggcgggtccgggggaagtagggtgcatgggggatttgtcagcggagtcaccatgggagatcctagcgtctgcaccgatgaattcttcacagtcaccgtgggtccgccatgcgtcgcggtcggggctcgacaccactcagatcatggtagtgaatccaacggccggaggcaacagataccccttcgctgcggtgcatttgcaaaagaaccctcgaacttctatgaaataagctcgccgtccataatggttcaaagagtattacagtccggtccataa

SEQ ID NO: 36946 - DNA, 873 bp, Zea mays
  Peptide Sequence Number=SeqID_80321
atgattgcaactgctggtcaggcgtgcgggacgaagacgaagcgtcggttcggcctgggtgggacggttggctcggaccaggacccgaaaagccccccgaatcagctcagcgcctcggcggcagcacacagtgacagtggcaagcagattgcagttgcagcgtcacatgactcggattcaaattcgttagcatcagggggttacatcatgaactccgacccaaaatatgacatgagaaaacttcgccgtcagatccagatcgaacggttgataccacacgaatccaagcacccgctgacacaggcgcaggcagcagagggcaataaccacagcccatttccagttccatgccgcatttcctttccatttctgttgctctcctctctttacccgtcgccgccctcgccctcgccaccacccgcacccgccgcgcggcccccattcgcctcgatttcgccggcggcgatgtacggcaacgacaactggatcaacagctatctcgacgccatcctcgatgccggcaagggcgtcgcggccgcggccgcgggcgccgtcaggggccggggcggaggctggggcggggaccggccctcgctgctcctccgcgagcgcggccacttctcccccgcgcgctactttgtcgaggaggtcatcaccggctacgacgagaccgacctctacaagacctggctccgggcgaacgcgatgcggagcccgcaggagaagaacacgcggctggagaacatgacctggaggatctggaacctcgccaggaagaagaaggaggtgcgcctttttgctcttggttcgtttcttctctcccttcgcgctgcttcttatgttcctcagagctcgtgctcatctcggttttga

SEQ ID NO: 36947 - DNA, 1317 bp, Zea mays
  Peptide Sequence Number=SeqID_80322
atggcgaaccgctggtgggcgtggtcggggatggtggtgtggttagtggatcggtgggcgggactgggtgaggcaaggatctccggactcgggataccaagctgtcaagagcgtcgaacccttgactcgccgggcctcggctacgtaactcgtagccttcggccgtcttctccggtaggagtattcctcctaaccgcaggcttgagagagagagcgactagggctgctaccctagaaccaagcctgcggcagaggggtataacctcgccggagaagacagctatcctcatggaccgaaggtccatgacacctggtatcatctccaggttatcctcaccaccaccagccgcccatccctcaccaccaccagccgccgcgccatctgccgccgcaacgccctcccacccgccctctccaactccagatgcattcactcgtctcgaagagaagtgggatcaattcgttgtgatgttccaccgctacaaggagaagacagagaaggaactccaagcaacggtgcggcttcaggcggcagcgcgagggttcctggcacgccgccaggtacagtcccttcgtggggagaagcaccttgctgtggcctccagggccaccccatggccgtcatcacatgagcaggccgtggtgcgcctgcaagccgcagtgcgcggcttccttgttaggcgggcggtgcggaagctgcacttgctgatcagctcatcgctgcaccaactcgcagcctgcgcgcccaaccatcaggtctcgtctatactttttgaaccccctgcagaagtcgagatctgggtatgcagcccccctgcacggccccaagagggtcgtctccttcattcgggcaactaccttggtgctggacagacccaacataagaacgagctggttcctccttcacctttcatccaacgtgaagtccgcagttcagctcttcccttgggatccaggaggacaggaggacatagatgcagttcaaatttatattttagttccacaattattttgtattttcgtcttaaaataaataaagcgcctagggctgctaccctagaaccaagcctgcggcagaggggtataacctcgccggagaagacagctatccccatggaccgaaggtccatgacagttgctgacgttcccagccaagagtcgttgggactcgccatgtcgagtgcgttcgacgactactatatcaaggactgtgacgtcatctcggcgccggaggtgacgctgaggaggaccgatagcaatgaccagttcgtcatcctcaccaccgtcggggtagcttttgtgccggcctgcctttaa

SEQ ID NO: 36948 - DNA, 2658 bp, Zea mays
  Peptide Sequence Number=SeqID_80323
atgaggtccccctgcttcacgatggacagcgacagcggtgcagccgctctggaccgcgtccaagcggcggctgcgccagagcttgtcgtccacagcggcgcatgcggccacgtaggactgcttccagaggtcgaactggcactcgccaagcttcttctcatcatcgatgagcgacgccaacgcgagcgcctcctgctagtggtgtttgttctgggtttccattttgagaaagaggaagccattcgcttgtccaaacaccgtttagagactaagaagccacggaatgatgctactgcagaaatgtctgaagatctttttgaaggagtgaagggagaagacgctggtgatccatctgttgcctacggtgacagcacaactgggaacacacctaggaccagtttatttgacaagctatacatagtgttgatcagtctgcatggcctgatacgtggagagaacatggagcttggccgtgattcagatactggtggccaggtcaaatatgtcgtggagcttgctaaagcattaagttcatgtcctggagtttaccgggttgatctattgacaagacaaatcttagccccaaattttgatcgtggctatggtgaactagatgagctgctggcttcgacaagtttcaagaactttagatgcgaacgaggagagaacagtggtgcacatatcatcagaataccatttggccccaaagacaagcatctagctaaagaaaatatctggcctttcattcaggaatttgttgatggtgcactaggtcatattgtgcgcatgtcaaaaactataggcgaagaaactggcagtgtgtgtccagtgtggcctactgtgattcatggccattatgccagtgcaggagttgctgctgctctattatctggagcacttaatgttcccatgttgtttaccgggcattttcttggtaaagataagctggaagagcttctcaagcaaggtaggcagacaagagaacaaataaatgtgacatacaaaataatgcgccgaattgaggcagaggagttgtctcttgatgcatctgaaataattatcgcaagcacacggcaagaaatagaagaacaatggaacttgtatgatggttttgaagtcatgcttgcgaggaagctccgtgcgttagtcaagcgtggtgctaactgttatggtcgttatatgcctcgtatggttataattcctccaggagttgaattcggccaattgattcatgattttgatatgtatggagatgaagataaccaatctccagccttggatccatctatttggtttgaggttataatgcggttcttcacaaatcctaggaaacctatgattttggctattgctcgtccatattctgaaaagaatattgcaacacttgtgaaggcatttggtgaatgccatccgttgagggaacttgctaaccttacactgataatgggcaaccgtgaggctatttccaaaatgaacaaaatcagtgcagctgttttgacatcggtgcttacattgattgatgaatatgatttatatggtcaagtggcatacccaaagcttcacaagcactctgaagttcctgatatttatcgtttagcagcaagaacaaagggcgcttttgtaaatgttgcttattttgaacaatttggtgtcaccttgatagaggctgccatgcacgggttgcctgttattgcaacaaaaaatggggctcctgttgaaatttatcaggttctggaaaatggtctccttgttgatccccatgatcagcatgcaattgcagatgccctctataagatgctttctgaaaagcagttttggtcaagatgtcgagaaaatggattgaaaaatatacaccaattttcttggcctgaacattgcaagaattacttgtcaaggatatcaagtcttggtccaagacatcctgcttttgcatgcaaagaagaccacaaggtgcctgtgaagtgcaggaagcatatatctatcattgctgtagactctgttaacaaggaagatttaattcaaattatcagaaactctgttgaggctacacgcactggaactatgtcaggttctacaggttttgtgctgtcaacttcactgacaatagcagagctacagtctgtaatattgcctcctttgaaggagctgcaaaagttgatgagaatccagtcactgcgttgtcatgctctgtataaccatggcgccaccaggctatctgtaattccaatgcatgcatcgcgatctcaggctctaaggtatttgtctattcgctggggcatagagttgccaaatgctgtggtcattgttggtgaaactggtgattctgattacgaggaactgtttggaggtctccacaagacagtcatccttaagggtggattcaacactcctgcgaataggatccatacggtcagaaggtaccctttacaggatgttgttgctcttgatagctcaaatatcattggaattgagggattcagcactggtgacatcaggtctgctatgcaacaacagcttgtcactcctggttatgatattaatgttccaaatgcttatgcagttgaccatttccagcatttgcgtaatgaggactctagggagaagcctcgtagtgagaccctggccattcacctcgaaagtgaatacgggtctagctaa

SEQ ID NO: 36949 - DNA, 279 bp, Zea mays
  Peptide Sequence Number=SeqID_80324
atggagccaagcaccccgacgcaccgtgacagagccacccggccacccgcgcgcagctcccacgccgagcctagcgcgccgtgcccaaggccgaagaccgaccgcgaccgtgcagcccaccgcgcgacgccctgcttccccgacgcgccctgcctaggacccacgccctacaccgcgaccccgaccccgaccgtggaagatcgaaagcttgcagatgaagatatgatgctgaactccatggatgctagtctagtgatacccccggtcatcttcctgtag

SEQ ID NO: 36950 - DNA, 396 bp, Zea mays
  Peptide Sequence Number=SeqID_80325
atggatcctctgaagccagtactccgtcgtgccttgcgttccagatttctagccgtctgtctcatcgagtcatcgtcgacccctctacctatctcacgtacagcacagcctcttctgcaggtcaggcgtcgtgccgatgccgaaggtccaatcgccattcaccggcgcgccaggatccaaggctgtcatgccatatggacatatacattggatgtttcgtggggcagctcgaaagcaacccgctttgaagctgtggaaacaaaacacggctgcctagcttgccggccagggagatgcgataaactcccagctgatattctaatgggaaaaacctcatcggcaagcatcgaaagtcagttgccaggcatcctctaccgactcccaaagctgaattag

SEQ ID NO: 36951 - DNA, 422 bp, Zea mays
  Peptide Sequence Number=SeqID_80326
agaagacactcggtaacgagttccttgcccagtggcccagtatttggcactcggcaaagaagcctctttgccgagtgctaatcctcggccctcggcaaaggctgacggccgtcagctttaggacggccgctgacggccctttgtcgagcgccacctttgtcgagtgtttgacactcggcaaacatgtctttgccgagtgtgttcctgtgccgagtgtcctgcactcggtaaaccagctcgttaccgagagccggactttgccgagtgcggctctcggcaaagccttctttgccgagtgcccgacaaaaggcactcgacaaagagtctggcactcggcaaaggcccgaattccggtagtgtattcgagttcggttcgggttctgttgggggccttcggcttccgaaggtcctcaaaaacatga

SEQ ID NO: 36952 - DNA, 399 bp, Zea mays
  Peptide Sequence Number=SeqID_80327
atggttaacagatactttgcaggagaggaggcgaatacaacggctgcttggttcctcgtcgacgaggaggacagggcagacctcaagcgcaaagaagcggaagcgatacatgtaacaccgaaaggtggagtcattgacgtgctcggtgtccagtaccaagaaggggaaggctctgggtacctagcgggcaggccagctgctggatggggacagactcggagcggcaggcgacgaaacgcgccttgggggcgaacgacgaggacggatgacgatgacaacaagacgacggatgacgacgatgaggaggcgcggacgatggcgcgggagcggaagaagccagaggggagcggaggcagcgagcagaatggtggcgtggtggtggtgaaggggagccaatga

SEQ ID NO: 36953 - DNA, 333 bp, Zea mays
  Peptide Sequence Number=SeqID_80328
atgacgaatagggttttctgcagtagcaggttgcaattgatataccttttctattttgagaaataccagttgaagctattgaatcaagtggcaggcaagtgcttgaacagctactcagagtcatgcttccaagtcagagttataggtgaggatcctgataatgggttcaagcctacaagtggaagagtggagtcagatggaaatagtcatgtaatttatgcagagaatgtcggtaagatgataatcacccccaccaagcttcgctcttggctttcccatactttagcattcaatatgtcaagccatgtaccatcttgggcagaaaaggcgtga

SEQ ID NO: 36954 - DNA, 1872 bp, Zea mays
  Peptide Sequence Number=SeqID_80329
atgaacaagagaccggcattcaaggtgccatcacaaacggaaccccggttccacctccgcatgtacgaacaaccccacatgattggggggcctgcggagcaacagaagaccgacgaacggctcgccgtcgcccgctccagcagcagcgacgacgacgacttctgctccggggggccgaacagcagcagcgatgacctcagggcggatgctgctgccataaggccctcgcccatgccctcactcgagaggcaaggacgggcagaaggtcgtagagttggaggtcagtccgtgggcggcaccggctatctcgtcggcggagaaacctcttccggctgtcgtggcggaaggcggcgccggaagcggatccgaagccactcgggtcggagagccgggcacgcggcagctgccagcgcctcaaacggcgaacgcccttccccccgatcactgagggaaggagcgggctgctgcccgcgcagggaccgaccccaactcggcgcactcccctccccagcactgatgatgaaaatccttgaagctgagggaggggcagaggccgcagcccggcttgcttctccccacccagggggctggtggtcaccgtcttgggtgaccaccggtgaggggatgcagccgggctgcctgatgaaaatccttgaagccgaacgatggctgaaaggtaccaacttccacgaagttgcgttcctccaacgacaaggcggaaggattgcgggtgttccccgtccgggggctcggaagccgtcgcaggctaagtcttctccaacacgctccaaggtcctccccctacggcgcgggggctgggtcccacgcgtcatgcaagctggcccagagcagaagaagccaaactgccgcgcgcggtgcatgcaactgcccagcggtcacgagcattcctccactatcgcccagaccagcgggcccacacgtcatgcaaccggcgcgtcggttgctacgtgcgagcaactgcaccgccactcgcaccactaccgcgcctcctcaactgcggaactagcgggcggaagcagcggtcacgtcgtcagccaagcttacgtcccatccagggacagcaaggaaaccctctaccacggcgtgaagacggcatgcccagggaccgggaaagggggataccccgaaaagggatccttctccacgatcaaaggttcaaaggctggcccctcggaggggttcaacagccgcctcagagcgcttgggctccgcgcccactactggtcagaggttcgaaggccggcccctcggaagggttcaacggccgcctcaggccactcgggctctgcgcccactactgatcagggcgggaacgatcttgtaatggaatcccatcagagggaggcatcgagccctcggaccctgtcgaaaggggaccgggtccggcagatcacccgcagcctcgggcaagggctgccgaccccggagggttttacgtctcgcccgaggaccccctccagcaacggacacaccttcggcttgcctaaggcccagtcttcaccaagaagcaaccttggccaaatcgccacgccaaccgaccaaatcgcaggggcatttaatgcaaagggctcggactcgggctcagccccgaaagacgacgaactccgcttcgcccgaccccagggctcggactcgggctcagccccggaagacgacgaactccacttcgcccgaccccagggctcagactcgggctcagccccagaagacgacgaactctgcttcgcccgaccccagggctcggactcgggctcagcccaggaagacgacgaactccgcttcgcccgaccccagggctcggactcgggctcagccccggaagacgacgaactccgcttcgcccgaccctag

SEQ ID NO: 36955 - DNA, 840 bp, Zea mays
  Peptide Sequence Number=SeqID_80330
atgtcgctggcctgcggcctgccgctgctcgagtgcgtctactgcctcgcttgcgcgcgctgggcatggaagcgctgcctccacagcggcgaggtcgacagcgccacctggggcctcgcctccgccgacgacttcgagcccgtgccgcgcatgtgccgcctcgtcatggccaactacgaacccgatctctccccctccgccccgctcctcttcgcgccgcccggcggctacggcatcgaccccgcctgcgtcctccgccgccggacctacgccgacacacgcggccgcgtcacgccctacctcctctacctcgatcacgcccacgccgacatcgtcctcgcgctccgcgggctcaacctcgtcaaggagtccgactacgcgctccttctcgacaaccgtctcggcaagcgccgcttcgacggcggctacgtccacaacggcctcctcagggccgccggctgggtgctcgatgctgagtgcgacctcctcagggaactcctcgagacgtaccccgactacacgctcaccttcacgggtcattctctgggcgccggcatcgccgccatgctcaccatggtcgtcgtcctcaacctcgacaagattggcaacatcgacaggacccgcacacgctgctacgccatggcgccggccaggtgcatgtcgctcaacctcgccgtcagatatgctgacgttatcaattcggtcgtccttcaggttacggtcactcactcaggtttcttaattatgtccactgactactccctactggtttcaaccattctccacctttatttcccaatggcaggacgacttcttgccccggacggctactcctcttga

SEQ ID NO: 36956 - DNA, 342 bp, Zea mays
  Peptide Sequence Number=SeqID_80331
atggccctcgcccgcgcctataaagcacccagggacctcgaccgtacccctccgcacgcgctcgacctcaccggagcccagaaccaccggcgtttgcccgtgcacggcttgccccgcggccgcccgaacccccgccaccgtagaccggccaacagaacccttcccaaccccgtccaaccctcggagaagactgtgcacacctcggtgaagctccccgagcgaggaatcggagtttgcttggccggagaagccagtccacagtcgccggactccacccgaccgtcgacgagcgtagaccggcctctacgtcaccccgtgaagctcaccgtgccattggattga

SEQ ID NO: 36957 - DNA, 339 bp, Zea mays
  Peptide Sequence Number=SeqID_80332
atggggaaatggagctgcgcagggactcctgctgggaggaagatgaacagggcactgggaaaaatctgggcgtcacggcttggagcagggggctcggcctccatggggaagaaggctcctgcgctggctgtctggggagggagcatggggaggcgacgtccatggatgcttctgccactgcgcaagggaagccagggggaagggggtgcgcctatggggggcctgctcccgcgctggcgtgctgctgcattccagggagccgagtggaggacgccaggaggtgcttcggcacgttggggaagaagggcgccttgcagggatgctgagcgccgggagtag

SEQ ID NO: 36958 - DNA, 867 bp, Zea mays
  Peptide Sequence Number=SeqID_80333
atgagccggctcatcctctccgcgcgacgcgtgtcgtcttcgccggacttcgctgacgaccaggactcgccccagccgccgcccacactgcagtttgtaccctttattgttgctgatcacaaaatcataggctctgtctacaatccttttgcatcaatgtactttggtgcatcgtacttggcatggttgtctcagtacgaagggagggagcaaagctacgaattcattgtgcaagtttaccttgggggaccagagaattttctgctgaggatcatttatgaatgctcatcgacattcttgccaaatttcaaatcccctccaaaagggttcgggaactggcaaacaattttgcttgctggacaacacgagcaaattgtgcctcatgtgcttaattctttcctggaccaagatagcagagtgcgttactatgcttgtgaagcgctatacaacatagcaaagattccgatgctaatgttcaaagtgcagctcaccttcttgacaggcttgtcaagcatagaagaattcataccgcttttgagagagcgcatgaatgtgttgaatccttatgtaagacaatttttggtggggtggataacagtgttagacagtgttcctgatattgacatgcttggtttccttcctgattttctcgatgcatataatcagcatccaatcgctcacttgctaattcttctgaacattccctgtgttcagttaccttatattttaccacacatgctgccatctgaaaaggcattttcagctgctgtatctgctcttggcttctataacaaagacgtgatagtagtttatgatggaaaggggctgtttagtgctgctcgtgtttggaagtcagacatcacctag

SEQ ID NO: 36959 - DNA, 309 bp, Zea mays
  Peptide Sequence Number=SeqID_80334
atgccgccgcgcataaggaaaactgtgcgcaagtctaccggaccaattggcgtgcctcgccatcaactagctccaaggcatgaggatagtagtagtggtagcaacgatcccatcagagatctggaagctcaagttgaacaacttcgcacggagctccgtcacaggaacgatgtatgggtcgaggaccaacttgctgaacgagatttagcgctcgattgggctgttaactcacgttcacttgctttggccaaggaagccaaagctcgagcccgtgtggaggagcttagcagagccgtggacaacttgtag

SEQ ID NO: 36960 - DNA, 732 bp, Zea mays
  Peptide Sequence Number=SeqID_80335
gtactgcagggagccggttacacgacgcctccccagtacacggtgcagctgttcgagaagcaccgggtgccccgctgtagggtgaggatgaccctggagcctcatcccttacagccacgctggcattcgttggactccgagtctttcggataccgggctgaggatactatcgaggccattgctctccacgggctgaccaccttctgtggttttcaccccttggagttgtccactcaccccattggtttgttccccgcggagaaggaggacgacccaatgtggaaggatcgagtggaacatgccaaggatgtgtgggctctatacccagggcagactgcccacctcatggtgcgatgcatgaatgccctgtatcgtctgcaagtgatgcgaggagaggcaatgtctcagctaatggcattgttggaggctacgaccaagatcaccttagacatcagagagaaacttgtggtagacctatccactgagatggtggaaaaggacctggagagcaccatagaagttctcgaagatcaggtcataaacactcagcagcaacttgatgaagccaaccagcacttggatatgcaccaccaggagatccaggacatggaggccaacgaggatgtcgacatcgagggaggagaggagccggagcctgcatccagcttggacactactggctcagggagaccaccttcccccgagtcgagcgttgcctcgtttgctcactag

SEQ ID NO: 36961 - DNA, 303 bp, Zea mays
  Peptide Sequence Number=SeqID_80336
atgaccaggatcagatctgcggacgcgcgcgcaggcgcgactgacaggctgggacggttgtcagcgaccagagggaaaggctggctgactagtcgggcccagcgccagtgggcgaaggcactgactggcgggcaaaccgggcgatctggtgaacccatccatgggcgcaaaactggcatcggggcagcagagggtgcagaacacggcgaagcggcctatggcggcgcgggtcaactccggtcgacggcggcggactccgactgcacggggaagactccagtgaacgcggaccggacaaactag

SEQ ID NO: 36962 - DNA, 288 bp, Zea mays
  Peptide Sequence Number=SeqID_80337
atgggtcagagagcttcaccaatgatcaaggagggccggcggccgaagtccggcgaggacgatcttggctttccggtgaagttctgccaggtccgagagcttgggaagcttcacaagctcttggcgaagctatccgagcggctggcgcggcttggaagcgaccggagtgggctagccacggtggccgaggctcaggtggcaatggcgggcggaagagagctcgccggagctaacgaggcaacgcagagagaggtcgagttcaagcatggattggctccaaatctttga

SEQ ID NO: 36963 - DNA, 357 bp, Zea mays
  Peptide Sequence Number=SeqID_80338
atggcggccaaatgggtggggctcacgaccatggggaaatggagctgcgcagggactgctgctgggaggaagatgaacagggcactgggaaaaatctgggcgtcacggctgggagcagggggctcggcctccatggggaagaaggctcctgcgctggctgtctggggagggagcatggggaggcgacgtccatggatgcttctgccactgcgcaagggaagccagggggaagggggcgcgcctatgggggggcctgctcccgcgctggcgtgctgctgcattccagggagccgagtggaggacgccaggaggtgcttcggcacgttggggaagaagggcgccctgcagggatgctga

SEQ ID NO: 36964 - DNA, 429 bp, Zea mays
  Peptide Sequence Number=SeqID_80339
atgggactccggttccattcccgcgggtatgaacaacctccacatcagggggcccgcgggataacgaactccaagcgactcgctggcgacctctgcagcagagacaacgaccttcgtctcgggtggctagacagcagcagcgatggcctcagggcaaatgctactgctgaagggccttcgttcacgtccctcatggaggacgagaaccagccattaaagccaaagagccggaggcctggagcgcaggtggtgccgatggtctcgttggcagggacaaccgctggtgcaagaggaagcctcacctatggcggccaccacctcagcaccgacgacagcggccacctgccttccaacaccgcgtcggcgaacagcggtcgccccaaagcgcaccggcaggtcctctgtaacaccctgaatttgggggtataa

SEQ ID NO: 36965 - DNA, 813 bp, Zea mays
  Peptide Sequence Number=SeqID_80340
atggcgaacaccctcaacactgagggcgggaccgggatcacagcccggtttgcctctccctatccaggagctggaggtcaccgtcttgggggcatggaaggtggaaagatgcggcgcatgagggaggaagaagatatgaccggctccgagcagaagaagccaaaccgccgcgcgtggggcacgcaaccgcccagcggttacaagcgatcctccacctttgcccagaccaacgggcgagagaggcgggcagccatgcaggcggcatgcaaccgcgccaagtggacgcgcttctccgactcccagcgcgcccagcctggaggcccaggcccacgcgtcacgcaaccggcgcgccggatgctgcatgcaagcaactgcaccgccacttgcgccaccaccgcgcctcttcggttgcggaaccaataccgcgactcgaggcgaccaggcacaagacccagcagcgccagcctgacgcgacgcagcaacgggcgacgcttcgccctcgccgaaacaaccgcaccaaaaaagggaccaggaaagggggatcccccgaaagggatccttccccgtgaaggaaccaggctccgagcctccttactgatcaggggttcgaaggctggcccccgaagggttcaacagccgcctcagatcgcgtgggccctacacccactactggtcagaggttcgaaggccggcccctcgaagggttccacggccgcctcaggctactcgggctccgtgcccattactgatcaggggttcgaaggctggcccccgaagggttcacagtcgcctcagacgccgagcgagggatga

SEQ ID NO: 36966 - DNA, 447 bp, Zea mays
  Peptide Sequence Number=SeqID_80341
atgaggtgcaccagcgtcgccttgctcttgctgtcgttggaggagcgcgacctcatggagatcggcgctcttcagccatcactcggcttcaaggattttcgtcgtgcagcccggctgcattccctcaccaatggtcagtttggtggggagaagcaagtcgggctgcggcctctgccccgccctcagcttcaaggatcttcgttatccgggctgaggtggggaagcgcgctgggccgcggaggagacgttctccagccatgcggcgggaaggcgaactgttgctccgtggccggggtgcagctttccttcctcctcccgggcggcggtcgtgccgcgcgcgggccggccacgcccatatcctcctcgctccgttggctgcaccgggaggtcgctcaacacgtcgtacgccgcgagggcagtactcgtgttctgggttggccttggtga

SEQ ID NO: 36967 - DNA, 792 bp, Zea mays
  Peptide Sequence Number=SeqID_80342
atgactctgagtacgtccgatacatggctgaggctcgggctacactcccgaggtaccctaggacatttccgagactggcgagaacgatttgtaatggaatcccaccggagggaggcatcgagccctcggaccctatcgaaggggtccgggtccgacgaatcacccgcaggccacatgagggaacgatcagacccggtcgaggcaccacgaaaagcattaagacctcagaggagtcaaaccactcctccgaggcctcgggggctacacccggcgggtgcgctcgcgcgcacccaccagaacaaagcaaaatcgagaaaggcgaagactgacaacaagtcacgatcaaccaccgagttcggcatcgggcgcaataggaagctccgcctcgcccgacctcaggctccggcctcgggaggaggtctccgcctcgcccgacccccggactcggcctcgacctcggtctcgggaggaatcgcgtcctcgcccgaccccggcctcggcctcaagagaagtctccgcctcgcccgaccttgggctctgaccaaccgcgccaacaggggatacatcattacgttatccctagctagcttaggctacaaggaacaagaccagcgtcccatctggcttaccccggcgacgggtaatgatggtgccccgcgtgcaaccatgacgctggtggctctcatccccttacggcagcaaggagacgtcagcaggatccttgccgcactgccagctatgctcctacagggctcaggcgcttctctgacggccacgctatcacgtgtatag

SEQ ID NO: 36968 - DNA, 396 bp, Zea mays
  Peptide Sequence Number=SeqID_80343
atggccggttcaaaagatagctctgaggtttccaccagcaatatcatcacaccgacatgggaagccttgccggctgaagaacagctcctattcgaggagcgccaggagcagctgatccaagaagcaaaggcgaagttcctggctgacttcaaagtggacaggaacaacaaggatggccacaatggtgaggagatcttaggggtgacggaggttgcgctcgtgctcctctggtctcaccaatcatgtcacgaggccgggcatatggaggagcgaggcaacaacggagagcaggcgtgggtgggagacgagcgcgtggaggtcccggatgagcgaccgtgggtttgggaccaaagcgtggtgggcgaggggaaggcggcggcggagcgagaggaggag

SEQ ID NO: 36969 - DNA, 1509 bp, Zea mays
  Peptide Sequence Number=SeqID_80344
atgtcgcacgacgagctcgccgacaaggagccgtcgtcctccgaggagtttcagctcgcgccgacgggttccaagttccggagcctcagccctgcaccgattccgatcccagcttctccgggcatcagatcattggtcgactcggtctctgatgagacagtaaatgtagatgtcatggcctcacatcaaagtgaaaatggatcaatctctacagctagttctaccgttagtttactggaatcagagaaggcagcatatgaatttcttgctcaaactcctgtcagatcaaccgatgcacatcttattgagttttcagaggccttgagaactgtcgcaaaagccttacgacaagtggctgaagggaaggctgctgctcaagcagaggcagcagagtggaaacgctacagcagttgtatcagtaataacttggacaaactggccagccaactaaccctggagacacctgcacctgatcaattaggctgttgtggtaagcatggtatatgtgcacaccaggttctccaggatgaagttcctggacctatcccaagatctaatcacaaggtgggagggagaaaggcaccatttaaactttcatggggatgtaacggggataaaaatggccagcataagcatgattttgtgtccttcgaaaaaggtgatataacaacagcagaacggagcaataagcagatcttactgaaatgggaatcaccaccacaaacagtgcttttcataaccaaaccgaattccagctctgtgcgtgttctttgtgctgaaatggtcagatggcttagagagtataaaaatgtaaacatctttgttgatccacgtgttagcaaggaacttctaacagaggattcctactacaacttcgtccaaacgtgggataatgcgagcgagcactaccgtgagttgttggacaacgtgctgaatgggccatttagcatcacgctgagaaatcgcatacagtgtcatgtaatacgagacgcggcgaaggatgaaatcgtgaccgaggagccgttcttagtgctaaatgaagttacgatcgaccgagggatatcgtcttaccttaccaacctggaagtctactgcgacagctcttttgttacttgtgtgcaaggagacggactgatcatatcaaccacatctggaagtacggcatattccctagcagctggagggtccatggtccatcctcaggtccctgggatccttttcaccccaatctgcccgcattccttgtcgttcagacctttgatcctgcccgagtacgtgactctccgcgtccaggtgccgtacaacagcagggggcacgcctgggcgtccttcgacggcaaggaccggaagcagctgtcacccggtgacgccctgatctgcagcatttctccctggcccgtgcccacagcctgcctagtggattcgaccaccgacttcttccgcagcatccatgagggtctccactggaacttgaggaaatcccagtcgtttgacggcccgcgtgattga

SEQ ID NO: 36970 - DNA, 495 bp, Zea mays
  Peptide Sequence Number=SeqID_80345
atgtcgcgccccgtgcacggactgctgcttccactgctcttcgccgtctgcctcatgatcccactcaaggtctccgagtgctctaggccaccaccgtcaccgtcgtcgggggacgaccacgttcacgtcggcaggccgcaccaccagcgccagcggctgctgctcgatgccgaggcccgcaccgcccgtccgcccacctgcaggacggatgtggtggcgggagccgccggcgccggcgcggcaccaccctcgtccgcatcgccgacgactcctgcgcggggcgtgggtgccgtcgccgcttcttcgcggccgcggcagacgagcgacgccgacgaccgggcgctgcttgcgcgctccacactagcgcggcggtttcttgcaggggcagacgtggacgtggacgggaccgccagcgcaacggacggatccaggggcgtgtcgtgccgctcctacaacccgcacataaactgcccacccgcggcgtcgaagccctag

SEQ ID NO: 36971 - DNA, 243 bp, Zea mays
  Peptide Sequence Number=SeqID_80346
atgctctcggtcaccgtggccagagctcctcagttgatcttacatgcaattgagttgggggaaaagcttaggatagattcgatttggtgtcagtcgctcgggagcgtcggtcatcgcctcaatcggccgaacacgaggaagaagtggaagccactgaagagcaagtaccaccacctttggaaacacaggctgagaactgtttctactttgatatttgtggatctgagcctgactcacccataa

SEQ ID NO: 36972 - DNA, 1356 bp, Zea mays
  Peptide Sequence Number=SeqID_80347
atggagagccaagccgtcattggcactggagttcgggcctgtgttgggcaggatcgagtctctggcgaccagtggtctgacgtcgatgcacgtggttggcgacttcttgcagcgccggatcgcgccgctgctagcgaggacacacttgagctgctggttttctggctcaaacgaccctggccgggtcctacgcaggccaggcaccgacctgacctaggaggagctagagctcttggtgaagggggtcactgcccctcgggcaagggcaagggagccgcgagcagttcttctgccccgggtggtttcgggaggtcggagggagagagccggcaccgactacgtcgtgccgacgggtctttcgtcgaggatccgcctcttgattcgggcctccctcagaagcaccagaaaacagctagcagggtcggggaggccggctccccgacccagggctcgcagaggcgtgtcagtcctccaccaacttcaccatcagtcccgccatcaccgccgcagccatcatctggcctgccaccgctaccggggcagcaacatcaacaacagcagcaagggcaacagacgtcttgcttccaaggtcgttggaaggtccggggccctaaggcctcttctccctctgtctccaaagttgctcctactagtgagtccggcctccagcagcaggcgtctgctggcgttgatgctggcgacctacctccgactgccactgttgaggcggcgccatcggacccccaggttccgactggcactgccgaggcagtgccgttgggcccccaggctccccactgggagtccagtaatgacgtcgtcgagcccccaagctccggctggcactgccgaggcagtgccatcgggcccccaggcaccagccgggagtccagtagctgcagcaccgccggcgtctacggcagactcaacgggggtgttcctgatcccatcccgccaccggttctggaggagccagaggctctccaggagactgaggcggctatccttcgggagtgggaggctctcgagaccgagcaccagcgccttggcgattggtgcacccagctggaggaacgtaccaaggccgtgtcctgccaatttgcttcagagcggtccaagcttgcgtgtggacatgaggaccttaaggaggacctggagaaggtgatcgagcaggagcgggaggctacccaggaggagaagaggctggcacagaggaaagagcgcttggaccaacgggaggtggtcattgcagaatttcatgagaagttgaaagcctacaatgcaatgctggagaatcagcgggataagcagaccacgatatttcatgaggtggtttatcatattttgattctgtaa

SEQ ID NO: 36973 - DNA, 537 bp, Zea mays
  Peptide Sequence Number=SeqID_80348
atgctgcactactacgcaattattatttcatttcatatgttattatcaactttggagccctgggctctatttaactacaggaagccccgaccagccggcggattggcggacgtggagggggtgcgaggaggaggagcctcagcgtccacggcgccccgcgcgccgtatgtggcggtgcgggcggcgagcctgtacgtgctggtgtacgggcagacgggggcgttggacgacgtgcagatcacggttcgggtggaggcccgcaacggcaacacgcactcggcggcctacttctcgcgcctcgagtgtcgcctcgcgttcgccggcgcgacgctggcagtgctccgcgcctacccattccgcgtgcccgccaagggcgtcctcccgctggcgtatgtggcgcgcgcggagggcgccccgctgggcgacgccggcagcgtcgccatggaggccgcgctccgcgacggcgtggtgccgttccgggtggagggggaggcccggatgcgatggaaggtcgcggggatcgtcggcgtcgactag

SEQ ID NO: 36974 - DNA, 657 bp, Zea mays
  Peptide Sequence Number=SeqID_80349
atggcacgccccgtgcgcgcaatgctgccgtgcatcctggtcgtcgtggtcctcctcttccagaccgctgcctcgtcaaggccgttgttgtccacggaggaacgacgacgacgaccgcgcgttgatcccacggcctcgccagcgcccgcccaccgtgcagagtcgcgctcgcaccaccaccgagccgccgccgagaccggaactggacgcgtggcggcagtggagacgacgacgacggaggacgatgacggaagcaggactactagtagcagcacccgtgccgaggaaggcggtggcgccgccgccgcggcattgtcatcggcaacgacgacgacatctgcgcgcggcaagcaacaggacgatgacgtcgtcggggtcgggttgaggaacgggaggccggcggcggcgctgctgcgttccgtgttggcgcggcggtttcttgctggggtggtcgggggcgcggactcggctgccagggcgtcgtgtcgatccagtgacgtgcacatcagctgtactccccccgccgtcggagcactgatatatgcgcgggcacaggatcccgccgctggcgctgccgaagactccacgcgcagcaggttcgccagaagactccgcgcgcagcagcagcaggttcgccagaagactccgcgcgcctaa

SEQ ID NO: 36975 - DNA, 1287 bp, Zea mays
  Peptide Sequence Number=SeqID_80350
atgaagaatcaaggatgtgcatcctccaagatgaccctcatcaaggaaaatgacaaacagcaagcgtcatgtcaggttgagcgacgcttctgctacaagtgtggtgagcagggtcatatatcaaagacaactgatcaagccaaggacggaggcaagaagagcttcgaggtaccaagtgcacgggagaaggtcaaggaggctgaggaacccaaagccaagggtgaagaaggaggcttgcaaagtcaagggggtccggtgtccctctgtggaggtccggacccaatgatgcatcctgggaagagggtacccctgattcaggatactgacagtggcccccgggaccgcctcaggggagcatgcgagcctacagtcttctgcgacggccccgagaagacgtggtattggcgcgagcggcagtgcgatttttccgcacctagtaaccgcccggccgcaacctcccgccggtggtcattcacaaggatgattaccagcattatggtggagagaagcgagccgggctacggcctccccccgccctcagcttcaaggatgttcatcatcctcgctggggtggaaagcgagccgagttggggtcttgccttccgcatgggctggcgacccgcttcttcctccagcattcgggggagaagggcgttcaccagccatgcggaggaggcgaacttcggctacgcggggtcggccggctgcaggcgccgtcagctgccgcgtgtctggctccttggcctggatggctttggtgccgcctccggcgctgcctcctgctacttggtcggggcgtggctgtccgtccacagcacgggcgacggtcgcgccgtgctcaggaggacgggagcgaggacctcttcacgcgtgctgaggcagccgccgcccaccggtacagtggtggccgctgtcatcggtgctgaggtggtcgccgccgctgaggtgcccaccgccattggtgctgaggtggtcgcctccgctggcgagccgctcggagctagctatcacgcggccctactggtgtggaggcttgatgtgtcgaggttggataccagcgtatctgaaaagattgtcaacaactctcgggaggcaacccgccgggatctggatctgtacacagcttcagctagggagcgcccacggtacgggaccaggctgagcggctacacgggctccggaccaccccaggagactaatgtccattctctagctctggacccgaggctttcagaccaacaggccgagtttatggggacggaccccaccgggttggcgtacacgtaa

SEQ ID NO: 36976 - DNA, 777 bp, Zea mays
  Peptide Sequence Number=SeqID_80351
atggctgaactgaaagcaaagaggggtagtcgtacttacctcacatggacagatgcgatggatctagctcttttggaagttcttgtggagcatcacaataatggagaccgtggtcaaaatggttggaagccacatgtctacaatgctgccataagaaatgtgaaggataagtgcaatgtggatatcacaaaggataatatttcggcaaggtgcaagacctttgataagcactatgaaatcattagcaagatactatcgcagagtggctttgggtgggattgggagaacaatagactttctatggacaatgaagatgctaacaaaggagcagcatgctacaagacaaaagtggtgaagaactgggatgcaatctgcactatatactccaaagaccatgccaatggtgaaggtgccaagacagggactgaaagtggtcaagatgtggtgaatgacagtcctacaaatgccaatgaaaactctccggtgttagctccaaagaagcagcgaactggtgatgcaattatgggtgtacttactgatatgaaagcttcatttcaggaggctatgcagtccaatgcacctttagaattgccaaagaagacggctccgtctaagatccttgcagcgcttcaagaaattcctgatttacctcgtgaagacatgctacgatcttatggtatgttgctaagccgtgatgatcgcatatttgaagctcttatggagctcccaatggaaatgaggaaagattggctgctgtttgagaatgagaggaagtga

SEQ ID NO: 36977 - DNA, 270 bp, Zea mays
  Peptide Sequence Number=SeqID_80352
atgtgccagcaccagacccttacttatgtcggggtcctccccatcccgggaccttgctgtggtccggaccttacttggagggacctggggcccaccctgaaagctctctttgagactcgggtgcgtagctcggagacaactgatcaagccaaggacggaggcaagaagagcttcgaggtaccaagtgcacgggagaaggtcaaggaggctgaggaacccaaagccaagggtgaagaaggaggcttgcaaagtcaagggtggtcgagttga

SEQ ID NO: 36978 - DNA, 330 bp, Zea mays
  Peptide Sequence Number=SeqID_80353
atgaagcctggtgatactgctatagtatatgcatgtgagttgctaaaaattaagggaaattttgatccatctaaggctgttgcccttggccttaggcctggtcccaagtatcgtgaactccgacttggggattttgtgcagtctgatcaatttgatgaaatgatcaagaagttcagggatgcacttgcaaagcacagagcagataaatgtagccttggcccaacttgggaactagaatcagaactgttggccctggctgcaaacaaggatctccaaggagccactactggtttcaagcatggaagacttcgcggaggtcaggaccgctga

SEQ ID NO: 36979 - DNA, 411 bp, Zea mays
  Peptide Sequence Number=SeqID_80354
atgggcaagaacaacaagcgcaagcgtgagccgactcctccatcggaggagtttggtgactcagaatactcggaggaggagttctcctccgagcccgaggggtctccggctcccgtctctcccccggcgtcgtccgatgactcggacgactcccaagggatagcagcggaggtctggacatatatccgggccgtcgagcgcgccgggctcgaaggctcggatgagtcggagtactcctcggatgaggaggactcggacggtggcgacgagggtgaagacgacgacgacgacgacggcgacggcagtggcaggggcggcggcgacggcagcagggacagcaccaagggcagcagcaggggcagcaccaagggcggcggcggcggcaggggcaggggcagggccagtggctag

SEQ ID NO: 36980 - DNA, 1338 bp, Zea mays
  Peptide Sequence Number=SeqID_80355
atggccgccgccatagccggctcgccctggccgcccgcccggccgcgccctggcgcgcccgcctggcccctggcccccggccgggccttggccgcgcccccggccaccccaacccccccgctggccgccctcggccgcccgcctggccgccctggtcgcgcgctcgcctggccgcttggccggctcggccgcctggacagcccgacccccctgcgcgctcgcctggtcgccggttcaaccgcccctagggccggtggcaatgagattgatggttttggttatgactatggtgctggtaagtggtattctttccgtttggaaaggatggctcgacttagacacactgcacgaaagtcagtcatccccttcttaccctcccgccttgctgagcgtccgcttcgccgtcccgtggccggacagtccagccacttggagagactacaccaccgcctgcgtgaggagcaggaacgtcgacgacaggagcagcagagctcttccttctcgctccaccaggagatagagtctgtgaggagctgctcccctgtgcttcctctggagccgccccctgcaccaccactgggcgccccagcttctggagtagctgctggaggagacccagacgacggagatggtgacgacagctcgagccacgacaccgacttctctgctaaccttgagccggaaggatgggttgctcgacccatcactcgcgacgctgctcgcgggtgtcacttccacgatgcgctcgacaccctgctacgtcgggcatttgaccggcatacttggtccgtcgagtatcgctgtgtggtctaccagcatagtcgtggggtctacccagaccgctgggaggcgacttgcttggtgcgctgcccggaggacagtctccagggtgcggaggcctgttcagagcactattctatctctgagcgggactcagctgaggcagccatgcaagatgctgcacggcgtgcgctttcgcactactgctcggttttcggtggggcagctgacggtcttgacctgaagtattacccccgccgtccatctggcagcacaggaggcgtgattgtctcacctgtcggtgagggcaatcctaggttgagcagcacagtcaacctagccgccgtgctaaacacggagctggaccatgcattagacgagctgagtagggctcgtgctgagatcgccctgctgcgggctgagcgcgcggaacgtcgttatttggatggtggttcccccgctcccgttgggactcagcacccgtaccgctcacctcagcgtggacaccagtcttatggcaatcccgactgcaagaccaagataactctagaaccatag

SEQ ID NO: 36981 - DNA, 1758 bp, Zea mays
  Peptide Sequence Number=SeqID_80356
atgaggatagcttttctcgtgctgttggttctctccctgtttctcctccctaatgggatcggcaaaagcttagccgcaaggccttcggtcgtgaatattaggtcgattcttcagttgaactccaccactggaggtgtttcagatgttgccatccgtgcagcagtggaggatatcaatttagaccccacagttctaaatgggacaacgttacaagttcagacgagggatacaaactgcaacgacggttttcttggcatggttcaagctttgcagttcatggagactgatgttattgcgatcattaggccacaatgctctcctattgcacatatcatttcgtatgtcgcaaatgagctccaagttcctttgatgtcctttgcatcggatgcaactctgtcatcaatccagttcccgttcttcgtgcggactatgcccagcgatctctaccaaatggcagctgtggcggcagttattgattactaccaatggaagatagtcactgccatatacgttgatgatgattatggccgaaacggcattgctgctttggatgatgaacttactgcaagacgctgcaaaatttcattcaagattgggttccgttccaatgctaaaaaaagtgatcttctgaatctattggttactgttagcaatatggagtctcgtgttattattctccatactggttcggaacctggactcaagcttctgtcacttgctaatggactaaagatgatgggcaacagctatgtatggattgctactgattggctttttgcttatcttgatgctaattcatcggtatctgctgaaactataaatgccatgcaaggtgttctgactatacgtccacacacccctaaatcaaaggtgaagagtaatctggtgtccaagtggagcagcttaagcaagaaatactaccacagcgatctccgcaccagtgcttacggtttttatgtttatgatagtgtgtggactgtagctcgggccctagatgccttctttgaagatggtgggaggatttcctttacaaatgactcaaggttgcgtgacgaaaccaggggaactcttcaccttgaagccatgagtgtttttgacatgggaaacaaattactgaataagattagaaatgtgaacttcactggggtgtctggccaagtgcaatttaatgctcagtttgaactcattcatcctgcctatgatatcataagcataattggcaatggcatgcggatcattggtttttggtcaaactatacaagattgctatcaaccgtccttcccgaagacctatattcgaagcctcctaatacttcgcttgccaatcaacaactctatgatgtcatttggcctggtgagactgcgcagaggcctcgaggttgggcttttccttccaatgccaaggagttgaaaattagtgtccctaacagatttagctttaaagactttgttagcaaagataatgctactgggtcaatgaagggctattgcatcgatgtcttcactcaagcattggcattgcttccttatccagttacatacaggtttataccttttggcaatggtactgaaaaccctcattatagccaacttgtgcagatggttgttgacaatgattttgatgcagtaataggggatatcgtaattacaatgagccgaactaaagctattgatttcacccagcccttcattgagtcaggcctgggttgtcttttcttgttgtcggtgtggttattcggattcttgagcatcgaataa

SEQ ID NO: 36982 - DNA, 1203 bp, Zea mays
  Peptide Sequence Number=SeqID_80357
atggctatcgcccgcttcgttctccaggagggcaccgacaaggtcttcatcaacttccgcgacgctaagatacaaatggatacaccatctggtgtgaagggttctattcctgcatgcatcaagttttctgtgaaggttccaggtgaaataccatacaatggtatatattatgacccacctgaagagacgtacctagacctcgttgcccctttctgttatctcttcaaattcacgctgtgctatgcttttggcgagaattgggggatagccatagaacttgaggatgaacagattgattgggctctgttgaagaatgtcttggatatttttattaaaattaggttgggtcaaatggagtgtttcgagaatgactttgaagatttcttactcaaggatactacagagtactgctctgtcaaggctcaaagacacattcgtcatgtccgtggtctgtccatcctgtccgacttggatccacgaccatcaccggtccagattcccgcgccgtccctcccgacctcgacgccgtcgccggtgctggatcgggttcgtgcgcgccatcgcctccacatccccgtcgccaagagctactcactcagcattccacgcttgacagtccgtgacggacgcgcaccctttcccctcttctgcgactcattccggagcgcgctgcctccgatccgcggcaccgcgtcgcgtccgccgatgaggagggcccacctgccggcgtcggcgcagcggcggccgacggtggcgctgcttctgggcctggtgctcgccttgtgcctcaccgtcctctccatccagtcctccttctccgccgccccaggggcgccgggcaggaggctggatctggacgccgatgacgtgcgcgagctcgcggggttccagtcccgtgtccagcagtgcgtgaacacacgtgagacagcttttgcccttaggaagttgtcactcaccaaggccaaaagttaccttgaggatgtgatcgcccacaagcaggccatccctttccgtaggtattgtggtggtgttgggcgtactgctcaggctaagtctcgccactcaaatggtcagggacgctggcctgtcaagtctgctagattcattctagaccttctcaagaatgcagagagcaatgctgaggtgaaaggacttgatgtggataccatctatgtgtctcacattcaagttaatcaggcttag

SEQ ID NO: 36983 - DNA, 771 bp, Zea mays
  Peptide Sequence Number=SeqID_80358
atggggggccccctcggtcgggaggtggtcagggagcggtccgaccgggcgagggatcaggcggcgcgtgacgagaaagtggaggacttcggagctttgaacagcgtgcggcctgaagcggagtcgaacccggtggcggccggggccgaggtcggcccggcgccgcccccggaaaccgtcgaaggctccctcgctgcccctgcggctactgtgtccggtggtggctcgtcgccaaccgctgtgccgagggctgaggatcccccaaagacggcgatggagccggcagcggaggatcccacggcggctgagtcttcgcaggttcaagattttgggcctgcgcacgcaaccgctactgctaattttttggcggcttcgaccgtggatgctggaaatgaatcggatgagtctgcttctaagttttctgattttggtgactctgggagttcggttgagtggacggaagagtcgtcggatgaggacttggattactttgcggccttggatgtggcagcggcggaggcttcgccgcgtgctacggatgctgaagttgtgcctggtccgagcgctgggcgtaggcggcgaagggcggttgcgaagcgtagagtgagtgaggtggatggcggtcggcttcgtgtgggcagggctggcgagcaggaattgttgtccttgccggccgttgcgagtgtaggtgagggggagttgcgaagtctttttgagggtgaggagcttaggataatgctgtacatatgtaactataatttgtatgaatga

SEQ ID NO: 36984 - DNA, 1590 bp, Zea mays
  Peptide Sequence Number=SeqID_80359
atgggggcagcggagcgcgatggcgttgcgattaaaaagctctcgagactcttcaagtctgtcctgggctttgaggtggacaatagcaccttcacagaggcccaaatcagggccatgttctaccccaagttcaaaaatgataaatccgatcagaagacaaggaccaaaatgattgatatggtgtcccatgggcttgcaaacttgaaggttacactcaagcattctagttccctcttcatgtatgatggtcaccatggtggtgcatatgtgaagaatagcttcgggaattcagtcatattcttcatccctgctgttgcacgctgtgggggagcttgggaccagcatcagctggcggaagaagaggatgtcgacccgcttccagaggggcaccatcacatcctcctcctgccccgatccgccagccgcgccgctcgccgcaccccgatgtgggccgccgacccctctgcagctccggccgcggccgtggtcgctgacccagatggccctgatgccgtgcggctcacctggaacacctggccacggtcaaaggtcgaggccagccgctgcgtcgtgccgctcgccgccaccatctcgcccggtcgcgtcccggacccctccgcggcgtccccgccgccgctcccttaccctccgctccgttgcaaggctccctgctccgcgctcctcaaccccttcgcgcgcgtcgacttcgccgccaagatctggatctgcccgttctgcttctcccgcaaccacttccccctgcactactctgccatctctgagtccaacgttcctgccgagctcttcccgcagtgctccaccgtcgagtacatcgtcggcggagccggcgtccctggggtgggcagctcgccccctccgcccgtatttctcttcgtcatcgacacctgcgtcatcgaggaggagctggggtacgtcaaaatggccatgcgaaaggccaccgcgcttctgccggagcacgcactcgtgggcctcgtcaccttcggcacgcaggtgcacctgcacgagctcggattctccgatctcagcaagatctacgttttccgggggaccaaggagatctccaaggaccaaatattggatcagcttgagctgtcgggcgctgggcgcccgggcttccccatgatgccacagcaaccgagcgggccgcaggtgaatgggatgcatccgtcggtcacggccggggtcaacaggttcttgctcccggtgtcagagtgcgagtgtacactcagcacgttgctggacgagttacagcctgaccaatggccagtggaggctgggaaccgtgccatccggtgcaccggtgttgctctcagcgtggctgccgggttgcttggtgcttgcatgcctgggactggtgcaatgatcattgcattgctaggtgggccatgtaccgagggccctggaatgattgtttcaaaagatttgtcagaaccagttagatcacataaggatcttgacaaggatgcagctcctcacttccagaaagctgttaaattttatgatggtcttgctaagcagttggtcagccaaggccatgtgttagatgtttttgcatctgctctcgatcag

SEQ ID NO: 36985 - DNA, 240 bp, Zea mays
  Peptide Sequence Number=SeqID_80360
atgagtcaaggaatcataagaatcaagcccaaaggaaaagccggccttcagaaatgcagcagcggtaccccgagaagctacccaggcacagaagtcgtcgtgcccggctataacttcgtcaagctcttcgatttcagcttcaatatgatcgaaggcctggggcttgttaatgctttcttcaattctgagctggtctggacttcggctttaagcttcgaattcagttctagcttctcctga

SEQ ID NO: 36986 - DNA, 118 bp, Zea mays
  Peptide Sequence Number=SeqID_80361
atgggtacgggttttttaatgggcatagatatttttcacgggtacgggtttgggacggaccccactgtgggtggcctggaccccatacagggggtctggatcccattccaggggtctg

SEQ ID NO: 36987 - DNA, 783 bp, Zea mays
  Peptide Sequence Number=SeqID_80362
agattcgtcgaccgatctgatgaggatttcgagcgcgagatttacaaggtcgaggaccctggggtgaaggaatccgcgggagccctctttgaccggatgtggggcccccacggtcgggaggtggtcagggagcggtccgaccgggcgagggatcaggcggcgcgtgacgagaaagtggaggacttcggagctttgaacagcgtgcggcctgaagcggagtcgaacccggtggcggccggggccgaggtcggcccggcgccgcccccggaaaccgtcgaaggctccctcgctgcccctgcggctactgtgtccggtggtggctcgtcgccaaccgctgtgccgagggctgaggatcccccaaagacggcgatggagccggcagcggaggatcccacggcggctgagtcttcgcaggttcaagattttgggcctgcgcacgcaaccgctactgctaattttttggcggcttcgaccgtggatgctggaaatgaatcggatgagtctgcttctaagttttctgattttggtgactctgggagttcggttgagtggacggaagagtcgtcggatgaggacttggattactttgcggccttggatgtggcagcggcggaggcttcgccgcgtgctacggatgctgaagttgtgcctggtccgagcgctgggcgtaggcggcgaagggcggttgcgaagcgtagagtgagtgtggtggatggcggtcggcttcgtgtgggcagggctggtgggccgaattgttgtccttgccggccgttgcgagtgtag

SEQ ID NO: 36988 - DNA, 705 bp, Zea mays
  Peptide Sequence Number=SeqID_80363
atgtcatgcaaccggcgcgccggttaccgggtgcggaaaaatcgcaccgccgcttgcgccaatgccacgtcttctcaaggccgtcgtggaagtctgaaaagacaagtttttcagaaccagtgcagcgactcgaggcacctcgcgcatggcccaacagtgacattaagtatgaaggtcacgggccagtcagccatgggaataggtgcggcagacgacatggccataggcgggctggcagtaattacatcaacaggcgcgcaggtgcagcaggccaaccaccaatcagactctggccccacctgcagactcacatcctcctctgaggcgggcccaggggccactatcgacaccctgaatcagtggtaccctcttctacagtatgaaggcgttgcgcccgtacgacacctccaggtcacacggagagcggcacccaaccccaccacatgggcaggcctaagggcaccacgtggcgaggaagggggactcgagcgatttctcgagtgcctctccataaggacctattcgttggatgaccgcccggaaaaacagtgcaaccatgagggtggtatgggacgccctaagccgaataatcagaggaactggggtgtagttcgcttcgccgtcgtgccgtcaatggggctcggtgtatgtggctcgctctgccaatggtggattgccccttggggaggagtgcggtacatttag

SEQ ID NO: 36989 - DNA, 138 bp, Zea mays
  Peptide Sequence Number=SeqID_80364
atggcctggccgtggccccctcccgcgcgagcttccccccaggttgtctttggtgcaatctatgctcaggtaaaggagaaggcgtcgaggcggatctccaggagttctaggacttcgacgagttcgaggattagctag

SEQ ID NO: 36990 - DNA, 390 bp, Zea mays
  Peptide Sequence Number=SeqID_80365
atgcccggattcgcgccctgcacacccatatccgaccgcgactttgatttcccaactgacgcaggagcggctaagcccacaaagagtgcgaatgggcaggtctgccagatttgtggtgactctataggtgtttcagccactggctatgtctttgttgcctgcaatgagtgtgccttccctgtctgccacccatgctatgagtatgagcgcgaggggaaccaatgctgccccagtgcaagactagatacaagagacaaaaatgttggtttcctggcaacttctttgagggactacagggacaaggatggtgtcaagggcctgtgcgtcgtgggcgccattgacaactgtacctcccagctccccacctatgggagatcttctcccccataa

SEQ ID NO: 36991 - DNA, 471 bp, Zea mays
  Peptide Sequence Number=SeqID_80366
atggacacggcggagctccaacggcggccgggaaccgagctcggaacggcggggtttacggcggcggcgctctggcgtgcgcgcagcgagggagaggtggaagagggggccggttggtgcgcaaatgagggagggggagatggcgagcaaggctcggggctcaagtggccgagggcgaggtggggcgagccccacgcgcaacgtgggcgcggagaccgcggcacgcacggcggcggttacgtgaagacggagaagctgacaagccgggcccgcggcgcagagagagagaagaaagcgggcacacgtacattcaccgtgacttctaaacgtcatacagacaaacttagtttaatagggagtaatcacttaatcgggttctaccaacattctcaatattctaatgcaagcacacacccaagagaacacgtagaaggtgttagcctaatcacaatgccttttatactaatctaa

SEQ ID NO: 36992 - DNA, 924 bp, Zea mays
  Peptide Sequence Number=SeqID_80367
atggcgagcacgcaagctccagcggcggccgacaacgtggaccccgtctacgagtggctcgacgatggcgccagctaccttctccgcctcgacctcccagctgagcagacgacgctcaaaactcatggctgctcattccacttaccttcttctccttgttggctgaatcaaataatggaagggttcaagaaggaggactttcgggtgcacgtggacggcgagggccggctcaccgtcatcggcaatcgcaaacccacgcccggcggcggcggcaaggcgctgcggctccacaagacgttccagctgcccaatacggccaaccttgataccatcacgggccgcttcgacggcaacgtgctcacgctcaccgtgcccaaactgctcgccggtgctgatgcccccacaacgccaccaccgcagtccaaggaggaggcgcgagtcgccggcgataagccagatcaggcggacaagctgcccgccagggttggccgtggccgtgaggagacgacggaggagcggaggaccaccgagaccgagaggactagcttggctgcgacaagcaaagaggaagacgaggagaaggccaagcccatggtggcgctgccgccgcagtcgagcgagaaggcgagcggagaccatcaacgagatgaccagcaggatggcaaggcgcaggccgaccacaggcacagggagatggtcgctcgcgaggccgcgcgcaggatcgaggcggcgcgggcgagggtggcggaggccaaggccaaggcggagcgggagaggaagtgcgagcactggaaggagcgcgccgtggaggagggcctcaggttggcggaggcggtcaataacaagaaggaggtgatcgccacggccgtcgccgccttcacacttggcgtcttcgtctccagtaggctcttctccaggacttaa

SEQ ID NO: 36993 - DNA, 477 bp, Zea mays
  Peptide Sequence Number=SeqID_80368
atggcacccaaggctggacttagctgctatcggcctcactctggcgagtggcacagcagtcggagcagggcaggcggcgctgttttcctgtcaggtcagtcagtggagcggcgaagtgactgcggtcacttcggccttgtcgaccgaggagcgcgcgtcaggataaggtgtcaggcgatccttgcattgaatgctcctgcgatacggtcggttggcgtggcgatctggtcaaggttgcttctccgcgaagcctgcccgagctgggcctcgggcgagtcgaaggcccaactagaggaagagaggaaggaatgtatggagatggaggcgaggatgagggtggagcacggggtggagtggatggctcgcttggcggattggcagaggatggcagagatgttccagtacatgcagagccttggcgccgcacagggtcttcctcaaccacctttgttgttccctccagctgaccctgcttag

SEQ ID NO: 36994 - DNA, 3960 bp, Zea mays
  Peptide Sequence Number=SeqID_80369
atgccgcgcacgaagaatgcgtcggcgtcagggggtggcgatgacgaggaccctcgtcgccccttcaggcaggtgaaagggaagactgtctttttggagcagcaggaaggccgcaagaagcggcgttcggacagagaggctcgtgcagcagcagcagctgcagcagccgctgcacaggcagcacttggagatcagccagatgttccatcagatcagattgctttccgtgctcgtcgtctcgcctcccggtcccgctcctccgctcacacctccgcttccactccgccacccactctgcctgctccagtaactcctattgctccatccacctccactgccatacccactaccagcactacgccagcttccactgctacccctgcacccgctcccgcttctgctccacctgtccctccacctcgcttccgggagcgtgatgagactgaggttcgtcctctggcttcggatcctcgtctgtttgatcttcagcgtgctactgcagcccgggtacgtcggttcaggtacgtacccgtggagtcttggctgccagctcaaagagacccagcagcaggagttcttttcagcacacggattcaggagtcgttcttcagggctcagatgtctgctcagattgcgctgcgagtgcaccgcctattggatcttccagctttcttgcttgcagccggtgctgagtctgaggcgcatctcacctatctgccaggcctcctgacccttctgactatcagcggcagatatgttgaggagtgggtccgcgtcttctatgcctctgtttggattgacccggatcatcattggatgaggttccgctttgagcgcgaggatgtcacgatcactgccagtcagatcagacagctttttggattccctgagtcgtctactcgcctccacagtctctgctacggcacttcagatcctccacgtcgccctcacggcggtgtggctccagggacagctcacgtcgcggctctgttccgcccgcctttcacagatgggtcgcgacgttctccagcagacttcactactgcagcgaagtacttatatgagctcgtcagacggacactcctgcctaggatgggatacagggaggctaccactcatattcagctttggctccttggtgccctggtatcccactctgagtttgatgttgtggactttctgatctgtgagattgaggacactgttctggatgggattcgtgctcggcggcagctaccctatgctcactacttatgccacatatttgcgcagctgatccagccacctcgttttcagagtacccttgaggcctcacgccttgtgtttggatcttaccgtcctgctccagagattccagtgccagcttatgctcctgtgtttgacactcaggccgaggatgcagcacttcgacagtttgacacccagggtgcagcagctgatgatgatgatgatgatgattttgggattcctcctccgcctccgcctcctatgcctccacgctcccatgatcatgaggctgggagctctagtgctgcccctgctacccctcaggctatgtaccctgctctagcttcgatccttcagactctcactcagcagcaggctcagctagcagccgagcaggcccgtatgtccgagaggatgctctcaatgtttcagactatgcaggacaggcaggattcacttcagcagcagcttattcaggatagggcagagaatagggcattcatggccctcatgcttcagcattctggtatctcagtacctccagttcagtctgctccgccttcttcgcttcacgctccagtggtgccttcgatcttgtctgcaccccctgctgttacctctccgctccggccggtcaccttggcgttcacttctccggttctcagctctgtctgcccgcagccgccagtgccaccagcatctgctgttaccactaccgctgtggcagtatctgtgaccgcttctgttccggtagctcctgcagcgctgcctgcgtccgagtcagtaccagctccagcttctaccgcagatcctggatccgagactgactctgaccctccgtcggcggactctcccagtcgcagaaacccgagagcacagccttcggaaatgaattttagcggcacaccggacaccgcaccggactgtccggctcggatattgacggttgaagggagcagcagcaccctcggcgtcaactacaccttcggcgaggtccgacctagcctcggacggcgacgcagtccaaggatctccactctgaaggacgacgtcatcaccatgccccggccgtcgccgccagggtcttctccgagaatccggcccgagcaggcggctcggctggtcaccccgaggcctcggccagctgtcccccgaagacatcagcctggcccgaggcctcggcagatcaactccggcgtcggtcccgctaacggacgacccgggtcaggctccggccgaccaggtcttcttttcgagccaactctgcctctgttcgcgctgacaccgctacccctgggcttcggctcatcgaagagcggccgaggggttcctttactaagcaagagaagcctcggacagcaaggccgaccaagccgagggactcctatgcctccgggatacggatacctcactcttcacctttacacggggcgactcacgcttggtgaagtggcctcgacagccacaatgaacaaaaacactggcattcaaagtgccatacaaacagaactccggttccacctccgcaggtacgaacaaccccactcgatggggaggcctgcggagcaacagaagaccaacgggtggctcgccgtcgcccgctccggcagcaacgacaacgacccccgcttcgggtggccgaactgcagcagcgaaggcctcggggcagacgctgctgcaaccttgccctcgcccacgccgacgctcgagggcgaggacaagtacaaagagctggaggcccgaagcgcggatggtggcggtgatcccgtcggcaacggggacttctcgagccgcctccgcctcagcaccgacgacaggggccgtcagccctctggtagatccccactcaaatcctcccggacgagtggggcaccgacctccgcgtggaggcgccgtaccggagggggcaccgggagccaagctgacgagcccgacgtgctgaggctgacgacgcccgccgtcgaccagccccgcgttgtcgaagtccgacccgcccgcagggccagtgagcaccctctccctcaaacgccgaaggagaggccgacccacgaacccgcgcgggaagtagagctccggctcagcccagcctccaccccagcgaggatgatgaacatccttgaagctgagggtgggaccaagattgcagcccggcttgcttctccccacccaggggctggtgaccagcgggcgaaaggacgggtagccatgcaggcggcatgcaaccacgccaaatgggcgcgcttctccgacttccaacacgcccagcatggaggcccaggcccacgcgtcatgcaaccgacgcgccggatgctgcgtgcgagcaactgcaccgccacccgcgccactgccacacctcctcgactgcggaaccagtaccgcgactcgaggcaaccctacgcacgacccagcagcgctagcctggcgggcaggagcagcggtcacgtcgtcagccgggcttacgtcccatccgggggcagcgagagaaccctctctcacggcgtgaagacaacgggaagcgagcgacgcttcgccttcgccataatgacctcgtcaaaaaaggctccgagcctccctactgataagaggttcgaaggctggcccctcggaagggttcaacagccgcctcagagcgcgtgggctccacgcccactactggtcagaggttcgaaggccggcccctcggaagggttcaacgaccgcctcaggctactcgggctccacgcccactactga

SEQ ID NO: 36995 - DNA, 216 bp, Zea mays
  Peptide Sequence Number=SeqID_80370
atggcgcaccggacagtccggtgcgccaccggtgcgccaacggtgcgccaccggtgcgtcaacggtcacttccaacggctagttctgacagctagccgttggactcatggcgcaccggacattgaacagttcactgtccggtgcacaccggacagtccggtgcggtgtccgccgtcgcttcgagttcttatctccgggattgctttcacattgtag

SEQ ID NO: 36996 - DNA, 435 bp, Zea mays
  Peptide Sequence Number=SeqID_80371
atggggggctcggagcccggttccttcgcggagaaggatccctttcgggcaactggcgcgccggttgctcgacgcgtgggcctgggttccaagctggcgtatcagaagtcggagaagcgcgtccatctggtgcggttgcatgccgcctgcatggctgcccgccccttctgcccgttggtctgggcgaaaatggggggtcgcctgggagggccttggagcgtgttggagaagactcggcccgcggcgcctgggggcgcacgcaggggagttgcctttaaaaggtggcgggtgaggggtaaccggttgagccgcctgctcgggccggattcccggaggagcccctggaccgcgacgccgcccgaggctgggtcgggctttgctgaagacgtcgtcgatgccgagggtgctatggctcccttcggcgtgaagacctga

SEQ ID NO: 36997 - DNA, 552 bp, Zea mays
  Peptide Sequence Number=SeqID_80372
atgtccggtgcaccagaggactccgactccgaactcgtcaccttcgggaaattccagaggcaactccgctataattcagcggactgtccagtgctcccaggaagagcggcctccggaactcgccagcctcgggaattcatttcggctgctccgctaaaattcaccggactgtccggtgtacaccggactgtccggtgtaacagcggggcaacggctatttcggcgccaacggctacctgcgacgcattaaatgcgcgccagcgcgcgcagaggtcaggcacgcgcatgctggtgcaccggacactcaacagtacatgtccgctgagcttttcagctgagccgaacttcagctgtgttgaactttctcaactccagctgaacttcaacttcaactggggtccaggcaggttcaaccggtgtcaggaccagtttttgcagtctgacttgcagtctgccagtctgactggcagactgtctgtgagcctgccccatgcggttgaaccggtcttaggggcggttcaaccggtcttggtcaacttgaccaatctgtag

SEQ ID NO: 36998 - DNA, 318 bp, Zea mays
  Peptide Sequence Number=SeqID_80373
atgagcaagaacacaagagacacaagatttatcccgaggttcggtcacaccaccaaggtgccctacttcctcgttgaggcgcccacaaagagccgggtctctttcaaccctaatcctccctttgccgaccacaaaggtcaagctcacacactaatctttgctcaaacgagcggacagtctgccagtcagactggcagactgcaagtcagactgcaaaaactggtcctgacaccggttgaacctgcctggaccccagttgaagttgaagttcagctggagttgagaaagttcaacacagctgaagttcggctcagctga

SEQ ID NO: 36999 - DNA, 345 bp, Zea mays
  Peptide Sequence Number=SeqID_80374
atggtgagagaacgaagaacacaaacaaacacaatgagcaagaacacaagagacacaagatttatcccgaggttcggtcacaccaccaaggtgccctacttcctcgttgaggcgcccacaaagagccgggtctctttcaaccctaatcctccctttgccgaccacaaagaccggttcaaccgcatggggcaggctgacagacagtctgccagtcagactggcagactgcaagtcagactgcaaaaacaggtcctgacaccggttgaacctgcctggaccccagttgaagttgaagttcagctggagttgagaaagttcaacacagctgaagttcggctcagctga

SEQ ID NO: 37000 - DNA, 591 bp, Zea mays
  Peptide Sequence Number=SeqID_80375
atggctcgtagaagatccgaaaagaacaagaagacaaccccgaaggagaacaaggagaaccatagatccaggcaattttggcatgctattcttgttcccttgggtcttggggatctcattcctgctgttgatgaaatctcatttgctgattggtggaggaaggcgcttaagaaggaaaaagaagaaaatgaacaatggagaccaaacgatgaatccacctctccaaaaggtttgtcttccaatttcgattcccacatatgttgtgtggctaatgaaaatgatggtggaagcacaaatgaggatgaggaggatgaaagaagcttcatgcaactctacgctcatctaagcctagaagataaggcggtcatgctcaaacttctaaaaagagcgagagagcaaagcgaagctcgtcaaatgctagaagatattctttccataaaaatgctaagatttgacaagttgactaaagaacataaggagctacagtgctctcatgttgatttggtccgaagtacagggctcagattaagaactcagcttaagacatgggaagaaaagtcatctcttgagcaaattggaaacagtaactga

SEQ ID NO: 37001 - DNA, 1185 bp, Zea mays
  Peptide Sequence Number=SeqID_80376
atgggtctcctccacccgcgacgctcgactgtgccacaccgccactatctctggctgtgctgccctcagattcatcgtcggacctcttcgccaccggcctgctctgacccaagccgcacgagtagctcctcttcccacgataatctgcgccccgctcgcggctccctcatcgccgacccctgcgctggtgtctcggctcgtgctggcgtggctcctctggcaagtgcagacacgtgcgctgccgtcgggcccctggtggggctcctcgacgaccggacaagggaaaaagcaagaagccgctgtagagtcgctcgtggtccaactctcttcgtcagctatgaccacgaccacctcaacttcggctacctcgacatccaggggctatcatctacacggagtgcacaccggtctctgatcctaccacaacattcgcaccctcatgacgttgcgaccgcaggaggatttcagcttgtcagctcctaccttcgacttctggtccagtcttatcgtttgcggtgctcccgttgcgactgcagggatgttagagtcttctgggcggcttctggccgccagaagctgaagctgataccaaacgccgaacttctgccgcggcttctggccgaagcgattgggtacgaagccgcccgctcacttacctcgcgaagcgccgctcagttggcttccgtccgaagccgcgcgctgttagggttccctcgcacggtcctccgccgcctccgcgaaccgaacgcagcgccgccgccggtccgcaccacacgcatcgccgccggcgtacgcagtgacgccgacgcccttgctccgtcctcaaggttccgcgtcgtcccaaacatcgcgtctgcatcttcattttcgtatcacttcgagttgaaggtgttgggttcgaagatcatctgggattcgaggacttcggttgcaacctccactgaagcaaaggagatagcttgcatgctggagcaagactctctggtgttgcaagagcatttggacatcgtgaacaactttaacatcccggttgacagcagctatgaaccttctaccttgtcgtcaccacccccatctgacgacgtcctgactccacattgggactttgcggagcatttccaaaacttctggggagttgaatatgactccgatcacatgccttcgtttagtgacaatgatgtttaa

SEQ ID NO: 37002 - DNA, 168 bp, Zea mays
  Peptide Sequence Number=SeqID_80377
atggacaagtgtggagggggcactggcggtggcggggtggtccacggggccttcaggcggcgcctccgtgctcagcatcgcaagtgcggctttcaaagacactcaagggatgacacgcttacctacccctactacaaggctgcacataaacaaagagagataaactaa

SEQ ID NO: 37003 - DNA, 963 bp, Zea mays
  Peptide Sequence Number=SeqID_80378
atggccgcctcgccctcttcacccttgacagcgccgccagagccggtgaccccgccgtccccatggaccatcacagacggagccatctctggcacgctcccagcagccgaggccttcgcagtgcactacccgggctacccctcctctcccgcccgcgccgcccgcaccctcggcggtctccccggcctcgccaaggcactactcccggaaattctaatccatctccagtttcagccttgcagtgcgcccgaccaaagtgtactgatgtttgtccgtgcggctcctcctctccccctcaggtccggagttccgatcccggcgcccgcctcgagctccgcttccgccccgaggacccctactgccatccagcctttggccagtcccgcgcctccactggccttctgctgcgcctctccaagcgcaaaggagctgcggcaccttgtgcccatgtggtcgctcgtgtccggactgcttactacttcgaagactacacttacctgggatggtcacaatactctatgggctgctgacgtccccatgcctgctcctagcagcaggcatggtgtcgatgatgaactggtcgctgaagattcacggttcttgtatatcacagtcttcagagttcagaccacacatgaggtatatgcaggtatggcagattttcaacatgttgttccagtgcatgctgcacaaacaagaaaaagaaaacactcagattctcaaaatgataatgagaattttggtagtggtaccttgctttctgaaattctttactttaaggattaccggcttcttgtgatgatgccgtttctagtcaatatcctcgttttctgtatgacagataagacaggacatgatgaagcagatggagatgtcatgatgttggtaccccctctcttttcagtgaaggataggccaacaaagatagcttcacctcactgccttgaaaatggtacaaattag

SEQ ID NO: 37004 - DNA, 1440 bp, Zea mays
  Peptide Sequence Number=SeqID_80379
atgatcgtaggaggggtgggtgccgaaaagagcgaagtaaggagtggggtgggcaaccgccttggtgggcagacggttgaggagccctgcctttctgaggagatgtgtaggggcacgaatatggaggtggacgccgcgagagaggaaaaagtcacgggacgcattgttacagaattcatggcccccacatgggctgggtcgaaggccccgggagagaaaggagcccctgctgaggttggggaggtgccgagggtgccgccggaggtggagcggcaaagaagacctgctgagaggtggtggggcgaggggccgaggcacccgcggacggcccgggctacatgtggatggtgccagtccacaggttgtagaaggatggccactgagaaccgcccggagagctaccccggtcgcccgacgtgccaccacgtccactcttgcgaccgcgacccccccggagccagtagtccgccgaagagctctagagggcgggggccgagatgtggtgaagaggacccccctccccgagtcagagggggcagcccaaggtgcgctgtagagcgccgtggcgggagcggcggtcgcagtagcggagaggcgaagctcctcgagaagaagattgttcttggtctccgcaaaagtgggaaaaggcttcatgcgggtaaggatgggcgtcacacgatcgaagcgagggctcaagccgtggaggaggttgagcacgaggctctcatcggtgatgcgggccccgagggtgcggagagtgtccgccatcgtcttcatttgacggcagtactcgtccacagagagatcgccctgagcaagctagcgaaaagcggtctcaaggtacaggatccgagtctggcggttgccaaggaactgtgcctcaagggcaccccagatccggtgagcggtatcgtccggcactcgaacgatgtcccgaagttcggccgtgagggtgccatggatccaggaaagcaccacttcatccatcaggagccagtcctccgacgggtcagtgaccgtagagaggatgtggtcggcgagggcgtagcggcggaggatctgcaggacctggtcgcgccaccgagggtactgagtggagtcgggcacgagaatgtcggtgacggttgcccggatgctggtgagggccgccgcctaagcgtgaagagaggcacgaaggacagagagggtgacaaagtggctggtgaaggcacgaaggacggagagggcctgaagttgacgcccgggatggagggagcagcgccgagggcgacatccatgcctaggctgaccagggccacgttgacgacgtcaaggccggtagcagtgaggccctgggagagtcgtgggggagggcatagacaggccagtggggcagtcggcagcgtggggtgcataggccccgcgtcgagtggaggcggtggcgggcaggtgccgacttag

SEQ ID NO: 37005 - DNA, 306 bp, Zea mays
  Peptide Sequence Number=SeqID_80380
atggcgccttcaagccccccatggtggatgcgcgacgcaacgcggaggtcttgtaacgagtcggcgtgttcgttcaaggatgagagggagaacagcggattcatccccgccaggcttcaggtcagggtacatgttttgtccagatctgacccctacaactggttgccttgttttacttgtgcgctgctgattcatgcttatgtcggccctgtaattgtgcctgagctccagaacatagatcagatgcctcatctagctcaacctcaaggagcagccagaggagtgaaactgatgatgacaggatga

SEQ ID NO: 37006 - DNA, 171 bp, Zea mays
  Peptide Sequence Number=SeqID_80381
atggccgattctgactcctgcgcgcgctgcgcgcgcattaaatgccgttacaggccactggagctcctacacatggacctattcggcccgatcgcttacataagcatcggcgggagacaagtctcatacccaagagaccttgaagggattcttgagacggactcaaaatga

SEQ ID NO: 37007 - DNA, 946 bp, Zea mays
  Peptide Sequence Number=SeqID_80382
ggaaactgggagcagcgttgacaggtcgaacaggttggcggcgttctcaaagacggcaaggaggtgcctgccccccgaccctggaaggtcgttgcgtcctcctcgtcgagccaatcgtgtgacctccgcccggcgccacggatggatagagcgggcttgccgccgagggcgtattgacccctcctcctcgagccggccggcatcgcgtggcgctcagaggggtcaggttgtagtggatcttgtgacggatcggcagagcgaggtggtgggtcacgcgtctgctggtgagtcggaggacgggggagctgggggaggcaaggatcgcgagcgggactggggcgagcggcgccggagcgtggcggccgcgaacgtggaaggtgagcacgagatcggtggaaggggatctaggttgagcatccgtcgatggaacgggggagcgatttccacctacgcgatggctcttcatcccaggctcgcccccgctggggagtttggggctggaggggagcgaggcgggccggaggggagggaggcgagcatggcgagcgtccgacgcgtggaggagcagggtcggcgagcatcgcggacgcgggataggaaggggatagcgaccaccgcggcgacgaaagcgcgaccacccgggatcgaagcggaggcagaaccgtgcacgggccacccagccactgtcgctcctacgcaagcaaacgcgcaggtcgcgccgccgccatcgcgcctcgagcagacatgcaagccgccctgccgccacatgagaaggcgcgcgggcgacggctaccgccgcggccaggccatgccgcgcgcggctactgcggacgagtgcgtgggcgagggccgccgcgacctctcgagcgagcaagcgcggtaccgagacaccgccatcgcagccacagaagagcgcatcggcacccatcactgcaagcaggagtaa

SEQ ID NO: 37008 - DNA, 618 bp, Zea mays
  Peptide Sequence Number=SeqID_80383
atgacttcggaacttcgctcattggagggtgcaagggtttcaaagatacatgtagtactacaggaactgacttctgatagtactgaccttatgatttgcctctatctatctatattagagaagtgggctgttgcattggttgaagtgaagccaagcttactttcaggtgaagcggagaaattcctttttgaggacatatatcaggtgggctacaatgtcgtaacttcccggcgacgcaatgttggcaaggtgcgtggtttcacatttgacatcagctcaggtgctatggagtctctcgagcttgactcttttgggctttcgattgtcccttctagcttggtaagcacgtactgtttatttgtcgaagacgtgctggatatagtctccgatacagtcgtggtgcatgaagacgccgtctcacgggttcaacggttaacacagggcattttgggcactcaaaacatccacggacctggtggtgagattgacgagtacggtagatttggggggagggggaggaggaggagagcaaatggccagggaaagtctggtggccgagaactccgcagcgaaccgaagcatccggatgatgaatgggagctgccgatggactactga

SEQ ID NO: 37009 - DNA, 1851 bp, Zea mays
  Peptide Sequence Number=SeqID_80384
atggcgaacgcggaaggttttcggctcgtgagatgcccaaactgtctcaacgttctcccagaaccgcacaacgttacagtctacaggtgcggcggatgcggcaccacccttcgagctaaaatctgtgccagcggtggccgacatgcgtctgcaaaacaagctcgccaggactccgacagttattcggtcgctacagccgtgagcaatggcaatggggcgcctccccaaatcaaagaccaaggctcagagagctccttcggtgctgatgctccaagcaccgagcatggcagcaacggggcagggagcggcgaaaatggtggtggcatactggctgtgcagaacgctgtggtggtggctcacgacgctgagaacaaggaaaaccacaccgtggaacagcctacggagaattcagagacttgccgagcagtaagtggacatgatgatgatacagaacgccgcttgaacgcctctgagatcaaaacggttccttctgagatgagcaaggcagccgtcagtgcgcaagatcccgagcagaaggaagaaggcggaggcgaacatgcagcaaacaagaaggggtatcttgtgagggtactgtctcggtcctgtgatcttcgatcgtcacgagactcgactgatttccaatctgcacggacttctctccagtcgaaaagcttcagtgccagcgagcccctccagtcgaagatcatgaacacagtggacgagctgaagggcgacctttctgagctgttcagtaataaacctgcagacgactgcaagccgaaggcgcaccaacctccacgaccttccaattccaagcaagatggccgcacgactcgtgcagccatcgcgtccagtgcacctctcgcggcataccatcctgccgccaagcattctggctacgtgtctcgcccgagcaagtctggccaggttgctgctgcttctcgtggactgccgtcgctgcggtatcgccggcactgggtttatccgttccacttccaccacaacgtgcagacggaaacgagaccttgccgtcatgggtgctgccaccatagttgccagcagccaccctgttacagatacagaccctgcaagcaagaacctgcagcgacgcgcaggccaccggtcatggtgagcaataagcgccctcctcctcccagaaactactgcctgccagtcctacgtggcgccccgttcgtgatctgctccagctgcgtcagcctggtccagctgcccgcggagttcgccgtcccgagcaggggaacgcgccggctgcggtgcggctcctgctccgaagtcctctcctactcctacagggaccccggcgccaggaagaggctgcagtcaccgttcgggggcgacgagtacagcactgacgagtacgagcaggcttccggcggccacaacgccgccgccgccggcggcttcttcggggaggcggacccggtgtcctactccgaggagtacgggctctcgttcggcatcggccactcgaccagcaccgaggacgggcagcagccgctgtacgtgtcgaggaactcgtccttcaacaccgtcgacgaaaggacgggtactagagacggcaagcttcaccggctgatggggtactcgtcggcgagcgaggtgctgcagcactcgcccgacctgttcgaaagcttcggcaggcgcgcggccgacgcaggaagagcgcacgtcggcgggaagggcaaaggcgtttgcgtggcagagaacgacgcgtgcgagcgagacggtggtgcggtggagagatcgaaggtgaggagtggtggttggccggtccatgggatcctgaagaaggggatccacggcctggaatcactcaagctcaggtcgtag

SEQ ID NO: 37010 - DNA, 111 bp, Zea mays
  Peptide Sequence Number=SeqID_80385
atggggtccaggcacagtgcttactctgccgaggctgagtgccgaggtaaagaagaaggcgtcgaggcggatctccaggagttccgggacttcgacgagttcgaggattag

SEQ ID NO: 37011 - DNA, 204 bp, Zea mays
  Peptide Sequence Number=SeqID_80386
atggccattggaagtgtgctgtcgcatggcgcaccgaacagtctggtgcgccaccggacactgtccggtgaagagttcggcctcgagtcccctggtgcaccggacactatccggagatattgttctgcacgactcagaaggctgtacaggtctctcaagtttttgcatggcggagtcttatataaaccttgtttgatgttttga

SEQ ID NO: 37012 - DNA, 1740 bp, Zea mays
  Peptide Sequence Number=SeqID_80387
atgggggaaggcctgcggagcaacagaagactgacgagcggctcgccgccgcccgctctgactacgacgacaacgacccccgctccggatggccgagctgcagcagcgcaggcctcagggtgggtgctgctgcaatcttgcccttgcccacaccgacgctcgaggggcgaggacaagtacgaagaaccggaggcccgaagcgcggatggtggcggtgatcccgtcggtgacggggacttctcgagccgcctccgcctcggcaccgatggcaggggccatcagccccccggcagatccccactcaaatcctcccgggcgagtggggcacggacctccgcccgccctccggcaggaggggccgccgggagccaagccgacgagctcgacatgctggaggtgacgacgcccgccgtcgaccagccctgcgttgtcgaagtccgggccgcccgcagggccagtgagcgccctctccctcgaacgccgcgggagagggtgacccacgaacccgcgcgggagatagagcgccggctcagcccggcccccaccccagcgaggatgatgaacatccttgaagctgagggtgggaccaagatcgcagcccggcttgcttctccccacccaggaactggtggtcaccgtctgggaccaacgggtggaaggggcgggcagccatgcaggcggcatgcaaccactccaagtggacgcgcttctccgactcccaacacgccagcatggaggcccaggcccacgcgtcacacaaccggcgcgccggatgctgcatgcaagcaaccgcaccgccacttgcgccaccaccacacctcctcaattgcggaaccaatgccgcgactcgaggcgacccagcgcacgactcagcagcgccagcctgacgcggcggtcaacgcggccaagagtgggccggcagtaatgacggtggcaggcgggcgggagcagcggtcacgtcatcagccaagctcatgtcccatccgggggcagcaagagaaccccctctcacggcgtgaagacagcgcgcccgtgatccattcctcgaacggctcgcgcacgcgcaacgaccgccccgccaaccactcgccccgtcgcattaactccgcggcaggacaggcggcgcttctggcgggagaggcgggcgacgcttcgccttcgccgctccgagcctccttactgatcaggggttcgaaggctagccccctgaagggttccaacagccgtctcagatcgcgtgggccctacacccactactggtcaaaggttcgaaggccgcccccccgaagggttccacggccgcctcaggctactcgggctccgcgcccattactgatcaggggttcgaaggctggcccccgaagggttcacagtcgcctcagacgccgagcgagggatgaccaggggtacgttcgatacataaccaaggctcgggctgcgctcccgagctcaccggagacaccatgttcggtgcccatcgagggtaacatggcgctctcccccctcctccttgcggaaaggcgacgtaggggcgtatgtaaaaaagccgagtctgtccctgatcgccctctcgccctgtgcggaggctcaggggctgctctcgcaaacccggctccggccgaaccgttgacagcgtcaacgtaccagcccgagaacttgggccccgaccgtacacccgggctacagccagttcgcatgagggaacgaccagaccagccgaagcattacgcgagacattaa

SEQ ID NO: 37013 - DNA, 330 bp, Zea mays
  Peptide Sequence Number=SeqID_80388
atgccggccggccagacgcacgcgcacgagaccgccaccggcggtgccgcgaacctctccaaccgtcgactaccgacccacttgccaccgccactccctgaggagggtggtgccgatgtacccgcgacctgttccttccacctcctcgccttctctgagaacgccgccaacctgctcgacctggcaccgctgctccctgtttccctcgctcaacttcgcgccgtatctaccacaatggaggtggagaagaagtcgtccgcaggcgccaccaagttgaccatcatgcaagtcataccttgttacattgtagatagagtacgggcaacttag

SEQ ID NO: 37014 - DNA, 111 bp, Zea mays
  Peptide Sequence Number=SeqID_80389
atggggtccaggcacagtgcttactctgccgaggctgagtgtcgaggtaaagaagaaggcgtcgaggcggatctccaggagttccgagacttcgacgagttcgaggattag

SEQ ID NO: 37015 - DNA, 237 bp, Zea mays
  Peptide Sequence Number=SeqID_80390
atggcatggggcgccgagagggtacagggagggggaatccatgtaggtgcgccggccaccagggacaacgaagctgctggagcatggtcttcattggggttagcggctaactcccttaacaggagcgttgatatgcacttggtgaagatgttgccgactctgatcttgactgatttgaaggagttggaggttgccaaatggacaggtgcaagaggaaagaatagcgagaaaaggtag

SEQ ID NO: 37016 - DNA, 594 bp, Zea mays
  Peptide Sequence Number=SeqID_80391
atgggtcggcgcgagacggagcgcgaaggggggaaaccagtgggagacaggtgtaaaggggaaacccgcggccttcgtgttgtcccgcgcccagccctgggtcgggcgaggcggaggctcctccgaggtcgagtatgtcttccgtggtcgaggtcgagtccgagccccgggtcgggcgaggcggagaccgtcgtcttccgaggccgaggccgagccctggggtcgggcgaggcggagttcgtcgtcttccggggccgggcccgagtccgagccctggggtcgggcgaggcggagttcgtcgtcttccgggtccgagcccgagtccgagccctggggtcgggcgaggcggagttcgtcgtcttccgggggtcgggcgaggcggagttcgtcgtcttccggggccgagcccgagtccgagccccggggtcgggcgaggcggagcttcctatggcgcccgaggccgggcttggccgctgtcagcctcactctgtcgagtggcgcagcagtcggagcgacgcgggtggcgttgtcttcttgtcaggctggtcagtggagcggcgaagtgactgcggtcactttggctcagtcgactga

SEQ ID NO: 37017 - DNA, 1239 bp, Zea mays
  Peptide Sequence Number=SeqID_80392
atgaacaagacaccggcacttaaggtgccattacaaacggaactccggttccacctccgcaggtacaaacaaacccccatgattggagggcctgcggagcaacagaaggccgacggatggcttgtcgctgcctgctccagcagcagcgacaacgacttctgctccgagcggccgaacagcagcagcaatgacctcagggcggatgctgctgccataaggccctcgcccacatccccactcgaggggcgaggacgagcaaaaggccgtagagttggaggtcagtccgcgggcggcaccggctatctcgtcggcggagaaacctcttccagctgccgcggcggaagggggcaccagaagcagcgccgaagccgctcggactggagagccggacacgcggcagctgccagcgccacaaacggcgaacgccctcccccccgatcactgagggaaggagcgggccgctgcccgcgtggagaccgaccccaactcggcgcactcccctccccagcactgatgatgaacatccttgaagctgagggaggggcagaggccgcagcccggcttgcttctccccacccaggaactggtggtcaccgtcttgggacgggtggcacctttggcgggcgaagcaggcgacgcttcacctccgccataatgaccgcgtcaaaaaaggctggcccctcggaagggttcaacagccgcctcagagcactcgggctccgcgcccactactggtcagaggttcgaaggtcagcccctcgaaagggttcaacggccgcctcaggccactcgggctccgcgcccattactgatcagggagtgaggctgacagcggccaagcccggcctcggacgccataggaagttccgcctcgaccgaccccggggctcggactcgggctcgaccccggaagacgacgaactccgcctcgcccgaccccagggctcggactcgggctcgaccccggaagacgacgaactccgcctcgcccgaccccagggctcggactcgggctcggccccggaagacgacgaactccgtctcgctcgaccccagggctcggactcgggctcggccccggaagacgacgaactccgcctcgcccgaccccagggctcagactcgggctcggccccggaagacgacggtctctgcctcgcccgacccggggctcggactcgacctcgaccacggaagacagactcgacctcgacctcggatgtcacacccgggctttaa

SEQ ID NO: 37018 - DNA, 1110 bp, Zea mays
  Peptide Sequence Number=SeqID_80393
atgaccacgtcaaaaaaggtgcgccacgttgttcgatttcgtatcattttcctcttcctctttctctctcttgctacagggaccgggaaaggggatactccgaaagggatccttctccgcgaaggaagcgggccccgagccctcctactgatcagaggttcgaaggctggcccctcggaaggttttgacagccgcctcagagcactcgggctccgcgccctcctactgatcagaggttcgaaggctggcccctcggaagggttcgacagccgcctcagagcactcgggctccgcgcccaccactggtcagaggttcgaaggctggcccctcggatgggttcgacagccgcctcaggccactcgggctccgcgcccactactgatcaggggttcgtaggctggcccccgaagggttcgacagccgcctcagagcacgcaaagcgagggatgactctgggtacgtccgatacatggccgatgctcgggctacgctcccgaggctcgggggctgctctcgcaaacccggctccggccaaaccgttgacagcgtcaacataccagcctgagaacttggaacctgactatgcacctaggctacggccagtcaaggctccgtccactcaagggacacgatcccgcctcgcccgagcccagcctcgggcaaaggcagccgacccaggaggattcacgtctcgcccgagggtcccctcaagcaacggacgcaccttcggctcgcccgaggcccagtcttcgcggagaagcaaccttggccagatcgccatgccaaccgaccggctcgggctcaacctcgacgccggacgacggactccgcctcacccgaccctagggctcggactcagcctcgacctcggacaacggacaccgtctcgcacgaccccagggctcggactcagcctcgacctcggaagacggactccgcctcgcccgaccccagggctcggactcagcctcaaccttggaagatggtctccgcctcgcccgacccccggacccagactcgacctcgacctcggaggagtctccgcctcgcccgacctcgggctcggaccgaccacgtcgcagggggagccatcattaccctacccctag

SEQ ID NO: 37019 - DNA, 924 bp, Zea mays
  Peptide Sequence Number=SeqID_80394
atggccaaaagcacatgcaagctatgctcccgccgcttcgccagcccccgcgccctcgccggccacatgcgcgcccactccatggcctccgcaaagtcgcagatctcatcggcctcgtcggcttcgacatccatcacggctagcggcatcgacgccgacaagaagcgcggccccgtccgggggcacgcgctgcgggagaatcccaagcgccgcggccgcctcgacgactcggatcgcgagagcgagacgacggactactactctccgtcgccggacgccaagcgctcgcacgccggatcgggggacgcggagccggtgagctcggtctccgacgcggccacgccggaggaggacgtcgcgctgtccctgatgatgctgtcccgcgactcctggcccgcgccgccgccgtactcgtaccgcctcgactcggacgacgacgacgagagcgacgcccgcccggcggtggtcgccgcgacagcgcagaagcggacgcggtacgagtgccccgcctgcaagaaggtcttccgatcctaccaggccctggggggtcaccgggccagcaacgtgcgcggtggcaggggcggctgctgcgcgccccctctcagcactccgccccccgccccgctgcagccattgccagaatgcgagggcagcgaggaggactccaaggcgcagccgcacgagtgcccctactgcttccgcgtgttcccgtccgggcaagctcttggcggccacaagcggtctcacctctgctcggcagcggcagcggcggcggccgccgcccccgtcacatcaggcgctgatccgtcgatcacaatgaggagcctgggtttcattgatctgaacctccccgcgcccttcgacgacgtggaggtctccgccatgtctgaccccttcctctcgtccaagccagcaggttcttga

SEQ ID NO: 37020 - DNA, 409 bp, Zea mays
  Peptide Sequence Number=SeqID_80395
tgctcagtccacggcgcgctacacttttacggtggcgccaccgcaacgagcaggtgaccggtccgagggagactatccacggcgagaggcggatttacggcggagctctcaccacggcgagcaattgcccgcacccggcttcaacagtggtatgctacgctaatgatgatacgccgagcaggtgcgagcgaggggaaacgcttaccgatgaccactcgaacaacgccttcgcgatttcacccaccgccgagcgcagtcgcagaagaatcccgacggcagcggtgaccgttccgagctccactctgggcacccggctcctgcggcgactacccgaccgcccagagcaacgaacggagaagctcccgatgagttcggtgaggaaggaaaggctgacccaggtggcccacgt

SEQ ID NO: 37021 - DNA, 1210 bp, Zea mays
  Peptide Sequence Number=SeqID_80396
atggcggcgctctccgcgcccctccgcgccatcgccgccggatcccgcgtcgccgcgtccgaccccgtcaaagtctcggtccggcggcgaagggaaggcaagatgtacaccgcgaggaagaagatccagaaggagaagggccttgagccctccgagttcgaggactccgttgcccagaacgggaaccaggagctcaagagcgacctcaaggacctgtacatcaacaatgctatccagatggatgttaccgggagcaggaaggctgttgtcatccacgtcccataccgcctgcgcaaggcctttaggaagatccatgtcagactcgtcagggagctggagaagaaattcagcggcaagatcgcagcgatgagatgccctcttccccgaccaccagatcacagcgatggagctggatccggtcgccgctggggcatcctcctcgccagccaggttggcatcacatctgatttattcttcgtatttttccctgctggcttcctgctctgcgagaagaagcaagtgacacagatcgcagcgatggagccggatctggtcgccgctggggcatcctcctcgccgccgccttcaccggtgtcggccacgtccccgccgtggcaaatgcgaggcggcccagatccgccgccccgcgcgtccaggccgtccggatccgccaccgtcgcggcttcttccagcaaccgcccgtccaggccaccccaacctgtccggatctgccgccaggcggccctgctccaccgccactgtccggatctgctgctgatccgccgccaggacccgccaccgatcgagaccagccctgccgccctctgtccggatcggatctcgccgcctggccagttcctgctcggatccgcggtccaagaagtcctcgccaggcctcccggaccctctgctgctgtccagagcatagcacgcttgttggactgctctgctgctgtccaggctgtgttcttcaacttcatccccgacggatttggttgtaccttcatctcctttgggtcagcggatcagactgcactgtgtggtcatggattgctttttcacttaactaaggatccacctgctttacgtgaggatcgtagtcatgctgctgatatcaaaacttggcagattaatgatggcaaagtgatggctgacatggttaacagcactaaaccatccatgattatgagcttgtccaagttcaccactg

SEQ ID NO: 37022 - DNA, 237 bp, Zea mays
  Peptide Sequence Number=SeqID_80397
atggcgcggaggggcgcggagagcgccgccataggtgggggtggggaatgggagcgggcgggcgggcctgcgcgtacggtgcggcagagacgagtgcgggagggacgcgggatgcggcaggggcgttggatgcgagttggacgctctggatgtggcagaaccgtgcaccatggtgttgacattgtgtatattcctgtgcctcttttgtattgtcatgaagatactgacattgtgtag

SEQ ID NO: 37023 - DNA, 1767 bp, Zea mays
  Peptide Sequence Number=SeqID_80398
atgccaccgtctccgccgccatcaccgccagagtacaagcacttctgtcgagtatgcaacaaggggttcacgtgtggcagtgcgctcggtgggcatatgagagcccacggccctgctagcgacgtcgacgggttcggcgtcgtcgacgacgacgatggctcgctcgatgaagagggggtcacgcgatgccccggagcagatgagtgggacgacgcggttgggacgtcggcgacgcatgcgtatgcgctccgggcgaatccgaataggttgatcaggagctgtcagctgtgcaaaaactgcgggaaggagtttacgtcattggaacttttccttcagcatgcgagatgcagcagatcagaggatgagggaggaggaggagaagaagagcaggtgggtagtccggtaccttcgtcatcatctccccctacgaacgctgatggtggtggtgacgaggatccgatactagcaaccccatggtcgaagggaaagagatcacgtcgcgttgggacgaccgaggaggatccttccaccagcaccgtgggagaggaggaagacctcgcgaaatgtctcgttatgctatcgtcttccaaatccaacattaatgaccaggaggcgaacgttatcgcgacgattacaaaagacgatcatcatcatcagaagcaaccgattccttttttcacacaatcacaagagtcagtcgtagccgcactgccttcttcgccactcgttgtgcctcaatacatctcacccgcaccacgtggaggagttttcgagtgcaaggcgtgcaaaaaggtattcacttcacaccaggctcttggaggccaccgggctagccacaagaaagtcaaagggtgtttcgctgccaagttcgagacgagcaatgccactgaatcaacacgccatcatcaagtggtggccgttaatatcgccaaagatggaagaaataatgacaatggcaaagctcctgctgtcgacgaaatcatcaatgcaggtgcgagtgcgagtgcgagtgcacatgtcccaggaggttttgctaccactatcgtcgacaccaacatagggacaagttccgacacgccacgatcactgtattcttccatggcgcttgcgcccatcgtcgaacacaatccattagttgagaccacgctcgccgttgcagcggcacagttcaagaaaagcaccaaaatgcatgagtgttcggtatgccaccggctgttcacctctggccaagcactcggtggtcataagagatgccactggcttacctcaaacacatcagacccttgtaacacggtgaccgccagcatgatcccgtcgctaacggaagatttcgttggcggcgtagtcaaacagcagttcaacctccagccccaaccaatggtcgtggacgtgcctccgccagtgctcgacctcacaatcgcgccaaacgcaaccgtagcgcacttgcagccactagctgtcgcagcaccaagcaatgttaatcaccagaagaaggatgccacaagaaaaaaatatgccatcgatgcggtgatggaggaggaagaggcagacagcacaccagcgaagagagctaaaattagcgacctcaaagacatggtgagcatggatggtctacaagacaaaaacaccttcagcaagataatacaaagcctcgctgaagctatcatcaacatcggctctgcttctcaagacaatgaccttgtgtacaagcaatgttgcagaatgccgaagctcaatagcatcggctcggatcaagcaaagacgtaa

SEQ ID NO: 37024 - DNA, 1860 bp, Zea mays
  Peptide Sequence Number=SeqID_80399
atggccgccatgcacgccatcgtgcaccaccgcgcaccgccgcctggccgctgctgtcgcggccacgggcgcagcgtcgtcgtccgcgcgtcggccgccaccgtcaccaccagcatccccgggtccgcggcgacagtgccggactcgccgtccgcggcgttctgggactacaacctcctattccggtcgcagcgcgccgagtcccccgaccccgtggtgctccgcgtcacggagggcgcgatcccgccggacttcccggcgggcacctactacctcgccggtcccgggatgttcaccgacgaccacgggtccacggtccacccgctcgacggccacggctacctccgctcgttccgcttcgacgccagcggcgcggcgcactactccgcgcggtacgtggagacggcggcgaagcgggaggagcacgacgcgggcggcgcgtcgtggcggttcacgcaccggggccccttctcggtgctgcagggtgggagccgggtgggcaacgtgaaggtgatgaagaacgtggccaacaccagcgtgctgcgctggggcggccgcgtgctctgcctctgggaaggcggggagccgtacgagctggacccgcggacgctggagaccatcggcccgttcgacatcctcggcagcctctgcggcggtaccgacgaagtggcacgagacgccagcggcgaggctgcgcatcacgggcgccggcagccgtggctgcaggaggcagggatcgacgtggccgcgcgcctgctgcgaccggtcctcagtggtgtctacagcatgccggccaagcggctcctcgcgcactacaagatcgaccccaagaagaaccggctgctgatggtggcctgcaacgccgaggacatgctcctcccgcgctccaacttcactttctacgagttcgacgccaacttcgcgctggtgcagaagcgggagttcgtcttgccggaccacctgatgatccacgactgggccttcacggatagccaatacgtcctcctcggaaacagaatcaggctggacattcccggttcgctgctggcgctcacgggcactcacccaatgatcgcggccctcgccgtggacccgagccggcagtccacacccgtctacctgctgccgcgcaccccggaggccgaggccgaggccagcggccgcgactggagcgtgcccatcgaggcgccgtcgcagatgtggtcgatgcacgtcggcaacgccttcgaggagcgcaacgcccggggcggcatcaacatacagctccacatgtccggctgctcctaccagtggttcaacttccacaggatgtttggttacaactggctgaacaagaagctggacccgtccttcatgaatatagccaagggaagggaatggctacctcgtcttgttcaggtgtccatcgacctcgacaagagagggacgcgccgaggatgcgccgtccggagactgtccgaccagtggaccaggccggcggacttcccggcgatcaacccaggcttcgccaaccggaggagccgcttcgtctacgccggtgccgcctccggctcgcgcagattcttgccgtacttcccctttgacagcgttgtcaaggtagacgtctccgatggatcagcgcggctgtggtctgtcgctgggcgcaagttcgtcggtgagccggtcttcgtccccaccggcagtggcgaggatgacggctatgttctacttgtagagtatgcagtgtacgatcacaggtgccatctggtgctgctggacgcaaggaagatcggggaaaggaacgcagttgtggcaaaacttgaggtgcccaagcacctcaccttcccgatgggattccatgggttctgggcagatgaatga

SEQ ID NO: 37025 - DNA, 141 bp, Zea mays
  Peptide Sequence Number=SeqID_80400
atggccatgatgggttcaacatcagaaaagatgtacctcggccaggtgaggaagcagaaaatttttgctgcttttgttcaaaggtggtgcccaaagaagaaaatcaagacagaagctgcgggaggaagggtcctccgttaa

SEQ ID NO: 37026 - DNA, 510 bp, Zea mays
  Peptide Sequence Number=SeqID_80401
atgtaccgagaggcgttgtggcagaagagaggtcgtcctcgggagttatatccggacgtatctagcaaggatgctcctgttcctcctgaactccccgtgcctaactgtgactgtggcagactgtcttgggtacatcaatcacaacatccagacacggctgctcgctgctactacctttgtggcactttggacggacatcagaggtgtttctttttccagtggatcgatggtcctgataaatttgaccctcgatatcttcttttcgttaattggttgagtggaaagaccagtcatgagcgttttaagcgttgggtacctcctcccccgaatcctccaccaatgacggatgcggagaaggaggattgctttggccggccgactgccagtgcgccagatgcttggttagatgtggtcgagccgctctactcaaatgactgcaacaagacactccggtggatggattcaggcattcagcactttgccttgacggggatgaatgagctagtgtga

SEQ ID NO: 37027 - DNA, 192 bp, Zea mays
  Peptide Sequence Number=SeqID_80402
atggccatggcgggactttgtgatggaaaagtggtgatgatgggtctggattgttataaggttcatttagatgatcctgacattggtgttgatattgtaaagatgaggtcatttacgagtttggtggacaccaactacatattagatgctatccatggttctgagttattggaagtgcaggatataggatga

SEQ ID NO: 37028 - DNA, 159 bp, Zea mays
  Peptide Sequence Number=SeqID_80403
atgacctgtattgctgtagtcagtatattacatgtttggttggttttagcacaacaaggtgaatgtgcaagcgcagcattgatgtaccatcagcacagttacaaatttcttggtcaaccactcaagctccgtctatgcatggagcttgaacatggttag

SEQ ID NO: 37029 - DNA, 165 bp, Zea mays
  Peptide Sequence Number=SeqID_80404
atggagaacggaggtcgaagggcgccgggcgcggtcggggattcggtggacggcgacgcaggagcgtttgcgcttctcttggcggaccacaaagcgtcgcgacgagcgggaggcggctgggaggactcgacactcggcgaacggctaggtggcgtagggggctag

SEQ ID NO: 37030 - DNA, 303 bp, Zea mays
  Peptide Sequence Number=SeqID_80405
atgcagaatttttttatgctcctcagatgccttaatcttctaaagggcaagaagcagagccttgaaccaatgatttcctcaagtgtttccttgtatgaaatagaaaagctatttagatggatcatcactatctgggagagacaaatttgtgttttacctcgcagatggagcaatccatttccatcaataatgagcaactgcagcaaggaggcagaatggcaaaaccttagaaagggcatgggtaaatacatagaagatgctggtgattatgcaagacatctcataaaccaaaatgattcatag

SEQ ID NO: 37031 - DNA, 1446 bp, Zea mays
  Peptide Sequence Number=SeqID_80406
atgtacgttctgttcctcctctccttctcccgtaccctcaccgagctcgccgccctcaccggctacgactacgtcgtcgtcgacatggagcacgggtcgggcgggatccccaaggcgctcgcctgccttcgcgcgctggacgccgcgcgcacccccgtcgtgctccgcctcccggaggccagcgccgtctgggccaagaaggcgctggatctcggccccgcgggcctcatgctccccgcgacggagtcccccgaggccgccgctgaggcggtctcccactgccgcagtgccgctacccgccgcgcagggtccgcggcgctgcacaccccatcgtccgcgccttggagacgaggcagcgtgcacgacggaggccggcatgtgggtgtgccccgtgcgcacgtcgcgccccagcggcagcgcgtgcggggagaggaagaggagcagctccgggggcagggtggtgccggtgccgtcgcccgcccacgcgcggtgcgggacgaggcgggtcgcgtccagctcacgcgcgatggcggccacctgcacggagatggcggcggcggcagaggaggagaggttggaggtggcggcggggaggacggggtgcgcgcggggggagaggaaggccagcagcgcgaggagattggtggagaggagggagagcagtccagctcacgcgcgagagcagttcaccccgcgaggaggttggtggagaggaggccagcagcgcgaggaaggccagcagcgtggcggcgggacagggacgggctcgtcagcccatggtacatggccggcaccacgtcgtccgcggccaggacgcgatgccacagcgcggcgaggcagcggcggacggcggcggacgacgtcgagcacgagcaggcgccgaggaggtcgtgctcgcacgcgcacggcgacggattctgcttccggtgctcagacgcgacccgaacaacggctggcttctctgggatcggcgtcggcgacgaggctgccagagactactacgacagggcgcatcaagagttgattccagtgttcggtgcgctggtgatgcacctctacaccggctttggccctgaggcgctaccggttgggatacggtggaccatggacgagagggatccggggtgcctgtatggagatctggctgaactgtcgtgctggggattcttcagtctcattgtacatccactgctaggcgaggcacgatgtcgacgtgctggcgtgctgctacagaaggtgttagatatatgcaacaatctgatattccatactaccttaaccatgtggagggggttgttcgtaacatctgacaagatccgtggcggctgtttaggtgctggatccgtagcggcggcggcagccatggataggagcatgctcggcgacctagatggcctccccgaggaggacaagatgcggatggccgccatgatcgaccagctctag

SEQ ID NO: 37032 - DNA, 174 bp, Zea mays
  Peptide Sequence Number=SeqID_80407
atgtgtccagagaaggtgatatactccaaggcatcaacagtggtccggacccccatgggagagcgccggacccccgggtatacagtccggacccccaaggttggtcccggacccccagggttggtcccgaacccccgagtatacagtccggacccccaaggtgctaaagtttga

SEQ ID NO: 37033 - DNA, 324 bp, Zea mays
  Peptide Sequence Number=SeqID_80408
atgactaccagccttatggtggcgagaagcgagccgggctgcggcctcccccctgccctcagcttcaaggatgttcatcatccttgctggcacagccaagacccaagagcccagtgcgtcacgtcgtcaggaactcaggactcaggaagtgtagggtttgtggcggcgggcggcggctgtagctggagccggcgacgcatcctcctcgtccggccagcctgctctggtccgctcgcgccgcagcagcgtcaaccgtcagtcgcgccgcagcagcgtcagccgtcagtcgcgccgcagcagcgtcagctcgcagcagtagtatga

SEQ ID NO: 37034 - DNA, 1179 bp, Zea mays
  Peptide Sequence Number=SeqID_80409
atggcggaagagcgccaacccccatggggctgcgctcctctaatagcagcaagaagaagacaagatcggaagcaccaccacgagtgtgagctctccggcgatttccccactcgcgccccgaagcgtcacgggcaaagtctcccccgacatgcaccagggttcccaccctatgacacgggggccaggccccacatgtcatacagactgacccgaagcacaaagaaggcgaaccaccgcacaaggagcgtgcaactgccccgcggttatgtgccccttcattttcggagcaaccagcggccaggaagacgaaccgccgcccaaggagcatgcaaccgccccgcggttatgcgtcccttcatcttcgccgaaaccagcggtcgaaaaggcgaaccaccacgcaggaagcgtacaaccgccccgcggttgtgcgccccctcagcttcgctgcaaccggcggtccaacatgggggcccaggcccacatgacatgcaaccggcgcgccagttactgggtgcagaaaaatcgcgccaatgccacatcttttcggggtcgtcgcggaagactgaaaagataagttttcagaaccagtgcagcgactcgaggcatctcgcgcatggcccaacagtgacattaagtacgaaggtcacgggccagtcaactgtgggaataggcgtagcagtcggcatgaccataggcggccaacagctcgcatcctcccctgaggcgggcccgggggccactgtcggtaccctgaatcaggggtaccctcttctacattatgaagacgctgtacacgtccggacctccacagagggccaccggacccctgtacgtacaagtctggagctcccaagaaggcatgccgggtccatcgggtgggccccaggtccctccgagcggagacccgctgctgccgcatggcttgcggcccgtgacataggccaacaggccgagcctggcgtaaagcccttaaagccgcgcaacctctgcatttattacgcagaggacgcgccgcctgccaccatgcttgatgcaagattaacttggactaaggaattgaggaaagcaacacctcaaaagaagacattaaagagatccaagaaaagtccaagaccggactgtctggtgtggaaagcctgcggcgccaacggtcacctgctcggacacggcaacggctag

SEQ ID NO: 37035 - DNA, 942 bp, Zea mays
  Peptide Sequence Number=SeqID_80410
atgccacagcacgacagctctgctactccacccgttgagtaccacgacagctctgctacgttcgaaacgaaaaaagggacaggaaaagacagcggaaaaatcctggacggtaggtgtccaactccagcgcaccattatccgcttgcttttttgtctcttggccgcaacgtgaagtgcagcagcagccagcagcgggggctggagcactcaccagtcaccactcagcagcgatcgcagcaccgcggcgagataatgagcagcctgtcctccggcatctctgcctcgccatctgcagcgcccagcaccgctcggcgccgccatgacgcagcgccgcagcagctgagggtgaaggcggcggcgcggccacagctgctgcacgccggccgccggcgttcgagtgtcgggaggaggccgggcggcggcgcggtggtggtgagggccgggcctgggccgctgtcggagatcgagccggacctggaggaggacgccatcgacgtgtaccgcaccaacggcatcagcccggaggacttcgagtacgggaagtatgacggacaccacacctatttcgaaggccaagacaagaagggcttctgggaggatgtctccgagtggtaccaagaagctgagcctcctcagggctttcaagcactcatctcctgggcatttcctcctgcgatcatcctcggcatggctttcaatgtgccgggggagtacctgtacatcggggcggccgtcttcatcgtggtgttctgcgtcatcgagatgggcaagcccgacaagccgcacaacttcgagccggagatctacatgatggagaggtcggcccgcgacaagctcatcgccgactacaactccatggacatctgggacttcaacgagaagtacggcgagctctgggacttcaccgtcaacaccagggacgacatcgtcaagtcgacctag

SEQ ID NO: 37036 - DNA, 744 bp, Zea mays
  Peptide Sequence Number=SeqID_80411
atgtgtctttccatgcatggcatcagtgcatggctgcaggccttgctgctgctggcagctacagcattgcaagccagccttgctgctgccgcactgtactacacatgcatgtgtgatcgatgtgcatggtccacaagatcttcctcctgcttgacatatcacgaggaactatgcatgaccaaaaccctgatctccccccaatccaaacatcttgtcacgcgcagcaaaatatttcttttcctctccctccgtgccatgcacattggagacaggagacatgagagagaagggattgtctcctcgactgaagcggcggttgccaggccgacggtggcggcggttcccaggccgacggtggcgaccctcgatccagagggcgagcggcggcggcagcgcccttatgtggtggcggcggtttccaggccggcggtggcggcccccgatccagagggcgagcggcggcagcgtccttgtgcggtggcggcgattcccaggccggtggccgcaactccattacctcgacgcgcggtggcggaggtttctcgatccgcagcgaggcccttgtgcaggcaagcggcggcgtccccgaagccccgaggaggcggcacttccaaggccggcgagcaagcgacgcccgtcgacgtgcgagtagcgacggcgacgcatgaggcgcgatgttcgagcgagcgacgtcacggaaggggcgagatgcgcgcagcgatgatcgcgcgtgacatcctctga

SEQ ID NO: 37037 - DNA, 207 bp, Zea mays
  Peptide Sequence Number=SeqID_80412
atggatctagggttagaggatcggaggaaggaggagtcggcgggtcagggaggcgcgctgacagagaggcgcgcggcggcgcgggacagggaggcgaggcggcggcggggggcagggagtcttgggtctgtgcgcgaggcggcgacggggacaggaagtcttgggtctgtgcatccacaaaataaaatgcacccaggtgcattttag

SEQ ID NO: 37038 - DNA, 801 bp, Zea mays
  Peptide Sequence Number=SeqID_80413
atgaatgcgaaggcgcgcgtagcccagaggcatcatgctaggttccgcccgttggcttatgccgcatgtagtatgccatgtggcagcatcgggtctccgcttgagtggggagcaagagtgtatgcggataggtccgaatcccaccagaccaggtctggacacatgtcggcaccggacccccgcctgggccctgatgacggaccgggggtccgacacttttccatggggtccgaactcactgttgatgccttggagtatattactttctctggacacgtggcggctctggacctacccatgtggtggggtcaggcactattgctggcccagagtagtcgcccgaggctgggggtaccgacaaagcacttcctcagactgaaagcgatcaggatgaccaagcgaagccatggcgtgtgcagcggcgcgggcatggaacagaggagaacgaaggcaaaggggcgcaaccggttgggagagaatgcgaaaaggctcgcattctcccctgaggtgggccccagggccactgtcggtaccctaaaactagggccatggctcgccccagcctcgggcgactactctgcgccagcaacagcacttgaccccaccacatgggtgggtccggtgccaccacgtgtctggagtctggacccccatgggaagacttccctgtatggggtccaggctgcccatagtggggtccccaggttccaggacagaacatacccaggccttaatcagggcctaggcgggggtccgttgccgacacgtgtccagacctggtctgatgggatttggacctaa

SEQ ID NO: 37039 - DNA, 690 bp, Zea mays
  Peptide Sequence Number=SeqID_80414
atggggcaaattgggtcaacgagcttccgtccgtactatgggggaaccgaaccacacccagccgagctaccggggagaccctgttcttcctggtctacggggttgaagcctgtcttcccccagaaatcattatgggctcaccacgggtccagtcttttgatgaatctatgcaggaacagctacgacgtgaggacgtggacttcatcgacgaacgtagatggcaagcggcgatccgaaatgcacggttgcacatatgtgtatgtcaatctggtgaggtccgccctctgtcgtgcttgcctcgctggcccactcggcaatgcgctggaccccggcgtggtgctctgcctagagatcttcaagggccttcctggtggcctccattgcctgggggcctggcgtcgcctgcgccacattaaactggcggatctgctcctccagtttcctctctttttcctctgcttcgagctcgtgctcggccagcaacttgcctccccgggtgagcatttcttccctgaaggcgagatccgtctctcatctggcgaggtccgtctctcgcctgtccaaggactgctcctttgccttaaggttttcctcggcgagggcggcatcgctggccttgccctcgagcttttactgccatttctgcaacctttccacagccttgacctgttgggcccgctgggcttctag

SEQ ID NO: 37040 - DNA, 504 bp, Zea mays
  Peptide Sequence Number=SeqID_80415
atggcccccaaccccttggataagggcaaaggggctgcaaacagtgcctccgccccaggtaccaggcccaccgacaggtctggctctcagcaacaggaatctgctgagggtggtgccggcggtccgcccccagctactgccaagacagcgccagcggcttcccatgccccagtcagggatccggcgacagcggtgccagcgtcgggcggcgtcgcagtggcggaggaggtcccagctgggggatctacgcccacccctgacattgggggtgacacaggaggcgtgtccagctccaaccccccacctgctccggaggagatggaggtcctcagtgacactgaggcagcaatcttgcgggagtggaaggcgcttgaggctgagcaccagcgcctcagtgactggtgcacccaactggaggagcgcaccaagacgacgtctcgacagttcacctccgagcggtcccaactcaagcgggaccgcaaggagtacaagagagacctctag

SEQ ID NO: 37041 - DNA, 1952 bp, Zea mays
  Peptide Sequence Number=SeqID_80416
atggagaagtgcaaaccaatcaagacccccatgcctacaaatggacatctcgacttagatgagggagtgaccttgattgaccgtgtgccgtctcccgtcctgcctggatcgtcacctctcgtgatgccgcgcacgaagaatgtgtcggcgccagggggaggcgatgatgaggatcctcgtcgccccttcaggcaggtcaagggaacgactgtttacttggagcagcaggaaggccgcaagaagcggcgtacggacagagcagcccgtgcagcggcagcagctgcagcagccgctgtgcaggccgagcttggagatcagccgcagactccatccgatcagattgcattccgtgttcgtcgtctcacctcccggcctcgctcctccactcacacctccgcttccacttcgccacccactctgcctgctcccgtcactcctattgctccatccacctccacagccatacccgctacctccactacgccagcctcctctgctcctcctcctccgctcccgcttcagctcctcctgtccctccaccatgattccgggagcgtgatgagactgaggttcgtcctctggtttcggatcctcgactgtttgaccttcagcgtgctacagcggcacggagctcagatgtctgctcagatagctctgcgagtgcaccggcttttggatcttctagcctttctgcttgcagccggtgctgactctgaggcgcatctcacctatctgcctggccttcagacccttctgactatcagcggcagacccgccagctatttggattccccgagtcgacgactcgccttcacagtctctgatacggcacttctgaccctcctcgtcgccctcatggcggtgtggctccgggtacagctcacgtcgcggctctgtttcgcccgcccttcacagatgggtcgcgacgttcaccggcagactttactacagcaggccaagtacttatacgagctcatcagacggactcttctgccgaggatgggatacagggaggctaccactcatattcagctttggctccttggtgccctggtctcccactctgagtttgacgttgtggacttcctgatttgtgagatcgaggacaccgttctggatgggattcgtgctcgtcggcagttgccttatgctcactacttgtgccacatctttgcgcagctgattcagccccctcgatttcagagcacccttgaggcctcacgcctcgtttttggatcctaccgtcctgcgcttgagattcctgtgccagcttctgctcctgtgtttgattctcaggccgaggatgcagctcttcgacagtttgacactcagggtacaacagctgatgatgatgatgatgattttggggttcctcctccgcctccgcctcctatgcctccacgctctcatgatcatgaggctgggagttctagtgctgcccctcctcctcaggctatggaccctgctcttgcttcgattctggccaacctggcggccgagcaggcccggttatccgagaggatgctctcgatgtttcagaacatgcaggacaggcaggatgcccttcagcagcagctacttcaggatcgggctgagactagggcattcatggctcttatgcttcagcattctggtatctcagtacctccggttcagtctgctccacctcctccgcttcacgctccagtggtgccatcgattttgtcaggaccccctgttggtacctctccgctccggccggtcactttggcgttcacctctccggttcccagctctgtctgtccgcagccgccagtgccaccagcatctgctgttaccactaccgctgtggcagtatctgtgaccgcttctgttctggtagctcctgcagcgcggcctcagtccgagtcagtaccagctccagcttctaccgcagatcctggatccgagactgactctgaccctccgccggc

SEQ ID NO: 37042 - DNA, 444 bp, Zea mays
  Peptide Sequence Number=SeqID_80417
atgggcaagggtaacaaacgcaagcgtgagccgactcctccgtcggaggattttggcgactcggaatactcggaggaggagttctcctccgagtccgagggatctctggctcccgtctctcccccggcgtcgtctgatgattcagacgactcccaggggattgccgcggaggtctggacgtacatccgggccgtcgagcgatccgggctcgagggctcggatgagtctgagttctccttggacgaggaggactcggacggaggcgaggacgaagatgacgacgacgacgacgacggcgacgacgacgatggtggcgacggcgccggtgacggtagcaacggcggcgggggcagcggcggcaagggcggcaccagaggcggcagcagcacgggcagcaccagaggcggcggcggcaagggcagcagcagcaaggccagtggctaa

SEQ ID NO: 37043 - DNA, 360 bp, Zea mays
  Peptide Sequence Number=SeqID_80418
atggcttcagggtcttctaggggcaagggtgcgcattcattggtcaaggagaattgtgggttcactcgttgggtagatcctcgtccgatttttcctcatgcggaatacatatcctacctacagaataggatatttgatctagagagggaagtaagcaacataaatgacgaggaagaaagagacaacaacaatggtggtgcttcacaggtgcaagtatgcccagatccatattgttgctgcccttgtcacaacaagaatgttggtcctccgtcgtctccaccgcacccacagcagacaccaacaatgggaggatactatggagaagggtcaactcaatttggaatgtgggagcactactag

SEQ ID NO: 37044 - DNA, 726 bp, Zea mays
  Peptide Sequence Number=SeqID_80419
atgaatgctttgtcccgtgagggatgcaggcacttcaaagtctttgaccgatcgaacgaagacttcgaacgcggaatcttccaggtcgaagacccggtgctaaagcgatctgctggggcgctttatgataggatgtggggccctcatggccgtgatattgtccagaaaaggtccgaccgggcgatggagcagatggcgcatgatgaggaggtcgaatacctcgggaacctggagagcacggtgcctctggcagtgggtgcgatggcgggggtcgaggagcagccggcgtcgccgactgatgttggcgagggacccatggaggcccccgtgccgactggtgaagacacgtcggtggcggtcgcaccagctgccgaagacccggcggcgtcagccggcccttcgcaggttccgacatgtgggcctacgcagacaacccctgctgatgttacgaattttgtggcggccgctaccgtagtgcctgctgattattgtgtgtctggttctgaatctgagtctttgtcgtttgatgatgagttcgggagtccgttttcctggagcgaagagtcgtcgggtgaagatttggataattttgttgcgttagatgcggccacggcggagtcctcgccgcggttggaggttggcgaggtgtctgatctccccagtccaaggatcgagcgacagcgacgaaaagtggtttcgaagcatagtgttggtgagatgtcgtga

SEQ ID NO: 37045 - DNA, 588 bp, Zea mays
  Peptide Sequence Number=SeqID_80420
atggatgtttgcgtggatgactaccttgtgggcggtgtcatgattttcgacgcccgtatagggcggggacttgttggatcggatgctgggcaactggctgttgtcccagcgccggtggcggccgcgtcggtcattgcgacgaccgaggcgaaggggtcttcgcaggatccctggtccaagttttgtgccagcggcgagattacttcggtcgccaccaccaaagacatggcgggctcggttgcgcagcagctaaagcttgcaacgcggcagctgaagcatgcggtcgccttcgtcgaacatgttgcgtcgggcgccctgacctcggagttcgctgccgagaggcgacgactcgagggtaggattgaacgcatccggacgcagcatactgaggcggtgcgggataaatcagccgcggagaacaagacccgcaagctgaaggagaaactgacggctgtggaggctgaaaaggaggacctcggtcgccacctggcggcggaaaagcaggatgcgaacagggcttgcgtggaggcccaggccgcgcgtgccgaggacaagcttgcgcgcgctgaggccaatctcaccatctaa

SEQ ID NO: 37046 - DNA, 558 bp, Zea mays
  Peptide Sequence Number=SeqID_80421
atgcaaaagaagaaaataggaaataagattgcacaatttagatcgtgcaccttcacaccgaggactggaaagacttcagcgaaagttgtggaaatagtcccttgtgctcggaataagtggggcaactggtgggactactggttttatgtctctggtggggaagttgaagatctccctgggctccctgccgccgtcatgtgctctcactgttatgtggcgttcccaccgttcgaggtggcggaggacgatgaggacgaaggggcccttcggtacgctgtccgcatgagtagcgggcacaatcttgttgaggaattcattagatatggagtgtggcccttggcgcacggatgggtacttggcgaagtatgcccttgcaggatgccgtccttggacgatcagttggtgcgaagtcctgccttcgccttggatttgcggggtcggaacccgaccgcgtttgttcgtgaagtggaggccgaggcctcaaggattgtaggacgatacgtgccgaggacggagacctgcggagttgggatattcacagttctaatgtttgtttga

SEQ ID NO: 37047 - DNA, 392 bp, Zea mays
  Peptide Sequence Number=SeqID_80422
cccgagtccgagccctggggtcgggcggagcggagttcgccgtcttccgggtcttagcccgagtccgagccctggggtcgggcggagcggagttcgccgtcttccgggtcttagcccgagtccgagccgtggggtcgggcggagcggagttcgccgtcttccgggtcttagcccgagtccgagccctggggtcgggcggagcggatttcgccgtcttccgggcggcgctgtccttctgtcagactggccagtggagcggtggagtgacggcggtcacctcggctctgccgggggcgcgtgtcaggatagagctttatgctgatgggggttaccagctgagaattaggcgtcttgagggtacccctaattatggtccccgacaggcacgatga

SEQ ID NO: 37048 - DNA, 219 bp, Zea mays
  Peptide Sequence Number=SeqID_80423
atggcgagatccagcgttaccgtgcgagtgcgagagtccgagactgagagggaggaggaggacacgtccacggaggcgctggagcggagacagagaggccgagagcggagaccggagatggaggagatggacgagaggcgagacggtggtcgcagtcgcagcggagaggagaggagcggtcgagcggctgagtgggtgcgcggcgcgataggaaactag

SEQ ID NO: 37049 - DNA, 303 bp, Zea mays
  Peptide Sequence Number=SeqID_80424
atgcaggcgacatgcaaccgcaccaagggggcgcaccctttcgactccgacgcgtccagcatgggggcccaggcccacacgtcatgtaaccggcgcgccagttactacgtgcgagaaaactgcaccgccacttgcgcctataccgcgccttctcgactgcggaaccggtgccgcgactcgaggcaaccctgcgcatggcccaatagtgccaaccaagcacatcggtcatggggaccgggaaaggggatactccgaaaaggatccttctccgcgaaggaagcgagccctgagccctcctactga

SEQ ID NO: 37050 - DNA, 267 bp, Zea mays
  Peptide Sequence Number=SeqID_80425
atgagccgggctgatgtcctcgggggacagctggctgaggctacggagcggccagtcgagccgtctgctcgggctgggttcccggaggagaccctagcggcgatggcccaggcgtggtgccgacaggacttatttgtcggtaacagaattgtttgtccaagcaagagttacttttcacggaaggtgatgagtgaggagtccctcggctcggtcgaccttgctgcttacgtgtactccgtcgttttcaggatcccactttcgaagtag

SEQ ID NO: 37051 - DNA, 450 bp, Zea mays
  Peptide Sequence Number=SeqID_80426
atgggcaagagcaagaaaggcggaagttcgtcgcaccattctggcgacaagcggaagcgcgagccgacccctccctcggaggacttcggcgattccgagtactcggaggaggagttttcctccgagtccgaggggtcgcccgtctacacctctcccccagcatcgtccgatgactcggacgattcccaggggatcgccgccgaggtgtggacatacatccgggccgtcgagcgctccgggctcgagggctcggatgagtcggaggtctcctcggacgaggagaactcctctaactcatccgaggaggagagcggcggtgacgacgacgacgagggcgacggtgatggtgacggcgacagcggcaagggcaacggcaagggtggcagcaagggcgacggcaagggcggcagcggcagcagcaaagccagtggcaaagcgccactggcttag

SEQ ID NO: 37052 - DNA, 273 bp, Zea mays
  Peptide Sequence Number=SeqID_80427
atggcgcctcctgttgacgtggctggcctgcgccctaggttgggcgatgtggaggctcctccgaagccgaggtcgagtctgtcttccgtggccgaggccgagtccgagcccctaggtcgggcgaggcggaggttgttggctaaggccagggcggagtccgagccctggggccgggcgaagcggagcggcgctgtccttctgtcaggccggtcagtggagcggcgaagtgacggcggtcacttcggctctgccggggggcgtgcgtcaggataa

SEQ ID NO: 37053 - DNA, 1464 bp, Zea mays
  Peptide Sequence Number=SeqID_80428
atggggtgcacctgcgttgctttctttttgctgctgtttgaggagcgcgacgccgtgggggttggcgttcttcagtcaccgctcggcttcaaggattttcatcatgcagcccggctgcagtccctcaccaatgcttcaaggatgttcatcatccgggctggggagggggtgcaccgagttggggcctgcctccgcgtgggccggggacccgcttcttcctccggcatttgggggagaagggcatcctctagctctgcggaggaggcgtcctccagccatgcggaggaaggcgcactgctgctgcctggacagggtgcagctgtccatcttctcccgagcgacgatcgccggctgcaccggggggtggcacaacacgtcgtatgccgcgagggcggtactcatgttccgggacggtcccgttctcattcttgtggcgagagcgggagtgaggacctgccggtgcactttggggcggccgccgctcgctggtgcggtgttggtgggcaggtggccactgtcgtcggtgctgaggtggtggtcgccataggtgagactgcctctaccgaagcggttgcttccaccgacgagaccgtcaatgccacctgcgctccggacctccggctctttggctttaatggctgcttctcgtcccccgtgaggggacgtgaacgagggccattcagtagcagtgtttgccctgaggccatcgctgcagctgtcttgccgcccgagacggaggtcgttgccgcgctgttggtgcagtggacaccggcgagccacctggagtttgttgtcccgcaggccctctggtcgagaaaaccgccgagggcgctgccgacgtttaagtctaggtaccattgttaccccaagtatgaccttcggccgctctgcgatgagctaaagccggaggcagcggtgtcggcgcagacggaggcggtgtcggctccaatagaggcttcgtcggcccaagagcaggtggcttcccaggccgaggaggtgcagtggcggcggctggagcttagccaggtcatccgcgagtgggaccaaccccggagtcatgctgccgaggccttgagccgggctgaggtcctcgggggacagctggctgaggctacgaagcggccagccgaggcgtccgctcgggttgggacccttgcggagagcctagccgtgagggtccaagcgcggtgctggcgtcctccttcgtggtggagatccttccggtcgtgtcgctgtctgaggccaggccagattctgccgagggtggaaatgacgccgagggcgctgctcctccccctgtcgatgtctgaacctataggaacagacttgttcgtcggtaacaaaatcgcttatccgagcgagagttacttttcgcggaaggtgatgagtgaggattctgttatcgatatagtcgagaaggcacgaaagtcgttttttacccgagcattaggacttgttcagtag

SEQ ID NO: 37054 - DNA, 162 bp, Zea mays
  Peptide Sequence Number=SeqID_80429
atggcgccgctgcggcgcaccgtgtaccgagtcctgtactcggtgtcgaccaaaattagttggagaattgagttcagggagtcatcaagggatgtgactcaagaatggcttgatatggtgaagatagcaaggaaagggcttcgaggaactaagcgaaggtga

SEQ ID NO: 37055 - DNA, 252 bp, Zea mays
  Peptide Sequence Number=SeqID_80430
atggtgagagaacgaagaacacaaacaaacacaatgagcaagaacacaagatttatctcgaggttcggtcacaccaccaaggtgccctacttcctcgttgaggcgcccacaaagagccgggcctctttcaaccctaatcctccctttgccgaccacaaagacaaaaaccggttgagtgtccggttgagtgtccggctgaaccagtattttcaaaaaggtgaacagtgcaaaaaccggttgaacctgttttaa

SEQ ID NO: 37056 - DNA, 327 bp, Zea mays
  Peptide Sequence Number=SeqID_80431
atgccgctcccgccgtcgctcgagctggacctattccaccgcgcggcagccgtggtcacgggcgccatcgtcgtatgcttccctttcggcagcatccccgttacgcacccgtactatttcttcgggcaggccgcagctgcagccaccgcggaagcagggtgtcgtgtgctcaagctggcgccgactgtcaccgtggcgcagagcggctcggactgttcgtcggtagtggatctgtcgccgtcgccaccaaccgctatgtcggcgaggaagaccgccgtgttcgatctcgacttgaactgctcaccgccgatggaggcggtagcatag

SEQ ID NO: 37057 - DNA, 177 bp, Zea mays
  Peptide Sequence Number=SeqID_80432
atgctggtagactacacaatgatactcaatggaccaagtgtgtcggtcgaaggcccgacgcagcaaggtgtcgagagcgtcatggaaatgaaaactggtctcctccagcagatgggatgccctatggtggtgcagggggcatctctagctgaggtgcaggggaaggctaccacctag

SEQ ID NO: 37058 - DNA, 1932 bp, Zea mays
  Peptide Sequence Number=SeqID_80433
atgccatcttcttcctcgtctactgcaaacacgccgctggcctattcgtcatccgaagataccttaagcgatttggcggcggcggagttacagccgggccatacggtggagttcggggtttcgaggatttcctcggttcgcgtgcaggatatgaagcagttgcggtattttgggaacggcgttgggcgtgtcttggggcggaagaggttcccgagcccaagggcgagttggtcatgtttgaggcgttcttcaccgccggcctttcgcctgcctgcacatcgttttgtggcggaggtcctgcagagatttgaggtcttcgccaagaattactgtctgcattggcaaaaaagaaagattggaaacaagattgcacagtttggatcgtgcacgttcactccgaggaccggaaagacttcggtggaagtcgtggagttagttccctgtgctcgcaataagtggggcaactggtgggattactggttttatgtttctgggagcaaagttgaagacctcccagggctccccgcggccgtgatgtgctcccattgttatgtggcattcccacaatttgaggtggcggaggatgatgaggacgaaggggccctccagtgcgctgcccacatgagcagtgggcatgatttggttgaagagttcattggttatggagtgtggcccctggtgcatggctgggtgctgggcgaagtatgccctcgccatatgcctactttgggccagcagctggtgcgaagtatagccttctctttggatctgtgcggccgagactcagccacgttcgttcgtgaagtggaggacggggcggtgaggattgtggggcggtatgcgccgaggacagagggtctatggagttgggatatccgagggtccaatgtttgcttaaatcgggtcttcgaattaaaccgtttgccatacggtggttatcctggagatgatgctgctgcggctgctgaccgtcgcgagaaaaaaccaatggccgtggctgaggaaggcccttcgcgggaggctgccccagccactaagaagaggaaaataggtactgcagtggggggtttgggggtctctgatcgttttgctatggagttgatgggaacttgcgtggccctcgggggaaggatgtcttcgtccgagctccgggagtcctcgggcgcgaatgctgaagtgatggagaaggatcgtcaagatgcggtgcgaaagtgccgggcggtcactagggtcggggaccctttccgcgaggcgaagaaggcatggggaggcgcgaagtctgctgcccctggcagtagcaaaccaccgccggctacgaagccggccgcccccgagcccagcaattcttcggcgggtgcgggggctgctgcggctgctgcggacaagctgccctcggccgagcccgcgaaggagcgaaggccgctgtcgccggatccgtggtccaacttctgcgcgagcggcaagatttcgttggccgccgccactaaagatgtggcgggctttgtgtcccagcagttgaggcatgcatcgcagcagctgaagcatgcggccgccttcgccgaccatgttgcgtcgggtgctctgacttcggagtttgctgccgaaatcgagtgtctccaggcgcagcatacggatgctattcgggagaagtcggctgcggaaaacaaaagccgcaggctaacagagaggttggctgctgtggaggccgagaagggggatctccagcgccagctggcggaggagaggagagacgagaacaaggccattgccgatgcgcaggctgctcaagccgaggccaaacttgcgcgggcggaggccagtctcgcccgccaacgcgccgaggagctggagaagaggctcagcgccctgcgcaaccgcgtggacaaaaccgaggcctcgacgcgcgcggaggtcgagcggacgcatgtgtag

SEQ ID NO: 37059 - DNA, 300 bp, Zea mays
  Peptide Sequence Number=SeqID_80434
atggcaggagaacaatcagttgttgaactagctttattgcttgcttcggagacccctgatacgaggggagatagctcaattgtggtagatgaagctaccacaccgcaagctaaagatgttgctgtggaccctgctgaagggtcagatgatgacaacgaagatactgatatcgaagaagacagtaccattatccatcccacgaagccaagccacgtggactccggaaaatccacaatcaagggaggacacattgaggtacttaccaagttcaataatattgactgggcgttgaagatttag

SEQ ID NO: 37060 - DNA, 348 bp, Zea mays
  Peptide Sequence Number=SeqID_80435
atggattcaagtgcaagtattgtaagaaacagtgaaaggggtggtgctacacgttttaaacaataccttggatcacgtggaggaaatgtggaaggttgtcgcaatgttccgccaaatatttgcgattactttcggcgggagcttgacaacgaccaagataaaaggaaagcaagaatagcgggttcacaaatggaaatgggtcacttaaatggggatccaatgctgaatgagcaggacaccaagagtgacaccccattaccatcaagcattgtagctcatggcacttcaagggaaaaattggttgactggactcagaagaatgtgggagacactcacgttggtaagtga

SEQ ID NO: 37061 - DNA, 243 bp, Zea mays
  Peptide Sequence Number=SeqID_80436
atggctatgaacaagtcaaagaagggagataagaacaagtcttttgatgagctactgctagagcagtgcccttaccacccacatcataatgactatatcacggatatgctaggtctcaataatggtgtactctcactcaaagatgacttgaagtgctcctataaatgtgacattgaggttgtttatcttgtggctaagtcccaactaataagccaagtgcaagaagtagccaatctctcctag

SEQ ID NO: 37062 - DNA, 186 bp, Zea mays
  Peptide Sequence Number=SeqID_80437
atggagaatcgggctaaacagaataatcccagttatgatggagggcttactgaagatcaactagtctactgcatcaacagtttcaaggaggctgctttgtccaatgaccaaaagtttggccatatcgacatatctgagaaacagaagttaaggcaaaattgtaaactaccgctgaaatggcattga

SEQ ID NO: 37063 - DNA, 267 bp, Zea mays
  Peptide Sequence Number=SeqID_80438
atggccggttcggccgcctccctgcccgccggttcggccgcctccctgcccgccggttcggccgcctccctgcccgccggtggttatgagattgatggttctggttatggctatggtgctgtagccatcaatcgttacgagaaagagcttcaagttcatgatacatctcctaagaacaacagtgtcaataagaaggatgtagtggaaccatctttaaggttgatggtaaaagctatgtactggagtgttgtgatagatacaagttga

SEQ ID NO: 37064 - DNA, 1458 bp, Zea mays
  Peptide Sequence Number=SeqID_80439
atggcgggccaagccatccctggcgccggagttccagctcgtactggacaggatcaagagcttggcggcgggtggcctgacgtcgatgcacgtggtcggagacttcctgaagcaccggatcacgccgctgcagcagagggcgcatctgtgttgctgcgtgggccaaggaccgacctgtcctgggacgagctggaagtcctggtgaaggggattactggtgagtccttcattcctgagtccctgatccttccccagggtatccctgcgctctgcgacgatccatggctgaggacggcgatcttggccacgttgccgaccctcgacgagagcggcgtggcggttcgccagaccggcggccgggacccccaccgcgagatctggatctccgatgcactcgctggaggcccccagactgccggcgtggctcccaccgcctccgccgcggccccccgcccctggacaagggaaaaggggctaagcgtcagaggactgctggtggggccgaggaggccggctcccaggcccagggcgcgaagaggcgcgtcagtccttcgccaccaccaccactgggtccgccgccaccacagccaccaccaccatcggtcccgccgccgccaccaccacctcggggtgatctcccccaagggcaccagcagcaacaacaacaacaatagcagcagcaaaagcaacggtcgccccgcttctagggtcgctagaaggtccagggccccaagtgagtgtagcccccttttttccattagtctatctattacgccgacgggtcttgacccatcctctgcttgtcagggcttcctccccctctgctcccaaggccatgcctcctctgcccccggctgccgccaccgagagagcgccaccgggctcccatgctccagctgggggtccggcagcagcggcgccaacgtcaagcggcgccgcagcggcggaaggggtccccactgctccgacagctgccgcagcctcaacgacggtgatgccatcgagtacaccgtcggcagcggcagaggaggccccaactgcgcccgccccgccatcaaggtcgacgcggggggcgcgtccagctccatcccgccgcccactccggaggagacggatgtggtttttgggcgacggctccggtccggcgccgagccagaagcggcgccggttcccctcccccgggtgctatctcgtgcccatcaggctcttcatgagactgaggcggcgatcctacgggagtgggaggcgcttgaggtcgaacaccagcgccttagcaactggcgtacccagctggaggagcgcaccaagacgacgtcccgccagttcgcctccgagcggtccgagcttgagcgggatcgcaaggactacaaaaaggacgtccagaaggtgtacgccctggagctggaggtgggccggaagaagaagaggctggccaagaaggaggaggccttgaactag

SEQ ID NO: 37065 - DNA, 300 bp, Zea mays
  Peptide Sequence Number=SeqID_80440
atggaggagcagcgggtccagcagaccgcggctgtggagagtctgcaaaagctgcagcgagagctcaagggcaaggcccgcgatgccgcccttgccgaggagaagcttaaagcaaaaggagagtccttggacaggcgggagatggaccccaccaggcgggaggcggaccttgccaggcgggagaaggatctcgccttcaaggaggaaatgcttgaaaggtgggagaagttgctggccgagcatgagctcgaggcggaggagaaggagcggacgctggaggagcgggtccaccggttctag

SEQ ID NO: 37066 - DNA, 141 bp, Zea mays
  Peptide Sequence Number=SeqID_80441
atggggatgtggaaggtggtgtgtgtcaccgacgcatcagcgtacatcgcgtcctggatcgtcaggctcctcctcgaccgtggctacaccgtccgcgccaccgtgcgagacacatatgaacttggcttgtcagtttattaa

SEQ ID NO: 37067 - DNA, 276 bp, Zea mays
  Peptide Sequence Number=SeqID_80442
atggctagtgggatagagcagcagcagcagctattggagttggagatgttctcgatcatctacgctaagaatgtcaggcgtctcacgctcgatcgcgcgaccgaggcgagggccgagaatgaactactacaaccagcagcaggcgcccgtgacaggtggtggcgccccagacgcagagccgcggcgacaagaccttctgggaaggatgctgtgcagccctttgctgctgctgcatcctggacatgtgctgctaagcaatcccggaggaagcaatag

SEQ ID NO: 37068 - DNA, 348 bp, Zea mays
  Peptide Sequence Number=SeqID_80443
atgtttgttgcttcacacaagcaacccagtgtgaaaggcgacatcaaggaagagggcacgagtttcacggttgccgaggaactgtggctcgaggtcaagctaggtggtgttggtgggggcgccacgctcaacgatggcttaggtgagctcgtcagagacgatgttgatgatccatgtccgtacaacgcaatccatacagacctgattgagtgtggtggcctcatgaagggcatcacagatgtgtggcgcgtcgggggcaaaggcattgtcctcagggtcattctcatcaaggttgacgtcacccggagacaactcgatcgcaacacacacacgagtgacgtggtctag

SEQ ID NO: 37069 - DNA, 1788 bp, Zea mays
  Peptide Sequence Number=SeqID_80444
atggagagcagcagcggggaggagctggaggaggagttcccgggccacgagtggatcaccccgcagtcctccatcaacgccgcctaccagtctcagaccgagaagggtatcaggaaaatttgctccgatttgttggagttgaaggatgctattgaaaacctgtctgcaaataggcagtcaaagttcctggcttttctcagaatttctgaggaggttgttgaagcagaacaagagttaattgagctacaaaagcatgtgtcttcccaaggaattcttgtgcaggatctaatgagtggtgtgtgtcgtgagctcgacatttggcacaaatctagcaaggaagaagatgcaacaaaaaaagactctgaaactgaacttgatgaaattttgtctgatgatacccaggatcccagaactatttttctagataagttagacgttttgcttgcagagcacaaaatggaggaggctgttcttgctttggaagctgaagagaagaaatatttagttgcagatgaatctggtaaagaatcaaatgcagataatactgcctttaagacagcactggttaaaaggaaaacaattcttgaggatcagcttgttaggtattgtggacagccatctttatctatgaatgaactaaggaagtgtttgtctggtttaattaagataggcaaaagttctttagcccatcaagtacttctaaaagcttatggttcacgcctgcagaaaagtgtcgaggcatttcttcctaactgttcaatctacacggagacatactctgcaactttgtcacagcttgttttctcagctattgcaaaagcagcaaaagaaactaatacgctacttggagatagccccatgaatacaaaccggattatccaatgggctgaatatgaaatcgaaacctttgcgcgtttggttaaagaaaattctcctttgcctgagagtgtttctgcccttcgctctgcctgtatatgcatcgaaactagtctctttcattgctcttgtctagaatcccaaggtctgaaattctcaaaattacttatggtactattgcgcccttatattgaagaagttcttgatttgaattttagaagggtgaggagaaagattgtggatggggcaaggaatgatgatattctgcttctcacccctcaagaaggatcaccgctctctggtgcagtttcaccaaatgttatgcttacaagcagtggaaaaaagttcatgtccattgtcaatgatgttttggatcagatcctcccaatgaccatagttcactttggtggagcaattctgaataaatttatccagctttttgatagatatgtagaaacactgatcaaagtcttgcctgggccttctgaagatgataatctactggagtcaaaagagcctattgaacttaaagctgaaagtgatgcgcaacaacttacactaattggaacagcatacactgtagcagatgagttattgccagctgctgtatccaagttctttgacatacaagctgagaagaaaggagctggtggatcaagcgaaggccttggccctgggtccatatatgccatggaatacaaagagtggaaacgtaatttgcagcattcattggacaaactgagggatcacttctgccgacagtatgtcttatcttttatttacttggaagggaagtcacgtttggatgctaaaatgtacttgggacggaaagacgatgatcttttatttgatcctgatcccttgccttcattgcccttccaggttattgcattttttcgcaaccatgcctaa

SEQ ID NO: 37070 - DNA, 1254 bp, Zea mays
  Peptide Sequence Number=SeqID_80445
atggtgaccaccagttcgatggtggggagaagcgagccgggctgcggcctctgccccgccctcagcttcaaagatattcatcatctttgctggggcggaggccaggctgagctggagctctacctcccgcgcgggttcgtgggtcaccttctccctcagcattcaggggagagggcgctcaccggcctagcgggagggtcagacttcgacaacgcggggccggtcggccgtgagcgtcgtcagcttcagcgtgttgggcttgctggctcagctggctctggctccgcgcccggtgccccctcccgccgcgagagcggttgtcgcgccgcgcgcaccagaggaccgccaaagacatcgcgcgctgctagggcggcgttcgcgttcttgggctgtcctgcctttgctccgatggctgccgtcgtcggcgctgaggtggtggcgctgaagaagtcctcatcgccgacgggatcaccgccaccatgcgcgcttcgggcctccggctctttggctttgatatcttgtcctcaccccctcgagtggggacgtgggcgaggggctcattgcagcagcgtccgccctgaggccatcactgctgttgtttggccacccggagcggaggtcgttgtcgctgctgccggagcgggcgtcagcgagccacctgtcggcgttttgtcgccccgcaggccctccagtgtggggggttgttcgtacctgcgggggtggaaccggagttctgtttgtaatggcaccttgagtgccggtgtctgttcattgcggctttcggggcctgaacatgagtccctcggctcggtcgaccttgccgcccgaggcttctcttgcttagttaaaggaaccttcggtcgctctgcgatgagctggagccggaggcagcggtgccagcacggacataggcagagttggctcgagaagaggcttcgtcggccggagcttggccgggccgtccactggcgggaccgacgccggagttgggttgccgaggccacgagccaggctgatgtcctcgcgggacagctggctgaggctacggagcggccggtcgagccgtctgctcgggctgggttcccggaggagaccccggcgacgatggcccaggcgtggtgccaacagaaggtgatgagtgagaaggtgatgagtgaggtatctgtatcccggaggcgtaggagtccctcggctcggtcggccttggctgcttacgtgtactccgtcgttttcaggatcccactttcgaagtaa

SEQ ID NO: 37071 - DNA, 453 bp, Zea mays
  Peptide Sequence Number=SeqID_80446
atgaggagaagatcttttctttccttttttttctctctcctctttttctctctctcccgcgccgtgggccgaccccggccggcccagccgcccctggcgcccccccttgggcccaattggcccatgccgccccccacctccccttttccccccaattctttctccctccctctcattttctctcattttctctccctctccctaagccgccgcccctacccctgccctaagccgccgccgccccctgcccaaccgccgccctcggccgcccctgccgccggccgccccgccccgtccccgtcgccggtgagccccctccccctccccctctactccctcccccatcaccccctccctttcccctcgccgcccggacccttggccgccatggccggctcggacagccaccggacgtgcccccaagccggcgcgtccccttgccgccctctgtga

SEQ ID NO: 37072 - DNA, 705 bp, Zea mays
  Peptide Sequence Number=SeqID_80447
atggtctcccattccggttatggtgggtacaagtgcggtcactgcacgacggtagtcggggtcagtgaggcattggcagaggatactatcgaggcgattgctctccacgggctgaccaccttctgtggtttccaccccttggagttgtctactcatcccattggcttattccctgctgaaaaggaggacgacccaatgtggaaagaccgagtggagcatgccaaggacatatgggctctttacccagggcagactgcgcacttgacggtgcgatgcatggatgctctgtatcgtttgcaggtgagacggggagaagcaatgtctcatctgatggcattattggaggctaccaagattaccttggataacagagaggaacatgtggtagaactgtccactgagatggtggaaaaggacctacaagtggaacagatgtccaatgagatccaggagcttgaggaattagtgggaacccgagagaacaccattgaggttctcgaggatcaactcatcaacattcagcaacaacttgcggaagctaaccaacatttggatatgcaccaccaggagatccaggatatggaggccaacgaggatgtcgacatcgagggaggagaggagccggagcctgcctccagcttggacactgctggctcagggagaccaccttcccccgagtcgagcgttgcctcattcgctcactag

SEQ ID NO: 37073 - DNA, 267 bp, Zea mays
  Peptide Sequence Number=SeqID_80448
atggccacggtaacactagaggtgaaaggagagacacagctgaataacctggctgagaagctggcaacagctggtgtccggcacaaggacggcttcctgacggtgactaccgcgactacctccgactacagggccgactaccgcgactacagggccgactaccgcgttgctgccgaggggaagagatctggagaccacgtcggcgctagatactcgagaactgaagagaggaagaggcgttgggggattacctcgatggctagataa

SEQ ID NO: 37074 - DNA, 276 bp, Zea mays
  Peptide Sequence Number=SeqID_80449
atggccttgctagatcctcccaagcgcctccagcccgaggtggcactcaacttggtgcgcaatctgctcggatggggcggccatcattgcctacctccgcaggatgtccgtgaaggcgacgctccttcccatttcttcctccagcattcggggggaagaatgttcaccagcctcgtgaaggtggacagcgggctgagccgcggctccatccctcgtgcccccaactccttggggtgggaagcgagccgtgctgcggctccatctctttggctctga

SEQ ID NO: 37075 - DNA, 156 bp, Zea mays
  Peptide Sequence Number=SeqID_80450
atgtccatagaagagaggaagataagtatgataggcaagagtactgcgctcaatccaaatacagaggaatttgttcttcgtcccttagatctgttagtgattattcctataagtgaacgccaaaagggtctaggacaatggattgtcattgactga

SEQ ID NO: 37076 - DNA, 417 bp, Zea mays
  Peptide Sequence Number=SeqID_80451
atggccgtcacctttaagaacaagatcacactcagcccaggggctatgttccgctttggaaccatctcatgcacagcggacatagaagggaccctacaccgcgtagcggatccacccgagaagaaaccttcctcgggaatcctaagagaagccaaagcaagactgtggacatcgccccaactcacatctcgggggaagatgtggaggaacctccccatcatgatgcccggtgacaaagaaacagacgccgaaatgtgcggcgacatcatgaagccggggaacgggatctggcgtagcccgtgtcttgggactaagcctcagaagtgggagaaactcctgacgaatgagtacactgagaaagacgtaactcccgccgctttgatcaccgataggctcaggatcgggagcgagagctag

SEQ ID NO: 37077 - DNA, 615 bp, Zea mays
  Peptide Sequence Number=SeqID_80452
atgcccgatgaagtgtttgaagtctctgcagttccaaagggtgtggcgcatgtccttgtgatacggacactgggagtcgaggatttcatccagtgtccgcactcctccgtgagatgccccacgggctcgagcggtaggtggcccgatagtgtgcacctcctcacgaggccttttttcccagtgcttttctggatgctggtttgtatcctgccatgtgtcgaggcaggtgtcggagccactacagcgcatcatgtcccaagacaattggtcctgcttaggctcattcttgtcgacgttggaggccttgaagttaggaggccattggatggcccggagacggggagtaagtgcagaaactccgcatgtatcctcctgccgatgtttgtgccgtcggtcccggggagaggagttggtagtaagccgtctcgaccgtcccctgaatggaccactagtcgaagctaccgccgactcaattcgggtggcaccacttcgcgccggtacaccgttatctcggtcatactcctctcagcgcctcatctcattttcatgccgtcggtcgcgcaaagcgctgatggtgcttcgtgcgtctcgttggccgttaatggcgtgacgtag

SEQ ID NO: 37078 - DNA, 1272 bp, Zea mays
  Peptide Sequence Number=SeqID_80453
atggcgatcccgccacccagctcggccgccatggccggctcggccgcccccgcgccctgccccgtgcccgcccggctcggccgcccccgtgcccgcccggctcggccgcccccgtgcccgcccggctcggccgcccccatggccgcccggcctcggtcgcccctggccggttcaaccgcccccgtggccgagaacgatccggttgaagagcccgaggaactcgcaggagaagcccctgagcagcagtcggtggttatgagattgatggttttggttatgactatgatgctggttgtcagcattgcaaccactgctcaggcgaagctgaagctgtggaaggagacttccaggagttccaagattacgacgagttctaggtgtgggttagcggcaacccccagtcggctgcctgtgaaggccgcggttatctacgtttctttttcgcactttgatttattgaaagaactatatggacgtctcagacgtatgatgcgccccctgcaccaccactgggcgcccccagcttctggaatagctgctggaggagacccagacgacggagatggcgacgacagctcgagccacgacaccgacttctctgctaaccctgagccggaaggatgggttgctcgacccatcactcgcgacgctgctcgcgggtgtcacttccacgatgcgctcgacaccctgctacgtcgggcatttaaccggcatacttggtccgtcgagtatcgctgtgtggtctaccagcacagtcgcggggtctacccggaccgctgggaggcaacctgcttggtgcgctgcccggagaacagtctccagggtgcagaggcctgttcagagcactattctatctctgagcgggactcagctgaggtagccatgcaagatgctgcacggcgtgcgctttcgcactactgctcggttttcggtggggcagctgacggtcttgacctgaagtattacccccgccgtccatctggcagcacaagaggcgtgattgtctcacctgtcggtgagggcaatcctaggttgagcagcacagtcaacctagccgccgtgctaaacacggagctggaccatgcattagatgagctgagtagggctcgtgctgagatcgccctgctgcggactgagcgcgtggaacgtcgtcacctggatggtggttcccccgctcccgtcgggactcagcacccgtaccgctcacctcagcgtggacaccagtcttatggcaatcccgactgcaagaccaagataactctagaaccatag

SEQ ID NO: 37079 - DNA, 375 bp, Zea mays
  Peptide Sequence Number=SeqID_80454
atggctgtgatgggttcaacatcggacaagatgtacctctgccagaacaggattgggccattgattgggccatcaactcgcgttcgatcgattgggaccgcgaagcaaaagctcgagctcgtgcggcagagcttagccctcgacaacctgcaagtgtactgtaatactttacatgaagaagtacatgtactgtatgctcgactgcacccggacgtgccttctgacgttgctgcaatgggagccagaccatcaggaacaacaaatgaaggacctgatggggagttggacctttttaggccccctccttccatgaaccttgctgatgaacggtctcccgcagcaggaaatgaagcaacaaaggatgacgaagactag

SEQ ID NO: 37080 - DNA, 441 bp, Zea mays
  Peptide Sequence Number=SeqID_80455
atggggtccctcgcggtgcccgcggcggaagaaagggcggaggggcttaccggcggtgacattgctcccgtgaggtggccgagggcgggggagctcgtcggcggcgaggagtccgacctatccagggcgaaattgaccaatcaaacgggcgggcgaccgaagtccggcgagggtgatctcgggcttccggtgaagttctaccgggtccgagggcttggagagcttcacgggcctatggcggagctaaccgaagcgctggcacgacttgggggtgactggagtgggctggccacggtgcccgaagctctggcggcaatggcgggcggaaaagagctcgccggagctgaggggtggctagccggtgatgagatatggagcccggaaatccggtttgtctccctgctcaaatccgaggcaaatccagggttttgtcgtgtctag

SEQ ID NO: 37081 - DNA, 225 bp, Zea mays
  Peptide Sequence Number=SeqID_80456
atggaaggaaagccgtcgcgagaaaggaagtcagaactgaaacgagtgtctcctccactggcaggggtgggtgaattcatctgcggaagggaatcaaagtacaagcggtcaagcagtctcattagctgcgataagcagatgattcgaatcgagtttttatccttgcaaggcctcaccgccttggcatacaatgctccactgaccccgactaccgccgtgcagtga

SEQ ID NO: 37082 - DNA, 367 bp, Zea mays
  Peptide Sequence Number=SeqID_80457
atgatcattttaaagagaatcaatgaagaggctgatgaagtcgaagcatacattgtgaaagcattgcttgctcagcaggacaaggagtgcatatttgttgtttgcctggaaggggcttttggtgcttatgtcaacaaaaaaggtcgccataacaagaattttggtcgcacagttatatggaaacattttcagggtcgtgctggttttgcaacctgtccattattgcttgatgagatagcaaatgtccgagaacggttgctcgacttcttcatgaatgaggtgtcaatccggattgtggcgcccgacgaggtgggggcgtggagagtggcagggaatcctcatcgttgtactgaagcttacatcaaag

SEQ ID NO: 37083 - DNA, 792 bp, Zea mays
  Peptide Sequence Number=SeqID_80458
atggccgaggccgaacctgagctcctgggtcgggcgaggcggagcccgagtccgagccctgggtcgggcggagcggagttcgccgtcttccggggccttagcccgagtccgagccctgggtcgggcggagcggagttcgccatcttccggggccttagcccgagtccgagccctgggtcgggcggagcggagttcgccgtcttccggggccttagcccgagtccgaggcctgggtcgggcggagcggagttcgccgtcttccggggccttagcccgagtccgagccctgggtcgggcggagcttcctatggcgcttttggccaagcctggctgcccctttatgctgatgggggttaccagctgagaattaggcgtcttgaggaactcaagaaagagtggtggccagactttgtggagtgggttacctctgatgagtatattgctctaggagaaaagggcaagcaaagccaaagcatgaataagttccgacaaaaactaggtcggcgaagctatactgtacaaaagagaaaatgggcaaaggaagatgcacaagcattaaccgagggtaaatctattccatttcaagacatgccagatggtcgtcataaggattgggcaagggcgaggaatccttctggcgatgtagatctaaatgaaaagtcagtagctgggatgggtcttgctcaaggtgatggccctcgtaagaagaaacgtagaacaacgaaagagtatgtcaagaggattgtggatgagtacgaggccaagtttgagaaactgacagccctgtgttag

SEQ ID NO: 37084 - DNA, 774 bp, Zea mays
  Peptide Sequence Number=SeqID_80459
atgtacgcagctcgctctgccaaggttggtttgcccattggggaggagtgcggtggtgatgagaatgatggttttggttatgactatggtacttgtaagtggtattctttccgtttggaaaggcaggagatagagtctatgaggagctgctcccctgtgctcctgctggaggcgccccctgcaccaccactgagcgcctcagctgctggagtagctgctggaggagacccagacgatggaggcggtgacagcagcttgagcttcagcaccaacctttcagaggagcaggagttggaaggatgggttgctcgacccatcactcgtgacgctgctcgcgggtgtcactcccatgatgcgctcgacaccttgctatgccaggcactcaaccgacgtacctggtctatcgagtatcgttgtgtggtcttccagcatagtcgcggggtttacccggaccgttgggaggcgacctgcttggtgcgccgtccggagaacagtctccggggtgcggaggtctgctcggagcactattctatctctgagcgggactcagctgaggcggctatgcaagatgctgcatggcgtgcgctttcgcactactgttcagtgctcggtgtggtagccgatggtctcaacctgaagttttacccccgccgtccatctggcagcacaggaggcgtggttgtctcacctgtcggtgaggacaatcctaggttgagcagcacagtcaacctagccgtcgtgctaaacacggagctggaccatgcgttagactag

SEQ ID NO: 37085 - DNA, 540 bp, Zea mays
  Peptide Sequence Number=SeqID_80460
atgaacgtaaatggaaatttgcagaatggaattgggattcagatgggtcaaattaaggcaatagaaatcaaggagaccgtggaaaaagggagaaataggaagagcgagaccgcagagaagaaaaggaacataaatcacggattcgtgggtatcctctgttggaatagtgaccccgtggcaaatccgccaagaacagagctccttcggaggaaggaccccgatggacacgagatggagaaggtcaggctcagaaacaacagacatatggttacctacgaaaggcaactggctgttggggtcgatagggggaatcacagcagcggacgaactcgaggctttccgcttgggcgccatctaaactccaccggcgagcagagcgggagtcgaattgcaaaagggcagagagggtctgagtgcaggaaagcaagaactagggcacggaaagcagaggcagccgaaggcgcagtacatatggggctttcccggagcagataccgtttccaaaaaagcgcccagtcatcacccggcgattacctctaa

SEQ ID NO: 37086 - DNA, 342 bp, Zea mays
  Peptide Sequence Number=SeqID_80461
atgggtaagagtaacaaacgcaagcacgagccgactcctccatcggaggacttcggcgactcggaatactcggaggaggagttctcctccgagtccgaggggtctccggctcccgtctcacccccggcgtcgtctgacgattcatacgactcccaggggattgccgcggaggtctggacttacatctgggccgtcgagcgctccgggctcgagggctcggatgagtcggagtactcctcggacgaggaggactcttcggactcgtccgaggagggcggcggcgatggcagagacaacgacaacgacgaaggcgatgatgacgacgcccgacgatggcggtga

SEQ ID NO: 37087 - DNA, 483 bp, Zea mays
  Peptide Sequence Number=SeqID_80462
atggaggacgagcaccacgagcaggaagtccacaaccaagtgcgtccatcgcctcatgtgcgaaatgaagaagaggaagagattttgatcgatatgaatgatgaattatatgaggagggggatcattgtggtcgaagccaagaggagggggatgatgatgatgatgcggaggaggaggaggagggggaggaattggagggcgatcatgtgtcaaaggctcagaagacaaatcgaggaagaaaaagattgaaaggtggtggtcagctgtctccttccaaagataaggcaaagagaggaaagcgtgttggttgctggaaatattttaaggagatccatgttcagtctaagaaggagtttggggttatggtgacaaaagccaagtgcaaattctattataaaagctatgcataccatccagggggcaacttcacagctaaaccgtcatttacagaagtgcacacagtttcagaacaaattggctaa

SEQ ID NO: 37088 - DNA, 123 bp, Zea mays
  Peptide Sequence Number=SeqID_80463
atggccttgctctccacaatggaaacatgctctgcttccaccctgaactggtgttgcctgactgctctgttgggtactggctttggaactgctgctgctgaggtggacgctggttctgcctga

SEQ ID NO: 37089 - DNA, 831 bp, Zea mays
  Peptide Sequence Number=SeqID_80464
atgcattgcgcccttccgccttttgagcccccggatggggtgctccagcgctgccttgctcttgctttcgttggaggagcgcggcctcgtggagatcggcacctttcagccatcgctcggcttcaaggattttcgtcgtgcagcccggctgcattccctcaccaatgggcagtttggtggggagatgcaagccgggctgcggcctccgccccgccctcagcttcaaggatcttcgtcatccttgctgaggcggagggagatctgagccggggttctaactcccgcatgggccggcaggccatctcctccttcagcattcaggggagaaggcacttaccgaccttgcggaggggtgaacttcggcaacgcagggccggtcggccgcaagcgtcgcgtctgttgcgccgtgcgcaccggtggaccgtccaagacgccgtacgccgcatgggcggcattcgtgttcttggattgtcttgtcctcactccggcacgacgcctccgtgcggaggtcggggcctgcccttccgcaaggacctgagtggggaactgccggtgcaggctggggcgtccgccattcgtcggtgtggcgctggcgcgcaggtggccgctgtcgtcggtgctgaggtggtggcagccggagaaggtttctccgccgacgagaccatcgacgccagctgcggtcgaacccccggctgtttggctttgatggcttgtcctcgcccttcgagtggagacgcgggcgagggcctcgtcacagcagcgttggccctgaggtcatcactgctgctgtttagccgcccgaagcgggggtcattgtcgctgctggtgtag

SEQ ID NO: 37090 - DNA, 600 bp, Zea mays
  Peptide Sequence Number=SeqID_80465
atgcgccccttcggctccgtccacatccggtggaccggcacaaaggaagcaggcccgcatgtcatggaccgggaaaggggacgttgtggaaaggatccttctcggcggaggaagcgagccccgagccctcctactgatcaggggttcaaaggctggcccctcgaaagggtttcgacagccgccccagagcgctcaggctccgtgcccactactgatcaggggttcgtaggctggcccctcgaaagggttcgacagccgcccagagcacacagagtgagggatgactctggcgccgctcgctccgctccgactgccgtgttagccaccccgggaacgactgacaacaagtcacgatcaaccaccgagttcagcctcgggcgcaacaggaagctccgcctcgcccgacctcatgctccggcctcgggaggaggtctccgcctcgcccgacctcaggctccaacctcgggaggaggtctccgcctcgcccgaccctcggactcggcctcgaccccagtctcgggaggaatcgcgtcctcgcccgacccccagcctcggcctcaagagaagtctccgcctcgaccgaccctaggctcggactga

SEQ ID NO: 37091 - DNA, 186 bp, Zea mays
  Peptide Sequence Number=SeqID_80466
atgatggagggctctttggtcattaggacatcctactactcagaggtggaaggattccctcatctcttgcggagttgtgcgcttcgcatggggatccgcaagaagccagagtacgtctggaaagaattgaaagttccctttggcccgggaacaggatctggatgtcgcctagaggggggtgaatag

SEQ ID NO: 37092 - DNA, 633 bp, Zea mays
  Peptide Sequence Number=SeqID_80467
atgggcccgggctggcacagcccagtggagcaggtcgtgcctgggccgcaagccaggcacgtgggccggcacggcacgacctactcccatatggcaagcccggtagagcccggcgtccctcaccgcctaatcccctcgccccctggccctagcgctcagcctctcactcgcactcgcactcgacatccctgctccctctctctccccgactcggcgattcggcgattcccctttggcgattggcgactcggctcctccgtcgcggcgccgccccgatccaacgacctcggcgcccttggctcccgtccccgatgtcggtcagttgttgatgcctcgtcttcctcctctggggtagatcgggcacgacgactacgtgcaccgttgagggacggtgctggagatcggtcgtccgcggtgaaggtcgccatggcggatgatgacaatgtcaatccggtcaccggcaacgacgaccttcgcgcgacagggcttgtcccagatgatgaagacgacatccaggctgatgctgctgctttgctcggtatcgatctaacctcggctcctgtcgatctaagttctaatccgactgaaagggaaataggcttacaccttttcctaaatgattttggtggttga

SEQ ID NO: 37093 - DNA, 414 bp, Zea mays
  Peptide Sequence Number=SeqID_80468
atggccggatctagctgccatctctggggaggcccgctcggagtcgagctcctgccgcagcccccacgcggcgtcctctgcggcctccttctccaacgcagccacgccgccgccagctccttggagagggagcaatctttaggggggcgagtagagccgcacctattgccgccaccgcacacggtgtcctccgaacggcggctccagcgcaggaatcgcggggaacagaggaggcccggagaggagaagcgggcgcccgcaggcgcggtgcgggaggtggcgggttcgcccgtggatgtgacgcggcgagaagaggaccccatcagcgcaggaataagcggggcgaggcagccgatgcggcgagaagaaccgaggccgccatgggcatcgggatcccgttcgtgggttggatag

SEQ ID NO: 37094 - DNA, 489 bp, Zea mays
  Peptide Sequence Number=SeqID_80469
atggcgagcgcgttgaggtggtcgccgccgctggcgagccgctggtgcagaggaagatgggggcgagggcctctctgctttggcacacatgttgaggtggccaccgttgttgtattagtacttatctgtgtaccacctgttcctgttgtgtgtgatgtttgtcgactcttccctgacacttggccccctgggatgcaggctcaatgtgtcgagtatttagtccgggaggccaagttgcgtgtccggaccccctggatcgcggctctagatactagggccctcgccgtagagtggtggagcgtgcaggcttatggactaggtcctgaccctgggctccctactatgcacgagccgttggccgcagtgtatgggcgccgggctacaaagtgcattttgggttgccgcttgacatctgagctcgccgatggagtcctcgtccttgcgctgcaattgctcctgcataggttcatcaaaaggttggacccatga

SEQ ID NO: 37095 - DNA, 690 bp, Zea mays
  Peptide Sequence Number=SeqID_80470
atgtcgttcaaatcattggagttcgttgtcaagttggggaaggagggccgaaaaattgagtacaaggaaccggtgttgctctcgctggagtgttcctgtactcgcagttcaaaaagtcaaaaccaaaggctacggctgcatgaagacaactccctgatgagaaaaacaaaaggaatatcctggttcctggatatgtgtccaacacgagtgcctaagtgtaaaaaggtggacaaagtacaaatcaaggataaagtgctggaaacagaaaaaatcgagttggagaagagatggctcgagcagccaaagactgctcaatctgggtgcaccggactgtccggtggtgcaccggacagtgtctggtgcgccaggctggctcgagcaaagtggctgctctcgggacttcgacggcggtgtacggctataattcaccgaactgtctggtggtgcaccggactgtccggtgggccgttcacaggcgaactcattgctcttgggaattcatcgtcgacgtacggctataattcaccggactgtccgtgtaagggcgagaggctccaagttgtggagattcctcgcaaacgggatattgaaaggcaaagcaaaacaccgtggtattcaagttggtctttggaccacttgagaggggttgattgcaaccctcgtccgttgggacgccacaacgtggagtag

SEQ ID NO: 37096 - DNA, 396 bp, Zea mays
  Peptide Sequence Number=SeqID_80471
atgtggccgcatttatttcagctgctcagatttgccactcttggagcttctaggggttgtcgcggtgtctcctcccatgatgagcttgatgttgtctgtgttgccgtcaccaacctctcttttgtcagtgtcaccactgtgcagtatgcaaagctcctgcctttggccttgatccacatgcttggaaatgttttcaccaatatgagtttgggtaaggtggctgtctccttcacccacaccatcaaggccatggagcccttcttctcggtcctcctctctatcctattcctaggagaggaaagttttcagtatttaagtggtgtttcacctttcactttcaccatggtgtctaggtatacgaaccacaaggctcaattctactttgaccatgagtaa

SEQ ID NO: 37097 - DNA, 228 bp, Zea mays
  Peptide Sequence Number=SeqID_80472
atgggtcatgatcttgtcttgtatatgctccaaaatggaagtgctggtgacgtgcttgtggatgtaatgcaattatgcaaaacattcataagattgcttgtgtacttgattagtatcaagggtgagacagagaacaaggacattgtgaaccaagatgaatccttcatggatattgacagtgcagagtgcagacttgaggaaccagcttggagtaatagaatatgctga

SEQ ID NO: 37098 - DNA, 882 bp, Zea mays
  Peptide Sequence Number=SeqID_80473
atggcctccagagaccacactggcttgacccgacaacttttggattttcaacatgatacaatagatgaggtaggtgcagaacacggtccattcatggatttgaaagcgagattcatggacttcaaacagagaaactatgttttttttgacattgctgtatctggaactatggacagggagaatttttcaaattaccaaaatcttgctgaacagcaaacaccaaagttcatggtgattgcttgtgctgactccagagtctgccctaccgctgttttggggtttcagcctggcgaagcatttacggttcgtaatgtggcgaatttggtaccaccatatgagcatgagggatcagagactagtgcagcactagagtttgctatcaatacactcgaggtagagaatgtactggtggtaggccacagtaggtgtgggggcatccaggcactaatgagcatgaaagatgattcaacgtccggcgcaaggttaagcacaagagctgcagctggaaatttgagttttgacatgcagtgcaaacattgtgaaaaggaatcaataaatagctctctgttgaacttgttaacatacccatggatagagaagagggtgaatgaaggtactttgaatctccacggaggctactacaacttcgttgattgcacatttgagaaatggacattattgtaccgtgaagggttggaaggtggaagcaaaagcgagtccctgtatcaaataactgtgtccattgcgatgcatggcactatggcactagcatgtcagcttgctgtagtattgcatactcacgggcaggaactctccactgtggaagcacaaagccacaatggagtgaggtgcgacgcaatgaacaatatggtggcaaagtga

SEQ ID NO: 37099 - DNA, 1044 bp, Zea mays
  Peptide Sequence Number=SeqID_80474
atggaggcaaccccccattcggtgcgctcctccgcctcagcccggatgacgaagatccttgaagctgagggtggggcggaggccgcagcccgacttgcttctccacaccaaactacccattgcaagagcaaggcgacgctggagcaccccatccgggggctcaaaagcacgggggctgggacccacacgtcatacgagctgatccgaagcacgaagaaggctaaccaccgcacgcgaggcatggaccgagaaaggggatgttgtggaaaggatccttctcggcgaaggaagcgggccccgagccctcctactgatcaggggttcgaaggctggcccctcgggagggtttcgacagccgccccagagcactcgtacctcaagcccattactgatcaggggttcgaaggctggccccctcggaagggttcgatagccgccccagagcgctcgggctccgtgcccactactgatcaggggttcataggctggcccctcggaagggaaaacagcgccgctcgctccgctccgactaccgtgtcagccaccccggcgacgactcacaacaagtcacgatcaaccaccgagttcagcctcgggcacaataggaagctccgcctcgctcgacctcatgctccggcctcgggaggatgtttccgcctcgcccgacctcaggctccggcctcgggaggaggtctccgcctcgcccgacccccggactcggcctcgaccccgatctcgggaggaatcgcgtcctcacccgatcccggcctcggcctcaagagaagtctccgcctcgaccgaccctgggctcggaccgaccgcgctaacaggggatacatcatttccctattcctagcttgctcaagctacaaggaacaagaccagcgtcccatctggcttaccccggcgatgggtaatgatggactcaagcgctcctccgacggccacgccatcacatgtacagggcccaagctctcccccaacggccacattggcatgtacacagggcttaggcactccactgccagacacattagcgcatag

SEQ ID NO: 37100 - DNA, 159 bp, Zea mays
  Peptide Sequence Number=SeqID_80475
atgtggcccctcctcctgcagctcggcgcgctgggcgccatctctagcggtggagaactgaccaccatggccaatcgtgatcaagcccctgacgtcctcgatccagttgtgtcgctgtcgaagcgctatgatcctccatggccaccagcagaggaatga

SEQ ID NO: 37101 - DNA, 729 bp, Zea mays
  Peptide Sequence Number=SeqID_80476
atggaccgggagtgctcaccgctggcagcaacgacgcggagcgggacgggcagaagccacagcgaggcggagcggaagcggcggcagcgcatcaacgcccacctcgccacgctccgcaccctcctccctgcggcgtcgcgggagctgaccgtacgtggcagttcatcatcgaactcgatagcgaacacggttacgtacgtgtgcgtgtacgaattaatcatgcagatggacaaggcggcgctgctaggggaggtggtgcggcacgtgcgggagctgcggggcgaggcggacgccgcggcggcgggcgcggcagtggccgtcccgggggaaggcgacgaggtcggcgtcgaggagggccaccagcaccgcttctgccacggcggggagagggccgccaggcgcgtcagggcgtgggtgtgctgcgccgaccgcccggggctcatgtccgagctgggccgcgccgtgcggtccgtcagcgcgagggccgtgcgcgcggagatagccaccgtcggcgggaggacgcggagcgtcctggagctggacgtcggcgggcggcaccacgatggcgagggaacgtcgacgtcgtcacggccagcgctgcaggcggcgctccgggccgtgctgctcagccgggaggagatgctcggcgccgagtgctacaagaggcagcgcttctcggcgcacctcgctagggtttacgacagtggcgccgtagaagtgactgactga

SEQ ID NO: 37102 - DNA, 327 bp, Zea mays
  Peptide Sequence Number=SeqID_80477
atgccgcggggggaggagtaccatgtcgtagctgccgtcgagggacatgaactcgagactcccgaagcagagcaccgtcccgggctgaagaggttgctgaagactccccatctggatctcaacgggaagcctgagcaggctaggaatagggaaatgatgtatcccctgttagcgcggtcggtccgagcccagggtcggtcgagacggagacttctcttgaggccgaggccggggtcggacgaggacgcgattcctcccgagaccgaggtcgaggccgagtccgggggtcggacgaggcggagacctcctcccgaggctggagcctga

SEQ ID NO: 37103 - DNA, 891 bp, Zea mays
  Peptide Sequence Number=SeqID_80478
atgacggtgtcgctgttcgggcaccatcggggccgcgtgatcctggccatccacgaggacacgcgcgtgtcgccgctgttcctcatcgagctgcccatgccgacgagtgtgctgcaccgggagatctcgtccagggtcgtcaagttggcgctggagagcgacactcgccgcagcgcgcaccgccgcctcgtagaggagtacatctgggccgtctactgcaacggtcgcaaggccagctacgccatccggaggaaggaggcctccaacgatgagcgccagaggaaggaggcctcctacgatgagtgccacgtgctgcgcctgctgcgcaccgtgtccatgggcgtcagcgtgctcccaccgcccgcccccgagaaggacgacggacccgacagcgagatcacgtatgtgcgcgcgcgcgttgagcgtgtcgtcgggtccaaggactcggaggtcttctacatgatcaacccagaggaaggtggaaacagcggcgacaacaatggtggaggaggaggaggcgcaccggagttaagcattttctttagtaaggatgaaatggggaacccgacgctgaactcgctaccttcgggaaaatggaggccgctccgctataattcaccggaccgtccggtgtgccagcggagcaacgactacttcgcgcgcaacgcatttaatgcgcgcctgcgcgcgcagaggccagagcacgcgcagcaggcgcaccggacagtctacaggacttgtccggtgcaccaccggacagcccagaggccccacaagtcagagctccaacggtcgaaccccaacggctggctgacgtggctggcgcaccggactgtccggtgcgccatgcgacagcagacttccaacggccacattttggtggggctataa

SEQ ID NO: 37104 - DNA, 939 bp, Zea mays
  Peptide Sequence Number=SeqID_80479
atggctaccaaagccaaatcaagctcctcgtcatgtctctccttcctgaaggacgcactgctccttccaaccaagaacgccaagctcttcgtccctgtcttcctcctggtaaccgctcccctcattcttctccagatcaccaatgtcttctacatccagccgcgcacagccgacatgctgcaccacatcaacgaggtcaagaacatggacccctcaagcgccgattacgccaagctcatggtggagatcatgaaggaagccaaggagcttgccatgatctccatcgcgctcctagtcatcacctttgcaggaagctttgctaaacagatcatagccttcttcgccacctccactacctacgccggtgaccgctactcgttccctgagctcttcaccaaggtgatcatgaaggggcgtcacctcaggggccctctcataaccgtcgccatggtgggcgtcctcaacgtcgcatgcgcgctcctcctcgccgcgctgctccagctcgcgatgcgccagttgggggtgctgtacacggcgatcctcttcgtgctcccgttcctcgcgttcctctacctcgacgtcgtcttctttgtcgccgtagccgcgtcggtggccgacgaggacagccgcggcgtgagcgcgctcaggctggcgtggcggctgatgacacgggtgtgcaggaaggaaggcttcgtgctggtcgtcgcggtccacctggtggcgatggttccgtccctgctctacgcggttgcgcttgcatgcttgaagaagaacatgcccatggggctggctctgttctccgtatacgcactgctctccggcttggtacagctcttctacttcgccggaattatggtgtactactacttagccatggagagcaaggaggtgatggcccatgactacgtcaacatccccaccgttgaagcaactgtgtga

SEQ ID NO: 37105 - DNA, 1452 bp, Zea mays
  Peptide Sequence Number=SeqID_80480
atggcaaccgggcaaataagctcgaccccaccatcgttcttcaatttcctcaaagaaggcctgctcctcccgagccacaaccggaggctcttcgcggctgtcttcacagttatcgccgcctccacctgtctactcctcgtcggcaacgacctcgtcgtccagcccctcgcagtcgagcttaatctcgacacaaaggcgctcaacagcaccgatttccgtagcccggacttacttccactcatccggaagacccaagctgacaccagggctctcttgctcaccagcacagcctattttctgtttggcgccgtcatcagatcagccatccagatcgtcgtcttctttgccgccgtctcgacatattccggtgagctgcacaccttcgggtcgctcctcggcagagtcaaggcgcaggtgaaaggccccgtgcttacgttcgccttcgtctgcgcactggagatcacctacgtcgcgctccttgtcgccatgtctactctggtcatggtcctcatgatcaagaaatactacggtttgttcttcgtggggtcgctgctcctcctgcctctcttcgtcttcctcgtgtacttctccttcctctgctccatgagtgtcgtcgtggcagtggccgagcccggctgctacggcgctggtgctcttgggagggcgtggcggctgctgaaggggaagcgcagacgggtcatgcttttcatttctgtcactggcgtgctcgccgcagccttgacccctatgtacactctggccaagagacgcgagcttactaacatggcagcagggttgctcctggagtttctgtacgtcatcttgatgtccgccttgcagctgtttgcgacctgcaccatggccgcgttctactacgagtgcaaggggagcaccgaggcatcggcggcggagtacgtcaagacgtgcaggagccagaaggccgtaaggagagaggtcaacggctcgacgctgctgtggacgccgacgccgaggaggtcggggaagaggcccttgcaaagctggaggcctgggttggggcgggagcaggggccacaacaaggagcactaggtggagatcaacacttgggagttgggggaccagctgtgcggcatggagacggcagccgcacggtgtaccctggggcagtcgccggcagaggctccaccttagtcggcggtggcaccgaaggcgaaggttccagcgagagcgcgtcacgcagagcctgccgcgccgtgtggatgtcggtctgcaccgcacctaccctggcgccgcacgtgctagttgtccccttccccgcacagggctacgcgctgccgctcctcgatttcgctggcctgctcgccgcgtggggcctccgcctcaccgtcgtcacctcgcccgccaacctcccgctgctctcgccactcctcgcggcgcaccccggcgccggggccgagctcgcttcttcttga

SEQ ID NO: 37106 - DNA, 270 bp, Zea mays
  Peptide Sequence Number=SeqID_80481
atggtgaaagcgctcgaccaacatggcggctcccgactctccccctccgacctcacctctctgcgcggcaaggagcacacagcaatggcggcgcccaggacttttcttacaaagtgggtattacaaacactacataccccactggatagtgtactcaaagagagttgcagcatgactagagggggctataatgcatcagacgtctctggtgcaactccattcaaaacactggatgccctaactcaaacggtcgacaatgtctacttctaa

SEQ ID NO: 37107 - DNA, 198 bp, Zea mays
  Peptide Sequence Number=SeqID_80482
atggcgtcggcgggcggttggggccactggctcagacggaatcgctcgccggagtccgtggtggcgcgctgggccgctaccgctgtggccggtgatctccacgcctcgacttccgacgagcaagccactgtggattctgaggttcagctggtagggatagctgagcaggagctcattgaaggcaagttgtgcccttga

SEQ ID NO: 37108 - DNA, 606 bp, Zea mays
  Peptide Sequence Number=SeqID_80483
atggaggcccaggcccacacgtcatgtaaccggcgcgtcggttactacgtgcgagaaaccgcaccaccactcgcgctagtaccgcgccttatcgactgcgaaaccggtgccgcgactcgaggagaccctgcgcatgacccgacagtgccaaccgagcacatcggtcatgggtcggtcagccgcgggagaaggcgtgacggtcgatacggccagaaatgggccggcagtaatggcggtggcaggcgggcggaagcagcattcaagtcgtcagcaggctcacgtcccctcctgggacaacgggagtgccctctcccacggcgtgaagacgacgcgcctgtgttccgtaccccgaacggctcgcgcacgcacaacggctgccccggaccaagaaaggggatactccgaaagggatccttctccgcgaaggaagcgggccccaagccacctactgataagaggttcgaaggctggcccctcggaagggttcaacagccgcctcagagcactcgggctccgcgcccactactggtcagaggttcgaaggctggcccctcggaagggttcaacggccgcctcaggtcactcgggctccgcgcccactactga

SEQ ID NO: 37109 - DNA, 513 bp, Zea mays
  Peptide Sequence Number=SeqID_80484
atggacatgatcctatacgaaaattggagtaacagctgctcaaatttggactgtctggtggctgaaactgaattgtattcagtccactgtaaactgaaattcagcacaagggtgtctagtttggagccctatggggatattttggctgtagaaaaatatcaaccaggaaacactctccactgcatgctgaacatgtgtagggacaccttgcccatattcagatctgagcacgccagccctctgcgtggtaaccattgtccacatcacagtggccaggggtactataccaaagtagtagagctatatctaaggaataactttggtaatgtgagcttggtttgttgctgtgtaaaaactggagaaaagttttgggtccttgtggtaattaatcccagaagaattaggagagaactcctaccagaaggagtgaagattcaacctgaagtggtgactgaagaggaatctactccagtggctgctgatcaagtggaggagccatctaactgggtttaa

SEQ ID NO: 37110 - DNA, 255 bp, Zea mays
  Peptide Sequence Number=SeqID_80485
atgcccgagatgcccggcgaggaagagaaactggggaaagggtgggtcccatgcgccagagaggaatggatcagctggcgcgcgcgcgactacgcgtgtagtgactggtggggcccgcgcgacggcgccttgcagcgcgattcaaagctgggctgcgcggagaaaggaattagttgggccgcgcgggagcaggtgtgggcacgatggctggaggccgggcccaatggcaggggcgtggtacggggatggtcctag

SEQ ID NO: 37111 - DNA, 2511 bp, Zea mays
  Peptide Sequence Number=SeqID_80486
atggcttccaacgacaacgatcgccgccccaccgacgacaaggcttccatcgccctcctgcgccgcatccgtgccggagagcacgtggacttcgtccatggcgtggacgtgtgcgatgctgctccagagattctcgtcgcgaacctagaaccggtgccgggctacagcagcgtctggtacctctactgtgccaagaaatacacgaacaagcgaggccagctcagcgggtacaggcagcgcgcgatcaccggtggtggcggcgcgtcctggcacccggagataggccgcaagaacgtccagggatccggtggcggcacgttctgcaccttcacctacggccgcaagcacaagacggaggagcgctccactagatcggtcgtcgtcgtcaatagaatgggctggaagatggtagagtacgatgacttggccgaggccgacgccgccagcaactacgtgctctgcaaagtgtatcgaacagctctcgcgaaagggaagtcatcgttgccgtcctcctcctcctccggccagaacgagaatgcctcctcgtccaagccgccgacggccaagaagaggaaggtctgtggcggtgaccaccccgaggcggcgccagccagcaagttgatccagcagcagcaagtcgaagagttaaacgtcgacgatatagacatcctggagaggttatcagacgtgttatcaggcgagccggtgccggagccaggaatgcagcagccaaccgacgccaggacggagcacgacggccggttcagcatcgtcgaagagttaaagatgttgccagacgagccggtggcggagccgggaatacaacatccaaccgacgccgggacggagcacgacggccggttcagcatcgtccaagagttaaagatgttgcgagatgagccggtggcggagccgagaatacagcagccaaccgacgccaggatgaagcacgacggccggttcagcatcgtcgaagggttaaagttgttgccagacgagccggtggcggagccgggaatacagcagcctaccgacgccgagacggagcacgggcacggcagcggctccagcttcagcatcagcatcgaagaagagttaaatgtcgacgactatgacatagacatcatggagatgatgctagacgagccggaccacccggaagcgacgccagccagcttgatccagcagcaagaagcagatgtgcaacagcacgtgcacgggcacggcgttggcttccacttcgagggaatgcagcagccaactaatgtcatcgagccggagcacgacgacggccgatccatccatcctacgtctggtgatccgttgttggctgcccaagccagcttcgacttcgagggaatgcagcagccaactacagtcgccgagacggagcacgacgtccggttcaaggtctgctgctcatcagagcacgggcacggcagcggctccagcttcagcatcagcatcgaagaagagttaaacgtcgacgactatgacatatacatcatggagatgatgccagacgagccggaccacccggaagtgacgccagccagcttgatccagcagcaagaagcagatgtgcaacagcacgggcacgggcacggcgttggcttccacttcgagggaatgcagcaggcaactaatgtcatcgagccggagcacgacgacggccaatccatccatcctacgtctggtgatccgttgttggctgcccaagccagcttcgacttcgagggaatgcagcagccaactacagtcaccgagacggagcaagacgtccggttcaaggtctgctgctcatcagagcacgggcacggcagcggctccagcttcagcatcgaagaagagttaaacgtcgacgactatgacatagacatcatggagatgatgccagacgagccggaccacccggaagcgacgccagctagcttgatccagcagcaagaagcagatgtgcaacagcacgggcacgggcacggtgttggcttccacttcgagggaatgcagcagccaactaatgtcaccgagccggagcacgacgacggccgatccatccatcctatgtttggtgatccgttgttggctgcccaagccagcttcgacttcgagggaatgcagcagccaactacagtcgccgagtcggagcatgacgacggccggtccgtccatccactgtctggtggtccggtgttggccgcccaaatcagctacgacttcgagggaatgcagcagccaactacagtcaccgagtcggagcacgacgacggccagtccgtccatccactatctggtggtccggcgttggccgcccaagtcagcttcgactttgagggaatgcagcagccaactacagtcgctgagccggagcacgacgacggccggtccatgtccatccagctacggagaatgtgcagctacacgccgagtggggtgcacacatctgcaaccaagatacagcgcagcgggcttcttcaaggacctgatgatgcacattctctgctcttttaa

SEQ ID NO: 37112 - DNA, 648 bp, Zea mays
  Peptide Sequence Number=SeqID_80487
atgaccgcgtcaaaaaagccgcctcagagcactcgggctccgcgcccactattgatcagaggttcgaaggctggcccctcggaagggttcgacaaccgcctcagagcactcgggctccgcgcccaccactggtcagaggttcgaaggctagcccctcggaagggttcgacagccgcctcgggccactcgggctccgcgcccactactgatcaggggttcataggctggcccccgaagggttcgacagccgcctcagagcacgcagagcgagggatgactctaggtacgtccgatacatggccgaggctcaggatacactcccgaggtaccctaggacatttccgagaccagcaggagcgattctgtaacggaatcccatcagagggaggcatcgagccctcggaccctatcaaacgggaccgggtcaaggctccgtccactcaagggacacaatcccgcctcgcccgagcccagcctcgggcaaaggcagccaacccaggaggattcacgtcttgcccgagggtcccctcaagcaacggacgcaccttcggctcgcccgaggcccaggcttcgcggagaagcaaccttggccagatcgccacgccgaccgatcgtatcgcaggagcatttaatgcaaggatcgactga

SEQ ID NO: 37113 - DNA, 174 bp, Zea mays
  Peptide Sequence Number=SeqID_80488
atggccatgatgggttcaacatcggaaaagatgtacctctgccagaaccccggtggtgagttgacatatgcaagggttaagtgctacatatgtcgtgtgattggagatcctcaggtgaggaagcagcaaatttttgttgcttttgtttcaaggtggtgcctgaaagtcgcctag

SEQ ID NO: 37114 - DNA, 408 bp, Zea mays
  Peptide Sequence Number=SeqID_80489
atggtgctgctcgccgccgcggcacgccgccaccaccgcctcgtcctccgcacccgccttctcgccaccacttcctccacataccctcctctccctcccgaccctgtcccagaccccgaccccatcacccccgtgccgtcccccgttcgcactccctcggatgagcagttcacggcgtgggtgacgcggctgcgcccgggctttaccgcgtccgatctcgccgcagctatcaccgtcgaggaggacccggacctcgcgctcgcgctcttccgatgggccgcgctgcgcccggggttccggcatgcgcccgaatcctacctcgccgtgctcaccgtggcctcgtctggccgtcgccccgccgcggccgaggccctcgtccacgacgtctttgcgggggcttgcgggtga

SEQ ID NO: 37115 - DNA, 198 bp, Zea mays
  Peptide Sequence Number=SeqID_80490
atggtggcggtagtgggagctgaggccaggaagcttgtgaatgacttgccgaagcaacagaagctgcagattgattacccacatattatgtgtggcccttgtcttcaccacagaataagcaatagagtttcttgggttgatccccatatcttccttcgaagccactgccgcctctaccccttggagctggtggcctga

SEQ ID NO: 37116 - DNA, 765 bp, Zea mays
  Peptide Sequence Number=SeqID_80491
atggagataggaaggggaggggctcaccatgggcggatggagaagaacgacatgggcgacacggcctccggcggacggcgtgctaagcgcggcaaggcgccaatggcaagaggagggcgcggaagggaggcgcgaggcgggcccggcggctgggcgaacggcgtgggcgagcgcctctgctcgcgcgcccacacgcagggtggcggctgtggctgggacacccacgctgctagggtttgggggcgctgggccacggcgagcgagtgggccaaggggaggtgggcctcgcgcaggctgccagggagggcgcggctgcggatgggccacggggaagggaggaaaggagccagttgggcttgcgctggggagtgggccaggggtgttacaggccggataggcggcacctttggcaggcgaagcaggcgacgcttcacctccgccataatgaccgcgtcaaaaaagggaccgagaaaggggatactcctaaagggatccttctccgcgaaggaagcgggccccgagccccctactgatcagaggttcgaaggctggcccctcagaagggttcgacagccgcctcagagcactcgggctccgagccctcctactaatcagaggttcgaaggctggcccctcggaagggttcgacagccgcctcagagcactcgggctccgcgtccaccactggtcagaggtttgaaggctggcccctcggatgggtccgacagccgcctcaggccactcgggctccgcgcccactactga

SEQ ID NO: 37117 - DNA, 597 bp, Zea mays
  Peptide Sequence Number=SeqID_80492
atggagggtctcatccctaagtttgaaacatgtggcttatatcagtttatgggacaacgcacatatttcaatgaaatggctgttaaacaattcttggctacctcagaaattgatattgaagcagaatctatcacttggatgactggcttcaagcgctattctgcttcctttgctgactttgccgctgcaaacagtctgaactatggcaccatttctgctgggctggatctttatactgaagataattttgaggattttgtgcagttttatgagccagccaggcttggtatacccaggaggccttttaagaatgagatagggtttctcaccaggccactcactccctttccagatgatgaggaagaccctggctatgagggtggagccgctcctaatgttgagggccagcagatgcctcctcctccacctcctcctcagcctcagcactattgggagcctgctccaggatactttgatccttattttcacaatctgcagcaagggcttgagactcacattgatactcgctttgagggcctaatgacacatgtggatcaccgcctcgatgacatgcagtctcgatacgaatcaagctga

SEQ ID NO: 37118 - DNA, 606 bp, Zea mays
  Peptide Sequence Number=SeqID_80493
atgtccatatatgagccccaattcggattcaaaattcacaatcagcaagtggacagaaattggaaaaatgagtatcaggccgcggaccgtccgcccatggaccgcggaccgtccgcagcatcaggcactggacagtccgatcagcctcgcagacagtctgaaatcatcagggcgcggaccgtccgccgccctagcgcggaccgtccgcgacagggaagtaaaaacggacagtggtcgcagacttgtcagttgcgctcattcgcttgttctctcgtgctctccactcgcccaatactctcctgtgtcgagtgtgcgcggacggtgaatggttttggtggtctccgcaagaaacttgcaggtcgcttcaaatcaaagcgtcctcgtggaggtgatgatgatgattatacaccgaccactgattcagaggcccaatcctcagctgggggcactgattctatggatactgaggaccttccccatgttcatcctgactatcccattgacatttctgggtggacctttccaaagcgcaggttctctatggctgagtactgctctagacggactgtgaaccagtatactctgccatctgatacaaatatctag

SEQ ID NO: 37119 - DNA, 1344 bp, Zea mays
  Peptide Sequence Number=SeqID_80494
atggagaagaaaactgctggtacaaacgcaaaacaacgcatctacatgttgggtcgatttcggaaagcagttaaatgggcatcacttttttcacaattatgttctgtaaaaggagattccaggacatctctagaagctgaggcatatgcttcatatatgaagggtgctttgttttttgagcaagacaagaatatagatgccgcaatgataaatttcaagaatacgagggctatatatgaggagcttgggaagtatggcagtatagaaaatcaacttttatgccgtcagcgcatcgacgaagtggagcctatgattgatttctgttcacataaactaggtggatcatatttgcaagcacatgaactcctggatactgctaatgatcttctcaaggcgaagatggaggctgtattgtctgagacaagatcacagcaggcagcttccatgactgagtttaaatggcttggtcgcacttttcctattacaaatgcaaagacccgtgtctctattttgaaagcccagcagcttgagagagacttgagtgctgcagccacagaatcagttgctgctgacaaaaagcttgctatatttgataaaatattttctgcataccatgatgctcggagctgcatccgcaatgacctggcttctgctggcaatgctgaggatataaaagatgacctgaatggtcttgacaaggctgttagtgctgttctaggattgagaactatagaacgtaaccagttacttgttagcattggtaaaagtaaattcacaaagcatcgagatgaaaaaaatgagcgaaccacaaagccagaagaacttgttcggctatatgatctgcttattcagaatgtaacggacttgacagatttagttagctctggaagaaacaaaaatgaagaagaaaactcttttattcatgagtatgagctgaaaggcttggctttccgagctgagagatgtttctttttggctaagtcatatagttcagcaggcaaaagagctgaagcatatgcattattctgccatgcccatactctcactggttctgcactgcaacagcattcaaacagtcatgacaaggctttaatacaagatctggagtttctatctaacaactgtagatcaaatagctgcatagaacatgcaacaggcattatggaggaggagattgttcctttaaaactttctaaaggagtctcaactatgtcacttgctgataataaaacaaagattggttgtgctatggtgtccaatttggaggttgatgccaccgttttttttgacttgtatatactattcagggtgcctctgggggtttcagttggtgccaccatttga

SEQ ID NO: 37120 - DNA, 1353 bp, Zea mays
  Peptide Sequence Number=SeqID_80495
atggctagcaacgacaacggtgcaatctggatccccaagacatccatctgtttcgggagtctggatttcgtcgtcaataaggaaggagagatgacaagggtcccggaaactctaactcatttgacgaatgacctacctgatgtagtcggacgtctcggcgacctctggctcgaccccctcaggaagagcatggacctcaagactcgccagaaaccacccatgccgaggtcgtggggggtattggaccccgtccgggactcattcctggacatcctcctatcagggccagaggacggattcacatccctgcccaacgaagcaagctgcaaccctggacatgagtgcctcacatcccacacgacgggggatcatttcccccgcacaagaagcctaggtggagccctcaccggtatcatgctcaacctgcttccccaagaatcaccgccaggccctcaagccaattcccaagaatcactgctaggcccaagcctttcactgagcagtcagtgccccacagcaagagaacaaggaagcccacggtcgagaatggggctatcgctccatgttgaagggcaacgacatgccatgacgataaacgaccgccgtcgcctggtctacggcgggggcgcgacgttgcatttccctcgggaaatgacggcttggtggcgatttgagcttgatgatcaccccagaggatttgttggtgacctgactcggaaattgtacgcggtcgcgagcaagcccaagaaaaataaattcaagggcaagaaagatgatgagaagaaagaaaagaagttcttcaagaagaaagaaggcaagcacgataggtttcacaaaaagaagaatgggaaagtatatattgttggtgattggctcaccgacattgaatcctcaagcgtctcttcttcaagtgaagaatatgatgaaaaggtcactgccatcgctggggatttctcttcaccaccaccatcatcatcttcatccactacacacctatggctcatggctaaaggtgaacagaaagtacaaaatggaattgtcattattgaagattgtgatggtgatgatgaatatgcttctcctacttatgatgaattagcggtcttgcttaagaatatactcaaatcattagaaagtccaaagctaaacgtgacaagaccagagggtttaggagagaaaatcccagctcaactgcccggaggcaagttcagctggtgtatggtcaaagaggtccacagctcaagtccagctcagctgcagctgaagaagctcaactcagctgaagtcaagttcagttggaaagctcagttgcagttgaagaagttcagctgcttttcagcaagaacactctag

SEQ ID NO: 37121 - DNA, 378 bp, Zea mays
  Peptide Sequence Number=SeqID_80496
gagaacaagtatctccttgatatgctagagagctatgaatcagcgattggtgagccgaacaccaaagctccatgtcgcattgctcaattcccacctcctttccaagcagttccatgcaatcctattgtgcttgacatggcttacaactcagttgagttcccaaaccttgagaaccaaaccctgaacaaacaccactggcaggaggcgctcgcattggcgtcgctcatcgacgacgagaagaagcttggcgactgccaattcgacctctggaagcagtactacgtggccgcatgcgtcactgtgttcggcaagctccggcgcagccgccgcttggacgcggtccagagcggctgcaccgcgctgtccatcttcaaatag

SEQ ID NO: 37122 - DNA, 420 bp, Zea mays
  Peptide Sequence Number=SeqID_80497
atggtgaaatttggcctgttctttttaaaagaaacacggcaacaccgctatgcatctgtgcataactggtcagctgctattcctgctgaggtgtggattctaatggtgagctcggtgcatctcagagaataccagtacgagtcgctggtggtgcaccgctttgaggagctcgcccaccgcttcgccggcgacgtgttcagttccgagcgtctctgtgcagccacctggtcggggcacgccgcagtaccgcacgcagcggcccacgaacgccacgcccacgccactcctctgcacaaggctaccgctcctcctggaccgatccttctgccccatcccgaggacacgatgatgagccagaacttgacgggcgctgatatgatcaggttgaggaaaagagtgatggtgatgtttggatactaa

SEQ ID NO: 37123 - DNA, 1845 bp, Zea mays
  Peptide Sequence Number=SeqID_80498
atgcctcttccatcaccgctctctacttctccttcgcctgcaagccagccagcctccattcgcgtggccgccaaaggcgccaaccgccggcgagctatgacaccatcggtctcctgcccggtcaagtgccgcccccacccctgccttgccccgcagccaccagcgccatcaccggagcttctcgccgctcgcggcgccccgatcgccggcgagctgcgggcgtgccggagccctccgtacttgcctctctcgcgctctgccgactccttggaactccgggcggcgtgccgcggcgctccgcctgccagccgagcccgtgctgccgtggcgctgggcggtgacggcccgtccgcggcgctgatagccggcgcacagtcgcgtcacgccatcttccgcgacgagctcgtgcggagagccttcactgccgccgaagcggctcaccgcggccaggtgcgcgcgagcggcgacccgtacctacaacactgcgtggagacagcggcgctgctcgcggagctgggcgccggccctgccgtcgttgctgccggcctgctgcacgacacggtcgacgacgcgggcctgggctacggtttcatctccgagcatttcggtgccggtgtcgccgaccttgtaaaaggggtttcaaatcttagtcatctgagcaaactggctcgtagaaacgatacagccagtagaattgatgaagctgacagattacgtatagtcttccttgcaatggaagatgcaagagctgtgctcattaagcttgctgacaggctacacaacatgaggactctggattctttgtccaagactaaacagcagagcgttgcaaaggaaacgttggagatatttgctcccttggcgaatcagttgggcatcttgaattggaaggaacaacttgaaaacctgtgcttcaagtatctttacccagaaaattttgatgaactgtcaacaaaacttatcgagatctataacatagatatgattgcagctgcaacaagacgacttgaacaagcccttcaggtgagaggactatcctattatgccatatatgggaggcacaagagcatgtacagcatctacagaaaaatggcaaggaagaagctggtcatggataaaatttatgatatacatggggtgcgtgttattctcgagaataaggctgattgttttgccacattagagattatccatcacctatggcctagaattcctggcaagttcaaagattatatcaacagccccaaacccaacaggtatcagtccctgcacacggttgttctcactgaacaaacgctgccactcgagatccaaattcgtacgagggacatgcatttgcaggcggagttcggaattgctgctcattggagatataaggaaggtgaacggagttgctgcacctctgtttctgaaattgttgagtgggtcagatgggttacatggcactgtcaaactctgaacacaggctatccttcatcacttgcatgtgatgcttcatcgaaggaaacgcacactatcccatctcactctgacgcctgtctgttgtcctactcaaaacaatgtgatcacaaagggcccgtacttgtaatacttctggagaatgaaaagatgtcagtgcaagaaatcccccaaaattggacgatactggacctactgaaaaggtcttcaaactatgggatgccgttgaggctgaggctgaactgccatgccgtccacaactggaaccaggagctaaaaatgggcgacgtgcttgaactgatcccttcgaccccatgcaaatccagaggtcacacgagggagctccaccagaagtttgatcaccgtctcgccgtttcccagtcctga

SEQ ID NO: 37124 - DNA, 429 bp, Zea mays
  Peptide Sequence Number=SeqID_80499
atgtacgacaagctctggcgcagctgccacttggacgcggtgcagagctgctgctccgcgctgtccatcgtcaagcgggggggacctcatggtcgtcgccaacgtcggcgactctcgggttgttctgggcaccgcattcgacgacgacaccatcacgtcgtccaactcatcgtccacctgaagcccaacctgccacgtaagttgctactgactggctatgaattcttgtgcgctgagacgatgaccgttgctgacgttcccagccaagagttatcagtactcggtatgtcgcgcgcgttcgacgactactatatcgaggactgtggcgtcatcttggcgccagaggtgacgcagaggaggaccgacaacaatgagcagttcgtcatcctcgccaccgttgaggtagcttttgtgccggcttgtctttaa

SEQ ID NO: 37125 - DNA, 2988 bp, Zea mays
  Peptide Sequence Number=SeqID_80500
atggttctgcctcgtcgaaccccagaactgctggaggccgatgaagcccaaagctttgtgcataagcttcagctcagtgtctcggggggccttcctcatgctgtgccagtgccaggcttgagaacagaagaacatgagctggttaaagctgttttccaggtgctgcaaggcttcgagacgtcctggttctattgggacagtgatgtgccttggtaccgtgagaaagcggggatatatgtggctcacttgtcactgacgggtcttaggtctttgttgagtccattcctgttcacggcaacatgcttaaagcaagtagagctttttgttgggaaggttaggatgcaacatcacaagattccgacgttggatgcgttcgctagctcggttgattcttggcttaagaggctccgcaaagcagctctgaaggaggaagaacagcaatttgtttcagtcaacaagactataactctgctgggattaactgattcattgtcaagtttacgttctggagcagaacatttgtctcaagttttgcatggagctgtgccagatggcttttgggattctggtgcacatatggcatctagtgaagttgcagttcatattcttgaccatctcttcaagaagttaaatgaaggtgaaccatttcatatgctgctagtgatatttactggaagtttattaccttatcttcaatgtcttgattcctggctatatgatggtatccttgatgacccttatgaagagatgttcttttatgcaaataatgcggttacaatagatcagccgtcattctgggaaatgagctatatgcttagagtaagaggttcaagagttgacagttcaacaactttaactgagagcgaatctatcaagaaaaaaggatcaagcaataaggaatctactactgcaggagcttgcttgaaagtgaacaatcaaggttgtgtgtatatattatgcccaacatttttgaaggatgttgcgagggccattgtatctgcgggaaaatcctttcaacttgtcgaacatgttcaagacgtacatcagattcaaactcacaaaagtacacatcggtccaatttgtatcaagatactaattgcagtggtcaacagaaattttggccagatatgtcaaatttaagaatccatgatggtcctccaagaaataaagatgctcttgaagtatccacaagtcagtttgggaatgattctcgtgaaatgggactcctaaccttgtctgagatcttcttgatatgcatatctggtctgttagaaaatggtgaccatgtatatgagtacttaagaacactgcatgctgataatgttccaaataacaatgcttttatggaaaatgagagcaacttgaaagaaacagagggtacatgcacagggaacatcattgagaagacttgggtaaagctcctaaaggatgctacatcaggaaggaaatgtaatggcatggaggagaccatacatgctgttatagataaggcaggatttgcctctggttgccccaaagatgcatcttccaatgtcgtagaaggggttttcactttatcttgttacgaaaacccagctatcactgcttgcagagaagtgctaatgaggaacccagcttcttggagtgaactgaatatatctgaaagttttcatctccctccactgaatgatgggaacatgcgaagagctatatttgctgatgggcattctgcaggaactagcactgattataagtttggtttccagtttgatgatctggaacatgtccgccaagaagatgacagaaggaccttggaggacctttacgcatttccaacccttcttccttgcgcaaaaaaagatagtacactagcatcgagagttttgaagtttattcagaatatgagcatgaaagatccccttcagccagtgggtatcatccaagaatgcctttccaaatgtataaagagacaggtcgatctcataggcaatcaaatcctgtgcaagctaatgggtgaatggagattaatggatgaactgtttgtgttacgtgctatttatttgctaggatcaggtgacatgttgcagcagtttctgataacaatttttgataagcttgatagagggaattcctgggatgacgactttgagttgaataatttattgcaggaatccataagaaactcagctgacaaaatgctcctgacagcaccagattctttggttgtttcattagcaaaatatgacacacacaatggtgaggaaggtatatcaacttccaaaaaaggtcgtgcacttggttttggcattgatgcccttgacatgctgaattttacatataaggtgtcttggcctcttgatctaattattaatacagaggcactgaagaagtataatcaggtaatgggattcttactgaaggtcaaacgagcaaagttcgttttggatgaaacacgaaagtggatgtggaaggccagaggcaggaccgcgcacaatttcaaacaacacctaatagtggcacagaagctcctccattttgtcgatgcatttcatcagtatgtcatggaccgagtttatcatagtgcatggactgagctttgtgatggcatgacggctgctaccacactggatgaagtcatggaagttcacgaggcatatctctcttctattcaacgacaatgctttgtggcctctgataagctgtgggccctcattgccagtcgagttaagactattcttggattggcactggacttccacaatgtagaacaaactctcagtaccggtgggacggcttcagctgtgaggacacgatgcgagatggaaatcgaccggattgagaagcaatttgatgagtgtgtcatatttctcctgaggatcctatctttcaagctcaatgtgggtcatttcccccatcttgccgatctagttacaaggatcaattacaatcactatttcatgtctgatagtgggagcttctctgctattcctgggtcccggccacggtag

SEQ ID NO: 37126 - DNA, 321 bp, Zea mays
  Peptide Sequence Number=SeqID_80501
atgtctagtcaacacggaccagactatgactggaggacctcacctattgatcctcaggttgtgtatgcaagtggtggaaaagctcatggaaggtacataatgtttgctaacgtcatcaactcgagccaggtgagggttcaatgtggaggttcgtcgaggctgggtgcacgaggtggacgcccccacaggggaggatggggtgacagacgagcggtgtgggggcgtgggagagacgccgaggttggggcaagcaccacgaactgggagatgtacagcttcgtccgcgggaggagatcaaccagcggtattgagagcacctag

SEQ ID NO: 37127 - DNA, 1419 bp, Zea mays
  Peptide Sequence Number=SeqID_80502
atgcaggtggcgtgcaaccgcaccgcggggacgcaccccttcgacttcgacgcatccagcatggaggcccaggcccacaggtcatgtaaccggcgcgccggatactacgtgcgaaaaactgcaccgccacttgcgccaatgccgcgccttctcgactgtggaaccggtgttgtgactcaaggcaaccatgcgcatggcccaacagtgccaaccgagcacgtcggtcatgggtcagtcagccgcgggaggaggcgcgacgatcgatatggccgaaagtgggccggcagtaatgggggcaacgggcgagcggaagcagcagtcaagtcgtttgcaggctcatgtcccctcctggagcagcaggggagccctctcccacggcgtgaagatgacgcgcccgtgttccgttcctcaaacggctcacgcaacggccgccccgcgagccacccgtcccgtcgcattaactttgcgccgcctcagaacactcgggctccgcgcccactactgatcaggggttcaaaggctggcccctcggaagggttcgacagtcgccccagagcacgcagagcgagggatgactctgggtacgtccgatacatggccgaggctcggggtcaaagcttcgtccactcaagggacgcgatctcgcctcgcccgagcccagcctcgggcaggaacaatactcctagacgaatccacgcctcgcccgaggacctcctcaagcaatgggcgcaccctcgactcgcccgaggcccagctcgggcaggcttcgctgtgaagcaaccttggccagatcgcctcaccaaccgaccatatcgcaggagcattcaatgcgaggatcgcctgacaccttatcctgacgcgcggtcctcagtcgacagggccgaagaaactctgcctcgcccgacctcagggctcggcccccgcctcggcctcggaaggtggtctccgcctagcctgaccccagggctcgacctcaacctcggcctcggaaggtggtctccgcctcgcccgaccccagggctcggccacaacctcggcctcggaaggtggtctccgcctcgtccgaccccagggctcggcctcaacctcgacctcggaaggaatcgcgtcctcgcccgaccccggcctcggcctcaggaggagtctccgcctcgcccgaccttgggctcggaccgaccacgccacagggggtacatcattgccctatccctagctagctcaggctacggggaacaagactggcgtcccatctggctcgccccgctgactgttggaacttcggactggttggtgcaccggacactgtccggtgcacaccggacagtctggtgccctttgccaaccgttggagcgggccacgtgtcgcccgtggatttggcggccgaccgttgtgctggcggccgttggctcaccggatag

SEQ ID NO: 37128 - DNA, 930 bp, Zea mays
  Peptide Sequence Number=SeqID_80503
atggtgaccaccagttcgatggtggggagaagcaagccgggttgcggcctctgccccgtcctcagcttcaaggatcttcatcatccttgctggggaggaggacgaggcgagccggagcctgccttcgcgtgggctggtgtcccgcttcttccttcggcatctgggggtggaaaccatcctccagctctgtggaggaggcgtcctccagccatgcgggggaaggcgaactgctgctgtctggccaggttgcaacattccgtcctctgtccgggtgactgtggccggccgcaccggagggtctcacaacacgtcgtatgtcgcgagggcggtactcgtgttctgagacggtcccgttctcgtttttgcggcgaggacgggagtgaggacctgtcagtgcgctttggggcggccgccgcttgctggtgcggtgttggtggacaggtggccactggagaaggtttctccgccgacggcaccgtcagtgccacctgcgctccgggcctccggctctttggctttaatggctggttctcgtcccccgcgaggggatgtgaacgagggccttccagaggcagcgtttgccctggggccattgctgctgctgtcttgccgtccgagacggaggtcgttgccgcgctgttggcgcagcagtcgccgacgagccaaccggagattgtcgtcccgcaggccctccgatgtggaggttattcatacccgcgggagtggaaccggagttccgtttgtaatggcacctttagtgccagtaaccctcggctgctctgcgatgagccggagccagaggcagcggtgtcagcgtggacagaggcggagtcggctcgagaagaagcttcgttggcctgggagcacgtggcctcccaggccgaggaggtgcagcagcagcggctggagcttggccaggtcgtccgctag

SEQ ID NO: 37129 - DNA, 501 bp, Zea mays
  Peptide Sequence Number=SeqID_80504
atggggaaaaatccccgccaacagcaaataaatatatggtcagtgaagaaatcaactgcacgaacaagttaccgggatgaagccgatctgttgttgctggaggaagccgaagccgagcagcactgcagcagccagcaggtggccgtgggcgcgtggccggctggctgcatcgtccgcgtcaccgcctggaagcaggcagcagcagggagcaccggcaccgaagcaggcagcgcagcagcacactgcagcctgcggggcgagcgaccgtcggcaccatggcaggaaacggaaatggggagcacgagcactgcagggagcggaaacggggagcagccgagcagggctgcacgacgtggagggaggtacggagccgagcgcccaagcgcgctgcgtctgcgtgcctgcggctgcgggcggcggcggaagcggaaaacggggcgcagagtcgcacggaagcaggaagctaggtttatcgacttagcggtgttcgggccgggctga

SEQ ID NO: 37130 - DNA, 1638 bp, Zea mays
  Peptide Sequence Number=SeqID_80505
atgaacaatgagagagaaagccaagaaccggcagccgccacgacctcggattggctcgatgagtccatcgccttcctagccgccaacctcgacctcggctttaacgactatggctggccgtcggcatcggaagcgcaggagcggcacgacgacgtccgcagcatgatcgtggagacgctagcacctactgctacaaccctgcaccagccaagcctgaaccttgatattagcgttgcgtcgtcgtcgtcaccgatgacctcgcagcaggagtttgggcagcccaagaaacgcaaatcttctggaaacagcagcagccagcgaccccatgttggcggcggcggtcagcaagaaaagggcggagcgagctgcgccaggccgaagccgggcaagaagggcagtggcaagggcgccgcggcaactgtggacagggaggcgaggtgggcggagcagctgttgaacccgtgcgcggccgccatcgaagcgggcaacctgccgcgcacgcagcacctgctgtacgtgctcggcgagctggcctccttctccggcgaccccaaccaccgcctggccgcgcacgggctgcgcgccctcacgcgacgcctcccgcacgccacgggccaagcggctctggcgaccgtgaaggtgcccccttgcgagtgcccgacgtcggtgttctccggcgtcgacccgcggctgttccgagcctcgctcatcaggttcaacgaggtcagcccatggttcgccgtcccgaacgcgctcgccaactccgcgattgcgcaggcggcgtcgaggaagaagggcgcggtggccgagccccgtcaggttcacgtcgtggacatcggcgtctcgcacggcgtccagtggccgacgctgctcgaggcgctcacccgcgtgccgcggggctccacgccgccctccgtccgcctcacgctcgtcggtcccacggctacaccacccgtgcccttctccgcatcgcctccaggctacgactgctcgccgcagctgctccggtacgccaagtccatcgacctcgacctcgccatcgtccatgcgccatgtttggacaccttgcgcggcactctcacccccggcgagaccctcgtcgtctgcctccagttccggctcggcctcaccaccgccgacgatcaagcagctatattccgaaaggtcagggacctaaacccggagctaatggtcctcactgagctagacggcggtcgccgcaacgatgacagcgcaaccagcgagttcgcggcgaggctggagctgctttggagattccttgactcgacggcggcggcgttcaaggggatggacgcgtatgagaggcgggtgatggaagcggaggccgggacagcattggcgctcacgccgcggtgcggagcgaccgtggacggggggagggaggcgtggcgagcgcgtttggccgcggcggggttcgaggaagcggcgttcgggggcgaggcggtggagacagcgaaggcgctgctgaggaagtacgatggcgggtgggagctggtgccaccgtctccgtccgcggcggcagcggtggggctccggtgggagggtcagcccgtgtcattctcatccatgtggcggccggcgcaggccagcccggtgctgattgggccttgcacataa

SEQ ID NO: 37131 - DNA, 507 bp, Zea mays
  Peptide Sequence Number=SeqID_80506
atgtcgattaacggtggtatcaagtcgctggaagaggccaaagcacacctgcaacatatggatggcgtgatggtcgggcgcgaggcgtatcagaatccgggtattctggcggcggcagaccgggagatctttggttcctcggataccgatgccgatccggtggcggtagtgcgcgccatgtatccgtacattgagcgtgaactcagccaggggacgtatctcggccatattacccgcaagagatttcatatttgggagagcatcatgctggaactactttttgtgattggcttttttgtcatgctgatggtcaccggcgtttcgttgctgggcattatcgccgcgctggttgtggcgacggccattatgttcctcggcggtatgctggcattgatgattaagttgctgccgtggttactactggcgattgcggtggtgtgggttattaaggcgattaaagcaccaaaagtgccgaaatatcagcgttatgaccgctggcgttactaa

SEQ ID NO: 37132 - DNA, 168 bp, Zea mays
  Peptide Sequence Number=SeqID_80507
atggagagtcatgatctccgggcggaatgggaatcacggcttgtgggtaaaagacatcgtggtacaggtggttatgagattgatggttttggttatgattatgatgctggcgaagatgaagctgtggaaggagacttccaggagttccaagactacgacgagttctag

SEQ ID NO: 37133 - DNA, 348 bp, Zea mays
  Peptide Sequence Number=SeqID_80508
atgaagctgtggaaggagacttccaggagttccaagactacgacgagttctaggcgtgggttagcggcaacccccagtcggctgcctgtgaaggccgcgtttatctacgtttcttttccgcactttgatttatttgggcaaacagatatatccgcagatatccgttacccgtgctgttttttatttgtagcgggtaacggttgccacttctcacccaagatcactaaggtgatgtccaagcaaccaaacgagttgattcatatgaacacagttgcttcagctcaggcaaaggatgagagttgttctcatgctcaaggtcacaaatttcagacatccacttcctcctaa

SEQ ID NO: 37134 - DNA, 1074 bp, Zea mays
  Peptide Sequence Number=SeqID_80509
atgcctactttgggccagcagctggtgcgaagtccagccttctctttggatctgcgcggccgagacccgaccatgttcattcgtgaagtggaggacggggcagtgagaattatggggcggtatgcgccgaggacggagggtctacggagttgggatatccgagggtccaatgttcgcttgaatcgggtcttcgaattaaaccgtttgccatacagtggttatcctagagatgacgctgctgcggctgctgaccgctgcgggaaaaaactagtggccgtggctgaggaaggcccttctcaggaggctgccccaaccacgaagaagagaaaaataggtcttaaacgagatcgtggtggtgcagggtcagatgtgggacagcttgctgtccttatggctccggtggtggccacttcgccgacggcggcggttgacgcgaagggtgcttcgcaggacccatgggccgccttctgcgtgagcgacgcgatttcgtcggccaccgccgctaaggatgtggcgggctctgtgtcccatcagctgaggcatgcgtcgcagcagctgaagcatgcggccgacttcgccgaccatgttgcgtccggtgctttgactttggagtttgctgccgaaattgagcgtctccgggcgcagcatacggatgcagttcgggagaagtcggctgcggaaaacaaaagccgcaagctggcggagaggttggctgctgcggaggctgagagggtggatctccggcgtcagctggtggaggagaggagggacacggacaaggccatgccgatgcgcaggctgctcaggcggaggccaaacttgcgcgggctgaggccagtctcgcccgccaacgcgtcgaggagctggaggcaaggctcaacagcctgcgcaatcgcgtggacaaaactgaggcgtcgacgcgcacggaggtcgagcagacgcatgcgcagctcatggatatgtagcgggagctgggtgcgcggaccgccgctttcgaagtgcccggccaagaggtgggcctccgcttcctcgagtggctacaggaggagttgggggtgctcccgaccatcgtga

SEQ ID NO: 37135 - DNA, 252 bp, Zea mays
  Peptide Sequence Number=SeqID_80510
atgttgtcacccatcgatagggacgacgactatgctgccgatgccgaagccgcggccccttgcgacgcgctcgacaatgtcatcgtcctcaagggtggcaataagagctcaaatgatggtgggccaactcaaaaggcatcaggacccatgacaatgttggaacttgcgctcctgagcaagttgatccaacgggggagtggaaagagtgcaaacaatgtttatcgtgggatcgcaattgctctgttcatctag

SEQ ID NO: 37136 - DNA, 351 bp, Zea mays
  Peptide Sequence Number=SeqID_80511
atgaagcatagacccaacactgtcaaactgtttgccattatcgactgtgagctcggacgggactccgaaccggcaaataatgttttgctagaaaaacttctgggcagtcttcgacattattgtggatactgccctagcctcgatccacttggtaaaatattcgacgatgacgaaggtgaacctgagctagccctcaataagtacgaagtcctggcttcggtgcttgaggcgcttggcctcgttgacgtcacttgggtgaccctctggattatggacggctggtgtgccaatgacatgctagaacacgtcggagggcaaggcttcgcctctagccgctgctttggccaatga

SEQ ID NO: 37137 - DNA, 126 bp, Zea mays
  Peptide Sequence Number=SeqID_80512
atgagcaacccgtggttcctgagtgtgttgtcgaagatcttcctgagcaacaacgtggtgaaggcaaaaggagatgctggcaacatggaggactttgaggagtttcaggactacgatgagttctag

SEQ ID NO: 37138 - DNA, 1722 bp, Zea mays
  Peptide Sequence Number=SeqID_80513
atggcgtcgtaccgggaaggcaagccacgccgctcggacgagatgacttacctggcaccttcatggctgcgcggcaacgcgggatctggtctgtggcgatgtttgtttcaattcatggcccacgccgtcgccaccgacaaccgttcgtcgcgtcaagcctgcccgctcggtgtggctgatgacaaacaaacaaactcttgtagcacgtcgacagccagggcggtgtgcaggacggggtgcacgggcgcggccctcatccagcagggtggtactggactgtacactgtactgtggagtgagtgcatcagcggtctcgagccacactgtgagccactgattatataccaggccactgattgttacgctgacacgcatgcatcccgcatccctgctccaagagagatgggtctcgccggcggcattgtccggagggtcttctccaagagcccttgctcgtccgccggcagccgtggccacagtgtacgtgctttctcttacatcgcatgttcttcacttgttggcgttttcactgtgtccgcggggcacgtcgttcgttctagtacaactgacgcttgcatgagcacggccgattcgcaggagaaggggtctgctgaacacaggaggagatggggctcgctacggctgtacctctgcggcgaggagatgaacgcggccgcagaggaggaggaggacggggacggcgacacggtgtccgtcaagagcttcgagacctgctgcgtgatgccggaggaggcgcacgtcgtcgtcccggtgcatcatcgtctgatgagcgccgcacacgatggcaacgaccagagcagggtccctggtggtgccgatgaagagggagcggcgacgctcatccagtccgcgttcagagggttcatgtcgaggaggcagctgcaggaggcgagggcgaggacgaggacgaggacgcgcggccgagagccagaaccggacggcgccaaggaccaagagcccagcagccccacctgggggccgtccgtcgcgacgtcggtgctggtccaggtaggcgacgagtcgtcgtcgctgggcaacctccggctccggctaagcgaggagagcgcgtcggtgcagcagcagcggtccagcagccagaggtcgtcgtcgcgcccgccgccagcgttccgagtcaaggaggagtgggacgacagcacggtgagctccaacgtgtccaggatgaggatccagaacaggatcgaggccaccacgcggcgcgagcgagcgctcgcctacgcgttctcgcagcagggggagttcaacgtggggtggagctggctggagcggtggatggcgacgcggcaggcggagcccgcggacgactgcgcgagccgcaacgcggacacgggctccgccacggggcggcgggtggtggtcgtcaggaggcggagcgacctcgccgtcgaggagaaggagagctgcgcctccaacgacgtctcggtcgtcagcttcgacgcctcctccggcctcgcctgccataggcccacgggcaacaagagccggctcaagggcggccggagcttgccgcgccggaagcaggtggcggcgtcggcgtcggcgtcggaccaccgcttccaggaaagatcacacaaggtgagcaagaagggacaccagcgagtggagcaggagccgcacaaggaccgattcgacgccgtcgccgccctggacgacgacgcttgccagcctcccacggattactga

SEQ ID NO: 37139 - DNA, 903 bp, Zea mays
  Peptide Sequence Number=SeqID_80514
atgtccattacatttgttaacggcttatggaaatctgtcgaggcccccgaagtcttttcatctttgagtcggttcccccttctgccatcgcgccgaagcttccctgcgcacagcttcggctacactcgaccttcgtctggttcaggcttcgtcctggccgtgctccatattcataattctggatccgaaaatacctgttcacataatccacttggaaaacattgtcaaatcatgtttttgaggaccttcggaggacgaaggcccccaacagccggcgatccatcagcagctaccatggatgctccttcttcatcggccgccatgcccgctggcgggtctgctgcatctgcccccattgcgcaggatgacgctggtgccgaggtggcgtcatcgggcccccaggattcgcctgtcaccgtcgaggcaacactcccgggttcccaagtttcagtcgggggtccgaaagcggcggtgccgccagcagctgttgcagaccttccaacggcgataccgccggatgcaccaccggaggtaggcgtgggggctcgtccagctctgtcccccagccaactccggagggtccggaggttattcttgggcgtccactccagcctggagcgtgaggacttcaaggaggacatccggaaggtgtctgaccgagaggaggaggtgacccgaaaggaaagagtgctggagaaacaacgggacaagcaagctgcggctgaggtgaagctgaagaagctgcaagaggagatgtgggcaaggcaaaacaagctgctagatgagcttgagctcaaggacgaggagaaagtgaagcgtctggaagggaaggtgcgggcgctggaggggcaggtccgccagttccaggctgcacaggcgacgcagtcggccccgggcccctag

SEQ ID NO: 37140 - DNA, 930 bp, Zea mays
  Peptide Sequence Number=SeqID_80515
atgaacgcgctctctcgcgaagggtgccggcactatgaggtcttcgaccaggctgatgaggatttcgagcgagatatctacaaggttgaggaccctatagtgaaggaatccgccggagccatctacgaccggatgtggggtccgcacggtcgagaggtggtcagggagcgggccgagacggcgagggctcaggcggcgcgtggcgagagggtggatgatttcggggcgttgaacagcgcgctgcctgacccggagtcgaacccggcggaagccgtgcccgaggccgccctggagccgcccccggaaactgccgaaggcgctcctgacgtccctgcagccgctgcggccggcggaggcccgcccccagagacagccgaaggcgcttctgatgcccccgcagccgctgcgccgagggctgagggtcctgcgacggtggcggcggaggcaccagcggaggcaacagcggaggctcccgcgacggctgggtcttcgcaggttcaagaatttcggcctgcgcacgcaaccgccactactaactttttggcggcttcgaccgtggatgatggtaataaatttgatgggtctgcatctgagttttttgattttactgactctgggagctcggttgagtggactgaggagtcgtcggaggaggacttggactactttgcggccttggatgtggcagcggcggaggcttcaccgcacgctgcagacacagaagatgtgcctggtccgagtaccgggcgccggcggcgaagggcggttgcgaagcgtagattgtgtgcccccgcacatttggctacgcttgcgaaggcgttgcgtacttggtcaggtgtatttgttatgcttcatccggctgtgccctcgggcactgctgcgcggatggtctttgcagtagactttggtttttcgcacttgctgtgctag

SEQ ID NO: 37141 - DNA, 552 bp, Zea mays
  Peptide Sequence Number=SeqID_80516
atggtgatcaaggtaaagttagaaaggaatcttcatatgttggtggatttgtttgagcctaaaatgggtctatatgacaattcgggaacattccttggtgctaatgaagactcaactagaacccttgcagaaatcgagaagaagattgcaagggctaccgtgttacccagaaatcatgggggagatattgcactgttcaagctagacattgatgagctgatagctgattatgccaagatagtggacatcttcagtagcagctgtcgtggccaccataagaatcctccttcagagtcatatgtccttagtgagggttggcttggttcacgctccattatcgctgcttgcagcgcgttttccgacatcgttcttcaagcaaacataacaaagcaggttcatgaaattaccgcaagactgctagatattcatgataagatgatgttgataaataataaagaggacctacctaaggtagcccagcaaagcactagcccctatccgcacgacattgcccctacctttcaccgcccagatgccagacacaacgcctag

SEQ ID NO: 37142 - DNA, 339 bp, Zea mays
  Peptide Sequence Number=SeqID_80517
atgaccgccctccaacctcgcgtgggcttgggcatgccgacgaggccacctccagacctcctgaatcctgaattcatgatgcctcacgcggcgccagcactgggaggtagccgttgccatgacatcggtcgccatcaggcatcaggggaggaggccggtggccgaagcaaagcaactccgatgtggccggggaggagccaggtcgcgccgacagcagcagttggaagaggatccatggggaaggaggcgacgcttgcgttcacgcccacctgggtggtggccatcatgtggcgtttctgcggttctagttcggaaaacccggcgaatgtactgatataa

SEQ ID NO: 37143 - DNA, 519 bp, Zea mays
  Peptide Sequence Number=SeqID_80518
atggcgcttgtaggtggggcccaccgatctatcgcacacaaccgcgcatgggtcatctaccggtgggaccgtttcgtcaggggctcctttccccttctcgacgacggcagctgcgccggaatcgcgcaacagatttccgcgctccgccacaggacatgcaggtctactcgcccggttgttgtggtccccgagtataaatctgatctcgcccctcgaccaaccccatcaagcttcatcatgaaagaacatcgcgtcgtgaggataccgaagagcagaggtgagggagctacaggccgtcggaggctatgcaacacagtagggccacaccacaccgtggtctgggcatcatcgtcctcgctgctggtaacttcctggactaccgactcgccggggtatgctgttggcgcttgggtcctcgtcgagtgtattcgacgtcggggaaccccggaattgctcgttggagtaaactgctccgccgtgaaaccatttgggtcgtggtcaggatgtatggtcgcgtga

SEQ ID NO: 37144 - DNA, 423 bp, Zea mays
  Peptide Sequence Number=SeqID_80519
atggtggcggccttcgcgcgggcagcgtggctcaaggagtaccacgagaaggttagcatgacgctgaacattttggccgacctttcacctcttttcacgtggaacacaaaacaggtgtttgtttttgtggcagcagagtgtgagactccacatgatgcttttattcaatatgtcatttgcacaattactgttgtttttaccttcaaagctatttatgcttctattgttaatgttcattgtacattcactcttctggcacaattgtgcttgactacttttgtgttcaaatacggaagtggtttgattatcgtagccatatttgtattaaaactgacatctgtgaaggaaaagtcccttgggctcctcacccagaattttgtcaagctcttcttcaccatgaaggttgagacaatctcactttga

SEQ ID NO: 37145 - DNA, 141 bp, Zea mays
  Peptide Sequence Number=SeqID_80520
atggattgccctgtgcctagtgcgaggggtcctaagacgcaaaggctccatggtagtgaaggaccagaagaaaagaccacactaggtcgtcggtccattgtgtaccaccctgaaggccccaccggtttacttgactcctaa

SEQ ID NO: 37146 - DNA, 909 bp, Zea mays
  Peptide Sequence Number=SeqID_80521
atgacggcacatgcggagtcagacttcgaagtggggctgtaccccgacaccgtctggatgcccgctcccaccctcggcatctcttccttccatgtcgccaccaagcccaacttccatagacgccctctagaatctcaagaaggtgagctgcagagggtggatgttgttgtccgtctcaaaaagggtgcaaaaggttcacaactagccaataaaaagatcaagtgttgggttcaacaaaagggcaaagagccaaccgtaggccctctggtctgggcgcaccggactgtccggtgtgccaccggacagtgtccggtgcaccaccggacagtgtccggtgcaccaggggactccagctcgaactcgccaccttcgggaatttccaggggctctcgcgctataattcaccggactgtccggtgtacaccggacagtgtccggtgcgccatggagaagcggcctcaggaactcttcagcttcgggaaaagccaacggctcgtccgctataattcaccggacatgtccggtgtgcaccggactgtccggtgtgactccagcgcaacggctatcccgcgccaacggctacctgcagaggcattaaatgcgccgcagcgcgcgcagacgtcaggtttgcccatactggcgcaccggacaatgaacaggagctgtccggtgcgccaccggacatcaagggtggcccacaagtcagaactccaacggtcagattccaacggcactgatgacgtggcaggggcaccggacatgtccggtgtgcaccggactgtccggtgcgccatcgagcagactggctccccaacggccacatttggtggttggggctataaataccccaaccaccccacattcattgccatccaagttttccacttctcaaccacttacaagagctag

SEQ ID NO: 37147 - DNA, 426 bp, Zea mays
  Peptide Sequence Number=SeqID_80522
atggagggcagcaccaaagcaaggtcggatggctctaccatagcaagaccaacagaggagggcacgatagaagcagcagaggaaggcacaacagaggcagcagaggaaggcacgacagaggagggtaccacagagccaacagaggaaggcacgacaaaggagggtaccacagagccaacagaggaaggcacgacaaaggagggtaccacagagccaacagaggaaggcacgacagatgcggtggttgtagtgactgatccagtggcacttgtggctctagtggcacttgtgggtctagtgtctgatcatctccaaaagttttatctagtgccaattgtggctctagtggctgatcctctccaaaagctggatctaccgcattcttgcaatttctcgcaatatgtcctaatcctccacaccttttga

SEQ ID NO: 37148 - DNA, 594 bp, Zea mays
  Peptide Sequence Number=SeqID_80523
atggcgcgggatcggcggggacgacgccgcccgcaacagccgggcgcggatgccgtgggcgcgaggctagggctggcatgtgcggcggctgctgcgcgagatcgacggggacgggatgctgagaatggggagaaaatacgaacttgcgaacttgcatgcaagtggtttgactggttctcctccatgcaccgcacacacgccaaaacagttgccgatcagggtcacatggagacggccggggcacgactgcttgggctcgcctgcgatcgttttcggccagggtgcagggcgcgcagagcaacgccatggctgctgccacggccggagctggcatcggcggctcaccggctgggaagcagcggacaaagcgacgccgagcacatgcctgcagcggcgcggccggacgcgacatgggatgggcgcgacactgcaggccgttgccggcacagctgcagcataaggagggagcgcgaccaggggagcgcaaagacgggcgtgggagagagaaagaaggagaggggcttacctgctcatggtgaccgtcgacgtcgggacgagcatggcacgggtggaactctgggcacaggctcctag

SEQ ID NO: 37149 - DNA, 150 bp, Zea mays
  Peptide Sequence Number=SeqID_80524
atggttggtttacaggtggtgacaaggatgatggttatgactatggtaatggttgcctttggtgcaatctatgctcaggtaaagaagaaggagaacagtgttgaggcggttctccaggagttccaggactttgacgagttcaatgattag

SEQ ID NO: 37150 - DNA, 1593 bp, Zea mays
  Peptide Sequence Number=SeqID_80525
aatggttacaacttcgaagactccatcctcgtatccgagcgtgttgttcaggaagaccgtttcaccaccatccacattcaggaactggcgtgtgtgtcccgtgacaccaagctgggtccggaagagatcaccgctgacatcccgaacgtgggtgaagctgcgctttccaaactggatgaatccggtatcgtttacattggtgcggaagtgaccggtggcgacattttggtttgtaaggtaacgccgaaaggtgaaactcagctgaccccagaagaaaaattgctgcgtgcgatcttcggtgagaaagcctctgccgttaaagacttttctctgcgcgtaccaaacggtgtatccgcggagcaatttcctgaggctggcgagttccagagccgcccttccctggggcaccggacactgtccgggaccgagaaaggggatactccgaaagggatccttctccgcgaaggaagcgggcctcgagccctcctactgatcagaggttcgaaggctggcccctcagaagggttcgacagttgcctcagagcactcgggctccgcgcccactactggtcagaggttcgaaggctggcccctcggaagggttcgacagtcgcctcaggccactcgggctccacgcctactactgatcaggggttcgaaggcttccccccgaagggttcgacagccgcctcagagcacgcagagcgagggatgactctgggtacgtccgatacatggccgaggctcgggctacgctcccgaggtaccctaggacatttccgagaccagcaggagcgattctataacggaatcccatcagagggaggcatcgagccttcggacccaatcaaacgggaccgggtccggcaaatcacctgcagcgggataaaactaacgatagataactggagggatggggaagcctgtcccatcactcctcatgctcctcctcagtcgaggcgggatcccactcgacagtccaacccggtgtacaatggatcaagcagtctcattagctgcgagaagcagacgattcgaatcgagtttttatccttgcaagtgaccgcacttgtatccaccataaccggaatgggagaccacgtctcaggtcgcgtgaggggtaaagtctgcgggcaggctctggtgctggatctggggctacctcctgagcagctccttgctccggcacgaggacgtactctccgtcagcaaggttacagtctatcgaatgcaatgaacattcgacaaggccgaagtgaccgcagtcacttcgcccctccactgactgacctgacaggaaaacagtgctgcatgccccgctccgactgttgtgccacccgccagggtgagactgacagcagccaggtccagcctcgggcgccatgggaagctccgcctcgcccgaccccagggctcggactcaacctcaacaccggaagacggtctccgcctcgctcgaccccagggctcggactcaacctcgacctcggacgacggactccgcctcgcccgaccccagggctcggactcaacctcgacctcggaggaatcaccgcctcgcccgaccttgggctcggaccgaccatgctatag

SEQ ID NO: 37151 - DNA, 267 bp, Zea mays
  Peptide Sequence Number=SeqID_80526
atggcgcccgaggctggacctggctgctgtcagtctcaccctggcgggtggcacaacagtcggagcggggcatgcagcactgttttcctgtcagactgtaaccttgctgacggagagtacgtcctcgtgccggagcaaggagctgctcaggaggtagccccagatccagcaccagagcctgcaccagaggacctgcctgccactgctttggaaggcaagccccggtttatgcataacctgttatttatgctattttacttcacttaa

SEQ ID NO: 37152 - DNA, 255 bp, Zea mays
  Peptide Sequence Number=SeqID_80527
atgcccatcaagacacccatgggaacaaatgggcatctcaacctcgacataggaggtaaatccgtagatcaaaagtacaatggatcaagcagtctcattagctgcaagaagcagacgattcaaatcgagtttttatccttacaagtgaccgcacttgtacctaccataaccggaatgggagaccacgtctcaggtcgcgtgaggggcaaagtctgcgggcaggttcactcagaaaaagacctactggatatttag

SEQ ID NO: 37153 - DNA, 495 bp, Zea mays
  Peptide Sequence Number=SeqID_80528
atggggagaggcaatccgggctatgatcccgatcccgccttcagcatcgagggtgttcgtcatcctcgctgggacggggagcgaggcgagccggggctctacctcctgcgcgggtcggcgggccacctgatcttccagcttctggtggtggcaatcgccctccagccctgcggcggagacgtcctccagccatgccggggaaggcgaactgttgctacccagctaggatgcaacattccgccctctccctcgcattcgcggcgaggacggcagcgaggacctgccggtgcgcttgggagcggcccgctctttggctttaatagctggttcgcgtcccttgagcgggaccgcgaacgagagccctccggtggccgcgtccacccgggaccatggctgctgctgcagaggtcgctggcaggtcccccgacattcgtcgccccgcaggctcgaggtcgctcgtacccgcgggggacggaaccagagttccgtttgtaa

SEQ ID NO: 37154 - DNA, 234 bp, Zea mays
  Peptide Sequence Number=SeqID_80529
atggcggtgggtgcgctgcaaaagggggcgtgggtggcggtgggggtgcacatggaggcgggcacgcgtgcggggggcacggcttattccaggcttcaaggaggactgggcataactaacttcagacctgacagcttctcttctagcgaggctggcacacaacttcaatctgagacttctcctggatgggtcaacagggagctgatgttgatgacttcttctggcggcaactga

SEQ ID NO: 37155 - DNA, 432 bp, Zea mays
  Peptide Sequence Number=SeqID_80530
atgcttggtgattcttggattgaagactgttgcacatggttcatagtctttggtttcctcctctgtatgatggtaatactcattgatagaatcctccagtgggaagagcaaagagaaagaaaggcctgctcaagcagcaacaacagaagaaggtcccgtaacacccttgttatgaggtacttcaaggagttcaaatccccaagattcaagagttctaccctcattctttttaagtggggtagtgttccagtaaggttcctgctatggagacaaagaagaaggcctgtagcaagcttgtggaggacccgatcgtccaagcatataagtttctggatgagaagtgatcacccaagttttgttgatgaagcaccagaagaccaatcaaggaaggaatccatgtgggagttcgcaagagaaaggtttgcgtgttag

SEQ ID NO: 37156 - DNA, 171 bp, Zea mays
  Peptide Sequence Number=SeqID_80531
atgccgtcaatggggctcggtgtatgcggctcgctctgccaaggtggcaatgagactgatggttttggttttcactatggtgctggttgtcagcattgcaaccactgctcaggcgaagatgaagctgtggaaggagacttccaggagttccaagactacgatgagttctag

SEQ ID NO: 37157 - DNA, 213 bp, Zea mays
  Peptide Sequence Number=SeqID_80532
atgtcgaaaattggagggtcctgcttgtcaaagactgttgctattctagcaaagggaaggtatcttcggaatcaggaatcaggttgcgggtatacagaagcatggtcaagacgaagcttgactgggacggcgatcaagacgaaggataagataattgcgaagctatatgcagaagagcttcggcatcacggcgggaaggggaaaccgacttaa

SEQ ID NO: 37158 - DNA, 414 bp, Zea mays
  Peptide Sequence Number=SeqID_80533
atggacagaaccaagaccctgtgcgcggtttcgaacctcccgctgcagcccaacgcggagccgctctccctcgacgacgcgcgcaggctcctcttcaaggtcgtcgggtggaggctcgtcctctccggcggcgacggcgacggcgacgagcagcgtcccgcacggctgcagtgcgtctggaacgccgcgctctacggcgccggccacgccccagcggccctggcgttcgaggcccccaaccaggtgatggccaagctctccacgtcctccgccgccggcgacagcctcaccatcaacgactacatcgtcccgtggttgcaactgccgcgaagcggagccggtgatttcttctggagcgcgcgagcgaaggtgtctccgcgaagcagcgtagggggagaacagtgctcctcctaa

SEQ ID NO: 37159 - DNA, 216 bp, Zea mays
  Peptide Sequence Number=SeqID_80534
atggcgggtgctcatgcaggagcacgacagttagaggtgactattaatggtattggtgaaagagctggaaatgcttcattggaagagctgactgtactagaaggttccttttgcaacctcaaattgagatttaagggagaattaccaccagaggcagtatacaatatcataattgatccaaagaataaaagggtgttcatgattagtaagatttaa

SEQ ID NO: 37160 - DNA, 456 bp, Zea mays
  Peptide Sequence Number=SeqID_80535
atggtggcggagatagcggctattggaggccgaccatcgtcgcagccttcgcaggcgcgcaagtcggtcgtgctctccgtcgccgcttcgccggcctccttcactcaccgggaacctagaggatttgggttcatccaatactttgatcctaaggccgcgaaggacgccacgcgggggctgcggcatgagctcgacgccgagcgggcctccgcggagacattttgttttaccagtggagacacggagattggaggacagaagggcgcagcacaggactacagcgaggggggaaggccagatcaagcaggagacaacaagagctcctctaacccggccctcaccacgacgccgcacgatgacctcgaagggaggatacctcggtggccaacacgagccgcccttcttctccagctctgcccccactacgcgccaatgtcgagttcagccctgatgtaa

SEQ ID NO: 37161 - DNA, 126 bp, Zea mays
  Peptide Sequence Number=SeqID_80536
atggcgactgttgtgtcctccgctctgcacgccgttggcgccgtcgcctccgccaagcccagatccgtcgcccccgcggtggcgaggaggaggagcgtgcgcatggatccccagcatgtcgcatga

SEQ ID NO: 37162 - DNA, 663 bp, Zea mays
  Peptide Sequence Number=SeqID_80537
atggatagtgcgatgatggcggggcggcgatggagggatcctggaattgcgcggccaagagcggtgcaaggggaggatgtcggaggcagggcaggcagaaccgtgcgccaggccaatgtggacgcctacggtaccttcttaagagtagtagagattattggtttactgatccctggaccgcgcgcattaatacagcgaagctcagggtttaacttgcaaaatttccctgacacagactgctcacatggtggactgcaaatttattttataatttctgggggactttttagtaaaactagcaccgcgaaggggtacgcgccgatctcggccgtccgattgcatgccaagcgcaaggattggatttttcacttaaatgaccggcacggaaagccgccgaggcctgccccgtttgtctctgcccgcgtgtacatccgctctgatgtccgtgctggaccacttcgttccccccttttcttctctatctcctacaccgtcgagagccaatggcgactagggtgtctccattggatgcagcaggatgaacaggaggagggcggtggcaaggtgttagcagcagaggaggaagagagaattagagacaggaatagggggaacgcgcaggaggacgcgctcaggaattgtattccttggacaagggtttag

SEQ ID NO: 37163 - DNA, 300 bp, Zea mays
  Peptide Sequence Number=SeqID_80538
atggccgtgatgggttcaacatcggacaaggtgtacctctgtcaggtgaggaaacaacagagttttgttgtttctgttcaaaggtggtacccaaggaagagccctagcattgaagttggtcgcgggaggatgttggcctcccactttgaaaacaataaacttgtgtgcaggagggtgttctgcctccctgggttgtccaaagtccttagggcaaggacaactgtaggtgggcctaataccttgggaggttctgtcacaactggtatcgaagcgaagcccatctcttcagatattacgtag

SEQ ID NO: 37164 - DNA, 564 bp, Zea mays
  Peptide Sequence Number=SeqID_80539
atggggttttgtcgtaaagatgcttgggaagccgcaaccatgcaagctctctccatcttttgtgagcaccaccagaagatggtggccattcaccatgtgggcttaatcccgctgaaagcgacggcgcatcaaactgcttttgccctgacctttcgccacattctcagcaatagggaggagcgtgtcattgacctctttgtcgaggtggtggagaaagaccttcaaattgagcagatgggcacccaggttcaccaaatccaagaggaggtgcatgagcaagaggttaccatcgggattttagaggaccaaccccatgatctccaactcgagctcgatgatgctaatgagcacatcgagatggagatggatgatggcaatgtcgcggacaaaaccaacaggctccgccgtcgccaccaccgcctcgtacgatacaagagctttgcccagcaaaacaagattctaaggcaacttgttcaacatcagtcgcagtcccaaccgttttctggcgatgctaagaagagagatcacttccttcacggtatcaacaccaagctcaaggagtaa

SEQ ID NO: 37165 - DNA, 1815 bp, Zea mays
  Peptide Sequence Number=SeqID_80540
atgcagcccagccggcccaactcggcccagccaggccgcgtgcccgcgccgcctgacaggcggaccccgcctctcagcggcagccctctcttctgcgtgccctccctctctcgctcgctgccgagtggggccgacctgtcggcgacgctccgccctctctcgctctctgcccacgccaccagcatccgctggagacccacgcccgcgttcccgaccatccagctcgccggagaccgcgccaagcctcctagagctccgccccgagcgttagtccctaaggtgcctctgcctctgctgaagttagacaaggccttagtgctccttaagccccttccccatgaccggaatgcctcgccgagctcctctggtccgcccaagaccttctctccgccgttctcccctctctgcccgtggattcttggcctcttccccgccattgagttcgccgtggcgttctctccctctctgcccaactccggtgaccccagagccaccctagctcgcgccagcctcaactccggtgaccccactgccgcggagaggaacagtgccgcccgcagccgttcgtcccccctatctgttcccctatgtccgatcttcatcgcacggcttagatcacggataacgcttcgcgcacgcgcgcctgacgccctggcccgcctgtcagcgcccaagtcccctggcgctgggccggctcggtcagtgcgccctccccctctgccgctgacgcccctagcccgcctgtcagcgctggcccgcccgcccgcgcgcccgccctcggtcgcagatctaatctcagccgtcggttttagatctaactacaacgagcagtacgaggttcctgagtgtgttgttggagacccccctgagcaacaacctggtgaaggcaatcacctggagagactacatcgtcgcctgcacgaggagcaggagcgccgacgccaggagcaggaggaggagcagcaggactcttccccctcgcctcagtgggaggtggagtctgagaggccaccttcccctgcacctcagccagagatgccccctgcaccaccacagggcatcccggctgctggaggagatcctgacggagacggtaatgacgacgatgccggtggcagttcgagccacggcacggagctctcggaggagccggagccggaaggatggatcgctagacccatcactcgtgacgccgctcgcgggtgtcacttccacgatgctctcgataccctattgagttgggccttcgaccgacacacatggtctatcgagtaccgttgtgtagtctaccagcatcgtcgtgggctatacccgaaccagtgggaggctacttgtttggtgcgccatccggacgatgatctccggggtgcagaggcattctcacagcactattctattactgagagggatactgccaaggcagccatgcaagatgtagcacgacgagcactttctaagtattgctcgttgttcagcggggtagctgatggcctcgacctgaagtactaccctcgtcgttcgaccggcagtgctggaggtgtgattgcctcgccagttggtgagggcaatcccaggctgaacagcatggtctacttaactgctgtgctcaacacaaagttggaccacgccctcaacgagttgggcaaggtttgggcggaggttgcggaattgcgtgctaagtgcgtagcatgccactatctagatggtggatctcccgcccctgtcgggattcaacacccttaccgttcaccgccctgtggtcgcttcgactatggtaccccagactgcaggacccgaatagatttggatccctag

SEQ ID NO: 37166 - DNA, 888 bp, Zea mays
  Peptide Sequence Number=SeqID_80541
atgaagcagtgtggagaacttgcttcggctgactctgccgcgcttcagcttcagcaatcaccttctacttctgaatgttgtggattgatcggacatgcctggggtgaagtcttctgtaacaccccaggtgttaccttggctagagccaccttggcactaaaagctgtgttcacaaggggcgtatcatcccttggaactcacacatgtgagatagccctaggtgccaggaggaggtctgcgccggattcatggcgagattcgcacgtttgcgatctctggaagcgtttgaacattggaagaaactcactgccacgtgttcgacgccttctgccgcgccagagcacgctcgcgcgcgccctcgcacgccccgcgccgcgcccgagccaaacccgcgccgtggcccgcccccgagcttataaatccctcccaggctttggctacacccttccgcacaccctccacacctcaccggagttagctagtcgccgtttgcccgtgcgcagcgagcccgcggccgctcaacccctctgccaccgtagaccggccagcagagccatccccaaccccgtcctgccctcggagaagcttgtgcacacctccgtgaggctccccgagcaaggaatcggagtttccttcgccggagaagccagtccacgctcgccggagctctcacccccgccggagcacgtggaccggttttacccctcattctataatatgcctaagagtaaggaaaatagaaaagactgtaatcttgctgacggagagtacatcctcgtgccggagcaaggagctgctcaggaggtagccccagatccagcacccgagcctgcaccagaggacctgcctgccactgctttggaaggcaagccccggttttatgcataa

SEQ ID NO: 37167 - DNA, 330 bp, Zea mays
  Peptide Sequence Number=SeqID_80542
atgtggaaagaccaagtggagcatgccaaggatgtgtgggctctttacccagggcagactgctcacttgacggtgcgatgcatgaatgacctgtaccgcctgcaagcggtgcgaggagaggcaatgtcccagctaatggccttggtggaggctaccaagatcaccctagataacatagaggaacttgtggtagacctgtccactgagatggtggaaaaggacctgcaggtggaacagatggccaaccagatccaggagcttgaggagctagtaggagccagagagaacaccattgaggttctcaaggatgagctgataaacactcaatag

SEQ ID NO: 37168 - DNA, 174 bp, Zea mays
  Peptide Sequence Number=SeqID_80543
atgagcaccgtcgcacttaccagggacaaccttgctcccgctttggcgctggcacataataactttgaaaattcatacctcgacaacttagacgagccagctatagaggatcctggtgttcatcaagtggcgactgctgagcaggagctcgttgaaggcaagttgtgtccttga

SEQ ID NO: 37169 - DNA, 309 bp, Zea mays
  Peptide Sequence Number=SeqID_80544
atgggactctcttctctacaatccatcgtcaaaaacagtccattcctacggtctgatcgagaattcaggaatcttcttcacctatctacagtcgatgtgatctctgtaaaattatggtttgataaaaagatcataattccaaaggttgccaatgtgtgttctggttttgatgattcatctggctgggcattctttgaccttacctcagtatatgatgattattgtgaagaatcaataaccattgtggaggctgaatttcttcatcacatcttatcaaatgcatacaagattttgagggcgcaattgtga

SEQ ID NO: 37170 - DNA, 624 bp, Zea mays
  Peptide Sequence Number=SeqID_80545
atgcggcgggctctgcagagggccgcgctggcagggagaccgggggggcggagttggagatgcgacctgggcgcagtggccggcgagtcggcgctccagcggccgcagtggttgaaggcgctcgtggccgactgcgccacgcgcagctgcacgcgcctgctgcttcagtcggacgaggtggccgcgcggggggggctccagcacgacctcgccatgctgcacgacctgctccccgccgcggagctcgggctcgccgacgacagcgcccgcgtcgcggcagtgccgccgcgcggcggccccggagctggagctaaaggcaggcgtgctcgcgctgatccaggaggtggagcgggagggagcagagggcaggggaggcgcggttggaagggcaccggcgggcggcggctggtaggggggatacacgctacatggaacaagcgaaactggagctccaaaattggcatcaacaagttcattggctcttctattgagacttcgcaatgtctctatatggggctcatctccttcaactgcaattattttggcaaagtccccaatgtcaaaatagtctactaccctattaccagcttcaagtccagtcacatatgctttttcctagcataa

SEQ ID NO: 37171 - DNA, 2190 bp, Zea mays
  Peptide Sequence Number=SeqID_80546
atgccgtcctcttcctcttctgctgccgctacaccgccggccgacgcgtcgtccggggagacgctgagcgatgtggcggcggaggagttgcgcgccggtgacacagtggagttcggcgtgtcgcggatgtcctcggtccgcgtgcaagacatgcaacaacttggttatttcggcggcggagtagcacgtgtcccggggacggaggaggtccctgagccagaaggcgagttggttgtccaccagctgacgccaaatgtcgtggtggctctggcgaaatatgtctgggcaacgacttcgtacggcgggcagccctcggtcgaagtcttcgcgaagtattattgtctgcactggccgaaaaggaaaatcggaaataagattgctcaatttggatcttgcacgtttacgccgaagacgggcaagacttcgatggaggtcgttgagttggttccctgtgcctgcaataaatggggcaactggtgggaattttggttctatgttgccgaaggcacagtcgaagaccatccggggcttcccgtggccgagatgtgtttgcattattattcagcatacccgcggtttgaagtagcggaggaggatgcagacgaaggggccctgcggtgcgcggccggcctgagtagcgggcgcgatctggttgaggagtttgtcgcgatgttggtgtggagtcccaccttcgcactggatttgcatggtcgagatcccgccgcattcgtgcgtgaggcgaaggatggggcggcgcggatagttggtcgctacgtgccgaggacggagggccagcgtagttgggatatacgcggatccaacgatcgcttgaatagggtcttcgagttgaaccgtctgccgtatggcggttatcccaggcaagacgatgtcgatcgccgcgggaagaaaccggcggcagagattgaagacgaccccgcgccggcggccgccccatcctctaagaagaggaagctaggtactgtgatggaaggactgggggtctccgatagttttgctgtggagctgatggggacatgcgcggcccccgggggaaggatgtcttcgcccgagctccaggagtctttgccgcggatgctgaaggttaccgggggttggtggcctgagaacgttcctatccctcgtgcggccggcgaagacttttttacatctcgcatggttcgtgacttgagagtgtttccttatgggcggaatattgctgctgttgtgtcggcagtgatggagaaggatcgtcaggaagctgcgcaaaaacaccgggcggtcatcaggctgcccgaagctaggccgaagagggcacaggggactgcgaaggctgccgcctacggcggtagccagccttcgctggcggcgaagtcagccgcccctgggtccagcaaggtgccagatgtcgtgaaggcagccggtgccggcgtagtcaagtctgcctcggccggagccgcgaaggcccgagacttgccttcgccggcgaagcgcgtagccgacttcgccactgacattagtgtggatgattatctcactggatcgggcgaggggcaacttgttgttgttccgcctgcggcggcgaccacggtgtctgccacggtgcctggggcgaagggtagcgctctcagcgctggcggtgagatttcggcgctcaccgccgtcaaagacgaagcgagcactgtgtcccgccggctgagggaggcgtcgcagcggctgagtcaggcggctgacttcgctgactgcatggcgtcgggggcccttacggcagttgtgtctaccgaagtcgagagacttcaggcgcagcatgctgacgctgtccgggaaaagtcggccgccgatagcaagtgccgcaagctgacggagaaggtggccgcgctggagggtgagaggactgacctccggcgccagctggcggaggagaaaagggaggctaatcaggccctcgccaaggtgcagtcggcgcaggcggaggccaatctggcacgggtggagggtagtctcgctagccagcgcgccgaggaatgggagatgcggttcaacgctctgcaggcccgcatggagagggccgaggtctcgatgcgctcggaagttgagcggacgcgcaaacagctcatggactcataccgcgagctgggcgcgcggaccgctgacttcgaagtgcccgaccgagagtcaggccttcgctgctga

SEQ ID NO: 37172 - DNA, 423 bp, Zea mays
  Peptide Sequence Number=SeqID_80547
atgtgcgggtgtgcggccctcgtcgccggagcccggccgccacggcccgtcctcccccgcaggctccgtcgccgtcgagggagctccgtccgagcagaggtctcaccaggcggtgagtcccagccgaagaaggtcaccgtcgcaggcgccggctgggccggctttgccgccgcgcaccacctcattaaacaggggtacgatgtcacgcttcttgctgcggagagtggcccaacggaggaggtcgaatttcccatatttcataaccagccccgattaccagctccctttggagtctttgcatatccagaattccctaatcttcctttgagtgataggctgacatcaattcctgtcatagctgcagtcattgacttcgacaacactgacactgcttggaggaaatatgatgcaagaaaattctga

SEQ ID NO: 37173 - DNA, 417 bp, Zea mays
  Peptide Sequence Number=SeqID_80548
atgaagcacaaaaccgcagctctcaagctcactcaaagatttctctccaaagatttgaaatgggagaggcaagagatgttgaaagggaaatgtgcccttgggccatttctaagtattttggtgattgagtgccaacacaagtgcttaaatgtgaatctatacccatggatggacaaagtgcaaatcaagagtaaagttcctccccttactctgtatttctttgtaaatctcaagtgtaagggcgagaggcttcaagttgtggagattcctcgcaaacgggatattgaaaggcaaagcaaaacatcgtggtattcaagttggtctttggaccgcttgagaggggctgattgcaaccctcgtccgttgggacgccactgtaggaaacgggtgacgcctaagagggggggggtgaattag

SEQ ID NO: 37174 - DNA, 180 bp, Zea mays
  Peptide Sequence Number=SeqID_80549
atggcctgcggcaatgtactcggcttcggcggccaaggctccgctcaagggacacgatcccgcctcgcccgagcccaacctcgggcaaagacagccgaccccggaagattcacgcctcgcccgagggtcctctcaagcaacggatgcaccatcgactcacccgaggctcagctcgggtag

SEQ ID NO: 37175 - DNA, 432 bp, Zea mays
  Peptide Sequence Number=SeqID_80550
atggaagatattataccaatcagtatagattgcaggagtaaggatcctatctccaatggcagtgagggggttggccgcctcaacaacctcgatgacgatgttggtagtgccaggcagctcgagcggccacgcgtcgagcatgatcttgacggcgtcgaagatgtcgagatcgtgcagtcgcactgtagagacactggcggcgcggagcagctcggcaacctccgcctcgatgagatcgtcctacgtcctggtgtttcctttgatgatcacgtcgtggacgcggatgcccacaggtccaatgacagccgccgttgcacagactacatccgctctcgctctgccgctgacagaaatgttttcactgctgctgcaattaacagatattcttggggaaatgttggtgacacatacaaatatctagaaacaagttag

SEQ ID NO: 37176 - DNA, 1110 bp, Zea mays
  Peptide Sequence Number=SeqID_80551
atggattatatgtttgatgcctggttttcacttatacatcagctacaagaaagggtagttatcttctcagatgctggaccagatactagatgggtgggagatgaggcaggagtcgcaggctatacttgctggtctcccttcaacaagagctctgtgacaattgggcataccactgctgaactgcagcagcgcaacaggcgagcaggactgcaggagaaggggcaggttgctgtagccaccggtgtagccgccgacaatcaaatttcaggactgcaggggtggtgccaagaaaggagaggaaaggagatgtgctggttggagactgtgttcgcggctagatactcatccagtggggatccttttggtcaagactgggttcctgcagaatgtgatgtttccatcagaccaggttggttctggcatgcctcagagaaaccaaaaaacgtgacaactctgcttgacatatactacaaatcagttggtagaaactgtctcctcattttgaatgtccctcccaattcatctggcctcattgccgatgaagacatacaagtcctccaggaattcactgagattcggcgtgcaattttctctcagaactttgctgccaatgccactgttacagcaaacagtgtgcgtggtgagcaagataatctgcagtttgcaccatccaaagtgcttgaagacgggatatactcctactgggctccgcaggaaggccaaacctgctgggaaatgctcttcgatcttgggcaatctacttccttcaacttgctccagctccaggagcctatacaactggggcagcgtgttattgagttccatgtggctatccttgtagatgaactgtggcaaacaattgttgaaggcacgacaatcgggtacaagaggctgctactgtttccagtcactgaatctcggtacctgaagcttaccatcgacagtgcgcgtgcagatccacttatctcgttctttggtgtcttcatggatcccttctcgtccatacatagtttgcagaatcatgtcaaaccaccccggacaaatagtaacgaagttacaatgttgaggatggcccatgcttctgtcaacaagagtattgacgcaatgtag

SEQ ID NO: 37177 - DNA, 2346 bp, Zea mays
  Peptide Sequence Number=SeqID_80552
atgtctgagcaggcaccaccttacgctcccttctccctggtctcttcccttgccccagagcctagctctaccccgtcaccgaaccccacccttgtcctccccagtcctgccttccccaacaagcgcaagcgcaccggattccgccgcaaagtaccctccggggcccctgccgctcccgccccctccctcgtggccccctcccagccccctctccccgcctccgctgccgacgatatcatagtgattaaccgggagccgaccgcggaggccgtcaccgcgctcaccgccggcttcccggcggattcgctcactgacgaggagatcgaggcgggcgttgtatccgacgtgggtggcatcgagcaggtcaattacatcctcatccgcaaccacctcctctgccggtggcgcgagacctacaattcctggctcgccaaggagcccttcgcaatgctcatccctccccactgcgagcacctcctcaccgccgcctactccttcctcgtctcaaatagctacgtcaatttcggcgtcgccccagccatcaaggagcgaatccccaaggagcccacgagaccctccaccgttgtcgttgtaggtgctggccttgctgggctagctgcggcacggcagctggtggcgttcgggttcaaagtgatcgtcctggaaggtcgcaaaaggtgcggtgggcgtgtgtacacgaagaagatggaaggcggtgggcgcttggctgctgctgacctcggcggcagcgtgctcacagggacatttggaaacccgctaggaattgtggcgaagcaactcggcttgccaatgcacaaaattagagacaagtgtccactctacaggccggatggctcaccagttgatccagaggtggataagaaagtggagattacatttaaccggcttcttgacaagtcaagcaacctgcgagcatccatggggaaggtggctgcggatgtttcacttggggcggccctagagacattgcgccaggttgatgggggcatctctacagaggaggatatgaacttgttcaattggcatctcgcaaatcttgagtatgccaatgcaggattgctgtctagactaagccttgcgttctgggatcaggatgatccatatgacatgggtggggatcactgcttcttgcctggtggcaatggcaaacttgtgcaggccctggcagagaatgtaccgattgtttatgagaggacggtgcacaccataaggtatggaggggatggggtgcaggtagttgtcaatggagggcaggtgtatgagggcgacatggcattgtgcacggttccacttggggttctgaaaaatggaggcatcaagtttgtacctgagttaccacaaaggaagcttgattgtatcaagaggcttggatttggtttgttgaacaaggtatcgatgctgtttccacatgttttctggagtactgaccttgatacctttgggcatctggttgaagatccgaggcggcgcggggagttctttttgttctatagctatgcaacagtggctggtggtccattgttgatggccttggttgctggtgaagctgcccacaattttgaaacaatgccaccaactgatgctgtcagctcagttctccagatactaagaggtatctatgaaccacaagggattgaggtgccggaccctctacagagtgtttgtactagatggggcactgactcgttcagtctaggctcatactctcatgttgctgtgggggcctctggagatgactatgacgcattagccgaaagtgttggtgatggccgtcttttctttgctggtgaggctaccacgaggcgttatccagcgacaatgcatggtgcttttatcagtggtttgcgggaggctgctaacatcacgctgcatgccaatgcccgggcgacaaagagtaaagtagacagaagtccatcgacaaacacacaggcttgtgctgctacattaacggacttgtttaggcaacctgatttggagtttggaagcttctcggttatttttggaggaaaagcttctgatccgaaatccccagctattctgaaggtggaattaggtgcgtcgcgaaagaaaaatacagccgaaggggtaaagacggaacagaaccactcaaacaaattgttgtttcagcagctccagtcacactttaaccaacaacaacagctttatgtttacacattgctatcacgacagcaagctatggagttaagggaggtcagaggaggcgatgacatgaggttgcactacctctgtgaaaaactgggggtgaaattagttggcaggaaaggccttggccctgggggcagatgctgtgattgcatccattaa

SEQ ID NO: 37178 - DNA, 604 bp, Zea mays
  Peptide Sequence Number=SeqID_80553
atggaagactctctggccattaagtcatcctactgctcagaagtggaagggttcccccgcctcttgcgaagctgtgcgctccgcatgggaatccgcaagaagccggaatacgtctggacggaacatttcgagggcggaatgataagatgctctatggcagtctacctgggggaaagaggagatcctattgagaatgatcccaccattgtctacatggctggatatcttcatacccttgataaccaatatgatgacctcgccctccactgcacctccctaacctcccaggtggaaagcctggaacagaaagtcagggagctgtcagaagaaaaagcgtccctccaagagagcctctcgttagctgaaggcgaagagaccaacacccgtgaagcctaccgcaccctcaaaatggactacgacaaggtactgaagaagctcgcccccgcaaggaaaacccgcaagaagaccaaaagccaaggatgtcagactgagcagcaggaagaaaaccctcccagaaaccagtctgacaccgaggacatgtccctggccagtcttgatgaccttctcttggaatttggggacaccttagagaaagagttcgggg

SEQ ID NO: 37179 - DNA, 579 bp, Zea mays
  Peptide Sequence Number=SeqID_80554
atggcgcacagcgccgccgaggggacgctacggcggggcagtactggcgaggacgctggtcaaggggaggaggacggagcggtgccaaacttccctgtgcggcgaggagacggcgatgaagagacggcggtgaaggacggcggtgaagggacggcggggcgtcgtgtgacatgtgctaaggagactattgccaaatattgtgaggttaaccaaaaacttgtgcaagcactcagatattctctgtctctaatgagtgatacagctaagaaactacaagatactgcctctttgtgctacacagatgaagatgttgtcgacggtttcaagctgactcaagtggctcgttcattggacgagttagctgaaacgctagaagttactgcaattgactgtcaggtctcgatgatggatccaacaactatattagaagctggctatggtagcgaagatagtgcggtgtgggaggacgtattccgtgaccgagaaataatgaatcagccattggaagcggagacactagctgagcactgtgctaagtgggggcttaattacaatgagatcagggatagatctgtgtaa

SEQ ID NO: 37180 - DNA, 1431 bp, Zea mays
  Peptide Sequence Number=SeqID_80555
atgaaaagggaccttcggccatctcttggagacgacttcagccgaagctgcttcttcgtagaggagtgccctactatctaccgccgccttccttggtcgccgcgcacggccttcctcgccgcccaagccccaacctcgacgacgcgcctcgcgttgtcgtcccgcctcagccctcttctcgccctgccgatggatccagccgcccccgagcctatccccgcacccgccaccgacaccgatgccgagaccaatgccgacaccgatgcggaggttggaggcgagggcgctggggtcgagaccgagacagggtccggaacgatgccggctggcggtgtagcggagatgaaggagctgcccgaggagcttgccaagggggtggtgtgcctcaaatgcgagacatcggtcgaagcggcggcggcgggggttggttatgattgggctatcaactgggctattcgtggatggactgcgcttcactgggctgcatgttatggaagggagcggacagttggtgccctgatagcaagcggagctgcatcaggtgctttaacagatccaacgcagcagtatccatctggaagaactcctgctgatttagcatcagaaaatggtcacaaaggcattgctggttttcttgcagagtctgctttgacaagtcacctctcagctcttacattaaaagagtcgccgagtggcaatgtggaagaaatatgtggattaacagcagctgaaggttttgcagtatcaagttcttcccagcttgcatgtgttaattctcaggaagagtccttaaaagattcacttggtgcagttcgtaaatcaactcaagtagcagccagaatatttcaagcttttagggtggaatcattccacagaaagaaggttattgaatatggagatgatgattgtggattgtctgatgaacgcacactttcacttgtttcccttagagacccgaaatctggacacggtgattcacattttgctgctgtaaggaaaaactatcggaaggtagtctggtctgttggcatcgtggagaaagtcatactgaggtggaggagaaagggaaggggtctgcgaggtttccaacctgagaaacaacttgaaggtccatcatggcagatccaacctgcaaaggctgaggctgaggatgaaaatgacttcttgaaggatggcaggaaaccggctacaggcaggttggatagagcactggctcgtgtgcgttccatgaatcagtatcctgaagcaagagaccagtaccgcaggctgcaagcctgtgttaacagcctacgagagtcccaggcgatgcaggacaggatgctggctgattcagctggcaccgatgggggtgatttcatgactgaattggaggagccatatgcttctaagagcatgccaaagagagaacaatttcctattgcagattgctaa

SEQ ID NO: 37181 - DNA, 1653 bp, Zea mays
  Peptide Sequence Number=SeqID_80556
atggatcagcagcggaggagcagcatcaggttgtacgggtccaacgcctcgtcccggtcggggtccttcgacttcgaacacgaccaggacaaggaacgcgctgaccagcccagcgacggcgaccgccgggaggtcgtcgtgaagatcgacgccgagccgcactcgccggtctccctccacgcggccggaggcatgtccgggcacagctccgcggtcagcacgccgcgggccggcggcgcggtgagcatgctcgcggcgtctgcgtccggctcgagcgcgtcgacctccagcgctgggggcgatgcgccccgctccggcgagtcgttcagtttcaagaaccgcacgccgcagtcttcggccggcggcggggagtccagcgaagatccgccgagccgcctcattggcagcttcctccggaagcaggcggccgctggcggcgagctgtccatcgaccccgacttcgaggtggacgagatgagaaggccgccacgcgcgccgacatctgtcaacgcctccagggagctgcgcgtctcgttccaggatccccggaaacggttctccccgtccacgtcgtcggcgtcctcctcctcctacgacgccagccacaaccggaaccagagcaccatcgacttggacactgccgaggtgctacgctgcacgtcgacgtccaccggttcctccctgctggcgcgcagcaagacgcgatctcggctaatggatcccccgccaccgtcgacgtcgagcgcccccgccagcgaggtggatccccgaaagtcatttgtctccaaggggctgccgcccaagtccggccagctccggtcgggtcttatcggcaagtcggggctcattggcaaatcagggcccatcggcaagtcaggtgccttcgaggatgaggacgacgacccgttcatggacgagggcatgacctcggacttcaagcgcgacaccatggactgccttctcatcatggagtgggtgagcctggtggtcatcgtgggcgcgctcatctgcagcgttaccatacccagcctgtccataaagaagctctcggggctccacctctggaagtgggagctcctcgtgttcgtgctcatctgcggccgcctcgtgtccggctgggtcatccgcatcgccgtcttcttcgtcgagcgcaacttccttctgcgaaagaaggtgctctacttcgtgtacggcgtgcggcgggccgtgcggaacgtgctctggctgggtgtcgcgctcgtgtcctggcacctcctgttcgacaaggccgccaagcgggagacgcacacgctggtgctgccctacgtcaccaaggtgctgtgctgcctcctcgtggccaccgtgatccgcctcatcaagacgttgctgctcaaggtgctcgcctcgtccttccacgtctccacctacttcgacaggatccaggaagcgctcttcaaccagtacgtcatcgagaccctctccggcccgccgctagtggacgagagccggatgatggctgaggtgcagaggctccagagcgcgggggcgtccatccccagtgagctcgaagcgacagcgatgccgggcaagtccgggcccactgcccaagagtgggcgcctcacgacggccacgtccaggcgggaaggaggaggggccagcaagcagctgcatag

SEQ ID NO: 37182 - DNA, 1029 bp, Zea mays
  Peptide Sequence Number=SeqID_80557
atggacgagcagctcaagcatgcaacgggcgaggacgagctggccacggagatacacagcgagtacgaggccaaggttgctgccaagaggatcttccagaacgtcgccaagcctggatccaagcacatatacctgtcagacttgatgcgtttcatgagacaggaagaagctctgaaggcgatggatcttttcgaaggagcgcaggagcacaacagggtcagcaagaggtcactcaagaactgggtggtaaacgcgttcagagagcgcaaagctctcgccctgacgctcaacgacaccaagaccgcagtgaacaagctgcaccagatggccaacgtcgtggtcgcgctcatcgttctcgcgctctggctcctcatcctggggatcgcgacgtccaagttcttcgtcctgctcagctcgcagctgctcgtggcggtgttcatgttcgggaacactctcaggaccatcttcgaggcgatcgtgttcctgttcgtgatgcatcctttcgatgtcggcgaccgatgcgaagttgatggaatgcaggtggtcgtggaggagatgaacatcatgacgacgatcttcctccgatatgacaacctcaaggtgtactatccaaacagtaagctagcccagctaccgatcatgaattactacaggagtcctgacatgggagattcggtggacttcactgttcatgtcgcaacgccggtggagaaactgtccctcatgaaggagagactgatgcattaccttgacaacaagaaggagcactggtaccctggctccatggtggtcctgcgcgacgtggacgacacgaacaagctgaaggcctccatctggtgtcgccagacgatcaacttccacgacatggggatgaggttcgagcggagagagctgctgctccaggagatgatcaaggtcctgagagacctcgagatcgagtaccggatgctgccgctcgacatcaacgtccggaacgcgcctgccatccagtcctcaaggatgccgtcgacatggacgtttagttattga

SEQ ID NO: 37183 - DNA, 2559 bp, Zea mays
  Peptide Sequence Number=SeqID_80558
atgggctccctggccaccgcggacgggccgttgccgccgctcaagtaccctcaggctcgccgggacgaagacatcgtcgacgactaccacggcgtcctcgtgccggacccttacagatggatggagcaggtggattcgaaggaggtgaaggagttcgtggacgcgcaggcggccgtgaccagcgccgtgctgtccagctgcgaccaccgcgggcgcctgcgcgggcagctcaccgcgctcttcgaccacccgcgcttccgcgcgcccttcaagcgccggggcagctacttctacttccacaacccgggcctccgcccgcacagcgcgctctacgtgcagcacgggctgggcggcgagcccgacgtgctgctggaccccagcacgttcagcgaggacggcacggtgtcgctcggcgtggtcggcgtgagcgacgacggcgagcacctggcctacggcaccagcggcagcggcagcgactgggtcaccatcagggtcatgcgcgtgcgcgacaaggagcacctgcccgatacgctgtcctgggtgaaattctcgcgcatcgcgtggactcgtgacggccaagggttcttctactcgcgttttccggctccaagggatgcgctggattctgggatgaagactggcgtcaatctcaaccacgaagtctactatcatttccttggaacagagcagtcacaggacgtgttgtgctggagagaccctgatcatcccaagtacatatacatccctcaagtcacagaagacggcaagtacgtgatcctttcggtctcagaaacgtcagagccggtgaacaagctgtactactgcgacctgtcggctctcgctcacgggctgggcggcgtgaagagcgcccatggcaacggcatgctccccttcgtcaagctcgtggacaggttcgaggcctactacgggctcatcgctaacgacggcacccagttcacgttcctcacgaacaaagacgctccaaggtacaagctggcgagggtggacgtcgacgacgacgagcccgggtcgccgtggtggaccgacgtggttcccgaggacgaggacgggaaggcggtcctggagtcggcgtgcgccgtccacggccacaagctgctggtgagctacctgtcggatgtcaggtgcgtcctgcagatgaggagcctggtcactggggagctgcttcacgacatacccgtcgacatcggcactgtcagcgggatctccggcagacgatgcgacgccgaggtgttcgtcgagttcgcgagcttccttacccccgggatcatctacaggtgcgatgtcggctctgcggtcccggagatggacgtgtacagagagatctcggttccaggattcgatcgaaacgagtttgaagcgaagcaggtgttttatccgagtaaggatgggaccaagatcccaatgttcatcgtatccaagaaggagatcagcctggacggatcgcacccggcactactgttcggctacggcggcttcggcgtgagcgtgacgccgcagttcagcgtcgcccgcgtggtcctgatgaggaacctggggttcgtggcgtgcgtcgccaacctcaggggcggcggggagtacggcgagggctggcacagggccgggtcgctcgccaacaagcagaactgcttcgacgacttcgtcgccgccggcgagttcctcgtgtccgctggctacaccagcccggcgaggctgtgcgtcgagggcggcagcaacgggggcctcctggtagctgcctgcgtgaaccagcgccctgatctgtttggctgtgccctggcccatgtcggagtgatggacatgctacggttccacaagttcaccataggtcgtgcatggacatgcgacttcgggtgttcggagaacgaggaagagttccagtggcttatcaagtatggctccggctgcttactaccgctactgtctgttttcacaaagagagtcggcaatgacgcactgatcatgcagatcgacgaggctgcggatcggctgttagaccaacgccagcagcgacccgcaaacggctccggctgcccaatctccggaaaaaaatttgttgcagcccggctgcaaaccaggttgtttgcagcccctcacaaaaaggaagataggtcccacccgcaggtggggcctatccacctttttgtgaggggctgcaaacagcctggtttgcagccgggctgcaacaaaatttttttcccaatctccgcgctcgcgtcaactgtagacgtctccagcagctcccgcatcgcgcccccatcctccgcgccccctctcgccaacgcccattccggcgcgcgctgctcgcgccccgcatctcgcactcgccaaccgagacgcgccgcgtgtccgccgcgcggggcccacagacgacgctccacaggcgagatgcgccgtcgctgcccggatgcgtgccgctgctggagatggtggccgcgcatctgtgggccccgtcctccacaacgcgcagaaagggggtcgggagcggggacgttgctggagatggtcttaggttacaatgtatcggtgctgtatttaaattga

SEQ ID NO: 37184 - DNA, 655 bp, Zea mays
  Peptide Sequence Number=SeqID_80559
atcgggggctgggccgttggccgcctcaccgactcgctacttcgacagctcgggggctgggttgtcgcccgcctcgccaacttgctacttcaatagcttgggggctaggctgttgtccacctcgccgactcgctacttcgacagctcgggggctaggtcgatgtccgcctcgccgtattgctacttcaatagcttgggggctaggctgctgtccgcctcgccgactcgctacttcaacagatcgggggctgggttgtcacctgcctcgccaacttgctacttcgacagctcgggggctgggccgttgtccgcctcaccgactcgctacttcgacagctcgggggctaagttgtcgcccgcctcgccgactcactacttcgacagcctgggggctgcgccgttctcgggggctgggccgttgtccgcctcaccgactcgctacttcgacagctcgggggctgggttgtcgcccgcctcgccgactcgctacttcgacagcctgggggctgcgtcgttgtttgccttgccgactcgctacttcgacagctcgggggctaggccgttgcccgcctcgctgactcgctacttcgtcagctcgggtgcttctgcccacctcaccaagaccactcggaggagtaagttgcttgatccttga

SEQ ID NO: 37185 - DNA, 381 bp, Zea mays
  Peptide Sequence Number=SeqID_80560
atggcggcggacggcggcccagcgacgtcggcgctggaagaggccctcaagcccttccaggaaagagcctccgaggctgaggttcgctcgtcccgatttttctcccgagctcctgaccacttattattcccagcggttcctcttttagagcagatacgcatagcgaagctggaagccttgctgtacaacaaagatggtccgagcggtggatccgaggcaacttcctctgccgtgaaggatctccagtcgaagctagatgtggttactgcagaatgcttgactgaaaaggagaagaacaagaagctgaccatggagaacgagaagctccagtaccgcatgacccatctgattcgtgcgataaaagaggcggaatcgagatag

SEQ ID NO: 37186 - DNA, 1095 bp, Zea mays
  Peptide Sequence Number=SeqID_80561
atggcagaggaatgccttcttcaagcaaaggacttaagtggcttgttgctactgtactcatctcttagagatgctgaaggaattgaaaagcttgcttctttggcaaaagaacacggaaaaaacaatgttgctttcctctgcctttttatgctcggtaaagttgaagattgcatacagttgcttgtagacagcaaccgtatacctgaagctgcattactggcgcgttcatatcttcctagcaaagtaccagagatattggcaatttggagagacgacctgagtaaaattaatccaaaagctgcagagtctctagcagatccttctgaatatccaaatctatttgaagactggcaggttgctctaactgtagaaaaaaagggcaattatcttcctgctgaccagtacttgaatcatgctgagaagtcagacatgactattgtggaagctttcaaaaggatgcaggttgttcagcatgaggaacctgaagatgtggctgaggaaaatggagaacttgatcaacaggctttgcgtgatccatacttcaaaggtcttgccagggttgaaagagaaccatcctgtcagccaatcagaaaagtggaatttgactttgagcacaaaagaatgtcaaaggaagagataagagagttgatattccgagagatactggaatatcacccacaactgctaagtagctacattaatggcacagagaggacaacctttctctacccaagtgccgttgatcaatttaagaagcagttttctcatcttgaagagagtggtggtaacggcccatcagttccaacagacaggaaacatgcatcccttcccaggaccactgtggttcactcaaatccaattcctgccaaggaacaacctcttgccgtgtcatcaagggttagaccagtctctgatgattcgtgtaagaatccttgggagaaagcaagtggtcctggaaatgttaccaggacatctctgactttacaagggctgcaagcacaagcagggattttaaggaatcgggcccgacttagaggtgctgctaggatgtacttaaccgctagcgagaagtcgttgtatcgtggggtattttag

SEQ ID NO: 37187 - DNA, 504 bp, Zea mays
  Peptide Sequence Number=SeqID_80562
atggaaaggttcaaaaagagacgtgcggaagggaaaattctgaaccctttgatcttagaagagttccaatgggacaatgaatgggttcaaatggcaactaacaatgaagaagttcatcctggagatcatggtcttttctggttccatattgatgaagccattggtgcaacaaaaccactacagggccgtaattttcctaggatgagcagaacttatactcgtagaaatggtgttgtcgctgctgcttcaacttccaccacaaccacaatttcagatcaagaccaacaagaattaggggaagaggaagaagctgaaattgactttgttgctcctgatgatctacatgttgaggatgactatggccaagctcttgctacagatgatgaagctgctgcaactgcaaataatgaggatgtgggcacatgcaatggacttagatatcgattaggccttatgggcttagggcagtatgccatatttatcagtttatcatttatttgttag

SEQ ID NO: 37188 - DNA, 4826 bp, Zea mays
  Peptide Sequence Number=SeqID_80563
gccctagcgcccgatccgtcgccgcgctggcctccccgcgctccgcaaaccctaggggttccgcgcgcgcgggagggatggaggcgctggtggggcgggcggtacggaaggcgttcccggggttcggcacctacgcgggcgtcgttgagtcgtacgaccccggcgcgggctacttccgcgtgctatacgaggacggcgactccgaggaggtcgacgccgacgagatggcccagattctcgtcggacccgcgatgccgcgcgcgcagcagcagcgcacctcgccgcaggatgccgcggggaggcgccccaagaagcgccgccgcgggaacgaggacgacccatccccgacctcgactccagacggcgtcgtgctggccgttgccgccgccgcgggcgaggagaccgagcccgcgacgcccgttatggaggcggtggcggagaagaagccgagggtcagcccgggaccagagtcgtccaggccgctgcggcggagcgcgcgccaggcgaaggcggccgagcacgcggccgagatggaggcggcggtggccgtcgcggctgccgcggaggccgaggaggaggctgctgctgctgcggcggcttcgacgccgcagcagtctgggaggaagcgaccccgcgcgattgggagtgggcggtaccgctcggtgtccagggacttggaggaggccgcccctaagaaaccgctgccaccgccacctaagccggagctgccaccatcgtcgcagggtctggatttaggcggcctccctgttctcgatgtctttcaagtttactcctgcttaaggtcgtttagcaaacagttgttcctcagccccttctcactggagacatttgtggctgcgttgcggagcacctatgtcaacccgttgatcgactgggtgcatttcacgctgctgcgggctctcaagagtcatctggaggactcggccaatgaaggagacccgtcggcggtacactgcattaggtaccatgtcctttgctgtatagtgaatcttaactgggagctgttagacctagcaacttggccaatctatcttgctgaatacttgctaactaggggctcagaattgaggtatggtatgaagcttacagatttaagtttgctgagtacagagtactataggcagcctgcaggggtaaaactcgagctgctgcgttcactctctgatgatgttctagagatcggggctatacggtcaaggttgtcagagtcagatggaaacgacgagggcttcagaagcactggtgtaagaagaaaaaagaggggcaggggctcttctgctaaggtggcagtgggttcttctcaatttccagaaggatctgctgaagtggatgatggaaacagcgatgaatgttatctttgtggcatggatggcaacttgttatgctgtgatggctgtccagctgcatttcattcgaaatgtgttggggtggtggaggatcttttgcctgaagttttgaactcatgtcatccttcgtacagctcaatggttaacacaatttcttcattttgtgatactgcaatcaagtcacccaatcttaacagtcgttaccagagtagcagggaatgtagtacatctgatgctgagatagactcaaaacatttatcattattgaagcaacctagtgatcatgatcagtttaaggtagaacaaagaagctcctttgaacacttgaattctggaaaaatttctacctcaaattctgatgatttggatcaagatttgtcacagcatagcattaaactaagatattcacttatgtctcgaagtggaattgttgctgaaggtgatttgaatcaaatacctgaaaatagatcctctagtgccaagaatgataactgcaattccccaaaagatattgtttattcacgtgctaatggttctcttgcaaagaaccagaaagattcaccacctaaagaaaaaccaagagattggcagctccattctgatcctgctaggtacataaactattacagtttcggtcaaatagcagcttcagctgctgaagagctaaaacacaagctgtctgaaaacaaggacgtgaaaaaacctgttcaggatgtactctcgttccatctgagaacaatatgtaaaaaattaactgatattaagtacatggaaggccctaagccacatactcttgatctcggagcagaaaataatatggaaagtcatatcatccttgctatgtataacattttgtcagttgaagaacggttgaatggtttgctgagtggcccttggcaaaatccacaatatagcatttgttggcgcaatgcggttctcaaggcttcagatgtgtcatcacttaagcagcctcttctaatgaaagcggcggactctgttgaagttgttggttctgcagctcatattttggtccgctcgtctaataagtctctaagtcatgggtggaaaattatctcgccaagtgtttcattggaagaggttgcctcagtcattggtcaacaaagctgctcggcaaggagaattcccacgatttcatacacggatggttcacaatttgcgcggaggttcaaatacatagcctggcgagctgctgtggaaatggcagaaaatgcggcccagctcattttgcagattaaagaacttgaatggaatatcaagtggactgagatactgagcactctcccttctagccttatgaccaaagaaacccagaaaatagctaggcttttcaagaaagttataattcgcaggaaacgcattgaaggaacaaatgttgaatatctgcttgattttggaaagagggagaacattcctcctgttatttctaaacatggaacaaaacttgaggaatcctctagcgagaggaacaggtactggttgagtgaagttcatgtccctttgaatctgttgaaggcttatgaagccaaaacatttgctcgcttactgaaaaagaaagaaactgacgaactatctaagaagactaagaaattgtgtggctcaaaaccagaaatgccaagaaagacaggctttgattacctctttgaaaaagcagaaaaaagatccaccatgccttgtggtcattgtcacaaagaggtgattgcaagtgaagctgttaactgccaatattgtgcagctcttttccatagaaaacatttcaaggtccctagaggtgctacaaatgctgtttatgtttgtaataagtgcttagatgagaaggttctaaaggtggagtctcctcagaaaaagactgcaccaaagaagctgtctcccaaaaagaagcagaagaaacaaaagaaacaatcacgcaagattgagaccaggaggaatcagatagttctgaaatgcaaaacgaaaattggcaaaaagggtaagcgtggccggcccaggaagaacccaacggatctgtcaaagaatgaaccatcaaagatccatgaaagtgaaccatcaaatgtttccaaaaatgaaccagtgaaacgtatatcaaaacgattacatgataaatacatgaaaagtaactcaaatgtatccgagaatgcagctagctctagcaagaggaagaggactgtttcacagtattcatactggttgaatggcctccgatggtcacaaaatccacatgatgaacgagcaagaagtttcaggaaagaaagagtagtttttccatcagaagatgctgaaatttctgaagtcaacccagtatgctgcttgtgtgaaaaatgctataatgaagaggatatctatattgcctgtgaaaaatgtgaagactggttccatggggatatatattctgttaacattgagaatgtgaacaatctcattggtttcaagtgccatagatgccgccggagaagtctacctgtctgcccgtatgcagagactgtaacagttgtcaaaggccagtcagatgaggatcattgcatcaagcttgtagatcaatgtgttggcaagtttgtggaggatgaggatcccaattgtcccaaagatcttggtgctccgggtagtctgcaagagcttcatgatcatgaaattgagcaggggctcaatgttcatattactgagatagaattcagttacgataactgtctagaggagctgaatgatcatggctgttcgaaagagtttgatgctcatagcactgagaaagatctagaggacgataaaagtttgagaaaggtagacatccataatgagttgagggcgcttgacgatcttggctctgagaaagaacctggtgatcattgtaatccgaaagatctcaacagtcacatcaatctgaaagatcctggcaactgtagaagtgacaaagagatgaaggataataattgtctaaatgaactagatggagacaacaattggaaagcactcgacagctataacagttggaaactgctcgacagccataacagtcaagaggagcttgactgtactacaaatagcaagttttctcctaaagaaataccatgtcctatggaacttgacggttttagtagcctgaagcttgtcagtcataacatcttggaagaacttgataatcataactgtctaaaagagaacggtaatgaaaatagttctaaagagctggacaacaatggaagtccaaaagattcaggtgactgtctagcagatcacttcaacagcagtaggatatctggcaatgaggcactggtccttacacctgaaactgattcggtaaatgaatctcttggtttgcaatccaaggatgatcctgggaagtctgttcctactgagcatgagattgatcttcaggtggtgacggttgaggaaaacatagcatcatacgagaagacacactattcacctggatggtcccactgttag

SEQ ID NO: 37189 - DNA, 1806 bp, Zea mays
  Peptide Sequence Number=SeqID_80564
atgactcccgagcatcacgccgaggccggggaggccaggggggttgcgacgccgatgacgggggcgggggaggcgctgaggacggggaggacgcgaggatgggcggcagcgacgttcgcggtaggggcgagtggggcggggatggtgaacttgacgggcggcatgtggggggcgcgcggcgccgccgcgtcagtctcctcctggcgggggcgcatggtagcagtcgtggcaactatggaggggggcaccgacgatgcgcggggatcgatgtggggcgccgacgacgaacggacgcggcagatgtggatcctcatcggatgcgccgatggaagggggtcgatgcagagcgtggatgggggcacggcgcgtggatggaagggcgggcgacgacgacgagggggagaggatcacggggcgaggcataggcgagggtacggcgggggctggccgagattggcggtcgtggccagcgcgggatccgcggcgggggcgagatccggggcgggggcgatggggggacggtgcctgtgcggtcgtgggggggaggggcacggcaggggctggcgggctgcttccttccgcgcgcgtgggaggaaccaaagtcaattgattcctcggctctccgcctccccctccctcctcctccgcaccggcgcccaccccctcccctcccttcccaccagcccctcgccggcgcccactccgggtccggcgaccacctcaccctccccagtggcgccgggttccccctcgtccttgtctcctctggctcgtcctttcgtgccggctggccgttccaggacgcagcggtgggcagaggtgagtccagcctctgttgggacgacgccggtatcctggcatcggtcgttcagggacgtggccctgctcccgcctcctggtgctgctcagccggagccgcggcgggagcccccccgcccggttttcaagttggtggcccgccctgcctcgtccagtagggcaccgaggccctcccctgatgctgaaggctgggtcgaggttcgctctcggcgtcgtccgcgcgggcctccgcctccccgtcgatcgatcccccaggatctccggggaaggtgtttcaattgcatggcgccctctcacaaggcgtttgagtgcaggcgcccggtgcgctgcttcacctgcaggtccttggggcatcgtgctgcatggtgcccgacccgtccgcaggtgcccctccgcaagtctgtgtcggtatgggatcgtctcggtccgctgccggttgtggccaggccacggtctgtcttgggtgccggtgcgacagctcaggtgcatgttggtgctaaggggcggcgccaccgcacgaggggcagaaggtctaaccctcccttggtgctggagttgtctgctcctcacgctccgatgcccgctgaggagggaacatcccctcagtccctggttgcagataatgcgtccgcccctcgtggttgcgtgctggagcgatcggatgcaattagcaggatggagttcaggttgcagcgctgtgccttgtttgtggtaatcaccggttcacggcctcgggtggctacggaggttttcgtggctgaggtggcggctgggtttggattgctagaagactccttctcagtgcaccgttcttcccctgaagattttgttttgatcctcaactccgaacaagcagcgattgaggtgtacaacaatggttcggtgttcaattctccctccggttcgttcaagttcatccggtggtctgggctagctcacgcggaggtggtttcgttcccatctgatagtcgcctagagggggggtga

SEQ ID NO: 37190 - DNA, 1185 bp, Zea mays
  Peptide Sequence Number=SeqID_80565
atgcatgggcgacacgtggcctctggccggtggccgttgcatggcggtgtgcagggcggtgacggctcgtttcctgtgaccgcgtgtgctggccctgaggagcgtgggcgggaccccattgatggtggtgctctttttggtggagtcattctggctcccgaggtggatgctgtggtcgggcgtgctgagggacctggctccaatggtggttcgagccagggtccttcggtcggttttccgtcctcgtcgggtgggccgggccgatccctggagtctgtcgggccagttcggcctttggagattgttgggccggagattgagttgcatttgggtgggtccggtgtggactctggcgatctgcgcagcacttttgttggtggtggagtcgctccgtcgccggctgccggcgctactcccgtggcggcgaaggccggtatggtccccgctgcggatgccgacatgatccctccgtcgccgactgccggtgctcctcctgtgacgaaggatgccggcatggtccctgctgcggatgctggtttggtccctccgttgccagctgccgacgctgccgacatggcccctgctgcggttgggcccccctcttccttccctgctgctgcgagtggtggtttgcccgttgccgggtctggggaaccatcttcgtcgtcgactgcgccacctgtgctgacgggagggatgaagtcgctcacgatgatgttgggtcctggcacgaggatttggccccgttccccaatcacctactcccgtaagggacgaagggtggttgcttccccggtactttcaccagtccctgcccagccgaggttcgttgagaggatgtcgaaggctgttgattccatcctcgatgatcctccgatgcgacagcgccgtcccaggaaccatgctggtggtaccctccctcgccgcagcaggcgtcttgctggtgcaggggtggagcctccgtcgatccctcagcgtatcccattaggcaagctgcggattgtgaaggagctgggtctgctgcagactgatcacgctgaattgttgtctccaggtgtgttggatgattatgctaaggtgttcgagaaacgaccttcggttctgcagctcaaatctttggcgttgcttctcaacatgtccatcccagaggatttgttgggggagcctgcctcgagggagatctaa

SEQ ID NO: 37191 - DNA, 969 bp, Zea mays
  Peptide Sequence Number=SeqID_80566
atgtggttgggcctgctcactcttctagcaaggagacagatgaagatattgggtttattgttaggcatcttgtcagtgggtctaatgctaggcaaagctctaaggcttcagcaggatcaagaggatattgaaaacgaatcagctattgtggagcttgaagctctagctgaagctaagaaggaagcagaaaaacacatgaacaagatatggcaaagattaaagaacaaggataattgcttcggtattgactctcgtcattgtgaccatctaaaaagggtgttttcctctattggcgctacttcgagagaggactcttattctaggggagatgttggtggagctcttacttgggtggagaaagaaaaaggggagcttgaaggtttcattaatgcccgaggtgactactgtgccatgatagtatcttgcggcatggcttctgtgctggagaagcatctaaatttgcattcccttaggaatgacttcggagtcttttacacctttacttcagtggatgaaaaatctgactctgcattcccttactttggagtctttttgaccttccacacaaaggtcctcgagagtgctattgtttcttcattgcacttgaaggagcctcccttctgtcgtgttgttgcatatcctacattgaagcattcgaggctgaagattgttgtaacttggggtcctggggttggacacattgcgggatgtaaggcgcgaggtacagcttctatgaaattaaaaatgtgtccacaaagcttccgtgaaattacaaatgcgtggggtacaacttacatggtgactacaaatatttctttcacaatctttatcttcgtctctgcttcatgcatcaaagccttcgacgttgaagctacctgcttcggcacagtccttcgcaacgcctatgtacaagtgaagctccacatcttatccttttttgattcgcaagctgcttctgacgaaggttag

SEQ ID NO: 37192 - DNA, 995 bp, Zea mays
  Peptide Sequence Number=SeqID_80567
atgaactcgacagaagctgtcggcaaacggctctaccgcctggcttcggagagcccaaatatagacgctgagcctgacaatcgcattgggaccttggagacagtcgactttccgaagtccaaatggctggggcttgctcggtacggcgatatggtaatcatcatcggaagcagcttcctcaatatctccttcctccgcttcggcaacagtctgttctgtctcggcagtaagaaggtgaatcgtcaggatttttacaccaggcaaacagctacttacaccccgctgcgcggtggaccgcagagaccaaataggcacatattcatagacacctgccaagtcgtcactcgtaaggcattgaaggccatgatgcgtgcattggaagggcagcagctgcttgaggacgaccccacattcgtgtacctcactacatacctgctcacccgggatgcacagtatgatttcttggctcggcaccaccgtcagatgattgcccgagcagaagatgcagagaagcgcaatcgccagctccatgtggatctcaccacaactcaatcccgtgtagctgccttggaaagtcgtgaagtcattgttgttaaagccctgaagcaagccaaggatgagcatgtccagaagttgattgaggtctacttggtcacccacaaccaacgtagagccctgcggatccaagagctcgcttcatccaacctagttcaacccatgagagctgaagatccccagattcttgaaggccacccggtctctatcagaggagagaagaaggcttgggaactcccggaaggagccatagttttggaaggaatgtcagtctcccctaaggctatgggtaagcaagagcaccccaaatcctcccaagatcccccgccagagttgtttgagcccctcaccatgaagaagattccatcaccctcccttgaggtcaaggaagaagctacaagcaccccactagcaccgccgccctatgaggagctacaaga

SEQ ID NO: 37193 - DNA, 573 bp, Zea mays
  Peptide Sequence Number=SeqID_80568
atgcaccggagccccacagagagcccaccccgtcgttcctgcccgaggaccgccaccgccgaccgaagccccgccccgactgagctcccacccgagccaccgccgccccacgtccaccttcccacgtgcaccgtcgatctcggccacggcacccgcaccatgcacgggcggaccccgtctattagcgcgatccctgcgcctcactgcacccgcatctctcccatgccgctgactagcgggctcggtcatgccgagatcccctctatcagctcgcgagtgcggtggcgccccactgcccaccaagccactggctcatggggcctgcgcgccagtgccatgccccagcccttgggccccacctccgtgctcgcggttatgagcggccttggagctcctttggttagagatattatggttacggatgatgatgatggttctgattatgaattctggtatttcctctacgaggagccttacttaaacaacaaacaccaggttatccacattgcatccgctgctcaggagaagatggaggccatgcagaggactttgaggagttctagattagattag

SEQ ID NO: 37194 - DNA, 288 bp, Zea mays
  Peptide Sequence Number=SeqID_80569
atggcgagctcgccggtgctcgccgtctcccccatccccctccctcccccgagcgcctataaaagggcccgctcgagccccgtcttcgccacacaactcccgcaatccccactgccctcctccccgagctgttcaagcaagcgccgccgtgctccctgccttgctccgctccgccacacgctcgtgatcactggacaccactttgcctcccctgtcatggccggaaacctcaccggcggcttcgccgccgcgggcacccgccactgcgccgtggaccggccgccatag

SEQ ID NO: 37195 - DNA, 558 bp, Zea mays
  Peptide Sequence Number=SeqID_80570
atggtgagggataccgagcttatcggccacaaaatctcgccgtgcgaagtcatcacctacgcgttgcgaagaagacccaggcgaattgtttggggcagggatggagcagacacggaggagcaggtcctgccagaagagaggttgcacatctttacccacaagtcatgttacccatctaccaagggatcgcgacttcccatacacctctaccgaggaggcgaggcagggaccgtcatcgcagcaaaatcctcccgagggcctccctacactgaccactcccctactgcccttgcccctttcgggtaccaacttgctcttcagatgacacgtgtcctcactgctagtcgtagcaatacaaatgaaacatgggtctcttgtgtaaaacgcctacggcgaaggggtatggttaattatgagccgcgagatcagataacgacggtccagattagatctgagctgtgttatgaagcggtcggcccgaggcggcgccgccgtcataacgcggcggagttctcgccggagaagagcaacgtgccatccccgagccacgggtcctaa

SEQ ID NO: 37196 - DNA, 873 bp, Zea mays
  Peptide Sequence Number=SeqID_80571
atggcgcctcctgttgacgtggtcggtccgtgccctaggttgggcgaggtggaggctccttcgaggtcgaggtcgagtctgtcttccaaggtcgaggtcgagtccgagcccccgggtcggacgaggcggagaccgtcggcggatgccagggctgagtccgagccctggggtcgggcgaagcggagttcatcgtccttcggggctgagcccgagtccgagccctggggtcgggcgaggcagagttcgtcgtcttccggggctgagcccaagtccgagccccggggtcgggcggagcggagttcgccgtcttctagggctgagcccgagtccgagccctcgggtcgggcggagcggagttcgtcgtcttccggggctgagcccaagtccgagccctggggtcgggcggagcggagtttcccatggcgcctagggccggacttggctgctgtcagcctcactctgtcgagcggctcagcagtcggtgtggcgcaggcggcgctgtccttcttgtcagaccggtcagtggagcggcgaagtgactgtggtcacttcggctctgtcgactggagggcgtgcgtcaggataaaggtgtcaggccacctttgcattaaatgcccctgcgatttggtcggttggcgtggcgatttggccaagggcgagaggacggtcaaggacagactcgacttttttacatacgcccttgagtcgcctttccgcaaggaggaggggggaaagcgccatgtgcccttggagggcgccgaacatggtgtctctggtgagctgctgggcggggctcgatgcctccctctgatggaattccgttacaagatcgttcccgctggtctgggaaatgtcctagggtacctcgggaag

SEQ ID NO: 37197 - DNA, 72 bp, Zea mays
  Peptide Sequence Number=SeqID_80572
atggcgccgtcacaccgttcggctcatcatccacctgaagctcaacctcccacgattacaaatggattatga

SEQ ID NO: 37198 - DNA, 1119 bp, Zea mays
  Peptide Sequence Number=SeqID_80573
atgcaggcggcatgcaaccgtaccaagggggcgcaccctttcgaatctgacgcgtccagcatgggggcccaggcccacacgtcatgtaaccgacgcgccggttactatgtgcgagaagctacaccgccacttgcgccagtaccacgccttctcgactgtggaaccagtgccgcgactcgaggcgaccctgcgcatggcccaacagtgccaaccgagcacatcgatcacgggtcagtcagccgcgggagaaggcgcgacgggactgggaaaggggatactccgaaagggatccttctctgcgaaggaagcgggccccgagccctcctactgatcagaggttcgaaggctggcccctcggaagggttcgacagccgcctcagagcactcgggccccgagccctcctactgatcagaggttcgaaggctggcccctcggaagggttcgacagccgcctcagagcactcgggctccgcgcccaccactggtcagaggttcgaaggctggccccttggatgggttcgacagccacctcaggccactcgggctccgtgcccactactgatcaggggttcgtaggctggcccccgaagggttcgacagccgcctcagagcatgcagagcgagggatgactctgggtacgtccgatacatggccgaggctcgggctacgctcccgaggtaccctaggacatttccgagaccagcaggagcgattctgtaatggaatcccatcagagggaggcatcgagccctcggaccctatcaaacgggaccgggtccggcaaatcacctgcagggggacccccaagactcctaaatctcagctggtaacccccatcagcacaaagctgcaaaggcctgatgggcgcgatcccggtcaaggctccgtccactcaagagacacgatctcgccacgcccgagcccagcctcgggcagaggcaggcaggcagccgactcaggaggattcacgactcgcccgagggtcccctcaagcaacggacgcaccttcgactcgcccgaggcccagctcggacaggcttcgcggagaagcaaccttggccggatcaccacgccaaccgaccgtatcgcaggagcattcaatgcaaggatcgactga

SEQ ID NO: 37199 - DNA, 1023 bp, Zea mays
  Peptide Sequence Number=SeqID_80574
atgtcttcgcactcccttcatgcatcgcgtccttccaccttccgagcccccagatggggagcgcccgcggttctttcgtcttgtcgtcgttggaggaacacaacttcgcggaagttggtacctttcagccatcgctcggcttcaaggattttcattaggcagcccggctgcatcccctcgccggtggtcacccaagacgatgaccaccagtttgatggtggggagaagcgagccgagctgcggcctctgcccctccctcagcttcaaggatcttcatcatccttgctggggcggagagcaaggcgagccagagctctacctcccacgcgggtcgacgggccacctcttcttccagcttctgggggtggaaaccatcctccagctctacggaggaggtgccctccggccatgtcggggaaggcgaactgttgctgcccagccagggtgcaacattctgtcctctgtcctcgctctcgtggcgaggacgggagtgaggacctgccggtgcgctttggggcggccggcgctcgctggtgcggtgttggtggacaggtggatgccaccgttggtgctgacgtggtggcagctggagaaagcttctccgccgacaagcccgtcagcgctacccgcggaccgacctccgactctttggcttcaatgtctggttctcgtcccttgagtggggacgcgaacaagagccttccggcggcagcgtccgtcctgggaccatcgctactgccgcagaggtcgttggcgaatcaccaggagtttgtcgtcccgcaggctctccgatgtggaggttgttcatacccgcgggagtggaaccagagttccgtccgtagtggcaccttgagtgccggtgtctgttcattgcggctgtcggggcctgaacatctaggtggagatcctccgaccgtgtcgccgtccgaggctgggtcggactccgcagaaggtggagtcgatgccgagggtgctgctgctcccccactgatgtctgatcctgcaggaacaatttatctgtag

SEQ ID NO: 37200 - DNA, 4701 bp, Zea mays
  Peptide Sequence Number=SeqID_80575
atggagcatctgttcatgcaggctttcgagagcagggaccgggtggccgcgcaggtgcagcagcaggccgacttctactcccagaccctcgcctccagcctcctcgccgccggtcaccagcccccggaatggctcatcccttccaccaccctgccccaagagctgaatggcaaaccaattgttctgactggaagacagatcacaacaccagctatcaataggaccgtctttctgcctctagctattcctagcactctgtccacaaaatcaggggatccaaatggatatgatggctacccaaacactaattgcactgctatgggtactaaccaacatgaagaggagcatcaagagcagtcttcacttgcccaggagcttactgagtcttgcactgcagacaaaatgttttcaaggattcagcgttccaggacaaggcaaatgcatattgaagatcgtgtgcatggacaggatcaagctgcaaagagcggaagctgtgatgggatgcataggtctaaccttaagactgtggggtcaaacagagctgctgcatcatctttgatgccgtgtgatgatgtcccaaaccttgctgcaacaacatcagatccaggccagggtagtggtttttgtgccattcaagggaagtcaattgacttcttgaagtgcaacaacaatcctgaagaccaaggagttaagttagatggtttcccgccgttgattgtggagaacaaaattatctgttctgatagcgatatcggggtcagtaacaactgttctattagagattcactgggtgcgccacttccagatttctctaagccaaacactgcagatagtgtatgcctatgccaccgaattcctgaaactcacttactggttgagccaaaaatacttcaatttgatgttgctgaatcagtttgtatgaatccttccagtgaacaaacaggtcagcagcaggaatctagtctgaaaagtaaccatcttgatcttgcttttacaaatccttcaagtgaagacccatcttctaccagttctcagggacctcattctatgggaaggttgttgcttaatcatgttaagtcaagaaatttgaaccctgacagtgaaccagtggagcagcaccacaaatatacttcagaatgtggccatcctgatcttactagtatgcattctccaaataagaaaccatctctgacgtgtcctgttgaagcaccgaattctatgggtgaaccattacttcataaggatacagaacatattcctgaaaccaattctttgggaagagcatactccaagttcagccaaccacttaaaatagatacatcaaacagtaatgaaaccaattgttctgtggtcaactcactgcttgataatgatacattgcaggccactgaggatactgacaaactgaaatctcatgtctcacctccatacagtggacctttgcagctacctacccaactagctgatgcaaggtttggggctcatacatcaccaggaatactaccgaacagtttgttaggggtggatgggtgtaatcacctttcaaatttgcaaaaaaatgacacaaatagccgttgctcccgatacaggtctgctgtaagcctagagctgcttccacctcaaaattttatttccactgatgcttgtcaatcaaggctcttgtcttatagaacacaaagtaatgacaaacattccagttctgttgcttctgctatgaatgcctctaaatctgcagatagtaagttacctcaggaacagtatttattggtcagaccatctttggaatttaatggaagtatttcagatgcggaaactcccttgggccgttctcctctgggcatgcaaaatgaaatgctccaagcagacccagtatatgactcagccaattgctctccaggaattttgggtgatgatgctcatgtcagcaaagcctatggtggttctgctgataacagaaagaacatatctgtggttccgaaagttggccccatcagttcatctagaatcagagatatgcaaataacagaaaagaatgtggtcgcttcatcagaaaaaaacaatggaaaactgcaagaaggaaaagcacaagagacccctcatcctaaggatgatgtgcaagtaaatgctgattcatgcacagctgaaaacattgagaaaatgaagtctccatgtacgtcagaatcatgtgaggagaacaacaagcaccaggaggatagaggacatgctcagaagaagtcagctgcagatgtcgtccagatcaatggggaaaaaatctcaatggaaatacaaccttctgatccttacatcctaagaagtacaggatttgatgacttcatgcttctcaaatctgagacaaagaatgatgcagtgaaccacagtatttcagttgcaagtgatgttcaacaaaacgagagttcttctcccaagctaagaaataggttcagcctagctgaggttgctctctgtaactcgtctagagcaaaggctttatcacctaattttagttgtgatatcagcagcaggaatgtagctgaagaaatggacctccaaaactatcaagcacagttacaaaatacttttgatgttgctacaagttctattatgcctagcagatctgatatttctcttgatagtgtggagctctgcagtcaagaggaaaatacttacttaaaaggagagggtttaagtgtttctaattccaatgtggaacattcacggatggctcctcagatggatgaaatattgtctcagagtgtgatactgaatccagcaaattatctcagcactgattcaacaaatatattcctgaattatgccttggatcaacatggtaaacatgcaccttctccagttaagaaattaagttatggctctggcgtagaagctgataggaaatttagaagtgaagatctaacaggatgtttgctatatgatggtactacctcaaggaaaaaggatagtgactctgtgaaatttaatgatgcaatgccacaatttgagagctttgatttttctcttccattggatagctcaactactgaagaaaaggcatttgggagtgttcatgattccatacaatttggtacatttaattcagatcccgctaataaacatgagatgagtgcagtaagtggcatgtatcagctattggcaactatgtcagggaaagctacaaactgcttgtttaatgatgatgaaaggcaacccggtgaaagtattgatggtagtgtaacagatatttttggttcaagtggattgggacataagggttctttcattactcctgattttgcagcgtcatgttcttcaaatgctgcgaacaaaaaggataatggtgaaaatccattgaccccttctgttgaaaagtattgtctggggaaactttcagaaaaaaatggatctgtttcggagcatatgggttcgattcctgagcttttatgcttccgaattgatgaagacaatgacattgcagaaggaaatgattaccgagagatattacctagatccataggcaaccaggagcaatcaggaaggaaagcacttcaggatatcactggactatgtcaaagcattgggaattctgcctcttattcgataggtatgagtatggatacaggtgacacagacatgactgtagaaacttgcagcagtgaactcaatcatcatccagatctcaggaatgatggtgataacaagaagcctaaagaaagttgtggttctttattaaaaaaaggagggaaaatgtctcgctcccttcataacagattaagcaagacagaaacaaggcacatgaatgaagcaaatcctggaaagcgttctaagcctagtaatattgttgctaatgtggcatcttttatacctcttgtgaagccaaaggtgcaaccaacagcatgtgaagccatccacttgccctacaacctgtcctcctcgatgggagtcgcgtcgtcgaccacaatggcattgagggccacaaactcatccaggctgatgaagctgtcaccgtcgacatctgcctcgaccatcatgcacgccacctcatcgtctgacatcgtgtggcctaggctctcgaacaatgtcgttagttctgaccgcgagatgcttcgtcctctgcagtccgcgtgggggacttatcctttgaaaaaagatgttagagtgaaagcacttgagacagctgaagctgcaaaacgtcttgaagaaaagaaacgaagtgaacgtgaaatgcgcaaagcagcagcaaaactagagcgtgagaaactgaagcaagagaaagagttaaagcaaaaagaggaagaggaacagaagaagaaaagaggtgctgatgtggcaacaaggaagaggcagagggatgaggaggaaaggagggagaaggagagaaaaaggaaatgcattgaagaagctcgaaaacaacagaagcgacctattgaaagaaaacatgccaacattaacaatgctcatccagaaggtcatgataataaggagctgcagcagaattcggctgaagcggtgaaaggcccagtaaaatttgatgaaatgacaggtcttggaggaaatgccactaacagtaacaatgaaatggttgtgattaccgatgagaggcctgcaatttctggacctaattgtcaggaaaatatcccaaacagtattgaggagtttgtcctgcccacataccgcaacgtggtttcagatgagtttctttcctag

SEQ ID NO: 37201 - DNA, 408 bp, Zea mays
  Peptide Sequence Number=SeqID_80576
atggcggcggcggacaccgagcgaagcgctgctttccgctgtgttccgtactccgccgttgtcttgctccctctcctctcgggctacttcgatctcccttccatctcctcgctctccaccccatcgtcgatcctcgccttcaccgcatgcttcccgaacgtactcgactctgtcggctcctgcgattggcaccctttcatctccgtcctcgaggccttcgcctcctgggacgccactgggctgggcctgagctaccgacaccaggcagcgctaccaacaccacgaaggaccatgcagcggcatccgtcaccggcgtttctgtttggcgacgggctgcgaggtgggaggacatggcgtcgcacaacaccgacgtgcttgtcaaggggtgggcgtggacgcgctaaatag

SEQ ID NO: 37202 - DNA, 336 bp, Zea mays
  Peptide Sequence Number=SeqID_80577
atggggattagggttcgagatgcgagggcagcgaagaagatgagagaaggagaagagaatcgagagtatagatgtccaaacaagcctgcacgcaacgactatgctcagttgaatcgccacgcccaaggcacacgtatgtctcgcgcgctcgcgcttgcgatcctcctcctggccgccgccgccgcggtggcgccgctggcctccgccggcaccgaggagttcaccagcgtcgggtccagcggcggcaagatgttcgacagggcggtcggagccgatcccgacccgtccccggccggcggactgccggccgacccggcgcccgacgcacgcccctaa

SEQ ID NO: 37203 - DNA, 90 bp, Zea mays
  Peptide Sequence Number=SeqID_80578
atggcttgggatgacatctatggtgatgatgactttgatgatgtcatgattgttcctgcttctactatatcttctgaatcaaccggttga

SEQ ID NO: 37204 - DNA, 747 bp, Zea mays
  Peptide Sequence Number=SeqID_80579
atgcaggcggcatgcaaccgcaccaagggggcacaccctttcaacttcgacgcatccagcatggaggcccaggcccacacgtcatgtaaccggcacgccggttactacgtgcgaaaaactgcatcgccacccgcgccaataccgcgccttctcaactgcggaaccggtgccgcgactcgaggcgaccctgcgcataacccgacagtgccaaccgagcacatcggtcacggggaccgggaaaggggatactccgaaagggatccttctccgcgaaggaagcgggccccgagcccccctactgatcagaggttcgaaggctggcccctcggaagggttcaacagccgcctcagagcactcgggctccgcgcccactattggtcagaggttcgaaggccggcccctcggaagggttcaacggccgcctcaggccactcgggctccgcgcccactaccgatcaggggttcgtaggctggcccccgaagggttcgacagccgcctcagacgcagagcgagggatgaccctgggtacgttcgatacgtaaccaaggctcgggctacgctcccaagagtgaggctgacaacagccaagtccggcctcgggcgccataggaagctccgcctcgcccgaccccagggctcggcccccgtcttggcctcggacgatggaatccgtctcgcccgaccccagggctcggactcagccctggctccggaagacgacgaactccgcctcgcccgaccctag

SEQ ID NO: 37205 - DNA, 201 bp, Zea mays
  Peptide Sequence Number=SeqID_80580
atggcgcttccccccccccctccttgcggaaaggaaaacagcgccgcctgccctgctccgactgctgtgccactcgccagagtgaggccgacagcagctaagtctagcctcgagcgctataggaagctccacctcgcccgaccccagggctcggactccacctcgtcctcggacgacggactctgcctcgcccgaccctag

SEQ ID NO: 37206 - DNA, 855 bp, Zea mays
  Peptide Sequence Number=SeqID_80581
atgttcgatgtcacctacaacccagaggacgggcccagggcgtatagagaaccttctatctacaaccgcctcagtgagtacactgtcatggcacaactgccatacgacctcggtaggacaactcacaacgtcgcatccaggaactccagggcggatgcgcttgcagtagggggttacaagcgttcgcgggggagagagagactgtccgccagcccgttctcccgcgcggccaccttctcgtacgagagccctggacctttcttttatagatgtaaggagagggcccaggtgtacaacggggggggtcgggcgaggcggagtccgtcgtccgaggtcgaggttgagtccgagcctaggggtcgggcgaggcggagtccgtcgtccgaggtcgaggttgagtccgagccctggggtcgggcgaggcggagtccgtcgtccgaggtcgaggttgagtccgagccctggggtcgggcgaggtggagtccgtcgtccgaggtcgaggttgagtccgagcccaggggtcgggcgaggtggagtccgtcgtccgaggtcgaggttgagtccgagcccaggggttgggcgaggcggagcttcctatggcgcctgaggccggtcttggcggctgtcagcttcaccctgacgggtggcacagctgtcggagcagcacaggcggcgctgttttcctgtcaggttggtcagtggagcgacgaagtgactgcggtcacttcggctctatcgactgaagacgatccggccaaggttgcttctctgcgaagcctgcccgagctgggcctcgggcgagtcgaagggctcaggggagacgagatcgtgtccctcgagtggacggagccttga

SEQ ID NO: 37207 - DNA, 1110 bp, Zea mays
  Peptide Sequence Number=SeqID_80582
atgcatgaggagagtgcgaagacatggttgccatccaagggggtcgccccccttttaaaggcgactctccccacttgcgtcctcagccgtcgcggactgagtcttcaccaacgcgctccaaggtcttccccctacgacacgggggctgggtcccacgcgtcatacaagctggcccaggacagaaggagccaaaccgccgcgcgcgggaccgggaaaggggatactccgaaagggatccttctccgtgaaggaagcgggcctcgagctctcctactgatcagaggttcgaaggctggcccctcggaagggttcgacagccgcctcagagcactcgggctccgtgcccactactggtcagaggttcgaaggctggcccctcggaagggttcgacagccgcctcaggccactcgggctccgtgcccactactgataaggggttcgtaggctggcccccgaagggttcgacagccgcctcagaacacgcagagcgagggatgactctgggtacgtccgatacatggccgaggctcgggctacgctcccgaggtaccctaggacatttccgagaccagcaggagcgattctgtaacggaatcccaacagagggaggcatcaagccctcggaccctatcaaacgggaccgggtccagcaaatcaccttcagggtgaagctgacagccgccaagaccggcctcaggcgccataggaagctccgcctcgcccaacccctgggctcggactcaacctcgacctcggacgacggactccacctcgcccgacccctgggctcggactcaacctcgacctcggacgacggactccacctcgcccgaccccagggctcggactcaacctcgacctcggacgacggactccgcctcgcccgaccccagggctcggactcaacctcgacctcggacgacggactccgcctcgcccgacccctaggctcggactcaacctcgacctcggacgacggactccgcctcgcccgacccctgggctcggactcaacctcgacctcggacgatggactccgcctcgcccgaccccagggctcggactcaacctcgacctcggacgacggactccgcctcgcccgaccctag

SEQ ID NO: 37208 - DNA, 420 bp, Zea mays
  Peptide Sequence Number=SeqID_80583
atggcctgcggtaagcacaccgtgtacaactactccgacatgctgtggtcgcactacaggccctactggcgccagctccgcaagctatgggtcacggagctgctcagcgcgcgccagctccgcctcacggagcgcgtgcgcgccgaggaggtctgcgccatgctgcgcgacctgcacccggccacgagcaccagcacgacgggtgctcaaggagcacctactcatggtgacgctcaacgtgatctcacgcatgttgctgggcaagaagtacgtgggcgaggacggcgccgggccgggcgccgcggccacgcccgaggagttcaggtggatgatcgaggagatcttcctcaacggcgcgctgcatgtgggcgacatggtgtcgtggctcggctggctcgacgcgcacggataccgttatag

SEQ ID NO: 37209 - DNA, 1641 bp, Zea mays
  Peptide Sequence Number=SeqID_80584
atgccttcggcggcattaaatctcggcacggcggtcgagggcagcttccaaggcgccggcggcggcatggtgccgtccgcgcgcctcctcaccgctaacggcggcggcgcgccgagccgtcgggaggagacggccaacggcggagggcctggctctgacctggccgcgctccggcccaccaaaaggccgcgcgggaaagcccagctggccgggaagcccaggaggcgggcgccgatctggaacctgcaggccgccgtcttcgtctctgtcgtcctcaacgtcggcctcctcctccagcaccacgtcaacagcacagctccgtcgcaccacgaccacgaccacgggcaccggcaggagcaccaggcctgcccgacgcatctagacggtggcggcgtcagccgcagcagtagggggaggcaggaggtggaggcggcggcgtcggcggcgtccgtgcccaaggccgccgggggcgccgtccaccggcaagccgccggtgacgccggactcggtgatcaacctcgaccatactgtatattggctagcgttgacattcgcgttgtcggctgctgcagcggcgacccgaccatgttcgaggagttctggcgggggacgggggccgccgcggagatcgtgatcccggggtggcagaccatgagctacttctcggacgtgggcaacgtgtgctggttcctggagcccgggctggaccacgaggtgcggcggctgcaccgcctggtcggcaacgccgccgtggacgacggctaccacgtcctcgtcggcaccggctccacgcagctcttcatggccgcgctctacgcgctgtcgccgcccgccgccgcgcccatgagcgtcgtgtccgcggcgccgtactactcgtcctacccggccgtgacggacttcctccagtcggggctgttccggtgggccggcgacgccagctcgttcacgggcgacgcctacatcgagctggtgtgctcgccgaacaaccccgacggcgccatccgcgaggccgtcctgccctccggcggctccggcgtagcggtccacgacctggcctactactggccgcagtacacggccatcaccagacgggccgaccacgacatcatgctcttcaccgtgtccaagagcacgggccacgccggcacgcggatcgggtgggcgctggtgaaggaccgcgacgtcgccaagaggatggccaagttcatcgagctcaacacgatcggggtctccaaggactcgcagctgcgcgccgccaaggtgctcggcgcggtctccgacgcctacgagctcccggaggcggcccagcaccgcctgttcgactacgggcggcgcaagatggtggagcgctggcgcgtgctgcgcgaggcggccgccgcctcgggcgccttcagcctgccccacgagacctcggccttctgcaacttcaccaaggaaacggctgccactaaccccgcgttcgcgtggctgcgctgcgacagggaggacgtggaggactgcgcgagcttcctgcgcggccacgggatcctgacgcggagcgggagccagttcggcgcggacccgaggtacgtccgggtcagcatgctcgaccgggacgatgcctacgacatcttcgtcaagcgcctctcctccctgcactga

SEQ ID NO: 37210 - DNA, 1025 bp, Zea mays
  Peptide Sequence Number=SeqID_80585
gtgagggaaatttgagcaacgtgaagcaacccctgctggaccagccgcctgatgagcagcaagtcagcaaccctcattcggacctgtcctcagatagctcttatggtcacattcatggtgccttgctgcagaatgggcagcctctgaatgggcagattcctgaagatccggtggatatggggccggtgccaaactttaatgcacctgccgctcatcccatgcttgggccccaagaggttgatggcccacctatacaggaggtccctcctgtgcctggagatatagttattcctgatgcccaaccggtggagcccctggtgaatgggcacaataacgtggagctcaactttatgttttcgcctggctggcattcggatcctgttctgttgagccacttagagaggaaaaggaatgctcagttttacaggatctgggagagattttttgctccagccgactactcagcgacctcggtgcaggtttccaagaaatgggcaccctttttcttatccaacttgatgcacgaggattcctttagctggtccaaaaagtttctgtcctcagatattccttcagctttgctggagccggagtctatgtcactcccttttgtcctccccaggaagtgccctgaggacaagctccctgatttggttgtttctgaggaatctgctgatgacacctctgtccctgcggacacaacctcctccaagcccaatattgctattgtggaatcagacctgaggagaagtaagaggcttcgtgacgcccgggctggtttcaggcaaggctcttgccaaaagaagaattgtttgatgtgtcagcacaaatgtgagggccccccctcgctttctgctagagctatcaggcgcttaggagagcgcttttgtaatctgtcagaggaagatttggctgacaaagttctgaagaaaaagaagaatccgcctggctgtgttggctctagcaagtcaggcaagaaagatgagggagacaggaatcaagaatcttcagatgatgacaaatga

SEQ ID NO: 37211 - DNA, 456 bp, Zea mays
  Peptide Sequence Number=SeqID_80586
atgacgagccacgccaagacccatgctgtgaaggtcaagggccggcgtggcacagagatgctcaatcgtagttcatttgggtcattttgccttttggagctttggttcggactgctggtagcatgcagagcggcagtgtcacagaggagaagtgccgcactcacgcaggggtcgttcgctgctatgagcaattttggacttctagtatacaagacattgaatgttctcaggtttgatgatgtagagaccagagcagagaccaagaaacaaccatggagcacataccagagcaaagaacaaagcagaccatggagcagagaccaagaaagtattgtcgcggagagggaggtgaacctaatatggcggcgaggagggaggcgaccttgttacgtcggcgaggagggaggcgaccctgctacgtcagcgaggagggcgacgaccatgctactgcggtga

SEQ ID NO: 37212 - DNA, 357 bp, Zea mays
  Peptide Sequence Number=SeqID_80587
atggcgcaccggttgctgtgggacgtgcaggcgaacgggtgggagcgattgaacttccccatcatctgtgagtcatgcctcggcgacaacccctacgtccgattatgcgttcttggtcttttgcggctcggcatgtcttcgttccagagatacaaaggagatgcagtttcagggtttgaacgttacttatgcttctcttgccgtgattggaagcttaggcatatgactattgcttcctgcccaggactcacggatcttgctcttgcatccgtcgccaagttcagcccaagtttgaggcttgttaacctcaagaagtgcagcaaggtctcagacggatgtcttaagaaatttacataa

SEQ ID NO: 37213 - DNA, 987 bp, Zea mays
  Peptide Sequence Number=SeqID_80588
cgcgagcacctccataatagcccccacctgttcgaccacaggtccaggggcaccgccgcttcccaccaccaccacctccgccggacgttccatgtcgtcgcctgccgacccctgcccaccgccttcgccggccgccgcctcgtggctcgggccaccaggcagccgtcgtcgcgcctcgtcgattggccggtcagggcgctggctatggggtcacgaaggaggccagggccagccctcgcagggagtatcgggggatccccggggatggtggcgacatgggggacgttgggcaaggaggagggcaagtcgctgcctcccgcttttgtgttgcggagagtcgaagggatgaagaacgagcaggcgatttctgagtattgcgagtcatggagtagagatgatgctcaaaggcagtacattgtagaacttggtataccagaagaatggatgcatgaagctctggctctttatcacgaatactatggagataaacagggcgcactggagaatttgattcagtgtggcaactggaagaaagctcatactattttcgtgacttctgttgctcattctatgtttctgtcatctaaccatcaggaggtctggaggatcacaagtgccttggagaaccacaagtatgaaattgctgactgggaccttggtgccggaatatacatagacttctacgttctgaagaactcaatgcaagaaagaaatgccatggatgattcgggttcactcgaggagatgagtgaatcatgtagaagtttctttggccgattaaacgagtcgttgttagtctggggaagcaaattacctgttgagtcaagggcatgctactcgaagatggcagaggagctatgcgcgcttctggtggacaccccaagcgagacgctgaacctacccatggggtgtcttctaatgatgctcaacgctccagttccggacgagagcagggaagggcagcgtcacagtgacccgtgcttcggg

SEQ ID NO: 37214 - DNA, 1473 bp, Zea mays
  Peptide Sequence Number=SeqID_80589
atgatgaaaatccttgaagccgagcaatggcagaagagcgccaacccccacgaggtcgcgctcctccaacaacagcaagaagaagacaaggtcggcagcaccaccgcgcaggaaacgaagagcgtggactccccggtggtgagaccgctggagggggcagccctgacaaggatccctccagcgaacaccggcgcgccccatccagaggcccggaaggcagaagggcacgatgaatgcaagggaagcgagacatggctgctactcaaaggggaacccctttttaaaggcagattcccccacttgcgcccgaagcgtcatgggcaaggtctccctcgatgcgcaccaggattcccatcctatgacatgggggccaggtcccacgtgtcatacaagctggcccgaagcgcgaagaaggtgaatcgtcgcacagggagcgtgcaaccgccctacggttattcgccctcccatcttcaccgcaaccagcggtcaagaaggcgaaccgctgtacgaggggcgtgcaaccgccctgcggttattcgcccttccaccttcaccgcaaccagcggtcaaggaggcgaaccaatgcacaaggagcgtgcaaccgcccgcggttgtgcgtcccctcggcttcgaccagtggtccaacctctggcatgggggcccagcccacatgtcatacacccggcatgccggtttctgtgtgcagaaaaatcgcaccgccactcgcgccaataccgcgccttctcaaggccgttgcagaaggctgaggagataaaattttcaaaaccaatgcaacgactcgaggcaccccgcacatggcccaacgaaggcattgagtgcgaaggtcatgggccagtcagccgcggggacaggcgtggtagtcggcgtgaccatgggctggctgacagtaactgcatcaacgggcgcacaggagcagcgagccaatcgccagtcaaactttggccccacctgcaggctcacatcctccccctgaggcggggcccgggggcccactgtcggtaccctgaatcagggatcaaggggcaccatagggcaaggaaagatgatacatccaggatgtatcaggcaagccggacctccatgaaggaacgccggacccccgtatgcataacccggaccccccgattgtggcctgagactctcgatgaaggcggcgctagggccatcctgcagacggcgctcctgtctagatcgttatcaaaaagtacgcccgtgctgtgcggcgcgctgtgctcatcatcccttatacgagaagcttcccctgcacgccgatactacgcacatctcagacgtcagggcgtaagaagattgctccagcagccaactattgctaccccaagtcttatatccattgtgctcctgggcccacatgtcggggctcatcgctcttgtacacgccccccttgtgctataaaagggggagtatgcaacgttacaaacggacccaagtga

SEQ ID NO: 37215 - DNA, 1014 bp, Zea mays
  Peptide Sequence Number=SeqID_80590
atggaggcccaggcccacgcgtcatgcaaccggcgcaccggttactacgtgcgagcaactgcaccgccactcgcaccactaccacgcctcctcgactgcggaaccagtaccgcgactcgaggcaaccctgcgtatgacccagcagtaccagccaggcgcgacggtcaatacggccaaaaatgggccgacagtaatggcggtggcaggcgggcaggagcagcggtcacgtcgtcagccaaagcttatgtcccatccaggggcagtgagataaccctctctcacggcgtgaagacgacgcgcccgtgttccgttcctcgaacggctcgcacacgcgcaacggccgcctcgcgaaccactcgccccgtcacattaactccgcggcgggacaggcggcgcctcaggcaggagaagcaagcgacgcttcgccttcgccataatgaccgcgtcaaaaagggaccgggaaagggggataccccgaaaaggatccttctccgtgaaggaaacatgccccgagcctccctactgatcagaggttcaaaggctggcccctcggagggattcaacagccgcctcagagcgcttgggttccgcgcccactactggtcagaggttcgaaggccggcccctcggaagggttcaacggccgcctcaggccactcgggctccgtgcccactactgatcaggggttcgtaggctggccctcgaagggttcacagccgcctcagacacagagcgagggatggccctgggtacgttcgatacataaccaaggctcgggctatgctcccgagggagatttgagtgatgcagcggatgtcgattccgggctacgttcgggctggggcatcgggaaccctggcgtggccctcccgtgcattgtgggtcaccagcacgtcggggactcctcaccggaatcaatcgtagtcgggcttgggcgtcgtggtatgaactctggtatgggcgtccgccgtggtggagttcctgacgccgtcgcgctcgatagctggaggtag

SEQ ID NO: 37216 - DNA, 542 bp, Zea mays
  Peptide Sequence Number=SeqID_80591
ccggggatagagggagggacgaggagccctacgcacgcgacagggaactggagcgcagccgcggcggatctgggcggagccgggtaatcgaccgctaccgcgaggagcgcgattcgcgattgccccccaagaacgggagaatgagacgcgagtgttacctcttgcgccgcgacgcgggaggccggcgggaacggttgcaggcgaggccgaggggaggcgaccacgcgtgcgcggccgtgggcgccacgggagtggcgcaagcgaaggccgggcgcccggacccggaagggcagagaggggggctcgggaagcgctccctccgccggatgcgtgacagcgtgagcatcctcacgatggcgcctcctgcacctggcctcgctcgcaccaaaggcgaagccgacggctccgccgctgctccagccacaaacgtcgccggtggtcaagccctccccttcgccactgctcaccacgatgtcgctgctccaaccttgcaacggcgccccctgcccttgtccccacccgcggccccgctgctgctctag

SEQ ID NO: 37217 - DNA, 471 bp, Zea mays
  Peptide Sequence Number=SeqID_80592
atggcgagtggtcattgttgtcggtccacctctgctcacctccggtgtcgagatgacgccacaatccttgatataatagtcgtcgaacgcgcgcgatatggtgagtaccgatcactcttggctgggctgccaaatgaagtgcaccccgggctcatcagcgaggtagtacacctggtcgttgcaccaccggatgtgctactcctctacatacatcttgttcgaggacactcacacaacaacaatggtcatcattccagcgcacaagaattcatggtcggttgtgatgcccagaacaacccgagagtcgtcgacattggcaatgaccatgaggtccccatgtttgacgatggacagcgcggtgcagccgctctggaccacgtacaagcggcggctgcgctggagctttgccgtacacagcgggcgcatggcccatgtaggactgcttccagagttcgaactggcagtcgctaa

SEQ ID NO: 37218 - DNA, 1251 bp, Zea mays
  Peptide Sequence Number=SeqID_80593
atgcgggcggtggccagcgccgtcgtgtggaccgcggtcgtgcaggtcgcctccatcgccgggctgttccgcccgcgggtcgtcgccgactgcggcgggaaaggcggcggcggcgccgcggccgggctcgccgctctcgccggcgaggacagcgccgccgcgaggctgtcgccgccggcgctcgtgcccaagagaatttacaagagcaacggctatctacgagtgacttgcaatggtggcctcaaccaaatgcgagccgggatatgcgatatggttactatagcacgccatctaaatctaacgcttgtggtccctgaattggacaaaaggtcgttttgggctgacccaagtgattttggagatatttttgacgtggaccacttcattaattccttgagagatgagctgatgatagttaaagagctgcctttgaaactccagttaataagaactaagaagagactgtactccatgtctcctgtcagctggtcgaatgaaacatactacctaaagcggatactacctcttgcaaggaagcacaaagtaatccatttcgataaatcagacgcccgccttgcaaacaacggccttccagttcagctccagatgctgcgttgccgtgtaaacttcgatgctttgagattcaccccacagattgaggcccttggcagacagcttatctccactctccagagaagcgggcaattcgttgtgcttcacctgcgctatgagatggacatgctctccttttcaggctgcacgcatggctgctctactgaagaagctgaggagctcactagaatgaggtctgtgtctttcaccgttacacactactcaactctttgcgctacttcgacgcttcgctggaaaaagagattggttctgaagcgaagaggcttcagggactttgcccccctcacgccagaggagattactctagtgcttaaagctctagggttcacaaaggacacgctgatctacattgcttctggtgagatctatggcggcgaaaggcgcttggcagtgctcaaggctgcgtaccctaaactagtaaggaaggagaagattctatctcctgatgaactgcggccgttccagaaccattcgacccagatggcagcgctggattacatggtctctctagcgagcgatattttcattcccagctatgacggaaatatggcaagggttgttgaaggtcaccgcaggtccgcatctctggattccgttcggaacattaataatcactag

SEQ ID NO: 37219 - DNA, 702 bp, Zea mays
  Peptide Sequence Number=SeqID_80594
atggcgcgccagcagccggagcgagtgccgacgcagcggcatcctgtcggttgcggaggtggttggaagcgcgacgggtggttggaagcgcggcggggtttgcgggagcccgcccctgagcggtgggctgttcgcggggtaccccgtggtgggcccgaggacgtgctgctgacggtgtgcccctgggacccgcgcgtgcggggcggcaccctcttccaccagaccaccttcagcctccccgtgcgccgcgccgtgctgttcgtcgccgaggtgcaccggttgcgggacctggagcccagggcgctgtgtggcgtggagctctacgacgacatcctcatgcgctacgtgaaggcgtccacagcctacctaggcaagcccgcgccgcgcggggagccgtcgggagacatggtggacttcgacatcacatactaccacagctgtgaccccgggcaggcgtgcctgttcgaggacgtgctggaggaggtcgagcagatgggcatcttcaagtacggcggcctgccgcactggggcaagaaccgcaacctcgccttcgtcggtgccgcgcgcaagtaccccggcctgccgcgcgcaagtaccccggcctgccgcgcttcctgcgcgtcaaggacgcctacgaccccgagcggcgtcctgtcggttgcggaggtggttggaagcgcggcgggtgtaggaaacgggtga

SEQ ID NO: 37220 - DNA, 1953 bp, Zea mays
  Peptide Sequence Number=SeqID_80595
atgagctcggccacatgccgccgcggcttcaatggcaagttccgtcgcatcgcatccgcgccgtcgccgcttctccaccgcaccggcctgtcgccacccgccgactgtggcgcgcgggctgcggagcagcactgcctccaccttctagagcgctcctccgcgccggccgccgtcctgcagtccctcgccttcctcctcaagtccggcctccacgccaacccgctcgtcctcaccaggctcttcgcgtcctccgctgctgcggcgcccgcgctgcttgagccccttgtcgctgcgctcctcgtgccctccgtccccatcgacgcgttcctcgccaacactctcatccgcgcgcacgccgcctccccgctcccttcggcccgcctccgcgccgcctccttcttcccgctcatgctccgcagcgccacgttgccgaacaagttcaccttcccgttcctcctcaaggcctgcgccgcgttcccgggcgttggtgtccaggcgcacgccgccgctctcaagttcgggttcaccaccgaccagtatgtttccaatactctcatacacatgtactcgtgcttcggcggtgagtttcttggggacgcgcggaatgtgttcgacagaatggccaaatcgagcgcggttacttggagcgcgatgatcggcgggtatgtgcgtagcgggctgtcgagtgatgcagttgggttgttcagggagatgcaggccagcggggtgaggccagatgaggtcacaatgattggtgttctggcagcagctgcagatttgggagcgctcgagcttgctcggtgggttggccggtttgtggagaaggaggggattgggaaatctgtgacgctgtgcaatgcgctgattgacgctctcgccaagtgcggtgatttggatggggctatggcagtgttccaggggatgaaggagcggactattgtttcttggacgtcagtgattgacgcacttgcaatggagggtcgtgggaaggaggctgtggcggtgttcgaggagatgaagactgctggcgtgcggcctgatgatgttgcgttcattggggtgctcactgcgtgtagccatgctggaatggttgatgaaggttatggctactttgagtcaatgaggatggcatatggcattgatcctaagatcgagcattatggctgcatggtagacatgttcggtcgtgctggcatggtcgagcgggcaatggagtttgttcataagatgcccatgaaaccaaacccaataatatggcggacgcttgttgctgcctgccgtgcccatggcaggcttgagctcggagaaaccatcaccaggaaccttctaaatgagtacccggcacatgaggccaactacgtcatgctctccaatgtctatgcgctgacacggaggtggaaggagaaatcagagattaggagagagatgagcaagagagggatcaagaaggtgccaggttgcagccttgttgagctcgatggggaggtccatgagttcatagctggtgacgagtcgcatccacagtggaaagagatatacatgatggtcgaggagatggcgagggagctcaggcgtgctgggcacatctcagctacatcagaggttctccttgaccttgatgaggaggataaggaggttgcgcttcagtggcacagcgagaagctggcgattgcatttgtgctactgaggactcctcctgcaggttccatcgcttcaagaatggctcctgctcgtgcaatgatttctgacagaaacaaaaggatcagcagcaaggcaaagcccacaaggacgcagacgcggacgcagaaggttgcatcaggtttccgcaccgaggagcggatgggccccgcctccacgacgacgctgcggaccgggccgagggcggtgggcccagcagctgtctgccgcctgccggggtcggagtctcagacgcccacaagagtcaacgcctag

SEQ ID NO: 37221 - DNA, 255 bp, Zea mays
  Peptide Sequence Number=SeqID_80596
atggcgctgatgaccgtcgctgaggagccaggcgcatgggagacctgcgcgcgagaggcactcaaccaatcagccgatggtccaagcggcgcggatggctggcgacagcagacagcggtccagccggcgcggagacgaaggcactcgtgcaaaaattcggcctcaaagcccatgccattaccttcacatatccatcagcccatcacgaaatgggacccaactggcgctctctttacagagaaaaactttggctga

SEQ ID NO: 37222 - DNA, 501 bp, Zea mays
  Peptide Sequence Number=SeqID_80597
atggtcttttcttctgttcctgtctaccttgatccatccaattggagccagcaccaccaggcacaggagcagcaacaacacgctcaacatggtcagcttccaagcgacggcggcatggacgcgcatgcacatcatcatcatgatcagccgccgccggtgcgaccacctcatggcggggctctcatggcacctcgccctgacatggcagttgtggtctcggcgagcggcaatgggccaactggcggtggctctgctatccgggcaggctccatgtctgagcgggccaggctcgccaagatcccgcagtcggagccggggctcaagtgcccgcgatgcgagtccaccaacaccaagttctgctacttcaacaactactcgctctcccagccaccaagtcgtctaagtccaactcgtcatcggtcgcctctgctttcggcacgggcgggacgtcgtcatccatctcgtccaccgctaccggcgatagccacacgggcaccatga

SEQ ID NO: 37223 - DNA, 120 bp, Zea mays
  Peptide Sequence Number=SeqID_80598
atgggtgacccatacccacgtgggtatgggtatggggttttggaccctttgctcggcgccataggccgtggcgccgagctaacacagctcggcgccacagcctatggcgccgagctgtga

SEQ ID NO: 37224 - DNA, 162 bp, Zea mays
  Peptide Sequence Number=SeqID_80599
atgaaccccatgctgagggctcaagtgacgcacaaccagaaggacctcgtgtcgaccatgttgatcaaggtggttctagtgttcgtaacactcccgttcgaccccaacgttcagctccataatagccggacatatcaatgcttcaatgcttggcggtgctga

SEQ ID NO: 37225 - DNA, 609 bp, Zea mays
  Peptide Sequence Number=SeqID_80600
atgcagcgctcgggcacctcgcgcgggcccaacgcgcaacgccagtacggcaccgccacgccgctggagctggactggactccactccacttgagcagcttcgcgcgctggtgtgcgccagtgccaccagcacccccaccgcccaccgcctatattacactacccctcctcttcctccgcccggctcaccagactcgctctcgcttgcgtagctgcgtcgccattgcgctgcttgcctgctctgtgcctgtcgcgagaggcggaggacgggcgccgcttgtggtcgtcatcccggccgagagaggagggagagtcggagagatggaggtggagcacggcggagagatgatgatgttggtcgaggcggctgcggcggatgaggaggggtggcagacgccgaggcgcgaggactgccgcatccctgtggtgccgccgtgcccggcggcgccgtcgaggaagaaggccgtcgcgatggcgccggaggcggccggagggagcaggcggcgggacccgcccaagggcgggtacttccagccaccggacctcgagtccctgttcgtgctcgcgccgccgagggcacaggcggcggcctcaagccgcgcgtggtaa

SEQ ID NO: 37226 - DNA, 234 bp, Zea mays
  Peptide Sequence Number=SeqID_80601
atgccgctgatcgagattatattggccgtcatcatcgatcacagcccaaaaccactgtcagttcgtcatgctgaaagggtacttactgctctagctgcaccgtacgtgctgcaaagcggccagaggggtcccatctttgacttgcacaccatcctggagcatggaatctcctttaccaaaattctcattatgggagaacccctgtcctgcactggcaagctagagactgattga

SEQ ID NO: 37227 - DNA, 807 bp, Zea mays
  Peptide Sequence Number=SeqID_80602
atggccaaggacggaggccccgactggaacggcctgttcaagtggagcatcgcccacggagacggcaccaacccgccgcgtgctctcagtgaagaagacagaaaatggtttatggaggctatgcaagccaacacgatagatgttgtgaagaggatgaaggagatcactcgggtgatgagaactccacaagatgtcttgcagtctcagggtgtgaccccagagaacattgaagatttacattctattggtgggctggatcccctgctcggttacttgaaaaattcaaatgctggcatccgcgcaaaggcagcagaagttgttagtacagtcgtgcagaataatcccaagagtcagcaacttgtcatagaatccaatggactcgagccactgttgataaacttcaaatcagatccaagtacaaatgcacgcacaaaagctttaggagccatatcttctataatacgtcataaccagcctggagtttccgcatttcgcctgggaaatggctatgctggattgaaggatgctcttggttcctatgatgccaaacttcaatggaaagctctcaatctcatacaatacctgttacacaacaaggcagacaggagttttgctacagagcttggtcttccaaagctgatgatgcatcttgcggctagcgatgatcacttggtgcgtgaagctgctctaagcggcctccttgagttgtcacaggaccagacatctggtaatgcgctacctgaccaagacaagctgaaaagagatcctgaagagccgaatcgaagggatcagtgcgatggactctga

SEQ ID NO: 37228 - DNA, 183 bp, Zea mays
  Peptide Sequence Number=SeqID_80603
atggacgtgagagccttctctggtatcatttacaatgttatagatcagcaagcttttgttgagagcaggttgagcagacgccgagagctcgcgttcgtggaaaaagagagagggaacgaggtcggcgccgccaccgagcttgtggaaggaagtactgtttctgagtcaattaaaatcttataa

SEQ ID NO: 37229 - DNA, 7296 bp, Zea mays
  Peptide Sequence Number=SeqID_80604
atggatctcgcggggatgaagcggcgggagctccaggcgctctgcaagcggcacggcctccccgccgggggcaccaacgccgacctcgtcggacgtctcgacgccgtgctttcggggcccgctgttgtggaggaggaggttgccggagtgccggcgaggaaggggtgtctgaagcaaacgggcggaggtgccaccgaggccaagaaggttactttttggggcggagatgtgggcgctgatgtcccagtgaggcggtccaggaggaattcgttcaatcctgccgaggctgaggaagcaggagaggctgttgctgttgacaggaagcccaagcgcaagaatcaggagaatgacgagggcgttgctgttatcgctcaggctagagttacgagaaggtcaaatttggagtggtctgctactgtattgcctcctgctgttgagaagaagagagggaggcagaatgcagctgagtctgatgtgcagaagtccgctctggtggaagtaacagctaggactacaaggtctcgctcaatcgtacctgttgtggtgccacccactgtggttgagaacaagaggaggaagactggagatccacaaacaactgtagagttgactatgctttcagatgtgcccagaagtgattttcctgccaccaggtctttaaggaacaaaattgtccacgttaacaacagcgtcgtggacgaaactcacactaccaggcagttggaaaacaagatgcgtccgtctactcgtaggcatcaacaggttgcatcttctccggaggataaaggtcaaaaaattcctgctaccagtaagtcccctctactgaggtggtcacggagaaactattctgaggccaatagtgcaaattcagtaaacatcaaattggccaaagactcgagcacagctcagccattggcacaccataattctcattctgaagatttggagaaacaaccagcagttaaagaaccaattaaacggtcaacacgtaaatctattgctttggctgcacttgagaaagagaaggatgtaattgaaggaaagaaccctgaagcacatgttaggcgatcaacgaggaaatcagttgtgcaggttaaagataccaaaagtattgttgaagagactcaatatgctaacagtgaagatgtggcgaagcaaccagcaactaaaggacctgctagggggctgagacgtaaatctgttatcacagaattgcatgagaaagagaagagtctcattgccgaaaagaacatggaaacagatgaagcgatattaacgcggaagcctgtaatcccagttaaaaatattaaagctgttggtgaaggaattcaaattggtaagggcaaagatgtggataaacaatttgttgtgaagcaacctactaggcgatcatcgcgcaaatctgtgctgcctgatatgcttgagaataatagtggacttctagcacccaaaatgaatgctgagatgaatgttaggagatcaacacggaagtctgttcttcctgacatgcataatgagaagcaagatcaccataaaatggctagaaatgagaacttgcaaagtggtaaatatcaagatggtgagaagcaacagaaagtaaaagattctattaggcaatcaaggagatctatcgctacagtgctacttgagggacaaaataatgatgaaggaaaaaagttcaaaaatcctacgaggaggacaacacacaaatctcatgcccttaatgcagttgaagaggtcagcatggatcacattgaagttggtgaagaaggcttgaaattgaggaagcgcagtaggtttttgctggaaatatcatcttcagctaatgtttcctggaagcatcagaatgcacagatctctaatgaaaaagataacacagaaggatcgcagcaggcatcaaattgcacaacttcaaagagaaggtcttcaaagaagagacgaacaactgctccagaagaagtgatgcctttcaaggtggcaaatgatgacatagttatcatggaagaaacaaaggacacacttgaatataataatgagtctagtagtaaagttcaagaaatttgtcaggttaatgctgcaagagaagagttctcttcaggtccattgcttgtaacagtagctcctagtgacgaaatttgcacagtgcagagtgtagctgtggtgatacctgggtcagaatctggtgacgatgcaaatcaaagttctgataagagtaagcaacctcaggaacattctgtcactcaaactgttgatgaccatttatctgaaacaagaagtgggaaattagatcaatcaacatgcatcacaggattagtctctgacaattgtgttgtctcagaggacaaaacattgatgagtgaaggtgagggagactttgttggtccaaaatcaccaaatggtttatcaattagtttcattgtcgcagaccgtgaagagcaaagccctgtgtccggagaacagagagttagcttggaagcaaatgccaatgagcctgaggaaaagaacctagctaacgtcacatcaactgatctccacaccaaaagtctgcagcatgatattgacagaatagctaaagagactgataaagatgttttgtctttggttttccctattgaagagcatgaagaaaaatatggagtgagccctatagctgttgaaaagtgcgtctgtcgtgaagcaagtgcatgtgaatctgcacgaaaacccctaaccgttatcttttctaacaatctccacaccaaacatctgcaacatgattgtgatgtgctaattaaggagactggtgaagaagttttagctcaggagaattgtaatgaccagcctgttcctgcccagactgaccaagaaattaagttaaacgatgaacttgctgatccggatgttttagctcaggagaattgtaatgaccagcccgttcctgcccagactgacctagaaattaagttacacgatgaacttgctgatccggaccatgaagagcaaagccctgtatccggagaacggagagttagcttggaagcaaatgccaacgagcctgaggaaaagaacctagctaacgtcatatcaattgatctccacaccaaaagtctgcagcatgataatggcagaatagctgaagagactgataaagatgttttgtcttttgttttccctattgaagagcatgaagaaaaatatgcagttagccctatagccgttgaaaagagcttccgtcaggaagcaagtgcaattgaatctgcaggaaaacccctaactgtcatcttttctaacgatctccacaccaaacatctgcaacatgattgtgatgtgctaattaaggagactggtgaagaagttttagctcaggagaattgtaatgaccagcctgttcctgcccagaccgacctagaaattaagttaaatgatgaacttgctgatccggatgttttagctcaggagaattgtaatgaccagcctgttcctgccaacgagcctgaggaaaagaacctagctaacgtcatatcaactgatctccacaccaaaactctgcagcatgataatgacagaatagctgaagagactgataaagaccatgaagagcaaagcaatgtgttcggagaacggagagttagcttggaagcaaatgccaacgagcctgaggaaaagaacctagctaacgtcatatcaactgatctccacaccaaaactctgcagcatgataatgacagaatagctgaagagactgataaagaccatgaagagcaaagcaatgtgtccggagaacggagagttagcttggaagcaaatgccaacgagcctgaggaaaagaacctagctaacgtcatatcaactgatctccacaccaaaactctgcagcatgataatgacagaatagctgaagagactgataaagatgtttcgtctttggttttccctattgaagagcatgaagaaaaatatgcagtgagccctatagctgttgaaaagagcgtcagtcgggaagccagtgcatgtgaatctgcaggaaaacccctaactgtcatcttttctaacgatctccacaccaaacatctgcaacatgattgtgatgtgctaattaaggagactggtgaagatgttttagctcaggagaattgtaatgaccagcctgttccggcccagactgacctagaaatgaagttaaacgatgaacttgctgatccggaagttttagctcaggagaattgtaatgaccagcctgttcttgctcagactgacctagaaactaagttaaacgatgaacttgctgatctggctatggaatcaggttgtagcattactgaaaggaatgaagggcttgttgctcataatcttgatcaagaaggtttccttgaagcaacaccagagtgcaaacaggaatgtggtttgcctgaggagacagtaatttcctcaaaagaaacaggatctctgctgtgtgcagatcaatcaccaattggtctggaatctttattttcgcaagaaagcatagttgaatcagtggggcattgtgcacttgcttcagcaacaactcataccgaaaatggctttgatgattcaaaagattgccataacaagtctgcacttgaaaatgttcatgtgccagaaccttgttcacacaatgatactaaaggaggcatttttaaaaatgttgattgtatgcatacatcccagcgagatgatagaatggaaggagtaccagaggctaacactgatgaagaacatgttctgtcagcctttttgctggatgcaaatcacctaaacgtagtcattaattctgaagaagtggtttgtgagggtgaagatagtaaggagcttctccattcggaagactgtaaagcttcatccgagaaaacagatgtgaatgatggcaatgtatatggtattagtgatgctgtagtgagatgtgcactgcatgctccagccgatgataattatgagatttttttgggtcccaatactgatgtaccacgtcaggtttataatgacggatgcagtgatgtcaaagaagatcgatttgcttccaaaccctggacaattgatattattgaggatgcctctgtcaaagaaagatcaaatttaaaagattggcaacttgattccaagttggagggcacagaaatagtggaatctggcctttacttcaataaggatattggtaacattttacatagtggatctattggtgaaataactccatctggttctggtttatcaaaagattcatctgtggactatagaggggaggttttagatggcttctcaatggaagcatctcttgaaaggtcttctacacgtggggaacaaaatggttgtagactagatgctattgagaatccttcaattactttagcaacttctggttataagcatgaaggtgctttatctgaggaagcagtgtacacaaagaagaattacgctggaacatgcttgtcaaatcccagggaattaatcatggagctgcaatcccatttctcaaaggaaaacataaatgaatctgatcctcatgacagccttgtattcccaactgctgaaaattcagcagatgaacagctggttaaagtacaccatggttctaatctgtctcagttaggattaactgatctgttggatggaccaattgggtgttccaataccgacgtgttgtgccagtgtgacaatcataaaaatcaatccaatgaggacaaggtagaggaagttgaggcggtgtctgctgctaaatacatagaaagtgaagttgtgctgctcccatctcaagagagatcaaatttgaataatgagcagcttaacaccaagttggaaagcccaaacattatgggatcttgccttaactgtgataacgatgtttgtaatacttcggacaatggatctgtttttgtcattggtaaaagaactccatctgcttctggcttaccagaagattatcctaaggatagtgacttgcaacaaccggttttagatagcttctcagtggtttcatcttttcaagacaatatatctgggaagaaaactgtttctggtgtagcaggcagtgagattctttctttaagtttagcaactcctgattataaacatgaagatggtttctctgaggaagcagtatgcagaacaaagaattatactggaacttcctcggtagatccgaggcatttagacatggaggggcactctatttactctgagggaggtactgaaaaatctaatctgcaagataatcttgcatttctaagcgctgagagtggaaaagatgaacctattatttgccatgttgagaaactggttgacgcacatgcttcttcagatacataccaaggtccttgtcaagatctaggcagacatgaagaacaagagagctgcatgtctattcctatgcaagccaaagaaagtggaggggttttgaggtctagccacacgaaagggtcagttacagcagcccaaattgatttggcaggtgatgcccatcttattgtgagtccttttgatcatgtaatccgacaatcattataccacagtgataatgctgctgccaagcaagtgtttagtgaggagaaagaggaaacaaaatctatctcttcttcagatattgatatccttcatgaaaaatcatactccagtggacacgatgaccatgctgcttgtgctgccgaaactcagttctaccatccacagaaagcatctatatctgatggactacatttgggtcctagttctttgcaagtagaatcactggatgctttggatagcgatatactgtatgttaacacaggagttctcgagcagcatcataaagagggttactatgaacccagtgtctaccaaatcacttcaggcatttgcacaatgtctgaagctgaaccattcgaagttttagaaactggaaaagatgtaaaaacgccatctaagctagatgagcaacttaatcctgggttggacggagatgaagctgagaaacacagcttagactgtggtacagacaccagtcctgtgatgagcaagagaaccctttcttcaccaggatcaggcatttgtcaaagcagcaggcgaagaggtatagatgaactttgcggtaagctgcagagtttcaaagtttccagcgccgtaaaaggaagctacgtagctatgggtgcacctcgtccgaagcctggggacagcacgagccgatctgcagccgcgctgctcaggaacatagagaacacaactgctgttaaagctggccgtcctcctgtcaagccaaacgccgatggtaaggactcgtctaggcgagccctgcagcccataagcggaaggcctgacagtaggtag

SEQ ID NO: 37230 - DNA, 774 bp, Zea mays
  Peptide Sequence Number=SeqID_80605
atgggcttcgccaccgtcggcgccctcctcctcggctccgcgcccgcctccggccccagcgacagcggcggggcgcccaagtccgcggagtcaaccacctacaaaccatcttatggagagacccccagtagggagaagaagtatgctgacgtgatcattcctcgaggtggtgataaccgtgtagcagttgatatgattgttcaacatatccgtacaaaacttcgtcagcatgacttgtgcaaaatctatccaaatgttcatgttgttcaatcaacttttcagatccgaggaatgcatactcttatccgtgatagggacatcaccacacctgagattgccttggaagagcaggatagaaacccaccttttgatatcggttcatatggggagcaaatacttgacacactttcatcaagaactaacaatacaggaactgcatctttttacagaagtgttgatctggataaaggaaaagccacgaatgagttggtgtgttacacagcagagaatccatttcatgtaaggcttattggtcccaaccggaggccagaaatggaggcacgctttgctcggaagagagtcaagtccccactgcaaaatgcaggcaaagtccgtgagtcctccctggcacaacatgagtgtcccaacaagcctttgtgtaaaaatggcaagattacagtcacgacagcaaccaagctgacgcaagatgggaaacgaaggcgaaggtcatcggctcacctaatgcagccgatcaatctggaatccagcggatga

SEQ ID NO: 37231 - DNA, 222 bp, Zea mays
  Peptide Sequence Number=SeqID_80606
atggatggagatgttgatggtgaaaacaattcatctcagttcattaacaatgatctgaggattgtgcccggtgaagagaatggtccatctcagtctatttacaatggtagcagtgtcgcccctattgaccttgaagagggtgctgctaccgacaatggttctgcccccacttcatatgctgatgaaaagcttctcctgtccggaataatctacgtattctag

SEQ ID NO: 37232 - DNA, 684 bp, Zea mays
  Peptide Sequence Number=SeqID_80607
atggaaggcgattccgtgcatggattgggtatccctctgccccggaaggcgattccgcagtcaccatggaaggcgattccgtcggtgtcggcgagggcgactcgctcctgccgccaaccgccacgccgtcgtgccggccagactcgtcgtaccgcccgccgccagcactgcccattcaggaccagtggccctcgccgggccatgcgccaccgttggcctcctcagtttctaggtaaaccttttacttattttatcgggtgtcatgctttgttcttggagtccaactattttgatcctattgggaagacaagtgatctagcattattgtctatattaatatttatattgctggtagcttctactttaactgatctcaatggggcatttgggtggctagcaattcacattgataatttaaaagtgaatttcaggtgtacatttgatggcctccgatatggtgttgccttcaatcctctacaatgtgcgataatgctgctcaggaggatggctgaaaaactcccagtgctgctacgctaccagtgtcttcatgtgcatacttacttcaagaactcaagacccagtgagaagctcaaagaaggggaagacatctacatctatcagggtgacaaatccttttgctatgaagatgaccacagggttcttgtttgtgagttcatcctctag

SEQ ID NO: 37233 - DNA, 1032 bp, Zea mays
  Peptide Sequence Number=SeqID_80608
atgcgcggggtgcctcgataccgctgcattggttttgaaaaattttctgtcttctgcggtggccccgaggaggcacagtactggcgcgagcggtggttcagcttctctgcatccaggaaccggcacccaaggatggtgactcgtgggcccgggcccccttgtcagggtccgggctattggtttcgacggaggcaaagagcaggcggtggcgtactcctcacgcagccaactggtctgctgcttttcggtggaggtgaagagacgcaccaccgcaggtggtggcatgctcctcacgcggcggtttgccttctccgcacatggaggccgatgcccaaggagtatgactcgtgggcccgggcccccgtgccagagactaggtcaccttggcgcgcgtcgggcgaggtcttctacggtgctttggggcgtaagtgggggaatccttctttaaaaagggactcctccaagcgtggtagccattctcatcagcgcccttttgcccttgagctcttcgcgctcttatgtcgtcgcagccgccatggccctgctagaccctcccgagcgcctccagcccgaggtagcactcaacttggtgtgcaacccgcttggatggggtgggttggcgtttgccggaaggatccgtgtcggtgtatctcctcacgacgacctcgccgccggagagtttgtgttcttcgtctccaaactccccagcgggttggcgctaccgatctcgtctttcttcgtgctgctgctagaggtgcactgcctcgtgggggcggcgctcttccaccggtgcttagcttcaaggatgttcatcagccttgcagtggtggagagcaagctgggctgcggctccgtcttccacatgagctggtgacccgcctcttcctccagcattcggaggaaaggatggtcaccagccttgtgaaggttggaggcgaacttcggctatgcggcaccggccagaccgcaaatgccgtctgccgccgtgcttccagctccttggcttggatggtcttgtcgtcacccccgtag

SEQ ID NO: 37234 - DNA, 813 bp, Zea mays
  Peptide Sequence Number=SeqID_80609
atgaagacgatggagtggtgcgcagatcgagagggcggcgactccatgggggccgcaatcagcggcgagacgcggccacttggagagactgcatcgtcacctgcacgaggagcaggagcgccgacgctaggagcaggagcagtaggactcttccccctcgcctcagtaggaggtggagtctgggaggcacccttccctgcacctcagccagagatgccccctgcaccaccacaaggcatcctggttgctggaggagaccctgacggagatgacgacaccagtggcagtttgagccacaacatggagctctcggaggagcaggaaccaaagggatggatcgctagacccatcactcgtgacgccgctcgcgggtgtcacttccacgacgctctcgacaccttgctatgtcaggccttcaatcgacacacttggtctattgagtactgttgtgtagtctaccagcatcgtcgcggcgaggtagctgatggcctcgacctgaagtactatcctcgtcgttcaaccgacagcgctggaggtgtgattgtctcgcccgttggtgagggcaatcctaagctgaacaacatggtcaacctggtcgccatgctcaacaccgagctggaccacgcccttgacgagttgggcaaggttcgggcagaggttgcggaattgcgcattgagcgcgtagcgcgccactatcaatatggtggtccccccgcccctgttgggattcaacaccctaaccgctcaccgccccgtggtcgctttgattacggcacccctgactgcaggacccaaaaagatttggagccatag

SEQ ID NO: 37235 - DNA, 409 bp, Zea mays
  Peptide Sequence Number=SeqID_80610
atggagctcccacggctcgtgtgtgtgcagatccacctccactatggccgcgccggcgccggcgagtcgctcgttggccaccttgccgtgcagatgagcagggagaagtcaaatgcagagaaaagagctttatatgatgatactggcatcactgatgatgcactggtgggagaagctgcaaacaatcttcaggagtacttcagaacaatgtacaagaaagtcacggaggctgacattgaagaatttgaagctaaatatagagggtcagattctgagaaaacggacttgaaggaactctacacaaaatataagggcaacatgaacatgcttttctgcacaatgatttgctcagaaccaaagcttgattctcaccgcttcaaggatataattgatgaggcgattggtgaag

SEQ ID NO: 37236 - DNA, 465 bp, Zea mays
  Peptide Sequence Number=SeqID_80611
atggtcgcagacgtggcgaagctgagcacgaacgagtggtacttcttcagcttccgcgaccgcaagtacgccacggggctgcgcaccaaccgcgccaccaagtctggctactggaaggccaccggcaaggaccgcgtgatccacaccccctgcagctggcccgccgctgccgccggccaccactgcaccgtcgtcggcatgcgcaagaccctcgtcttctaccgcggacgcaccccaaacggcgtcaagaccagctgggtgatgcacgagttccggatggagaacccgcacaccccacccaaggaggactgggtcctgtgcagggtcttctacaagaagaaggcagacgccatggactatgccgactgcagtgaccaggacgccatcgccgtgcatatgcctcgcggcagcgctgacccacgaggggcggcagtagcagcgtcgggccgaggagggagacaatag

SEQ ID NO: 37237 - DNA, 1014 bp, Zea mays
  Peptide Sequence Number=SeqID_80612
atgtttggtatcctggcccagcttgagggcctggttgaggcgagccgtatcttccttcgtggccaggcccaattgaaacgctgcgcgctggtcccgctcgtggacgacgcctgcctgcgcatcgaccgcgtcatccccgccgacgccgccgacgcgggggcgccgcgcccgcgcgccgcgctctcgcacctcctcaagtccgtgctgctcgccgtgctcaagcccttcgcgcactgcgacgccaagtccgcgtcgccgcaaaagcacgcgcagcagcagcaccactcgcccgcccaggtgctgaggaacttcagcagcatccgcagcctccggatggagctcccggtctccgacgtgggcaccgacgacggcgtcgtgctcaggtggaaggccgtgttcggcagcacgctgcagagctgcgtcatcctcggcggcaccagggtggaccgcgccgcggccgcgggaccgccgcacgccccctcctccgctccccccgcgggcgacgacgacggcggcagcatcccggagtccctgtacaccaacggcggcctcaagctgcgcgtcgtctggaccatcagctccctcatcgccgcggccaccaggcactacctcctccgcgagatcgtcaaggagcaccccaccctggagcgggtggcgctgacggacgccggcgggcagggcacgctcagcatgacggacgccgtaggagaggatggcgtcgacgaggaggacgggggctcatcggggataacgcagtcgacgcggacgaggacggagtcgacaaggggcacgagctcgtggaagcggcgggagatgagggagcagcagccgagcgccttgacgttgccgatgcgattgaagatgacgaggaggagcgcgtccgggaggcggtcgaattggtcatcaccagcggcccccgagagccagcgctcgtcgccgccgaggtcgcaccgccagcggcgggatcccgcgggatcttcggacatcggtggcggcagggcagactggatctga

SEQ ID NO: 37238 - DNA, 435 bp, Zea mays
  Peptide Sequence Number=SeqID_80613
atgggcaagaacaacaagcgcaagcgcgagccaactcctccatcggaggattttggtgactcggagtactcagaggaggagttctcctctgagtctgaggggtctccggctctcattcccctgcgtgagtcgtctgacgactcagacgactcccaggggctcgcggcggaggtctggacgtacatccgggccgtcgagcgctctgggctcgagggctcggatgagtcggagtactcctcggatgaggaggactcggacggtggcggcgaggacgaggacggcgacaacgacgatgacgatgaagacggtggcggcggtgacagtgacggtgatggcagcggcaggggcggcagcagcggcagcggcggtggcggcagcagcaggggcagcaacaggggcggcagcggcggcggcagcaacagggccagtggctag

SEQ ID NO: 37239 - DNA, 2524 bp, Zea mays
  Peptide Sequence Number=SeqID_80614
atgcaagtagtcgagttggttccttgcgcccgcaacaagtggggcaactggaatgaattttggttttatgttgctgagggtaccgtcgaaggccatgagggactcctcgtgtccgagatgtgttctcattattactcagcgtacccgtcttttgaagtggcagaggaggatgtggacgaaggggcccttcggtgcgccgccggtcagagcagtgggcgcgatttagttgaagagtttgtggcgtacgtggtgtggcccttggcgcatggctgggcgttgggcgaagtgtgccctcgccagatgccttttcacggtggaagggtggtgcgaagtcctgccttcgcactgaatctgcgaaaccgcgacccggccgcctttgtgcgtgatgcggaggatggggcggtgcggctcgttggacgctacgtgccgaggacagagggccagcgcagctttgatatccgcgggtcgaatgaccgtttgaacagggttttcgaattaaatcaattgccggatgacggctatcctggtcaagacgacgtggaccgccgtggaaagaagccagtggtggagactggagacgaccctgcgccggcggccgccccatcctccaaaaagagaaaattaggtactgctatgggaggacttggggtttctgatagttttgctagagagttgatgaggacgtgcgcggccccggggggaaggatgtcttcgcccgagctccgggagtctttggctcggatgctgaggagtttttccttacgggccaaatcgacgaaggtggtgccgccgctcagcggagtggcagaggtcgcgaaggcggcccgagcgttgccgtcggcaggcaagcgtgtcgccgacttcgccaccgatattagtgtggaggactatctcggtgggtcggacgaaggccaacttgctatggttgcgcctgccgcggtgacaacgatggctgccgtaccgccaaaggcgaagggcggggctcttagcgccggaggcgaggtggcggtcctcgcggctgtgagggatgaggcgggcgctgcgtcccgccggctgaaggaggtggtggagtcgctgagtcaggtggctgacttcgccaaccgcacggcgtcgggggccctcacggcagttgtgtctgccgaagtcgagagacttcggacacaacatgctgacgccgtccgagagaaatcggccgccgacagcaagtgccgcaagctggcggacagggtggccgcgctggagggagagaaggctgacctccggcaccaattggcgggggagaggagggagaccaatgaggccctcgtccaggcgcaggctgcgcaggcggaggccaagctggcccgggcggagggcaatcttgccagggagcgcgccgagcagctgcaggagcggctcatcgccctggagagccgcgtggagcgggccgaggccgcgatgcgcgcggaggccgaacggacgcgcacacagcttatggatacatatcgaggagctgcaggaactccccactgtcgtggggggtttatgtcgtacgcctccttggtcacctgcgagggggcgatgaacgcgctctctcacgaagggtgccggcacttcgaggtcttcgaccaggctgacgaagattttgatcgagatatctataaggtcgaagaccccgtagtgaaggagtccgccggggccatctatgaccggatgtggggcccgcacggtcgcgtggtggtcagggagcgggccgagacggcgagggctcaggcggcgcgtggcgagcgggtggacgacttcggggcgttgaacagcgcgctgcctgacccggagccgaccccggcggaggccgtgtctggggtcgccccggagccaaccctggagactgtgccggatgctcccacatccgccgcggccggcgaagacctgcccccaaaggtggccgaaggcgcgcctgatgcccccgcagctgctgcgccgagtgctgaagatcccgcggcggtggcggcggaaacaacagcggaagcgacggcggggccaatggcggaggctcccgcaacgtcagggccttcgcaggttcaagattttgggcctgcgcacgcaaccgctactactgaatttttggcggcttcgaccgcggaaggtggtaatgaatgtggtggatctgcatctgagttttttgattttactgactctgggagctcagttgagtggactgaggagtcgtcggaggaggacttggattattttgcggccttggatgtggctgcggcggaggcctcgccacacgccgcgggcgcacaagatgtgccaggtcctagcaccgggcgccgacgacgaagggcggttgcaaagcgtagggttagtggggaggagggggctcggcttcgtgtgagtagggctggtcggcaggaactgttgtctttgccggccgccgcgagtacaggggaatgggaactgcgaagtctttttgcgggcttgtatgatgaagtcgtgtgctctcgcttgtctgtgcctgcgaaggcgttgtgtactttgtctg

SEQ ID NO: 37240 - DNA, 294 bp, Zea mays
  Peptide Sequence Number=SeqID_80615
atgggttcgaaaaccctgagtacgaagtgtactttcgcaagtcttacccgtctaaagaaaaagactctcaaggataagctggccttttgggaatcaagggcagtgaccaagtcttcatatcctagaaaccgggttcacgccaaccgagagcatagatacaccatcgtccagcctcttgccacggaggaccagcagcgcatgaggcacgactacaatagcgaggtaaacaacaacactgtgagggaggacgaccacggtgttgccgaggcatcgtacgagtcgagcgcgagatag

SEQ ID NO: 37241 - DNA, 540 bp, Zea mays
  Peptide Sequence Number=SeqID_80616
atggcgtgcacggcggcgcagaaagagcgaactgccgcacgcgccggtagtgtgcctcctcggggccgcggcagaagacagagaaggctcacatcctcccctgaggtgggcctggaggccactgtcggtaccctaaaactagggtactcattactactgtatgaagacccagtacccacgcgggctatctttagtcgtgtggtaaaggagttgtacgcgggaccagaccatgactcgccccagcctcaggcgactactctgggccagcaacagcacctgacgccaccacgtgggtggctccggggctgccacgtggccagagaaagtgatatactcgaaggcgtcaacagtgagtccggacccccatgggaaagtgtcggacccctggatatacaattcggacctccaagatggtccaggaccccacgtgtacggaccggacccctagaatgggatccagacccctctgtatggggtccagaccgcccacattggggtcccaagaccttacttaaggtccaggcgggggtccggagctga

SEQ ID NO: 37242 - DNA, 969 bp, Zea mays
  Peptide Sequence Number=SeqID_80617
atgcccgccggcgggtctggctgtcagcatcaggcatctgatgggagtggtgccggcgatccgcccccggctgctgccgccgagacagcgccaccagactcccatgctccaactaggggtccggcagcagcggcaccaacgtcaagcggcgtcgcaactgtggaggaggtcccaactgcgccgacggctaccacagcctcaatgacggcgatgtcgtcgagtacaccgtcggcagcggcggaggaggtcccaactgcgcccacccccgccatcaagggtgatgcggggggcgcgtccagctccatcccgccgcccactccggaggagacggaggtggtttttgggcggcggctccggtctggtgctgagccagaagcagcgccagttcccctcccccgggaggccctcgcaacagagctccaggccaagctgagtgccctggaaaagatcctggaagagcagtggatccagcagaccacggctgtggagaggctgcaaaagttgcagcaggagctcgagggcaaggtcagagacgccgccctcgctgaagagaagcttaaagagaagggagagtccttggacaggcgggagacggacctcgccaggcgggagaagtatctcgccttcaaggaggaaatgctcacccggcgaggcgagctgctggctaagaacgagctcgaggcggagaagaaagaaaaagaggtggagaagcaggactccgccaccgaccaccttcgacgcctggaccagattcttggcgcccgcctagaggctgagggtggcaggctctaccgagcggtgatcgagtatatcctgacgtgcttccggagccacgacctggccatatccttggagctgattatcgctggttcggtggccaccactgaagatgccgcttgggagggcgtacaagacaccgtggaactggtggccgaacgcttccagcgggatcctgccgatgatgagtag

SEQ ID NO: 37243 - DNA, 2016 bp, Zea mays
  Peptide Sequence Number=SeqID_80618
atgaaacttatatatagtcttctaaatgaaggtatggctggacgcgttcaagacttcatcacgctccgcatcggttcgctttggctggatgcgccattgggacctcttcatgctagtgatagtgctagcttcctgcataccacagctgcatcaccagctatgattgggcttgagcaggaggtcaactccaaacctcatgatggtttcattcctgttgtgtccaaagctacaaagcgaagggcaaggaggatggctgcgaggtcaagagtgtcagcctcccaagaataccctaacaaggttcacaaggttgcgtcctccagcttaggtcctcctgggttttccaggttgaaggccaacaaatctgtcagccacaagacagaagcaaggtttcgtaagactacccttagggagtggcctgtctgcataaagcaagcgcctccaaccaagtttgtacaactaagggtttcctctacatcaactccaaaagagacaactcctactttgacacctcctaagatgctggaggtgcggtcatccaaacttgctccaagcatacttggggcaccaccaacaaaaacagtgacaataacaactccacttggtccaaatgaagaggtggtattggtagatcaacatcaacatccacatttctgtaataagggaaaggccgccatggtggaaaaggaggctcctgagttcatcccatctccggtctataatctcggtttggttgaacatggacgtgtgcttaggtggcaaggaattggtctcaccaatgatgacatcaggaaaggtcatgttgacccaactgcaaccctttctgatcccatatcatcagaaattatggtttcaaaatcttctgtgcaaggttccatgtcaccgaaaaggcaccgccgccatcgtcgaaataaccgtcgtacgcgagctaacctcattgtggtcgatagtgctgcattgacaaatgcacatcgttcattaattgtggatatgattttaactcaacaccaagaaagttgttgtagaattcaagatgcggcaagacgagccatgcatgcttccttggaaagaaccatatgtcaagatttgaataagttactccctggggtatcaatgtctggagatgatattaatggtgagatcatgcgacgtgctgaagcatttgcacaatggccagagtaccaagagtgggtaaagagaaacccacaacgcaagaagtatgtcaaacaagctgttaatgtgcgtgctagtcgtgctaccaacaaacgaagagagttggcacttccagctaactctatggctagtagggtgggatgtactagtaactcgacatccaaccatgctcgccctagtcatgaaaggttggtcggacggtcgagaaggtcaacatcatcacgtgctcccttctcaactcaaaagagaacctcttctaatccattcaaagtcctttatgccatgccggtagggatcactgaaaagtatagcgatgctagtcagtcttcctctgcttcaactcatttcaaaagaaagaagcctcgcaagcaaattccttctggtcatcgcccgataactcagagtttgttaggctgtcgttcagatgattcaaatgccataagcaacgacgacttgtgttccccgctaaataatgacgatgggccaagccgtgtggagcaagtccttgcagcaaatgatggccactcagttgagcagcaaatggcccaacttatggctactcttcaacaaaaggaagatgaattggttgctcttcgtgaacaaatggctcgtgaacaagtggctaaccacaaccataataatgaaagggatgcctctaccagccataaccaacaacgttctgaacctgcactcactcttgaggcgatacaaagaatgatttttgaggagaagcacgagcacaacctaatggaggagtatgcaactttcgccatcggggtatttgaggatgatgatgaaccactttacttccccaaggaagaagtgccagaagttgatgaaatatag

SEQ ID NO: 37244 - DNA, 186 bp, Zea mays
  Peptide Sequence Number=SeqID_80619
atggcttttctttatgaggacattctaaaggccaagaaagaaatattgacaggcttaggaaatgttgataaggctgccactcaaaatctctacaagagtatcatagaaatcattgatagtaagatgaagggggcgaagccagaatttgagtttgagggggtaaatcagattgagggggactattaa

SEQ ID NO: 37245 - DNA, 267 bp, Zea mays
  Peptide Sequence Number=SeqID_80620
atgagcgggtctattcactgcgctgctgctgtatggcatgtggttcagggtgggaggcttaccactaggtcttggtttcaagtgtatgagcgatttgttgattgttggcaaatgaagtattatttgaggttggtattgtatctgaaggttttgttgacgcagagaagtgttatagaacctatggtggttgttcgaggaaatgagatggtgcttgttgctcatccagggaagtgggaagtagcagcacatccaccttcactctcataa

SEQ ID NO: 37246 - DNA, 435 bp, Zea mays
  Peptide Sequence Number=SeqID_80621
atgcatgtggtcagcgacttcctgaagcgccgagtcatgccgctgcagaggaggccgcgcttgtgctgttggttcactggcccgaatgatatcggcaggatccagcatgggccggggctgcgaacggcggtgatggccacgctgtcgaccctcgatgagagcagcatggtggttctccagacctgcggtcgggaccccctccgcgggatccggatccctagtgtaccggctaggggtccccagcccaccagtggggctcctagtgccggtctcgccgtggcccccagctccatggacaggggcaagggacctgcaagcagctcctccgccccaggtggcaccggggaggcgcgtcagtcctccgccaccaccaccatcgggcccgccgccatcaccaccacctccaccatcggtccctccgccaccaccacctag

SEQ ID NO: 37247 - DNA, 225 bp, Zea mays
  Peptide Sequence Number=SeqID_80622
atggcggacaaccggacgagctcgcgacgcgaggacgtgctgcgcacacgacgcgaagcgacggcgaggctgccgctacgccgcgcagattacgctggggttacgcaggatgcacgggcgctctcagttcaactggtcgtgacatgggcagggcgaccggctgggcagggtcctcgtgtcgtcctcctggctggtgagagcagcgggaggagaggttcttattga

SEQ ID NO: 37248 - DNA, 1014 bp, Zea mays
  Peptide Sequence Number=SeqID_80623
atgagattgatgattctggttatgactatggtgctgatggctcgacttagacacactgcacgaaagtcagtcatccccttcttaccctcccgccttgctgagcgtccgcttcgccgtcccgtggccggacagtccagccacttggagagactacaccaccgcctgcgtgaggagcaggagcgtcgacgacaggagcagcagagctcttccctctcgctccaccaggagatagagtctgtgaggagctgctcccctgtgcttcctctggagccgccccctgcaccaccactgggcgccccagcctctggagtagctgctggaggagacccagacgacggaggaggcgacgacagctcgagccacgacaccgacttctctgctaaccctgagccggaaggatgggttgctcgacccatcactcgcgacgctgctcgcgggtgtcacttccatgatgcgctcgacaccctgctacgtcgggcatttgaccggcatacttgtcgcggggtctacccggaccgctgggaggcgacttgcttggtgcgctgcccggaggacagtctccagggtgcagaggcctgttcagagcactattctatctctgagcgggactcagctgaggcagccatgcaagatgctgcacggcgtgcgctttcgcactactgctcggttttcggtggggcagctgacggtcttgacctgaagtattacccccgccgttcatctggcagcacaggaggcgtgattgtctcacctgtcggtgagggcaatcctaggttgagcagcacagtcaacctagccgccgtgctaaacacggagctggaccatgcattagacgagctgagtagggctcgtgctgagatcgccctgctgcgggctgagcgtgcggaacgtcgttatctggatggtggttcccccgctcccgttgggactcagcacccgtaccgctcacctccgcgtggacaccagtcttatggcaatcccgcctgcaagaccaagataaacctagaaccatag

SEQ ID NO: 37249 - DNA, 753 bp, Zea mays
  Peptide Sequence Number=SeqID_80624
atgacgaaacaatactattatcgcgtagatgatgctcaccccgcgacgacgacggacgaccggacgagctcgcgacgcgaggacgtgctgcgcacacaacgcgaagcgacggcgaggctgccgctacgccgcgcagattacgccggggttacgcaggatgcacgtaaggctgcgccgagggcgcgtgcaagcgattcgcgggcaagccgtgggcacgccgtccacgcgtggaccgagatggtactgcataggcagcgagcaacgctggccacgcgccgtgggtgcacgcagccgcgccgggggcacagctggccacgccgggggcaacacgaccatagccgcggggctgcgcacagggctctgcgctggcagctttgggtcacgggcacctgggtggcacagtcgggggagcagggcatcgcggcgtcggtcactggggcgcggtcagcatcaggcgcgcggtgcaggacatggagcggggtcgtggcagggacgcggtgcgtcgggctcgaacgctgcaggggcgtgggcgggcgcctggtcgcggcagcggcagggcgaccggctgggcagggtcctcgcgctgtgctcctggctggtgagagcagagggaggagaggaagggatggagagatagaagagggagggagagagatagcggcggcggcggctgttgccagggagaggagtggcggctggggaggatgttcacgttccactgagataattcttgaggaacccttggacttgtga

SEQ ID NO: 37250 - DNA, 57 bp, Zea mays
  Peptide Sequence Number=SeqID_80625
atgaaggggctactgttgggggccttcttctccgccaaagcatttgtgaacaagtga

SEQ ID NO: 37251 - DNA, 798 bp, Zea mays
  Peptide Sequence Number=SeqID_80626
atggacgacggggtttgggtggccagcttctgtcttctcctacggctagcagaggcggcggcgcccgtccccgcggcggagaactcgccggagacgaggggcgcgggggctctgcgggtccctggggcgacctgggtggccggggaggttggggagggcgcggggaaccttccggtggggactgggtcggggcaggggcaccggagggggggcggcccgcggcgaagcggctcggcggtggcgctaaagaactccggcgagcaattaaacgagacggggggcaataaaaaggtcgggaggggtgggagaggtaccttacctcaaggcgaattccggggtcccctcgatggcgacggagatgcggcggcagcccgagtcgacggtggcggacctcgcggctgcgcagagaacggcggtgagcgcgagcagagggattcggggagggagaggggaaattggggcgcgtcccgagttgcggacgtcgaggcgaagctcaccatggcagagggcacggcggagctccgacgtcgacggagaaacgagctcgggcggcggtgcgtgggggaggtgggagaggggtctgcaggtgcgcaaatgagggagggggagagggcgagcgaggctctaggctcaagtggccgaggcgaggtggttgcgagctccatgcgcgacgtgggcgtggagtccgcggcacgcgcggaccggggcggcggttacgcggagacggaggagctgacagcttgggcccacgagcagagagagagaggaaagcgggcgcggggaaggcggtcgcgctga

SEQ ID NO: 37252 - DNA, 366 bp, Zea mays
  Peptide Sequence Number=SeqID_80627
atggccggagtcggtcggtccacgcgcgcaggcggggatgctcgtcggcggcgaggagtccggcctggtcacggcaagatagagcaattggatgggtcagagaggttcacgggatgccagagaagatatgggtgcaaggaattggtcgaagactcactggatagctcggtccacgcgcggcggcggaagaccgaagtccgcattttaagagaaaccctaggtgacactggggtgtcacagaagacccttgatcatggcctcaatgacgatttcattgggcactgtgggcgcttatgctctcagtcgcaagaaccttcagacatacgcctgaaggtattcctcacggtcttgtgtgcactggaataa

SEQ ID NO: 37253 - DNA, 1248 bp, Zea mays
  Peptide Sequence Number=SeqID_80628
atgctcattgtgattaccgttgctgttgatgggatctggaagtcatgtccacaatctggtgggcctgttcagtttccaggattcaacgttttaacggtgactgcattgatggaacctgtcactgctttcctggttttcatggccatgactgcagcagaaaaatactatgccagaaatgatcgtgaaaaattgtataatgttagggaggatcttgcccagacaagtgcagtaaccatggtacatgcaaagctaatgggatctgtgaatgtcaaagtggatggacagggattgactgctctacaggtactgaaacatgaggataagcggtttgcgatgaacaatgtagtttacatggaggggtttgtgataatgatctcaattcaacggtgtgacgaggatggggacaacaggctcaggcttgtggagcgggtctggattgttcagaccagaccctttttagcaaaagggaagaagaagagaagggtgttccgtgcacaggatatggcgagaagaagtctttctggctataacatctctgaagcttcttccgttatggctctggatacgggaagtaagcgtccgtttcacctaggcacccgaagatgggctgccctggtgtacaagctatgttggagtgggctctttgttagaagtcggctcgcggttgcgaccgtggccgagggcaacaggttgggaaggaagaacagggcgaaggctggaaagacgaacgggacatcccacgatgggcgaaaacgatggtgcgcgcatgatgtgaaacgttctcgtggacgtgcaatagccactgcgcgagtcggtgtcgggctggtgtcggacgaatacggagaggaggcgtatgctcctatgccctctgctgagaatgggatggtgcagaggtgccaaaggttcacaacaaaccaatacaaagataaaagaaagggttcaaaacaaaggagcaaagttaaatcgaaggcagccctggtctggcgcaccggactgtccggtgtgccaccggacagtgtctggtgcacaagggagatcgactctgaacttgccagcttcgggaattcagggagttactccgctataattcaccagactgtccggtgtagcaccggactgtccggtgtgccagcggagcaacgactacttcgcgccaatggtcgtctgcaaaggaacagtgaaagtgaacagtgcgcgcctacgtgcgcagaagtcagagcaggcgtcagaaggcgcaccgtacagtga

SEQ ID NO: 37254 - DNA, 1704 bp, Zea mays
  Peptide Sequence Number=SeqID_80629
atggatccaatcacaaggccggcagctccatcgttccatcggccagcagtcgcgaccgcgaagcatctccatcaggccgccgccaccttggctcggaggaatggagtcagcaggaggtgccttctgacgctgctgatgtccactgcggccatacctggcggcagcgaatcgaggaaggctctactgcaagagtatctgaagaaatcgaaggagaacaaggaaaagaacgacaaggagaggctggatgactacaacaagaggaactacagggactacttcgggctcatcgagggccaggtcagagagaagacggaagaggagcgcacggagtcggagaaacggatcctcgagtggctcgacaagaacagacccaaatcgggcagaccggacggcctgtttgaacatcacctgctgcattcctgcttgatgatccagccaaatgtctccaaccagggcgtcacgcatcagaccacgctagtgctccgcatcgtccacccgtttctgttcgagggtgacggtggaaactggccgatcgccgacaggggcagaggagagaaaaaccccaagctaagctcgttctcgtacaccgcgggacccgtccacggcggcgaggcgcgggcttcaaggcgggcgcaggcggaggggcggaattgctcgggcgatgacacggaggctcgcggccgcggcgtcgcgtccgaggccgtgaatgggagtggcggggcgctgcgggcggcggctgcgtacatggaggccggggcaccgccccgcggctggcgctgtggggtgctctggctcgtcagcgtcgagattgtgttggttctagtctgcactcgcggagctggtgcggattctggtgaaagcaaaggatcgtttctgcaagactctgaagctggagaaaaggatgtctaccttagccactcctgcatccacgacgagatactacatcaacggcgacgagctgggaggaaggagtactctgtcatgccacaagtgtaccatgagtctcgggaggatgcggagcgtgtaagaggacgacacttgttgggcatgtcatcttggcgtgctccgcacgagaatgccaggaagccaatacgaatatacctcaattatgatgccgtcgggcattcgcccgaccgtgattgtaaaaatgttggcgacatcgtgaagcttggcgaacctcctgtatcatcagcaccaggaacacctatatgcgatcctcatggtgatccaccactggtgggagactgctggtacaattgcacccttgaggacatagctgggaaagacaagaggcaacgtctccgtaaggcactggggcaaacagtagagtggtttagaaaagctctagctgttgaacctgtcaaggggaacctacggctcagtgggtactcagcttgtggtcaggatggaggtgtacaactacctcatgcgtatgttgaagatggtgttgctaatgctgatttagtcctcttagtaacaactagaccaacaacaggtaacacccttgcatgggctgtggcctgtgaacgtgaccagtggggtcgggccattgcaggacatgttaatgtggcccctcgtcatttgacagctgaagctgaaacattactttcagctactctaatacacgaggttatgcatgttctagggtttgatcctcatgccttcacacattttcgtgatgaaaggaaaaggagacgtggtcag

SEQ ID NO: 37255 - DNA, 279 bp, Zea mays
  Peptide Sequence Number=SeqID_80630
atggacgtgttgccgcctctgcagcacgccctgtcgctgccgaccccgcccagccatgcatttggagtttacaatgtggagacatggtttatccaccggacggcgaggtattatgcacaggctttggagttcttgatgtttcctgtttgtgtaaactcaaacgccgaggattttattgaagcaataaaagggccagatgctattattgttggctatatcagacagtttgtcatcaagcctttgtttggattcctttttggcactcttatggagtactaa

SEQ ID NO: 37256 - DNA, 1212 bp, Zea mays
  Peptide Sequence Number=SeqID_80631
atggcggcggggcaggggagggtgcttccctcggggatgctcaaggtgttcctggggttcctgctgctggccgtggggctgtccgccgtcggcatgtacatggcgcggcacgcggtggcggcggccgcgcccgcgctattccgcccgtgcctgagcggctcctccgcggaggaggaacccgaggggctggagcggtggacgcggcccccagcgcgcgtagagcacgcgatgacggatcaggagctgctctggcgcgcgtcgttcgcgccgcgggtgcgcggatacccgttccgccgcgtgcccaaggtggccttcatgtttctcacgcgaggcccgttgccgctcgcgccgctctgggagcgattctttcgtgggcacgaggggcgctactccatctacgtgcacgcgttgccatcctaccatgccaacttcacctctgaatccgtcttctatcggcgccaaattcccagtaagatgcgttgctatccaaaagatattacagacaccaaccttgcctttgttgaatctgtttctgattttgcacgagattggtttttgtgctatgtctatgttgcagaatggggtcagatgaccatgtgtgatgctgagagacgcctacttgccaacgctttgctggacatatccaacgagtggtttgtgcttgtgtctgagtcgtgcattcctatatttgatttcaacacaacatacaggtacttccggaactcaaaccaaagctttctcatggcgtttgatgaccctggaccttatggacggggaagatacaactggaatatgacccctgaggtcgaactcgaccaatggcgcaaaggctcacagtggttcgaagtacacagagagcttgccattgaaattgtgaaggacacggtctattatccaaaattcaaggagttctgcaggccccattgctatgttgatgagcactatttccccacaatgctgacgattgaagctccaaaccgcctggctaacagaagtgtcacttgggtggattggtcaagaggtggtgcacatccagccacgttcggcaggggcgatatcacgttggagttcctgaggagagtccgcgagggacggacatgtctacacaataaccagaactcaacgatgtgcttcttgtttgcgcgtaagttcgctccaagtacattggagccgttgttagagctagcgcctactgtgctcggttttggttga

SEQ ID NO: 37257 - DNA, 540 bp, Zea mays
  Peptide Sequence Number=SeqID_80632
atggacgccacacgcgcctgcatctcggcgcccgcgattcgcgactacaatctcgcttcagtggaacctcccagatttgagttagggactggcatatcaccagcaccacgaggccggatcgagcgcgccaaatcgaggggcggcacgtaccagatctggttcgggtttggcggggcggcggttgttagatggtgcgagtctgcgagaagggtagcggacggcggtgctggtgttggtggggttggagtgggggtcagggactcagggcccagggggacgtgtagcgtactatcgtcacgggtggagatgcaatcggatggaccgatgagcctggtttacaagaaggcggccaaagaggctagcacgatatgtatggaccgggttcttagaagttatgtgagagacggatctggagtatgtacagtagatttgatgtttggcgaagacctgacagaaatgccttcgttgattctggcgcgcgtgggagcggttgcgccgttgcggtggacgctggtgctggctgctgggagcctggtatag

SEQ ID NO: 37258 - DNA, 569 bp, Zea mays
  Peptide Sequence Number=SeqID_80633
atgggagaccctgtctcagcacaagtgagggataaagtccacgcccgacttcactcaagtactaggcttactgaaccggggcttgacttcaaaagctggggctgcggggagatcctcggtggcaggctcttgagctggctcctggacttcctcttgggcaacttcttgctcggggatgagcactccttggctagatggaacagtgaccggggcaaagatcacgtcggcgagacttatcgacgacgatttagctccggtgaggtggtcgacgacgtcggggaggtcacggcggtcacgacggtgtgcgggtcggcgtcggaggagtccacgcgcggcagtgggcggccgaagtccgatgaggtcgcgctcgctgttccggcggggcagggcctcggctcaagcttggaaaagcttcacgccctctcggggaagctatccaagggctcaggcgaggttgggggtctatggaaaaggctggccacggcggtgtgctcgggcagtggtggcgggcggtggcacttgcttttcgcggcgaactccggtgaccactggctcggacgggacttaag

SEQ ID NO: 37259 - DNA, 573 bp, Zea mays
  Peptide Sequence Number=SeqID_80634
atggtgggtgcagtgcagccactgcacggcggcaaccagggtcagtggggcattacatgccaaggcggtacggtacaggatatggttaatggtgtgacttggccttccatcctgccaccgggttggacgatcacttcacccacccccgtcaatggaggagacactcgcttcagttttgactacctttcccatgagggctttccctccatcttgtgggaggtgctctgctccaccagttaccctacgcccgctctgtatacggtgcagttgtatgaggagcatcgggtgccacgttgcagggtttggcggaccctggagtctcaccctctgcagcctgaatggcgttcccttgattccgagactgtcgggttcagggcggacgacaccaccaaggccgcagtgctaaaaaccctgacaaccttctacggatatcatcccctagagatgatgatgcacccactaggactcttccccgccgagaagagggatggccccatgtggtgcaaccgagtgagccacgtgaaggacatgtgggccatgcatcccgaccaagttggaaggatcactgtttag

SEQ ID NO: 37260 - DNA, 264 bp, Zea mays
  Peptide Sequence Number=SeqID_80635
atggagcagaggattacccggtctacgctcaccggcggtcgggtgaagtccggcgaccgtggactggcttctctggcgaagcaaactcctattccttgctcggggagcttcaccgagaacgcgtcgaacacgtggaggtgttcatctgcccatgttcaaaagcttgctgagatcgcaaacgtgcgaatcttggcaaaaattaggcgcagacctcttcctggcacctatggctatctcttgtatgatagttccaagggaagataa

SEQ ID NO: 37261 - DNA, 324 bp, Zea mays
  Peptide Sequence Number=SeqID_80636
atggccgaagctctggcggcaatggcgggcggaaaagagctcgccggagctaagggaaagtggctgaccggtgagggtgagtgcggggcgaagtggggcgcgcctaggaaggcttttataggcgtggcgcgcgctctacccacgctgtccgacctcgccgaagacccgcgcccgcctccctggtcatccagctcgctggaggccatgccaagcgaccccgagctccgccccgagatcacgggataccgcttcgcgcacgcgcgccgttcgtccgagcctgtctgtcagcgcccatgtcccctggcgctgagcccgatcggttag

SEQ ID NO: 37262 - DNA, 87 bp, Zea mays
  Peptide Sequence Number=SeqID_80637
atggcgggcggaaaagagctcgccggagctaagggaaagtggctgaccggtgagggatgtgttcaagggaatttggcacgactttga

SEQ ID NO: 37263 - DNA, 906 bp, Zea mays
  Peptide Sequence Number=SeqID_80638
atggctgaaaggtaccaacttccgcgaagttgcattcctccaacgacgaggcagaaggattgcgggtgttccccatccgggggctcggaaagtggaaagacacgatgcataagggagcgcgaagacacggtcgccttccaagggggtcaccctccttttaaaggcgattctccctacttgcgtccccagccgtcgcgggctgagtcttctccaacacgctccaagatactccccctacggcgcgagggctgggtcccacgcgtcatgcaagctggcccagagaagaagaaaccaaaccgccacgcgcggtgcatgcaactgcccagcggttacgagcattcctccactttcgcccagaccagcgggcccacgcgtcatgcaaccggcgcgctggttgctacgtgcgagcaactgcaccgccactcgcaccactaccacgcctcctcgactgcggaaccggcgggcaggagcagcggtcacgtcgtcagccaagcttacgtcccatccaggggcagcgagagaaccctctctcacggcgtgaagacggcgcgcccgtgttccgttcctcgaacggctcgcgcacgcgcaacggccgcctcgcgaaccactcgccccgtcgcattaactccacggcgggacaggcggcgcctcaggcaggagaagcaagcgacacttcgccctcgccataatgaccgcgtcaaaaaaggaaacaggccccgagcctccctactgatcagaggttcaaaggctggcccctcggaggggttcaacagccgcctcagagcacttgggttccgcgcccactactggtcagaggttcgaaggccggcccctcagaagggttcaacggccgcctcaggccactcgggctccgcgcccactactgatcaggggttcgtaggctag

SEQ ID NO: 37264 - DNA, 405 bp, Zea mays
  Peptide Sequence Number=SeqID_80639
atgacgcggcaactcgccgagaggaaaggcaaggcagccctcgttgttccccaagatgcacccgaaaacaacgacagagcagtcaacagcaagcgccctagaacagagaacccactcaccctcgaaggcatcgttctcacatctaggtttcaccccccggaggttgatgatatcatcgaggacagcgaggtcctgggcatctcagctgaagatcagctaaagttacaagcacttcacattaaaaacaatcacctacaaaaacaggagatactcgcggccaagcgacatcgcaccaacatgcaagccaaagtaagggagatggtcctagaagaagagcagaaagccagagagttggagcagcaaatcgcagaaatgcaggccgaggacccctgccaccggcagtag

SEQ ID NO: 37265 - DNA, 351 bp, Zea mays
  Peptide Sequence Number=SeqID_80640
atgactctttggttgtcggtcggggcgaccctggccattcggtcttttgttgctttagtctcagggcagtctctggttgagtgttctgagtctcatcatggaacagacaatagaatattctctgttgctaaggcccttggcctctgcctttgcccctggcagtgctgccaccgcggacttgttgtgggggatagtcttgacgacgaggagtgttttctcctagttgctgctggtttgcgatgttgtgcacctagagctgggcacggtcttgctgggctgggtcctgctgtgaagccaaggggaggcctgaagctatggtgcaagagggcttcgttcatcaaggtaatttaa

SEQ ID NO: 37266 - DNA, 153 bp, Zea mays
  Peptide Sequence Number=SeqID_80641
atgcagattattgaaagaaagtgcgaggctcaaaagggtgttgggataagttcaattctcttgcacgggcccgagtcactggcccaggtggaaggggtggcgcctggactgggaaagatggtgcctgggctggagaaggtgctgctggtgtag

SEQ ID NO: 37267 - DNA, 1131 bp, Zea mays
  Peptide Sequence Number=SeqID_80642
atgtcttcgcgctcccctatgcatcgcgtctttccaccttccgagcccccggatggggaacacccgcaatccttctgccttgtcgttggaggaacacaactttgtggaagttggtacctttcagtcatcgttcggcttcaaggattttcatcaggcagcccggccgcatcccctcgtcggtggtcacccaagacggtgaccaccagcccctgggtggggagaagcaagccgggctgcggcctctgcccctccctcagcttcaaggatctgccgcgtgcccggctctctgacccgagcggcttcggagccgcttccggcgtcgccttccgccacggcagccggaagagcattcgccccgaggtcatcgctgctgctgttcggcccctcggagcagaagtcgtcgtcgtcgttgttggagcgggcggcggcgagccacccgtcggccttctgttgctccgcaggccccccgatcgtgtggggttgaaccctcggccgctcttcgatgagccgaagccggatgtagcggtgtcagcacggacagaggcagagttggctcgaaaagaagacttgatcggtcggaacctggccgggtcgtccactggcgggaccgacgccggagttgagttgccgaggccacgggccgggctgatgtcctcgggggacagctggctgaggcttcagggtggccggccgagccgtctgctcgagccgaattcctggagaagaccccgtcggcgatggtccgggcgtggtgtcgtccttcggggtggagatcctccgaccgcgtcgccgtcccaggttatgccggactttgccgaaggtgtagttgacgccgagggcgctgctgctcccttcaactgtcaagatccgagcctgcaggatcggaaggtgatgagtgaggtatccgtatcccagaggtgtaggagtccctcggctcggtcagccttggctgcttacgtagggggttctgatgtagctgaggtgcccgatctttcggcgagtagagataattccgatttggcggaagatgacccttgcgatccgactacgacgagcaagcccgaggcgccaatgcaatcgctgaaccaactccctgtggttaccgaccttgctgatgcgagatcggcctga

SEQ ID NO: 37268 - DNA, 5949 bp, Zea mays
  Peptide Sequence Number=SeqID_80643
atgcagtcggcatgcaaccgcgccaagtgggcgcacccctttgactccaacgcgcccagcatggaggcccaggcccacacgtcatgcaaccggcgcgccggttgctacgtgcgagcaactgcactgcccctcgcgccactaccgtgcctcctcgactgcggaaccagcgggcggaagcagcggtcacatcgtcagccaagctcacgtcccctcatgggacagcgagagaaccctctcccacggcgtgaagacggcgcgcccgtgatccgttcctcgaacggctcgcgcacgcgcaacggctgccccgcgaaccactcgccccgtcgcattaactccgcggcgggacaggcggcacctttggcaggagaagcgggcgacgcttcgcctttcgcccataacgaccacgtcaaaaaagggaccgggaaaggggataccccgaaagggatccttctccgcgaaggaaataggccccgagcccccctactgatcagaggttcgaaggccggccccttggaggggttcaacagccgcctcagagcgctcgggctccgcgcccactactggctggccctcgaagggttcacagccgcctcagacacagagcgagggatgaccctgggtacgttcgatacatatccaaggctcgggctacgctcccgagggctcggactcgggctcagccccggaagacgacgaactccgcttcgccgaccccagggctcggactcgggctcagccccggaagacgacgaactccgcttcgcccgaccccaaggctcggactcgggctcagccccggaagacgacgaactccgcatcgcccgaccccagggctcggactcagccctggcctcagccgacggtctccacctcgcccgacccaggggctcggactcgacctcggcctcggaagacagactcgacctcgacctcggaggggcctccacctcgcccaacccagggctcggaccgaccacgtcacaggaggcgccatcattaccctaccccaagctaactcaggctacggggaacaagaccgacgtcccatctggctcgtcccggctccagcgctcctccgacggccacgacaccacacgaatcgggtgccaaaacctctccggctgccacgatggcatgaccctcttacggagggttggctgcgcggggaaggacgggacggcgctcacatttccaacacgaacacacacttccagctgcatcccacccgaaacgaggagccggagccacaggcacaaggcagcgccgccggccgctgccaattctcttcccgctgtcatgtacagctcctactccgccgcggcctttgcgctgagggccgcgaagccatccttgcacgcccattcctcctactcctatttctaccacccccctccccacctctgccattgcgacgacgccgacgagcaccgccaccataataaggtcgtcccgcggagcccgtacctcgccccacgcttcttgttcgacggctgcctgctccgccactcggcctacctgcttctttccgcgcagctccggctcctgccgccgccgccgcgcccgtatgcatcccgatgctgccgccggcgagcacccataggctgttgccgcgacggcggtggtgggagacagctggctggacaactctgttgtcatgttgaggcgcacaagtgccggtgctgtgggagtggcgctgggaggccggatcttggggcgatccgccggcgattgaaagcgcctgagtgccgctgcggcagttccggggatgggaccttgcttggagctggatgcgtacggcgggatgtgccgagattggtggggagggcgatgcggcaggaggtgtgggagtatgagggcggccagtggctgtacggaaggtcttcgacggaatgccttgattcggaggaggaagaagaggattgcggttatggtcaattggaggtaggtgggatgcatttcagtaggagatgggaagatggtaatgttgatgatggggatggtcattgtatggattgctgtcggaggaagggcatagaaaactattacagtggtgaggatgtgtacagtagccggcgtagagagaggagagatctgaatgagggccgtcatagtttcagagattctgaccggcgccagcgaagtgagtactatgatgatgaggatgatcttgacttggggcagcgaaagcagggatgggaagggagagatacgaggaattttgtacccaatgatgcagttgacacaaggagtgttgaaactagaaggtactgtgatgatggcagggaatataactgcataagagacaggaggaattttaactctgatgatgtggccaatgtcaggagggctggtcggtatgcagaggatataggaggatttgatcgtagaagagagagtagggattttgagatcgatgataaggttattgtgaggagagaaggcaggcgccatagaaatgaccacagatatgtttcacggcacccaagaagaagtgaagatacagatggagaggatgtttcactcttgagatcacgtcattggaatgacaaagagattggttacaatgagcaagatcttgctgacagaaggtactactctatggtgagatctcaaaagtctgcgggagcatcttcattgcatgaggatgattcaaagagggcttcaaattttaggagcacatttgatgctagacatacagggcagaaggagaattcagcctcaagtgtgaggtggcatgacaatgtaggtggacgaactgagcagatatctgaggagagggaccggcgacgttcagctggttggtcaaatgatgagagagagagatatgattacgatgatgcgcagtttgtgagagtaagaaattctaggataggaagacaagatgacaagtttataactgaggatgaaactagggttacatccagttcaaagaacacatccattttaaaacacggtagcaatgctgatcagcaggctgcagtacataaggatggttcaacgaagagctcacagaagataacggagatatcagaagtccacgataattccactgaacaagattcaagagcacagcgctatcatcaggaagatagagaaaactacactaagaatacgccatcttctgttcaaaattctgtgaagatggctagtgacagtagaagacaagttgatcagcataatgaggtgaatcagaacttggtctcagtcactgattcaaggaaaaactcagggaacctcaataatataactcatgttataagagataagaagagcattgtaaaccaacaagtgatacatgaaacggatatagacgcgcagaatattacacatgtcgatatttcaaagatccatgctagtgatacttccacgtctaggagttcacaaagtcatttggaaactagatcagacatgaactcatcttccagtatgggtttcatcaatagaacaagaagccaggaaaaagaagggtatggaaatatgatctctgctaatgatagtggcatggttaggggttcacaaagtcatcttgagactggattgtatgatccatttcactcaaagccatcggctaatattactgacaacaaaagggaaagtcatgaacaagctgaacttaatattgccaatgctagtaatgctgctgcagccaacacttcaggcagtcatctccaaaccaaaacagattaccaatttcaatcgccttcagctgtagcaattgacagtatgaatgaacaaattgattttgctaagatccatgctattgatgctacagttagcagttcacaaggtcctgtgattagaaatgacaatcaagttcataaggcatcaactgtacattggtcaagtgagagacaaggcatgaatggtcggcaaattacacaagtttccaatacagaacgagatgatgaagcaagaagtatttttcctgaatcctctcaggatacacatcataacatggatttgatctggcagcaggcagacaccagtgggatctctgatgacaaaaatattactggtttgctcgtggagagcaccaaaaagggatttatgactaatgtggatatgggaaaacaagaagcaacaatgggtagctatgaccaagaagtaaggagtgaaattactgcaggaagtagtttaccaagtgattcaagtgccagacagtctgtcaaggaaagcatgctagaatcagctgctcgattagagaaatcatctacctttcttgttggacggtttgttgatgagctccaacagggagtctcagatccagatgctactttaacaaagaaaaatgggaaatccataatggaaggtataacaagctcttcatcaaggtctagaacaaaaggaccagcagatgaaatgtgggatgtccagagtactacttctgaagagaccttcaagacggccgacaaggaggaaggttcctcagctgatggagctactaattctgcctctcagacaccaaaaaatgaatctgttgttgctaggaaagttcacaagtcactctgggcttatgttgctgatataatccgtcttggatttattcaacatggtgactcccatgattctagtcacaaatcagttaagaaaagttcatctaataattctcagagcacagagggttggctttctagtcaggaacgtgataatgatggcacaaagaagaaaaatggaagtaccaacactctgggtggtggtgaacaagaatctggagtggcttcaatgtcaaatgaggaatatttgcacactgatacccatggtttgcagatatcagaaactgttgttgaacctcaagtaggtagatctgagggagacttgttgcctacaagttctacagatgatctacatatatcaggggggagaacaaagcaatctgatgcaggtgaattacgcaaaggaaatagcatagatgatagcactccaacttatctagatatcacgataggacatttacctgaacgcaaaactgcatccaggatcacaacagagggttctggtgagtttattactgggaaaggaatgttagctggcacatcttctgtgaccatcagtgcaatggaagctggtcgcagtgaagatggagctgattcgatatatgatccttcaggtgctataactccttatcatgattctcaaacgcaaacagtaatgccacatgagaatacctcaactggtatccttggaccaccagcgttacctgtgggagtttctacaaggtttgaagaaaagaatatcatgcaagaggccccagaaattattaaaacaggagggaaggatacagaattgaaaaggagaaattttcaaagaaataaacaagtattgaaggatacatttgatgaatgggaggaagcataccagcgggatgctgagcagagaaaagctgatgagttattcatgagagaagctttacttgaggcccagagagctgcagatatttgggaggaagggagtgacgtcggggacgccaccgtcgcatgtccaagatggaccaggcttttgttcgtggaagacagtgttagggagtgcgacgccctcaacaggaaccagacaccatcacggggcgcaccatcgtcaccgctgaaccggtcctcgtatccaccacctcgcctgcacgaagccgcgaccacacttgcacagtgcagccacaggccccctcgcagaccgcacactgatgccgctagcccccacgcctgcatgttgatgatgcaactcgtcaatagaagtcccagcagtcgcagctgcccgaacgtggaccgccagccggccagccaagccaccaccgctgacgcatggccctcctccacatccagccaagggaatgacctggggccagatccgacggccaccgtgttactccagcaccacaggcccaagacctggctaacgcccatcgtccggtgcaaggccactgcaccagcggggtcgcggctctggcagcgctcgccctag

SEQ ID NO: 37269 - DNA, 393 bp, Zea mays
  Peptide Sequence Number=SeqID_80644
atggcgccgccaagtggggccctttcgtcagtcggacggtgctcatctgtgatcgcccctcacctcttcactggcgcgtgggccccaggcgtcaggctcgtctcccaccccggaacagaacacgcgaagaaggcgtggcggaagaccaaatcaggcgggggtttcgacgatcgtcccctgggactcaagatatatggatgggattgggttctcgccgagcccgccttgcgactcgccctgccacgccttccgcgatttcatcttcccccaaagccacccaaaggtctgcgccacaccgccattgccgcacagctcggcctcgcgaaaacgctggccattccggcactgggtcgccgctgggagctccgcgctaccgtgagggatcatgcctga

SEQ ID NO: 37270 - DNA, 633 bp, Zea mays
  Peptide Sequence Number=SeqID_80645
atggggtggtccggagcccgtgtagccgctcagtctggtcccgtactgtgggcctgcatgctctgccactccgtgacgggtatgaactacctccacaccagtaaggcccgcgggatagctagcttcgagcggcccgccagcggaggcgaccacatcagcaccgacggtggcgaccacctctgcgccgacgactcgccaagcagcggcgatcatctcagcatgtacgccactgcgaaagggtcctcgcccccatcttcctacgggggcgacaacgaggccattaaagccaaagagccggaggtccggtggcaggtggcactgacggtctcgccagcggaggcaaccacctctgcagtggggagcctcaccagcggcggcgatcacctcagcaccgacgacagcggccacctgcgcaccagtgccgtaccggcgaatggcagccgccccagcgcacgtgaagaggtcctcgctcccttcctcaccgcgggagtgaggacaagaccatccaagaacgccgccgccgcccccatggcgtacgacgtcttgtatgaccccccggtgcggccagcgacacgggagaagccgtgggtgtggccgacccgcgcacgacgcgaccgtcgcccgtgcggttga

SEQ ID NO: 37271 - DNA, 120 bp, Zea mays
  Peptide Sequence Number=SeqID_80646
atggcgaggtggccgcggctgagcgggacctcgggtaacgcatacgtgtacgacaacccggtggggtttgtccccgtaaacccggcctattggtctgcacacatgcacgatgagttataa

SEQ ID NO: 37272 - DNA, 318 bp, Zea mays
  Peptide Sequence Number=SeqID_80647
atgaacgtatgtgagctcactcttgctgtctcacaccccccacaggtcaagaacaggttgaggtactcttgtatatttccagaaatgttaaatcgcgaggggaatggaatgggaatggcgaacacacgaacatggagagggcgacacacgaaaccgctaccagagatcgacatcatcggttgggagaagactctgagcgtccctagcgatgcggtgggccacgagcggaggtggttgtggctggcggagaaaggattgcgcatgatagattcagagcttggaggttactgggcggcagtcagctgtgggcccatgtga

SEQ ID NO: 37273 - DNA, 885 bp, Zea mays
  Peptide Sequence Number=SeqID_80648
atggcatgcaacattacttgcccttcgattgagataggtggctacggtgatgctttgttgaacctgatatacgcatctccatcaagccagttcgaagagctcagtttagaatgtgagctagatgctacaggcaatcattctagagtgaaggatgctcaagttcatggctcacctatacctgagagtaatggaagattatcgacaactgctcagactaaaatgatgtccacagtctcagaagatgcaattcttgttggctcatctttcaggtggaagcgcaagctgacttattttattaccatgaagcctgaagatgtataccaaagtagcctaggtaacaacaataagagggttgggctttttgatatgggtgatggaagtagtgagcctgctgctgaggacaacaatcaaatgcatcaggaaaatatattttttgccttgaaagctaaagttatatgggatgttttggtaccgagaggccctccttgctctagagaggattataacagagcaatagacaccctcctcgaggcttcactgcttcagagtttgagtctgccatccgtagttcttctaaaccaagacaaatactctctccgtcccaaaatattagtcgttgtagctattgatttttatgtctatattcaaaaggacgatgatgaatctagacacatatatgaaacacatacattaattattgtattaatccatttaaaggtctatcatgggttttattctgcatacgataatacaactctactatatgagatcctgaagtctattaaatgggcaagaaaaacatatgtaaatcgacctgtaaatgttgttggacactccattggaggggatctagcttcattttgtgcccttgatctatttgtttga

SEQ ID NO: 37274 - DNA, 1269 bp, Zea mays
  Peptide Sequence Number=SeqID_80649
atgcaagaagcatacaaccgccccgcggttgagcgccccctcagcttcgctgcaaccggcggtccaacatggggcccaggcccacatgtcatgcaaccggcgcgccggggtaccctcttctacagtatgaaggcgctgcacccgtacgacacctccagaggaacaccagacccctgtgagtacgagcctggagctcccgaggagacatgccgggtccccctgagtgaggtccgggccttggcagggtcccgggacagagaggaccccgacacaagcaagagtccggtgccgacacacggcgtcagggtcacccagcagacggcgcgcctgaccagtctattggtgaacaggaagggtctcttatgcgaaagtgccacgaccaagggatacgggctcatcgagccattggatcaccaatcaagtgcccagattagatcattaatcccaccatcgcccgagccattgaatccaatcggtgctaacgatgcgcagctaaaggcgaacaactggggaatcttcttacgagagatcgagtcggcggtgaagctgatcacggcacacgacggctctgtggcagtgctgcttaaatggatggacgagaaggcgcggtcggggcttatatcacagcgaggtggtggccaggaggctgacgcgcgggaccagacagtcggcgcggtgcattggctgacgggcggggcccacgtgtcggcgcccattgcagtattgggccgtgcgggagatgtgtatgggcccgatccatttgtgcgttcacatcttctctcctccctggcaactgcttccatcatctccatcaccgtccccacgttctcctccctccgcctctcgctctgcgcacatccccatgcccacgccgagcgcttgcgcctcaccacccccgtcgcagccgcggccgtggcggcgtcgacgacctcccccgactttcccgccgtgggcgccgtcctggggaagcccacagtgctcgtgggtagtggccgagaagatcggagccgcggggttcatgctgaaggaggtggtgcgatgtccagctcccaggtcgtcgtcctcacgctcctggagttttggtcagtgagatgttcgtcttcgtgctcagcctcgtcctcgagtcgtcgcgcaaacagcgagagcagcgtgggtctcatcatcaggatcacaccaacaggaaatgataacaaattacaaatgtaccttcggcttgaaggaaagcaaaagtacaagcgtgacacaaaagcgaatgccaagtcagcgtga

SEQ ID NO: 37275 - DNA, 111 bp, Zea mays
  Peptide Sequence Number=SeqID_80650
atgaagttggtgcctgctgcctccagactccagctgttccatttcagcctggcacccccacaactacgaaaaggcgcacgcatcttcgtctcacaagcaccgacgcaatga

SEQ ID NO: 37276 - DNA, 537 bp, Zea mays
  Peptide Sequence Number=SeqID_80651
atggtcgtgttgcacgtgaagttggcgccacccgctgccgccgccgccaccgccgccgcctcctctcccatgcaggacgtggacgaggagacggagttcctgtacgagtgcgccgcctctgcggtcgtcgcggacgtcgcggccgccctcggcgcgctagcgggcctcccaggccgccatcctctccctctgccgccgccttcgaggtgtgctggtgcgatgggcgagctcgagagggcgctggacgaggccgaggcctacgcttctaaggagcaggtgcagcgcaacagattcctgtctcctcgtgctctaagggaacatatcaagaacatcgagaagaaatgcgctaatactctacaagaacctctggaggcattgtctctgcaagagtcatcatcagacaacaagcatgagagaatacagatttggtgggctgggaaagagctagccatggaccagaagctatccgactatatcggtgttaatgataaaaccaagattgtcgtcaggctaattgaagctcgtgatgagtgttga

SEQ ID NO: 37277 - DNA, 171 bp, Zea mays
  Peptide Sequence Number=SeqID_80652
atggcgaatgtttttttatgggaccgggcccgacccggcacgacaggcccgtcgtgcctccggcccggcacggcccgtgtaagaataaccgtgccgggcttaggccgcgttagccagcccgcgggccggcccggcacgacacgataccaaaccgtgccgggcttggactag

SEQ ID NO: 37278 - DNA, 1290 bp, Zea mays
  Peptide Sequence Number=SeqID_80653
atggcattgaatgaatccagtccaacgccagccaagccgttccgtgttaataatcagctatcactgcctgcgctgcgacaaaggcttcattacacaacagtggcttgcaacagagacccaacaaaaccaaactgtaagcgcaccgcccaaaaccctataaaccatctcccatctctctggctcgctcgtctagcagatgcacagcagcaggcgtcccctgtcttcgtccttccgaaatcccaatcctccctccgagtcccccatcccaaaactcggagctccgaagctggcactggcatcgcggcaatgccgaggccgcccacaatggtgatccaggacgactacatcgacatggacctgaccccggcagccacaccggagccctcgccagcctcgccccgcttcgagttccagagcgccggcgccggcgccgccggcgacaggcatagggaggcggcgttcgcgtcccccgcggacgagctgttctacaagggcaacctgctgccgctccacctgccgccgcggctgcagctcgtgcagaggctcctccaggaccaggagcagccgccgccgctgcgaggggcgaagcgggatgcggagtcggatgccacggcggcggcggcggcagagcgaggagacgccgacgctgccgctgccgccagcaaggtgtgcgccgccaagaagccgtcttgggccaagaagctcaaggtggttaagcggtgggcgtcgaaggagtacatccggtcgctcttcctggccaggccgccgttgccgagcgacatcgtcgccgccgccggtggcgccagcgccagcggccacggcatcggcagcgtcagcgcgagggggagcgtcctagagcaggaggaggtgtgccagtgccagcaccgcaagtccttctccggcatcatccgccgggtgcgcctcgtggcgaccaaggcgcctgggacctcgccgctgtgctcctcctcgtcctcgtcctcctcgtcgtccacgccgtcgtgccgcaacgcaaacgggttcttcttccggacgccggcgtcggcggcgggggcgacgccggcgctgaagcggagcagcagcgccgggtcgtccgaggagggcgccatccagggcgccatcgcgcactgcaagcgttcccagctgctgcagcccgggatggtggcctcggcggcggcgcggaggagcgtcagcgacgtcatgttctactcggtgaccaacacgcccagagcctcttccgtgaccgccggcgaggtggcgcaggagaggaggcaggagatgtgcaggggctga

SEQ ID NO: 37279 - DNA, 246 bp, Zea mays
  Peptide Sequence Number=SeqID_80654
atggcgcaccacagaggtctaagaagatgggacgagagaggtcatggcataggttttataacccagcatcgctcctaccctccgaaacacgcgcagaggtcacagcggagaccgcgggattcacttgagtttgttacggagttcgtttgctacagaggagctcgtcgcgatactattgcgtccatccgcaaggttggtgctgaactcgccaggtggggcccgcaaggaagtgaccagcttgattag

SEQ ID NO: 37280 - DNA, 861 bp, Zea mays
  Peptide Sequence Number=SeqID_80655
atggcgcactctggctcaaccaggcccatacctcagccatcccggcatcaacatgaggcgtcagcgtctgtacgctcgccctcggtgagggccgcgccgactgaggacctgcgggcggagctcaaccgccggcgtgcgggagaggaggcccgagtctctctggggaggtctaacgacctgcgggcagaactcaaccgcaggcgtgcgggcgaggatgcccgtgtctctctagagagggcgcgtgagcgccgacagaatgtcgagggtcgtaacctcaactatgactttgctgtggttgcaccgcagactccaacgggcgcccggatccaggcgggtgtccccttggccggcgtaggttgctccgcgtggcaacttggccatccaagttccgaccgcacctgccggaaaagtgcgacagaacgtcaaacccgtctgggactgggggttgcccagacgggtggctcgggtgccgtcactcaggatggcaaaaagaagaaaaagaaccgcggccacgagaagccatcgtctgccgctctggtcgttgcagctgcgactgggggccggaacaagcgcaacaagcgcccacggccgcagaggggtaacatcggctcatgctctgtacaccccaacagtcgccatggcgccgcagagtgtcgcgagatcatcgaactcgcgaagcacgtcaccgagcggcgcgaggaaacttccagggacggctcctcacctcgtcgccgacctggcaaggaaagggtcaacaacggcgaggtggccgcgggagaacgggacctcgggtatcagtcacccgagggggtcctgaaggatgtcttcaccggaggctccaacttcggtgacgatagctag

SEQ ID NO: 37281 - DNA, 360 bp, Zea mays
  Peptide Sequence Number=SeqID_80656
atgatggtccttgcctcagttgccaccacctcgttcgccattctacttcttttctttctcccctcatgcctccaccttcgcgccaccccattctcggcagagggcgtaggagcaagcgcctcctccccatattggttcgacactagccccgacaccgactcgcgtagtggttattgcacgtccatgaggacgtttcacatcatgcgggcatcatcgttttcgccgttgtcggacgtcccgttcgtcttcccggccttcgcgctgttcttcctccccaacctgctgccctcgcctacggtcgcagtcgcgagccgaccgacgctcgtcgacgcgtacgaggcgaatcggtcatgctcctga

SEQ ID NO: 37282 - DNA, 300 bp, Zea mays
  Peptide Sequence Number=SeqID_80657
atggatggcggcaaccacccccgcggcggtgagccctccttctcgcagctcctccaaggccttcaaaaggggctggagattcttctatttctcgcgcggggccccatagcgccagttactgccggcggcgatcaccactcgttgagaaaacgacgggagcctcccatcgtcatttcggaggcaaagcaggcgacgcttcacctccgccatgatgaccgcatcaaaaagggaccgggaaaggggatactccgaaagggatccttctccgtgaaggaagcaggccccgagccctcctactga

SEQ ID NO: 37283 - DNA, 630 bp, Zea mays
  Peptide Sequence Number=SeqID_80658
atggatgttttgatgattaggaacattggagagaaccagcaaggacttgggaaaggccaaggtgttgaggaggaggagcaagggcacccacaacaggaaggagatcaagtccgactcggctgcgactccatctcggggtctaggaccaggataagccttcatggcgaggtcactcgtgtgtcatgggtaataaccaacggagctgtgaagatcgaccgcgtcttctatcaattggtatcagatttccaggtttcccgtgagcccttcgtatcaaggcatgtcgctgtgccgaagctccctggaaggtaccttcggcatgtaccttcgcgctatgtttgcttttatgctgatcttccaaaggtgtttgttcttaaaagaccttcggcgtcgaagcagacccccaacagtagccccttcgcgcaaatcacacgtcccggcgtcgagaaccggttcctgcgcgaccctgttgaccgaagagggcgcggatttcgtcgccagatgggtggagccgccgcacgggccaagggcgccgccgtgtgctgtctggccgccgctctgctggccggggaagatgagtgggatggggatgagactggtgccgttgagtggcggatgtgtggctgtgattag

SEQ ID NO: 37284 - DNA, 192 bp, Zea mays
  Peptide Sequence Number=SeqID_80659
atggcgagagtagcatgtaccctctgtggcaagaggctggacggtggtgtatctgtgctctcggtaattttacttaatttgacaaataaaactggatttttaaggatccactttagtaagcatttctgcaaaatagagtctttgattattgagaagccttaccttgactcccttaagccagcatacccttga

SEQ ID NO: 37285 - DNA, 453 bp, Zea mays
  Peptide Sequence Number=SeqID_80660
atggcgatggcgagcgagcagaaccatagcagcggcgctattccagcgcgcggcatgtccaagggttgttatcaacccggaaatctcggctgggcaagaacggctatgcgacaccattggggtccgaccctggtgcatgcgagctgtggagacgaagatgtgcctggcaatgatggcccacacgccataggctgtgagattctgtggagcaaacgatacccaagggaccgcacgaggggcccgcgcgacagcgtcctatttaccagagaagctcagcgcgtaaaatactggccagtgggtcgacgcagtcggcgccgggatccaaaggagatacgcgcgagagaccacaatgcgggtcccacccgccggtgtaactcccaggcaggccgccacattgggttgataggcttggcgtggagaggacaaactgggttgcgcgggtttgagaagtag

SEQ ID NO: 37286 - DNA, 2343 bp, Zea mays
  Peptide Sequence Number=SeqID_80661
atgggcgccgccctcggcctcggcctaggcccggtctcccaccacgatgactgcggcgccggatgccccaacctcagtcctcccgccgccgtgcctccccgacgcagcctgcgcctcgcgggccccgccttgggtactccaaacactctctccgctcgtgacggcagttcctccgggttcgggtcgggcgggagcgagaagaggtcggggagggcccgtgctcgagtccctgcctcttcgcttgctacatccatctcgccgaggactgggaactccaatagcgatggcggagggtcgggggcggacagggtttccgcgagcggcgacagctctggcggttcggatcccttcacgaccctgcggtcagggtttcggatcgcgaagcgtcggatggaggcgggtggggaggcggagactgggtcgtctcgtcgaggacaggtgcataacgaaatgctgcaccaacacgtggacacgccgacgaagcggtgtaagaccatattggtcggtggagtggagacagagcatgtctctgacacaaagggtgattctgatgaggattgtatgatgctgggtccaagtgggaccgaactgaattatgttgctacgaagactgaaaagggggatgtggatgatcctgccaatgcaagcaatggagaatctctgcagacgcataatctgttaccggcagcaaatggtggggtggttgagcaattagtatatgcttcaggaagtcctgcaagttttgaagcacaagtctctgcagatatgtgtctcaaggaaggttcgagccaatgcagttctaggaaggaaggcaaagtgaaagagaagcttgttttggggaataacaaatcttgcgcttatgctaatgtgggctctgcagtcgatacctgttcccacaaattcaaccctgatagcaaaggaaaggaaaagatggttgcagaagatagtttatcatctctgacctcgagcgaggatgagccagatttcgatccagtggattccaaagagactcagctcaactcaggatcagtttctgcttctatggagtcatatcgcagacaaaccgtaaaagaaagggctatcaagctggcccctaaatttgcattcttcaaagcagataaagatgagcatagtgaagatgacgatgaagagttagagcctggtcctgacactgaagactggccaggcccatttgcaactgcggcaaggatatatgaagaaagagaagctaagttgagagctcgagagttgaattctttaaagctggacgaatctgcaaacagggtcatccgttggtcgccttcaaaggataggaaaaatctagtacaagctcaagttgctccatcacttacaagtgtatgcttaaatacccttgcggaacattctgaatggattcaatcgcttgaaggtgtcccagaggagctaaagcacaagctgttaaagattctgtgtgattccaggaagatgaatactcatcttctcaataaactattgtgtgacagtcctacagaactgcatctcagcgagtgttcatggctgagtgaggatgactttgagaaaacttttgggaaatgcagcactgaaagtttgcaggatctacagcttgatatatctgggagatgcatacctgactacatattgccaactaccttagctaaggttcctaactgcatgccattgttgagaaaaatatctctgaagggaaattatcgactttctgataatggtttagtcacaatcatctctgccgcgccttctttatgctccctaaatctgtgcgagtgttctcttctcacttcatctggaatcgatattcttgcaaacaagttatgttcagttcttagagaactctatatagatgactgcacaaatgtggacgctatgacgattcttccttctctacagaagattaagcatctagaggttttgtcaatgtctagaatacaatctgtttgtgacaaatttgtgaaggggctcattcctgtacatggtttaaatctgaaggagttagcatttgctggttgcttgaaacttacctcatcttccatcaagactattggggaatactgtcaaaaaataacttcattggacctttgcaacttgaatcggctgcgtgactcagcaatgatgcatcttcgtggttgtaggctaataaggaaactaaagcttcaaagaaatgcattcagtgatgaagctgtgtctcaatatttggaagcatctggaggatgcctgactgagctaatgctaaacaatgttgaggttttagttccaacagacgtctttcgctgccaccgctgcgccgccctcggggagatcatctcgacgggggcagcaccctcatag

SEQ ID NO: 37287 - DNA, 462 bp, Zea mays
  Peptide Sequence Number=SeqID_80662
atgcagagactgatgggcgcgattcaggaagctccgcctcacccgaccccagggctcagcctcaacctcggcttcaggaggaggtctccgcctcgcccgaccctagggctcggcctcaacctcagcttcaggaggaggtctccgcctcgcccgacctcagggctcggcccccgcctcggcctcaggaggtctccgcctcgcccgaccccagggctcggcctcaacctcggcctcggaagatggtctccgcctcgcccgaccccagggttcggcctcaacctcgacctcagaaggaatcgcgtcctcacccgaccctggcctcggcctcgggaggagcctccgcctcacccgaccttgggctcggaccgaccgcgccgcgggggatacatcattaccctgcgcctagctagctcaggctacgggggaacaagaccggcgtcccatccaggctcgccccggtaa

SEQ ID NO: 37288 - DNA, 486 bp, Zea mays
  Peptide Sequence Number=SeqID_80663
atggccgtcagtcggtcccaggttgaccacatatggtaccccggaagacgcgaggtcaacgtccgtcgtgtcccccactggggcaccggcgtcgtcgactcgctcgacagccaactaggtgccgcctcctgcttggccacggttgctccgcctcctcctcctgcggtggggaaggtgacgggacagacccggatgctgctcttccgccatggggggaagacgtcgtcgagtccgccgccgccgggcgggttgacgaccgccgttgtcgctgtcgcgcggcagaggaaggagtaccatatcgtagctgccgtcgagggacatgaactcgagactctcgaaatggagcagcatcccgggctgaagaggttgctggggactacccatctggagctcgacaggaagctgttcgtcaacacgcagcaggcccctacctggcacgccaactgtcggcgtttcgaccccgggggtccctggaccgacgagtaa

SEQ ID NO: 37289 - DNA, 561 bp, Zea mays
  Peptide Sequence Number=SeqID_80664
atgagcttgcggtatgaccgtatttatacgctaagagcgttgaaaattgaaagaccccgcttgtcagtgaatgttgctattctagcaaagggaaggtatcttcggactcaagtcggcatcacagtggaccagaataatacgaaggttggtacagcgccgaaggtagatgatcttctctttaacatttacaggaaaaagcaaagaaagagacgatgcttcgcatgcggggagaagggccacttcaaggacaactgtccaactatcatcgagcctaaaaaggggaggagcaaaggcaagacgctaacaagtgtcaaaacttgggatgattcttcaagcgaagatgaacctccaaggatgcgcaaccaccggtcctcatcacactcatcacagtcatcacacaagtgtcttatgacaagaggtaaaatgagtattccatcctctagtgatgatagcagtagtgatgatgaaggtgagggaaagctctccgtagatgagcttgcggaagccgttaaattttataggatgtttgcactaaacaaaaggctcaacttaaaactttga

SEQ ID NO: 37290 - DNA, 291 bp, Zea mays
  Peptide Sequence Number=SeqID_80665
atggcgatgttcgcgcggccgctgctggccaccctgctgctgctgccggcgttcctgctctctgccgcctcggccgccgacagcaagagtatggctcctgttaccttctcccgcgcgctttcgttcccggttgctactgtcgcctgctacattcctcgtgttcgttcctgcacgcgctccattgatccaatctgtctaggaccggcgtcgtccgttcgctggactagtgcctggatctgggtgctttggatgcgtgcctcgggttgggatctcgcgggcgccgtgggttga

SEQ ID NO: 37291 - DNA, 189 bp, Zea mays
  Peptide Sequence Number=SeqID_80666
atgcaaatcccctatgttatcctaaaggaaaacttaagtccaaaggactgtaatcttgctgacggagagtacatcctcgtgccggagcaaggagctgcccaggagattgccccaggcccagcaccagagcctgcaccagaggacctgcctgccactgctttggaaggcaagccccggttttatgcataa

SEQ ID NO: 37292 - DNA, 486 bp, Zea mays
  Peptide Sequence Number=SeqID_80667
atgggcgcgattcaggaaaacagcgtcgcctgccccgctccgactgctgtgccacccgccagggtgaggctaacgacagctaagttcagcctcaggcgcaacaggaagctccgcctcgcccgagcccagggctcggcctcaacctcggcttcaggaggaggtctccgcctcgcccgaccccagggctcggcctcaacctcggctttaggaggagatcttttcctcgcccgacatcagggctcggcccccgcctcgacctcaggaggaggtctctgcctcgcccgacccgagggctcggtctcaacctcggcctcagaagatggtctctgcctcgcccaaccccagggttcggcctcaacctcgaccttagaaggaatcgcgtcctcacccgaccctggcctcggcctcgggaggagcctctgcctcgcccgaccttgggctcggaccgaccgcgccgcgggggatacatcattaccctacccctag

SEQ ID NO: 37293 - DNA, 432 bp, Zea mays
  Peptide Sequence Number=SeqID_80668
atggcctgcggcaatatactcggcttcggcggtagaaagagcgaccgatgtgacaccccagtgtcacctagggtttctcttaaaaagccaaaccaagaaccatcattttatgtgaaccaaagtaagcatgagcatcaaaacaatttaagtgagaaagaattcaccaagggcagaggcaacgggaacacgtgttcgaccgcggctgacacccctggttcacgcccgttcgcgcaccgcgccttcccagtgcacgcccgcgcgcactcgccggtccacgaccgcccgccggtctcctcgccgccgacgagcatccccgcctgcgcgcgtggaccgaccgactccggccatctccgacggcgttccgcacaccgttgtgatccccgcgacctccccttcgccctcgaccacttcaccggaacagtctcgccgccg

SEQ ID NO: 37294 - DNA, 642 bp, Zea mays
  Peptide Sequence Number=SeqID_80669
agcctgatgggtgcaattgaggtcaaggctccgtccactcaagggacgcgatatcgcctcgcccgagcccggcctcgggcaggaacagtagaccagggcggattcacgcctcgcccgagggtctcctcaagcaacgggcgcaccctcgactcgcccgaggcccagctcgggcaggcttcgcagagaagcaaccttggccagatcgcctcgccaccgaccgaaaattgcgccgcctgccccgctccgactgctgtgccacccgccagggtgaggctgacaacagctaagtcccgcctcaggcgcaacagacagtctccgcctcgcccgaccccagggctcggcccccgcctcggcctcggaagatggactccgcctcgcccgaccccagggctcggcctcgacctcggcctcggaagatggactccgcctcgcacgaccccagggctcggcctcgacctctacctcggaaggtggtctccgcatcgcccgaccccagggcccggcctcaacctcgacctcgggcggaatcgcgtcctcgcccgaccccggcctcggcctcaggaggagtctccgcctcgcccgaccttgggctcagaccgaccacgccacaggggggatcatcattaccctacccctagctag

SEQ ID NO: 37295 - DNA, 414 bp, Zea mays
  Peptide Sequence Number=SeqID_80670
atgtggacccagcacgttagtggccaactccgcaagaattgtggctccgacgcaataaactttgtgaatgccggccacctctgcgaactccccacgtccgtgggcgccgtggcttcagcccttataggatggcaccataacagctctgccttcgtggccaactcgggagaggaatttctcaccggcgcgctctccaccacggaacagccgttgcccgtggacttcacctctgccccctcggaaagccgttcggtctgggagatcaccaatcgcaggggcgatctggtctgtaggggcggaatcggatgggtcagtggtcgtctcgtccctttaaatagccaccttcagatcttaatccatacgtccatgttgcatactggttcggtgcgggaggagagtaatctgaacccttga

SEQ ID NO: 37296 - DNA, 582 bp, Zea mays
  Peptide Sequence Number=SeqID_80671
atgcagctgtttggctgtggggtttggttgccaaaagcactagctgagtttataaatcaagttttagctttgtcaagtatccgcggaaaggaaaagggcggcgtggcttaccgacgaggctatgtgcgcaaggaatcgaaaaatggtgcagagacttacccggtctacgttcaccggtggtcgggtgaagtccggcgaccgtggactggcttctccggcgaggcaaagtccgattccttgcttggggagcttcaccgaggcatgcacggtctcttccgagggtcgggcatggctgggaagggctctgctgaccggtctacggtggtgggggatcgggtggccgcgggcacgccgtttgcaaggcaaacggcggtgatctctggctccggtgaggtcgagcgtgcgcggaggggtacggtcgacgtctatgggggctttataggtacgggcgcgggcaacagcattggctcagctttggcgcgacgcggggcacgcgggggcgcgcgcgggcgtgctctggcgagctcagagcgcgtcgaacacgtggctctttgcttctgttcgtgttctaccctctgctga

SEQ ID NO: 37297 - DNA, 870 bp, Zea mays
  Peptide Sequence Number=SeqID_80672
atgacttctcacggatcctcagatgaagggaatgcacagtcccacactgatgggcttgcacgagagggtttcccccgtatcttgtgggaggtacttcagggagctggttacacgacgcctccccagtacgcggtgcagcagttcgagaagcaccgagtgcctcgctgtagggtgaggatgaccctagagcctcatcccctgcagccaggctggcgttcgctggactctgagtcttttggataccgggctgaggacactatggaggcaattgctcttcacggactgactaccttctgcggattccaccccttggagctgtccactcaccccattggtttgttccccacggagaaggaggacgacccaatgtggaaggaccgagtggagcatgccaaggacatctgggctatctacccaggccagactgctcacttaacagtgcggtgcatgaatgccctgtatcgtctgcaagtgatgcgtgtagaggcaatgtcccatctgatggcattattggaggctaccaagatcactttggacgacagagaggaacttgtggtggacttgtccactgagatggtggaaaaagacctacaagtggaacaattgtcaaatgagatccaagagcttgaggagttagtgggaaccagagagaacaccatcgaggttctcgaggatcagttgatcaacacccagcagcagcttgcagaggctaaccagcacctggatatgcaccaccaggagattcaggacatggaggccaacgaggatgtcgacatcgagggaggagaggagcctgcctccagcttggacactcctggctcagggagaccaccttcccccgagtcgagcgttgcctcgtttgctcactag

SEQ ID NO: 37298 - DNA, 77 bp, Zea mays
  Peptide Sequence Number=SeqID_80673
gacttttagccccggttagtgaaggaccagagtggtgcatgcgatggggtcatggtcaacacacggcaagagaatag

SEQ ID NO: 37299 - DNA, 228 bp, Zea mays
  Peptide Sequence Number=SeqID_80674
atggcggccgacaacccgccctccggtggcggaatcgacgacgtcctccccgcgcggtggaagaacgacattcgagctcgccccgtcctctcccccgccaatggaggaggaggcggggcaaccaaggccgggcaggaggccgcgcttcgtcggctgttgagcgaattgatcagttacataatatggacatcatcacacagtgctcaaaatagtattaaaaagggataa

SEQ ID NO: 37300 - DNA, 540 bp, Zea mays
  Peptide Sequence Number=SeqID_80675
atgtgggacgacttttttcctgttcctgaattgttcatgttttacttgactgcatcttacccagtccggattcagcttagcaccaatggaagtaatctaatttacacttgtgccagctaccttggtggattactatacattgtctacaggctcccactggtggagtgtatgatgtttggtgctcttgtatcagcaactgatcctgtgacagttttgtctatatttcagaatttttttccttatcccataccataccctttgtttatatttttccctactgatgcttataaaattctcggacccttctttggtctgtcattgaaggtagcgatatccttgtacaggtctatggcatctatgaggacgcaccattctggaaaaaactttttccttgtaattctgaggtttcttgaaaattttgttggatcaatgtcatcagtaagtcttgttcagccatggggattttttagtgcagacaagctgaagtttacccgaaaagggctgacagctatgtacactgcaaaatctgcactagactag

SEQ ID NO: 37301 - DNA, 1356 bp, Zea mays
  Peptide Sequence Number=SeqID_80676
atggctacgggtgctccgtcgttcattggctatgaaccggtgtcctcagatgaatggcagcgtggaggggaggagatttatcttccatcgcctctaggggatggagtttggtgcgttggtggcaccacgagcagcagaccaagcggcaccaacaatgcgtgctcctacgacaacgacttcaaagaagatgaccacctggaggtggtcctcccggcgtggcagtggcaggaggtcgttcgactctttcggtccctgacccttctgcggtggacggagagacaaccgaagaagtgcctgggtcacccgtgtcaatccctacccatcctaggggtattggcggtggtttcggccctactaccgccgccggtgtataggtgcgtctcccttgaggcagtgccactattggctacgatctcttcttcttcggtgggggtcatagtcccttcgccaccgggagggcatccttcttcccctgagatgcccagggcgaacatggaggattggaggcaagtcgaatcggcttcgtcctggggcgatcttagcctcagcactatcgaggagacgctcggtagctttcaggacatggtctcaattacccgagcgtcaatgacacatgattttatccgctttgggcacgtaaacgccgcttatcgggcggagaaattggtatccgttgagcgggaggtggagcagcttcgtgtgacaaccactcattctgtggtgaagcagcgcgaactggccaagctccactctaaggttgagtgtcttgagagcgaagagattgaactcctttttgaggctccagaagatgctttctcggctgatgacgtcaagagggcagtcaaggagatgaaggtggtggctgagacccagggaagcaccgagcttcatgggttctgcctggtcgtcggccaggtgtgctcccacctttcaccaccgcctccaatcgagatgcctcagatcgggacgagatctcaaaagtgggagaaactctcgacgagcgagtacaccaagaaagacggaactctcgccaccgtgatcgtcgacaagctcaagaccgagaacgagagcaaaccgagcaagaaggctatcggtgattgcttacttgagcagctaatcaccttctacccatcgctcatcctccgagcgacctacgccatgccatcaacagccggcaagacgcacagagctccatcaatgcttcgcgcgaccgatggcacgaaaaccatgaggaaccgcatccccgaagtcgccgaggcagtggtgattgaagacttctaccggggatccaatgacttggctttcgtccaggacatactacagaaagcacccgccacctttgaacaactgttctaa

SEQ ID NO: 37302 - DNA, 312 bp, Zea mays
  Peptide Sequence Number=SeqID_80677
atggagatgactctcatggatcgcgtagggggagacaatgccatgggagcaaacaaagaggcacaaagaagagatgggggcaaaagtagtccaagaaggcagactaacaaacgcgagaatacaaaaatccaccctttagataaaaagcctctacacaaccccaaggagttgagtaaaggctcaggggatgctgttgggaacctaggaacatggtgcctaaacgaggcccatgaagtccctgtcgagcaaccttgcgagatgaagcggacgaccaagtccccgtcgggcaaccttgcgaggcggagcggatga

SEQ ID NO: 37303 - DNA, 294 bp, Zea mays
  Peptide Sequence Number=SeqID_80678
atggcgcttcctgtcgacgtggctggcctgtgccctaggttgggcgacgtggaggctcctccgaagccggggtcgagtctgtcttccatggccgaggccgagcccgagcccctgggtcgggcgaggcggaggtcgtcagcagaggccgagtccgagcccctgggtcgggcgaggcggaggtcgtcagcagaggccgagtccgagcccctgggtcgggcgaggcggagttcgtcgtcttccggggtttatcccgagtccgagcccttggtcgggtggagcggagttgccgtctga

SEQ ID NO: 37304 - DNA, 945 bp, Zea mays
  Peptide Sequence Number=SeqID_80679
atgtacttatttactaaatgcttcattagaaggtcaacctttgagtatatgaaactgttcttttttaaaagcttgcaccgtgatcctgctgtggagattggattggttttggacatcgtaggcgagagcaccctcatcgacaccttcttctgctatcttggtggcaatgcaaggttgttcgacgactatcgcgatgaagattattatgtgctaccacggaagttcagtattgtcgctcgagtagaagttaaattccccattgaaccacgttatcgtgacagacaacatttcattttgtctgacatcaatggagccaagatcgaggcaatgacaagttcgtacgagacagtcaagcacttcaacaatttgctacatgaaaaacatgttttcaagatgcacaatgtagatttcagtattagtatgggtgcacatcagtttcgacacctaagtggtccaatggaattatatctcaccagacaaactgtcgtggagccgtacacagttccatttcaaatgccgccattcccaaaacatatattcttgagtcttgcagatattgccgaactaccaaataggactttagttgacattatggctattgtagtccacttagatgtaattcatcgcacaatgtggggtccattcaggaagattgttgtcatggatgccaggtggtctctacatgccattaaagtttggggtgacttgctaaacaaaaatgcacttcgctgggtgttggctaaggagaattgtagcataataattgggactatgtttcgacgatttagaaggcaagagtgcctcgagtcatctgattatacaacaatacacttcaatcctttccatcacaataaccatcactttgaaccaattcagaaagctttgatggcgtggaatgatcgtcaatttgctgttagatttcttgaagaacaaaggcgtagatag

SEQ ID NO: 37305 - DNA, 339 bp, Zea mays
  Peptide Sequence Number=SeqID_80680
atggccacactttgcaagttgcaaggaatttatgttctggagcagaacatttgtctcaagttttgcatggagctgtgccagatggcttttgggattctgttgagtatatccattgaagttcctggtgaagaaccataccattttcagccccgtctgttttctaagtacacaggcaatggagatacaaatcaagatgttgctttgtgttattttttaaagaagtatttagcaggtcttctccattctaagactccgatgaacctctcaattgacgagcgatgcaagataaataatttgtccacaagtatgattgcattatcccagatcccttcgttttga

SEQ ID NO: 37306 - DNA, 1386 bp, Zea mays
  Peptide Sequence Number=SeqID_80681
atggggggagcccgcggttctcccgcctggtcatcgttgggggaacgcaacttcgcggaagtcggtacctttcagccatcgttcggcttcaaggattttcgtcaggcagcccgaccgccttcccccaccaatgggcaatttggtggagagaagcgagccaggctgcggcctccgcctcgccctcagcttcaaggattttcgtcatccgggctgaggcggaggagcgcaccgagtggggggttccccccgcgtgggtcggtaacccttttcttcccccggcatttggggggggaaaggcatcctccagccccgcgggggctcccttcagccatgtcggggaaggcgaactgctgctgcccagccagggtgcagcattccgtcctctgtccgggcgatggtcgcgtcgcgtacgggccggccgtgtccagatcttcctcgcgccgacagccgcgccagagggttgcccagcacgttgtgtgccacgagggcgcgctcatgttctggggcggcctcggcgagggcgggagcgaggacctgccggtgcgctttggggcgcccggcgcccgctggtgcggtgttgaggcggtggcagccggagaaggtttctctgctaacgagattgcctactccgcctgctcccctggacctccgtcccttgactcgaatggctggttctcgtccttcgcggctgtttcgccgcccggggcggaggtcgttgtcgctgctaccggagtgggcgccggcgagccaccaggggttttgtcgccccgcaggccctccaccgtgggggttgagtccctcggcttagtcggccttgccgcccgaggcttctcttgcttagttaaaggaaaccctcggccgctctttgatgagccggagccggaggcagcggtattagcgtggacagaggcagagttagctcgaaaagaagatttcgtcggccggagcctgaccgggccgtccgctggcgggaccggcgccggagtcgagttgtcgaggccatgggccgggctgatgtcctcgggggacagccggctgaggtttcagggtgaccggccgagccgtctgctcgagccggactcctggaagagaccctggcggtggtggcccggacgtggtgctgacgtcgcccttcggagcggagatcctccgactgtgttgccgttcgaggctcggtcggacttcgtcgaaggtggtgttgacgtcgagggtgctgctgctccccctccatcgagcggaatcgcttatccgagtgtgagttacttatcgcagaaggtgatgagtgaggaccccactttcgaagtagtcaaaaagcacgaaaggcgctccggcagaaagactttttccgaggaaaattttgacgcagagggggttccccccttctag

SEQ ID NO: 37307 - DNA, 252 bp, Zea mays
  Peptide Sequence Number=SeqID_80682
atgtacatgcccaacgtggctgtcggagaggtgctcgagccctgtgtacgcggtgtcgtggccgtcggaggagcgtttgagccctgtagaagcacagttgtcggggctgctgggaccttgtttacgtcttcttgcttccgtagggggctgagaaccgccgtcgtcatggacgcacgcggggagccatcattacttgttaccggggcgagcctggatgggacgctggtcttgttcccccgtagcctgagctag

SEQ ID NO: 37308 - DNA, 234 bp, Zea mays
  Peptide Sequence Number=SeqID_80683
atgaaggatgccaagcccatcaagacacccatgggaaccaatgggcatctcgacctcgacacgggagagacaaccgatcaagccaaggatggaggcaagaagagcttcgaggtaccgagtgcacgggagaaggtcaaggagaccaggaacccaaagccaggggtgaagaagaagacttgcaaagtcaaggttgatcgagttaagagttatggtgcatcaaggatcactacataa

SEQ ID NO: 37309 - DNA, 712 bp, Zea mays
  Peptide Sequence Number=SeqID_80684
gagccgaagcactaggtcgggcgaggcggagcttcctatgcgcccgaggctagacttagctgctgtcggcctcactctggcgagtggcacagcagtcggagcagggcagacgacgttgttttcctgtcaggcgatccttgcattgaatgcttctgcgatacggtcggttggcgtggtgatctggccaaggttgcttctccgcgaagcctgcccgagctgggccaagggcgagtcgaagcagtatttcaacagcaacagcgcccatgttcccttcaatgcttccaatccttggtctccagctccgcctcgcgtcttcctttccgctgcaggaaaggacggcgtgatgaggccagcggcgccggctgcggcggcggacgcgcaccagtcgcggctgctctacgagctctgcgcgctcctgctgaccgtcctcggagcgtcgccggacgacggggcgggggcgcggccgctgctgccgcggcaggtgacacctgccggggtggcgtccatgctgctgggcgcgtccatggcgctgatgctctgcggctcggtcaccttcatgctcggattcttcctcatgccctgggtcgtcgggctcggcttcctcttcctcttcgtcggcttcgtcaccaacctctccgggatctggagggccatcctcctctggccctccgccgcgtgctcgcccaaggaagcatcctccccatgtacgtga

SEQ ID NO: 37310 - DNA, 153 bp, Zea mays
  Peptide Sequence Number=SeqID_80685
atggagcccggcggagggacagctgtcggagcggttgagtccttgctgacgtcctcttgcttccgtaagggggctgagagccgccgccgtcacagggttgggcgacgtggaagctcctccgaggccgaggtcgagtctgtcttccgtggttga

SEQ ID NO: 37311 - DNA, 876 bp, Zea mays
  Peptide Sequence Number=SeqID_80686
atggcggctggagaagtcctcgtcgccgacgagatcgccgccaccatccgcgctccgggcctccggctctttggcttcgatagcttgtcctcacccctcgaatggggacgtgggcgagggccttgtcgcagcagcgtctgccctgaggtcatcgctgccgctgtttggccgcccggagcggaggtcgttgtcgctgctgccggagcgggcggcggcgagccacctagggttttgtcgccccgcaggccctccaatgtggggggttgttcgtacctgcgggggcagaaccggagttccgtttgtaatggcaccttaagtgccggtgtctgttcattgtggctgtcaaggcctgaacatgtagttaaagaaaccctcggccgctctgcgatgagccggagccggaggcagcggtgtcagcatggacagaggcggagttggctcgaaaagaagctttgttggccggagcctggccgggctgtccactggccagaccagcgccggagtcgggttgccgaggccatgagccgggctgatgtcctcgggggacagctggctgaggctacggagcggccggtcgagccgtccgctcgggccgggttcccagaggagaccctagcggcgatggccaaggcgtggtgccgacaggattctgttatcgatatagtcgagaaggcacgaaaaatcgtttcagcagaaaagctttcgaacgttaagacttgttcggccagcggaatcgcttatccaagcgtgagttacttatcgcagaaggtgatgattgaggtatccgtatcccggaggcgtaggagtccctcggctcggttggccttgcctgcttacgtgtactccgtcgttttcaggatcccaccatcgaagtag

SEQ ID NO: 37312 - DNA, 1155 bp, Zea mays
  Peptide Sequence Number=SeqID_80687
atgcatgaggagagtgcgaagacatggttgccatccaagggggtcgccctccttttaaaggcgactctccccacttgcgtcctcagtcgtcgcggacagagtcttcgccaacacgctccaaggtcttccccctacgacacgggggctaggtcccacgcgtcatgcaagctggcccaggacaaaaggagccaaaccgccgcgcgcggagcgcacaactgcccagcggtcacaagcactcctccgctttcagaccagcgggtgaaagggcggaccgccatgcaggcggcatgcaaccgcaccaagggggcgcaccctttcgacttcgacgcatccagcatggaggcccaggcccacacgtcatgtaaccggcgcgccggttactacgtgcgagaaactgcaccgccacttgcgccagtaccgcgccttctcgactgcggaaccggtgccgcgactcgaggcaaccctgcgcatggcccaacagtgccaaccgagcacatcggtcatgggtcagtcagccgcaagagaaggcgcgacggtcgatatggccagaagtggaccgacagcaatggcggcagcaggcgagcggaagcggcggacaggcggcacctttggcaggcgaagcaggcgacgcttcacctccgccatgatgaccacgtcaaaaaagggaccgggaaaggggatactccgaaagggatccttctcatcgaaggaagcgggccccgagccctcctactgatcagaggttcgaaggctggcccctcggaagggttcgatagtcgcctcagagcactcgggctccgcgcccactactggtcagaggttcgaaggctggcccctcggaagggttcgacagccgcctcaggccactcgggctccgtgcccactactgatcaggggttcgtaggctggcccccgaagggttcgacagccgcctcagagcacgcagagcgagggatgactctgggtacgttcgatacatggtcgaggctcgggctacgctcccgaggtaccctaggacattttcgagaccagcaggagcgattctataacggaatcccatcagagggagacatcgagccctcggaccctatcaaatgggaccgggtccggcaaatcacctgcaggtacttctggagcgcgcctctgggccactag

SEQ ID NO: 37313 - DNA, 609 bp, Zea mays
  Peptide Sequence Number=SeqID_80688
atggactccatggtgtttgaggttgatgaattggatggagcaacaatgatttgtcacactaacagtaaattgaaagtttacgtgggtattgttcccgaggtcgggcgaggcggaggctcctccgaggtcgaggctgagtctgggcccaggggtcgggcgaggcggagaccgtcgtctgaggtcgaggctgagtccgagccctggggtcgggcgaggcggagaccgccttccggagtcgaggctgagtccgagccttggggttcggcgaggcggagtccgtcttcagaggtcgaggttgagtccgagccctggggtcaggcgaggcggagtccgtcgtctgaggtcgaggttgagtccgagccctggggtcaggcgaggcggagtccgtcgtccgacgtcgaggttgagcccgagctcgggggtcgggcaaggcggagcttcctatggcgcccgaggctggacttagctgttgtcagcctcactctgtcaagtggcacagcagtcggagtagggcaggcggcgctgttttcctgtcaggtcggtcagtggagcggcaaagtgactgtggtcacttcggccctgtcgactgaggagcgcgcgtcaggataa

SEQ ID NO: 37314 - DNA, 69 bp, Zea mays
  Peptide Sequence Number=SeqID_80689
atgggccagacgcccaccggccacaactcgggcctatgcacgaggtggggtttgaacccatgcccctga

SEQ ID NO: 37315 - DNA, 504 bp, Zea mays
  Peptide Sequence Number=SeqID_80690
atggcgaatgcaagcaagcacttgcaaccttcaagtcaagcaggcaatgacaagaagtatcagggcacgctggttgcttcaccagcaaaggccatttcacctaagtgtgtgaaccgcattgtgccatcgaagcaactgatcttgggtgggggttcaataggccatgtggcatcatttctgatcaaggtcgttgctcttgaggcatatgtcagcattgtctcatttactcacaatcttaataacatgtttggttatgataaactatccatgccactgttgtttctgtcagtcacaacaacagtaagtgagctgtcttccaagcatgatgatgaaccagataacaatacagaacattctgagacaccttccgaaacaaatgaattggcgtcaacttctggcacaagcgatgctgctgatggcacaaaggaaatcgtgcaagagaactggcttgtgttacttttcagggagcttgagaagcaaggcatcactttgcctgagaggtga

SEQ ID NO: 37316 - DNA, 102 bp, Zea mays
  Peptide Sequence Number=SeqID_80691
atgcagtcggcgcagtcgctggtgtcccgcgctcgcaccgcgatccactccgccgccgcccgcgtgctcaccgacatcaaggccgacctccaaggcagctga

SEQ ID NO: 37317 - DNA, 168 bp, Zea mays
  Peptide Sequence Number=SeqID_80692
atggaggatgactcgtgggcccgggcccccgtgccagagactgggctgttggtttcggcggaggacacccgtcgcagagtggtggagcatgcaggcttacggtacaagaccaggctaagcggctacacggctccggaccaccccaggggacaagtatccattctctag

SEQ ID NO: 37318 - DNA, 675 bp, Zea mays
  Peptide Sequence Number=SeqID_80693
atggccaccttaagtggcaccggaggaggtggaggcggcaacgtcgacgcgcatgcgcaccatcatcagctgccgtcgatgccacctcctgctcgtgttggggctctcatggctcctcgtcctaacatggcggctgtggtcgccgcgagcggcggcagcacgagcgacggtagtgggccaactggcggtggttccgttatccggtcgggctccatgaccgagcgggctaggctcgccaagatcccgcagccggagccggggctcaagtgcccgcgttgcgagtccaccaacaccaagttttgttactttaacaactactcgctctcccagccgcgccacttctgcaagacgtgtcgtcgctactggactcgtggcggcgcgcttcggaacatccctgtcggtggcgggtgtcgccgcaacaagcgcaccaagtcgtccaactcgtcgtcggccacctccgcttcaagagcgagcgggacatcgtcgtccacctcgtccaccgcgaccggcggcaacagcgccgccagcatcaagctgcctcaccaggggcacggagggcagctgcctttcctagcctcgttgcaccaccctttcaccgacggggatcatcactacaacacgggcgcgtcacggttagggttccccgggctgagctcgctggaccccatggactag

SEQ ID NO: 37319 - DNA, 627 bp, Zea mays
  Peptide Sequence Number=SeqID_80694
atgtctggcatttacccgttcaacgtggaaggccatggtggggaaggttccggcttcgccgaccacatgtttggcgactccaaggtgcccagctcagcaaggctgatcacgcagcttacgttagtgaagatggaggacaacccaacgtccgcggtgatggcaagcagctcaccaagggagttccttggtctccctggaaacccccaattctgggacggtggcggcagcaacggtggtgcaagtggcaacaatggagcaggcactggcaacgccggtagtgctggtggcgacgctattcctccgggtggcagctggatggacctgtcaggattcaactcatctttgtccgaaaacggaaccgccgccactactccggatcgaggaacctccaccaccgcgcgtcgaggtaatggagttgtggccaccggcctaggaaccatcgccaccgcacaagggcagtgccgtcgctcgccctctggatcgggggccgccgccgccggcctgggaaccgacgccaccgcatgtcgaggtcggggagccgcggccaccgtagccattggtcgggggtccaccgccgcgcgcgctatcgggcaaccgcctacgctaatgaatcgagatggggcgtga

SEQ ID NO: 37320 - DNA, 612 bp, Zea mays
  Peptide Sequence Number=SeqID_80695
atgcaggtgacgcgcaaccgcatcgtggtgacgcaccccttcggcttcgtcgcatccggcatggtggcccaggcccacacgtcgtgtaccaggcgcgccgggaccgagaaaggggatatttcgaaaaggatccttctcggcgagggaaacgggcccccgagccctcctactgatcaggggttcgaaggctggcccctcgaaagggaacgattttataacggaatcccatcagagggaggcatcaagccctcggaccctatcgaatgggtccgggaaaacagcgccgctcaccccgctccaactgctgtgctagccacccgggcaaggctgacaacagcaagttcagcctcaggcgcaacagcaagctccgccttgcccgaccttaggcctcagcctcgggaggaggtctccgcctcgcccgaccccaagactcggcctcagcctcggcctcgggaggaatcgcgtcctcgcccgaccccgacctcggcctcaggagaagcccctacgaaagcaaggagacgtcagcaggatcccagcagcatcgacaactgtgcttctacagggctcgggcacttctccgacgaccacgttatcgcgtacacagggctctag

SEQ ID NO: 37321 - DNA, 1491 bp, Zea mays
  Peptide Sequence Number=SeqID_80696
atgcatcgcggccttccaccttgcgagcccccggatggggagcacccacgttgccttcgtcttgctgctgttggaggagcacgacctcgcgggggttggcgcccttcagccatcgcttggcttcaaggattttcatcaggcagcccagctgtagtcccccgccggcggtcacccaggatgatgaccgtaggcctcgtggtggggagaagcaagccgggctacggcctctgccccgccctcagcttcaaggatattcatcatccttgttatggcggagggcaagctaagctggggttctacctcccgcatgggccggcaagctgcctcttccttcagcattcaggggatagggcgctcaccggccttgcggagggggcaaacttcgacaacgcgggaccggtcagccgcaagcgccgtcagctgcagcgtgcctggctcgctggctcagccggctctagcgcggcctccgacgctgcctcctgccgcttggtccgggcgtggccgtccatccatcgcacgggcgactgttgcaccatgcgcaccgggggatcgtccaagacgtcgtacgccgcgcgggtggcgttcgtgtccttggattgtcttgtcctcactccggcacatcgcctccacgcggaggtggccgctgtcgtcggtgctgaggtggtggcagtcagagaaggtttctccgccgatgagaccgtcggcgccacctgcggtcggacctccagctcttcggctttgatggcttgtcctcgcccctcacgtggggacgtgggcgagggcttttccacagcagcgtttgccctgaggtcatcgctgctgctgtttagccgcccgaggcggaggtcgttgtcgctgctgatggaggggtcgtcgacgagccacctggagtttgttgtcccgcaggccctctggtgtggaggttgttcatacccgcgggagtggaaccggaattccttttgtaatggcacccagagtatgggtaaccttcggcctctctacgatgagctggagccggatgcagcggtttcggcatggacagaggcggagtcggttcgaaaagaggcttcgtcggcccaggagcaggtggcttcccaggccgaggaggtgcagcagcggtggctggagcttggccaggtcatccgcgagcgggaccaaccccggagtcacgctgccgaggccatgagccgggctgaggtcctcgggggacagctggctgaggctatggagcggccggtcttggtgtccgctcgggccaggatcctggcggaggccctggctgcaatggcccaagcgcggtgctggcgccctccttcgaggtggagatccttccgcccgtgtcgccgtccgaggctgggccaggacttgttcgtcggtagcagaatcgcttatccgagcgagagttacttttcacggaaggtgatgagtgaggaccccgctatcgaagtagtcgaaaagcgcgaaagtcgttctggcaaaagacttttctga

SEQ ID NO: 37322 - DNA, 1872 bp, Zea mays
  Peptide Sequence Number=SeqID_80697
atgggcaactccctcgcctgcttctgctgcgcgggcggcgccgcggggcacgtggcgcccgccgcgctcccctcggaccccgcctacgacgagggcctcggccactccttctgctacgtccggccggataaggtgcccgtgcccttctccgcggacgacgacctggtcgccgacgccaaggcggccgaggacgccaccacgttccgggccatctcgggggccgcgctcagcgccaacgtctccacgccgctctccacgtccctcctcctgctgctgccggacgagtcggcggcctcctcctccggcttcgagagctccgagtcgttcgccgccgtgccgctgcagccggtcccgaggttcccgtcggggcccatctgcgcgcccgccggggccggggccgggttcctctccgggcccatagagagggggttcctctcgggccccctcgacgccgcgctcatgtcgtccggcccgctccctggcgccgccacgtccggccgcatgggaggcgccgtgccctcgctccgccggagcctgtcgcacggcggccgccgcctgcgggatctcacccgcgcgatcctcgcgcggacggagaagcttcagggttcgatggatctcggcctcggcctcggcctcggctcgcccgatggcgccgggctgcagctgcagtgggcgcaggggaaggccggcgaggaccgcgtccacgtcgtggtgtcggaggagcggggctgggtgttcgtcggcatctacgacggcttcaacggccccgacgccacggacttcctcgtctcccatctctacgccgccgtgcaccgcgagctccgcggcctgctctgggaccagcgcgacgcgcaccccgaccagccgaccacgaccagcaccacggcctcagatcaccaggaccgccgccgccgccgcgcccgccgctcgagaccgccgcgcggcgccgacgatgaccagcggcggtggaagtgcgagtgggagcgcgactgctccagcgccctgaagccgccgacccagcgccctcctcggggcagcagccagaacgaccacctcgccgtgcttaaggcgcttgcgcgcgcgcttcgcaagaccgaggaggcctacctggacgtggccgataagatggtcggcgagttcccggagcttgcgcttatgggctcttgcgttctagccatgcttatgaaaggggaggacatgtacctcatgaatgtaggtgacagccgggctgtcctgggaacaatggacagtgtagacgtcgagcaggtcaccagtgatggattggttggggatggcacgccgctcttgtcagctgtgcagcttacatcagaacacagcacgtcggtgcggcaggaagtctgcagaatacggaacgagcaccctgatgacccgtccgcgatctccaaggaccgtgtgaagggctcgctcaaggtgacgagagcgtttggagctggtttcctgaaacagccgaaatggaacgaggcgctgctggagatgttcagaatagactacgtcgggtcatccccgtacgtcacgtgcagcccttcgctctgtcaccgcaggctcagcacgagggacaggttcctgatactgtcctcggacgggctgtaccagtacttcaccagcgaggaggcggttgcccaggtcgagatgttcatcgcgacaacccccgacggcgaccctgcccagcacctggtggaggaggttcttttcaaagccgcgaacaaagcagggatggacttccacgaactgatcgagatcccacacggcgaccggcggcggtaccacgacgacctgctcctgtacaaaatctcaacgaagcaccactgggtgggcttgggatctcggcgcatccaagttgaatcacgatga

SEQ ID NO: 37323 - DNA, 320 bp, Zea mays
  Peptide Sequence Number=SeqID_80698
gattggatcttttggactttctcttcaagtctgcgctcgcgtccgtctcttgtgccgctggcggctggcccgctgtgccagaacagaagcaaaggtccaggcagcaacgaggcatggtgcggctcacctcagcctcacaagcggccacacggacgcggacgcagaaggttgcatcaggtttccgcaccgaggcgcgggcgggccccgccaccacgacgacgcaggaagcggaccggggcgaggggaagggctcccgcggccgcggccccgcagccgcagctgcctcgcgggctcgcacacccacgcgagtcaacgcctag

SEQ ID NO: 37324 - DNA, 1881 bp, Zea mays
  Peptide Sequence Number=SeqID_80699
atgaggcgaaaagacggcgggttccccccattcgggggcttggaaggtggaaaggcgcggcgcataagggagcgaggagacatgaccggctccgagcagaagaagccaaaccgtcgcgcgtggggcacgcaaccgcccagcggttacaagcggtcctccacctttgcccagaccaacggcgcgcccagcctggaggccagggccacgcgtcacgcaaccggcgcgccggatgctgcatgcaagcaactgcaccgccacttgcgccaccaccgcgcctctttggttgcggaaccaataccgcgactcgaggcgcaccaggcacaagaccagcagcgccagcctgacgcgacggtcaatgcggccgaaagtgggccggcagtaatgacggtggcagacgcgcgggagcagcgggcacgtcgacagccaagctcacgtcccatccgggggcagcgagagagctccctctcacggggtgaagacaacgcgcccgtgatccgttcctcgaacggctcgcacacgcgcgacggctgccccgccaaccactcgccccgtcgcattaactccgcggctggacaggtggcgcttctgagagatgaccaagtcgtaatacaaaattttgagaaaatcgaccctcaactccggctgtctggtgctctgaatgaggattgccatggtacagtagaccgagcggatcaggttgccagcgcggcgggctcgtcgctggtcaccgtcggggataaacttgagccattaaacaactccggccactgtaccatcgttaccgcggcggatgtggattacctcgccgaacgtgaggaagaaatcgaagttaccgaagaggagacaccaccaccaccaccttcggagtctcaggccgggaatcttttctactttgacatctgtggatctgagcctgattcacctgtgaacgaaggcaagccccggacaactgtaggtgggcctaattacttgggaggttccgtcacatctggcaggagcaacgggcgatgcttcgccctcgccgaaacaaccgcaccaaaaaagggaccgggaaagggggatcccccgaaagggatccttccccgtgaaggaaccaggctccgagcctccttactgatcaggggttcgaaggctggcccccgaagggttcaacagccgcctcagatcgcgtgggccctacacccactactggtcagaggttcgaaggccggccccccgaagggttccacggccgcctcaggctactcgggctccgtgcccattactgatcaggggttcgaaggctggcccccgaaggctcaccggagacaccatgttcggcgcccatcgaggaggctcgggggctgctctcgcaaacccggctccggccgaaccgttgacagcgtcaacataccagcccgagaacttgggccccgaccgtacacccgggctacggccagctcgcatgagggaacaaccagaccagccgaagcattacgcaaggcattaagacctcgaaggagtgaaatcactccaccgaggcctcgggggctacacccggcgggtgcgctcgcgcgcacccaccggaaccaaaagcaaccgagaaaggctggtccccttgcaaaaaagtgcgacgaaagcctccaagcgagtgctaacactcccttcgaggctcgggggctactgtcggggaccataattaggggtaccctcaagacgcctaattctcagctggtaacccccatcagcataaagctgcagaggcctgatggggctcggactcgggctaagccccggaagacggcgaactccgctccgcccgacccagggctcggactcgggctaagccccggaagacggcgaactccgctccgcccgacccaggactcggactcgggctaa

SEQ ID NO: 37325 - DNA, 249 bp, Zea mays
  Peptide Sequence Number=SeqID_80700
atgacagtggccatgtcccacttgagcgtgcacgacacggcgtacgcgccgcatgtgtatgtgccgaacctgatcagcggatcactcaagactcccaagtgtacaccggagaagtttgagaaaagtcctgatgatgaaggtggagagagctcatatattatgcggtacagtgacattggtgggacaaactccatcaacctcggcccgttcggcagcataggaacagttccaagccaagaactgttttag

SEQ ID NO: 37326 - DNA, 753 bp, Zea mays
  Peptide Sequence Number=SeqID_80701
atgcaggcggcatgcaaccgcaccaagggggcgcaccctttcgacttcgacgcgtccagcatggaggcccaggcccacacgtcatgtaaccggcgcgccggttactacgtgcaagaaactgcaccgccactcacgccagtaccgcgccttctcgactgcggaaccagtgccgcgactcgaggcgaccctacgcatgacccgatagtgccaaccgagcacatcggtcacgggtcagtcagccgcgggagaaggcgcgacggtcgatacggccagaaatgggccgacagtaatggcggtggcaggcaggcggaagcggcagtcaagtcgtcagcaagctcacgtcccctcctgggacaacgagagagccctctcccacggcgtgaagacgacgcgcccgtgttccgttcctcgaacggctcgcgcacccacaacggtcgccccgcgaaccactcgccccgtcgcattaactctgcggcaggacaggcgacacctttggcgggcgaagcagggaccgggaaaggggataccccgaaagggatccttctccgcgaaggaagcgagccccgagcccccctactgattagaggttcgaaggctggcccctcggaagggttcaacagccgcctcagagcactcgggctccgcgcccactactggtcagaggttcgaaggccggcccctcggaagggttcaacggccgcctcaggccactcgggctccgcgcccactactgatcagggattcgtaggctag

SEQ ID NO: 37327 - DNA, 489 bp, Zea mays
  Peptide Sequence Number=SeqID_80702
atggcttccgtcgtcggcgctgaggtggtggcggctgaagaagtcctcgtcgccgacgggatcaccgccaccatccgcgccccgggcctccggctctttggctttgatagcttctcctcgcccctcgagtggggacgtggacgagggctttgttgcagtagcgtccgccccgaggccatcgctgctgctgtttggccacctggagcggaggtcgttgtcgctgctgccggagcgggtgtcggcgagccaccaggggattctgctaacgatgtagtcgagaaggcccgaaaaatcgtttcggcagaaaggtttccgagcattaagacttgttcggtcagcggaatcgcttatccgagcgtgagttacttatcacagaaggtgatgagtgaggatcccacttttgaagtagtcaaaaagcacaaaagacgttctggcagaaagactttttccgaggaaaattttgacgcagagggggttccccccttctag

SEQ ID NO: 37328 - DNA, 1107 bp, Zea mays
  Peptide Sequence Number=SeqID_80703
caaagcaagaaccaataaatcaaatgggcagctccagctccaagaacgccagtcacatgtcgtccctgccgtggacggtgcgcatccaggcagccgccttccaggtggcacaacgtcaggacggcagtatccggcgccctattctcttcctcagcgacctcaagacaggcgccagccgcgccacgcccagcccggatgtttcggaggtacgatccaccgatatcacaattgacgtctcccgcggcctctgggcacgcgtgttctgccccacggcgatcgctgacgatgctccagccccgctccccgtctttgtctacttccatggcggcgggttcatgctcttctccgcgtcgttcggcccctatgacaccttctgccgccgtctctgccggaagctccgggccgtcgtcgtgtccgtgaactaccgcctcgcccccgagcatcgtttcccggcagcatacgacgacggcgtcgccacactccgctacctggacgagaccccgaccccactgccggccgacctcgtaccggcccccgtcgacttcggtagctgcttcctgatcggcgatagctcggggggcaacatggtccaccacgtcgcccagcgttgggcgtccatgtcgtcggcgacgtcgtcacagtcacagtcacagcctccactgcgcatgcgccgcctccgcctggccggcgccgtcctcatacagccgttcttcggcggggaggagcgcactgaggccgaggtaaggcacgacaaggcgtgccgcatattgtcggtggctcgtgcggatctctactggagggagttcttgcccgagggagcaagtcgagaccacccggcggcgcgcgtgtgcggggagggcgttgagctggcagacacgttcccgccggcgatggtggtgaccggcaggatcgatctgctcaaggactggcacgcaaggtacgtggagacgttgcgtgggaaggggaagcgggtcagggtggtcgaatacccggacgccttccatggcttctacgcgttcccggagctcgctgattccagcaagctcgtcgaggacatcaagctgttcgtcgacgatcataggtctggttcccgactagatgcatgtg

SEQ ID NO: 37329 - DNA, 300 bp, Zea mays
  Peptide Sequence Number=SeqID_80704
atggggcatggatgggggctggggctgcttacagctgtgcctatacgtgcgtgtgctagtttgctagatagggtattcgggataggagtcagtggaccctcatgtctgcctttactaacatggaagacatttatagcagatctagaagacgaagggttccgaagacctgctctcctgatcgcagatgcacctctgcagtcgggacgaagggaactaaaaggcggctcagatatgaagagaggcgaaagcgaactgggatctgggatgatttggaggctggctgccgggctccttttatag

SEQ ID NO: 37330 - DNA, 600 bp, Zea mays
  Peptide Sequence Number=SeqID_80705
atggctgcggcgcctgaccgcgctaggccagcgagactggccacgagcaggggcacgctgcgcgccgcggtcgcgctggggaaaggagggagggcacgtagactaggccgtgctaccgtgccgagcgccagccacgccggggaagaaggagaaagggaaagggggagaagggaggatggaaccgagctcaccacggtgacgaacgatgactccggcgaggcgagcttggacgctggcaaggacgggggcgctgggcagcgctgtcgcgtgggctgggaggggcgattcggcaagagctcatgggcatgcgctgcggggcggacatggcggaggggcagttggaaatttggggggaggcgggctgacatgtgggccccgctgccaggtggcgacggtggcgcaagcgcagcgcgtggggctaggagaaggccatggcgactgggcgttgcccacgcgcgggtcgttgggtgcgcgacgcggcagcctggtgggccatggcacgacgcgcggccgagccacggaggtaggcctggggcggggtgggccgaggcgcgcgctgggatgggctgcgggaggggggaaggggagaaggaggtctag

SEQ ID NO: 37331 - DNA, 375 bp, Zea mays
  Peptide Sequence Number=SeqID_80706
atggtcaggcgcttcatcccccaaggaaagaacgagtccaggattagtgtccacgcggagatcgcgcaggtttggccaccggcgtccgtgatccgatctccaaactccccagccgagatcctcgctgcctgcccttatttaaacaccagtcgcgacttggcctggctccatcctcagccggccaaggttgccgtcaaacttgggattgctcgccggacccccttcatcgcctctgtgtcgctgctcgtcgcgggcagtgctgttaagcacacggaatcacggtgtatggagtctgatcaactctgtggcaaatgggtaacacgacttgtgggtaaagatgcgcaacctctgcagagtgtaaaactggtatactag

SEQ ID NO: 37332 - DNA, 684 bp, Zea mays
  Peptide Sequence Number=SeqID_80707
ctggaggcgccccctgccccgccgcgggacgtcccggctgttggaggagctactggaggaggtcctggaggagaccccgatgacgatgactcagatcacagcacggagtcctttgagccgcaggaggcggaaggatgggtcgcccgacccatcacccgtgacgccactcgcggttgtcacttccacgacgcactcgacaccttgctgcgccaggctttcgaccggcacacctggtcgatcgagtatcgttgtgtagtctaccagcacagtcgcgggaggtacccggaccgctgggaggctacctgcctagttcgccgtccggaggatgacctccggggtgcggaggccgtttcggagcactactccatctccgagagggacactgcagaggcggctatcaccgagagtgtggttgtctcacctgttggtgaggctaaccctaggttgagcagcacagtcaacctagtcgcggtgcttaacactgagctggatcactctctggacgagctaagcagggctcgaacggagattgcggagttgcgtgctgagctggcagagcgccatcaccaggagggtggttcccccgctcctgttgggactcagcacccttaccgctcgccgccacgtggtcaccacacttatggttcccctgtctgtaagaccaggattgatctggatccttag

SEQ ID NO: 37333 - DNA, 360 bp, Zea mays
  Peptide Sequence Number=SeqID_80708
atgaaggttgttcgtcatgcaagtatgtccaaagtaggatatgaaaaggcacttgatacattagacgaactggaggtgggtgtatttgctggggttatgagattaggcgaccaaactgaacaatttgatcaaaatgacattggtgatgaaatcgtgggtgataaaactgggtgtgagcctggtgcatcaaatgctttagtaagagttgaacataagctagattttaacattggaggagtaagtatggataaaccaataaatgtgaaaccaaaaggaagaacaattagaaacgatgaggtggtaccgccaattgcagaaccatacgggttggagtctaagatatctatgcagcgcctatga

SEQ ID NO: 37334 - DNA, 474 bp, Zea mays
  Peptide Sequence Number=SeqID_80709
atggtggaggccccctgggtgaggtaccttagccaagaatatgttcccatgttaacgtgggctaccaacaccatcgctccccctcttgcccatatttcagtgatagatgggggcacgacgggcgacatcgacacaagcaggaaaggctggcgggtggactaccgagagggtgaggtcggacgtcggcgaggaaaggcactggggccctgggttctgacgccagtcgacgaagggctccggcaacagcgagctgcgcagcagcagttgcagagagaggcacgacacagagaacagtatggcgtggcgagagaacggagtggacgggtactgctcaagggacctgagctcgcgatttatagagaggggaagagagatggaggggcgctgggagagagaagggcgcgacggcgtcttcaagtaccatcaatggcgacgttaccagagagaataatgggggaggagaagaaacggtag

SEQ ID NO: 37335 - DNA, 984 bp, Zea mays
  Peptide Sequence Number=SeqID_80710
atggatcttggcacacatatggtatgcgcttggttctaccccctagaaccggtgctagtcgaggaagttccggtggatatccctcacatccgagtggagaatgtagtcatcctggaggacagctcggaggaacatctgccgacgcccaccccgttggcaaagtcactggccttcgcagctaggtcatcaacatcagcaccgcctgcaccagccgttcaagctcctgcacccggaggcgacgacctagacgactctggggacgacgatgacgaggatgacaacgacgacgaaggagaaggcgaacacgtcaatgaggaatccaactatgcccagcaggactacttcatggggtttggtcctgtcgtcgaacattacacatcgatgttcgagacggggcacttccccaacctgctgcaagatgtgctgcacgcgctaggcacctacgtccgccccctgtacgaaacaaggcgagtgagagagcctccccgggcttgctactacatcactcgcatccacgtcagggtgatggatgcaggggataggggatttagtactctatctgctcacgagtccctgacaccactatccacctacgctgcctcggtcagcgacactgctagacggaccctgtggttgctcagccacacctaccggcagcagctgcaggacacgaggttcaggcatctccctctgcatctgagtggaggaagccataccagcatcgtcccaggtgaagctagtgaggattgcctcaacaccctagctggtgtagtggctggtctcaacaccgacctggacagtgccaccctagatctctctagggtgcacttggagctagaggatgcccatgccaggattgcacccctagaagcccaacttcaaggacaggattcgcccgaagcccaggtccccgccatggcgttgtctcctccccacaagaggcttcgttatggggagcccggatccatcaccagactgctttaa

SEQ ID NO: 37336 - DNA, 1317 bp, Zea mays
  Peptide Sequence Number=SeqID_80711
atgcgggaggtggagtcggaggccattaaaattgttggaaaatatgtgtcgaagatggagatgatgacaagaaagcaggtgaagacccagcctgaggagggcacatcgaaggagaaggttgtggttgcagctactcaaaagaggaaaatagattcgcaaggtacgtgggatgaaaagatggggccaaaggcttctaggctttttgttgaggagttaacagggacgtgtgtgggtcctggggaggtgatgtcttcgcctgagctccaggaaacatcttcgcgcatgttgaaggttaccaggggtcgatggcataggaaggaccctataccccgggccaccgacgatgactattttacgtcccgtttgttttgtgaactgaaaatctttccttacgagagaaatattggtgttgttgtgtcagcagtgatagagaaagatcgacaagatatccagcgaaagaagcagaaagccccgcttcagctggtggacccgcgccgcgatgccaaggtggcacgacccagtgcgaaggggtcctccgcctacaatgatgcccccccgcggcgcggaccttggctacaaaatcgtcttcgtcgccgtgcgttactgaaacgacagtgtcggggtccgaggggacatgtcaggagttgtctacggacgactacctggtgggcggagtcaccatgttcgatgcctagactgggctgccgcctgctggtgagtggaatgacttatgcttctaagcaggggtcgaaggctgggcaactggcggtggtaccgtctgtggtgcccgtcggcctgggggtgacggcgcttgagaatgaaaaggaggacctcgaccgctggcttaatgatgaaaaagaggatacggagaacacccgcgaggacgcccaagcttcccacaagcgtgttgccgacctagaggttgaggtgaagaacatgcctggctactgcgagaagacggagtctgccacccgtgctggggtggatcgggcacactcactttttgtggatgtgtatcacaacctcggcacacaaactgctcccttcgacaagtcaggggaggaggtggggaaccgctccttgtggtggttgcaggatgagctagagttgctcccgtccattgtgacatgccttatgtcctatgcgtctcttatcaaagacgacgtgctaaagggctctgcgggggtgctttacgataggatgtggggtcctcacggccgcggcgtcgtccgagagagagccgaccaagcgccggtgcaggcgatgagggatgaaaaggtagaacacctcaccggccttgagagctcggtggcctga

SEQ ID NO: 37337 - DNA, 912 bp, Zea mays
  Peptide Sequence Number=SeqID_80712
atgctccaaggtcctccccctacgacacaggggctgggtcccacgcgtcatgcaagctggcccagggcagaagaagccaaaccgccgcgtgcgggcaggcagcacctttggcaggcgaagcaggcgacgcttcacctccgccataatgaccacgtcaaaaaagggaccgggaaaggggataccccgaaagggatccttctccgcgaaggaaacgggcccctagcccccctactgatcagaggttcgaaggctggcccctcggaagggttcgacagccgcctcagagcactcgggctccgcgcccactactggtcagaggttcgaaggccggcccctcggaacggttcaacggccgcctcaggccactcgagctccgcgcccactactgatcaggggttcgtaggctggccctcgaagggttcgacagccgcctcagacgcagagcgagggatgaccctgggtacgttcgatacaaaaccaaggctcgggctacgctcccgaggtaccctaggacatttccgagaccaccgggaacgattttgtaacgaaatcccatcagagggaggcatcgagccctcggaccccgtcaaaaggggaccgggtccggcaaatcacccgcagctcactggagacaccatgttcggcgccctccaagggcaacatggcgcttttccccctcctccttgcggaaaggcgacgcaggggcgtatgaaaaaagccgagtctgtccttgaccatcctctcgccctgtgtggaggctcgagggctgctctcacaaacccggctccgaccaaaccgttgacagcgtcaacataccagcccaagaacttgggactcgactgtgcacccgggctacgaccagttcgcatgagggaacaaccagaccggccgaagcatcgcgaaacgcattaa

SEQ ID NO: 37338 - DNA, 267 bp, Zea mays
  Peptide Sequence Number=SeqID_80713
atggtcaggcgcttcatcccccacggaaagaacgagtccaggatcagtgtccgcgcggagatcgcgcaggaccgtattaatcgggagttcgtgtgccgggtcaccactgatttctcgccgaagatcatctccgccatggatccgcattccgccgtggccaacgatctgtgctacgtaaccaccagcgagcaagccactgtggaatctgaggatcagcaagtagagatagctgagcaggagctcattgaaggcaagttgtgcccttga

SEQ ID NO: 37339 - DNA, 249 bp, Zea mays
  Peptide Sequence Number=SeqID_80714
atgaagctaggacctattagatcgccgggaacactcggtgttattcttgaattgcacggacaccaaaatgaagaagagatagaagttgaagaagcaaggactacaccaccaccacctgaagaaccacaggccgggaactgcttttattttgacatctgtggagcagagcctgactcacctataacacaaggcaagccccggtgcatttgccacattcttgctattttaaaatctttctcacttgcttga

SEQ ID NO: 37340 - DNA, 246 bp, Zea mays
  Peptide Sequence Number=SeqID_80715
atggggaagcctgtcccatcactcctcatgctcttcctcggccgaggcgggtacaatggatcaagcagtctcattagctgcgagaagcagacaattcgaatcgagtttttatccttgcaagtgaccgcacttgtacccaccataaccggaatgggagaccacgtctcaggtcgtgtgaggggtaaagtccactgccaggttcaatcaggatttaacaacattatgcttaaggaagaaagaaactaa

SEQ ID NO: 37341 - DNA, 888 bp, Zea mays
  Peptide Sequence Number=SeqID_80716
atgaagcggcttgccggcacaccgaacccccactcgtggaaggagacgaagctcacgacgtaccccggcggcggggacggggcggctccgctcgcgggaggaatccactccggctgcctctcatcagagagagggcgaagtaaaccctcggcaacaagatcctccaggtcatccgctgtgaccgtggagaaaggccatggatcgcgcggcgagatgatggtcacccggtcggccatcaccgagcaaaaggggtggcggcgggaaggactgggtgggcggtttccttttctccggctaaaactctcaggttgcgaaaacctaaggaggaggcaagaagcggagcaaagaaccgtcgccagaccctcccccgagtatataaagaccaaggcgagacccgttcaacgttttgcccggacccgccgcgggattcaaaaacccaaagcgaaacggccgttccccgaacggctcccgcacgcgcaacggccacctcgcgaaccacccgctccgtcgcattcactccgcggcgcgacaggcggcgcctctggcaggggaagcaagcgacgcttcgccttcgccataacaaccgcgtcaaaaaagggacagggaaagggggataccccgaaaaggatccttctccgtgaaggaaacatgccccgagcctccctactgatcagtggttcgaaggctggcccctcggaggggtttaacagccgcctcagagcgcgtgggctccacacccactactggtcagaggttcgaaggccggcccctcggaagggttcaacggccgcctcaggctactcgggctccgcgcccactactgatcaggggttcgtaggctggccctcgaagggttcacagccgcctcagacacagagcgagggatga

SEQ ID NO: 37342 - DNA, 153 bp, Zea mays
  Peptide Sequence Number=SeqID_80717
atggccgtgatgggttcaacatcggaaaagatgtacctctgccagaagcacagaaggggtacaaaggatggcgcagagccgaagctgcgtgtagaagagcttcggcatgataacggaaagggaaaccgacttaaagatgaaaaggctatttag

SEQ ID NO: 37343 - DNA, 369 bp, Zea mays
  Peptide Sequence Number=SeqID_80718
atgaaaggatccacttttagtaagcatttctgcaaaacagagtctttgattattgagaagccttaccttgactcccttacaaccagcatacccttgagggtcttttctttagtcggaaaaatgccgccgcgcacgaggagaactgcgtgcaagcatactggactgattggtgtgccatgtcatcaactggccccaagacatgatgatagtagtagtggaagtaacgatccgataggggatctcgaagcagaagtgaatcggctccaagcggaactctgccgcaggactgatatatgggtcgcagatggcgacagaataaatgaattaagaagagacgtccaccacctgcgagatcagctcgcggactga

SEQ ID NO: 37344 - DNA, 174 bp, Zea mays
  Peptide Sequence Number=SeqID_80719
atgaaaggatccacttttagtaagcatttctgcaaaacagagtctttgattattgagaagccttaccttgactcccttacaaccagcatacccttgagagtcttttctttagtcgggtggtaccaaaggaagaacgccaggaatgaagtgcgggaggaaaggatcctccattag

SEQ ID NO: 37345 - DNA, 681 bp, Zea mays
  Peptide Sequence Number=SeqID_80720
atgccgtcgtgcataagaaagaccacgcgcaagtctaccgggcccattggcgtaccccgccatcaacttgccacaaggcatgaagatagaagcagtggtagcaatgatccaatcggggatctggaggctcaagtagaacagcttcgatcagagctccgtcacaggaacgatctatgggtcgcggatggtgagagaataaacgaattgagaacagacatccgccacctgcaagaccaacttgctgaacgggatttagcgctcgattgggcggttaactctcattcacttgcttgggacaaggaagccaaagctcgagcccgcgtggaggagcttagctcaaccgtggacaacttgcagatgccatccaagactcgtgcacaggatggggctggaacctcccgtgggagggaagcaactcctaatccaccccctgtacctccaacattagctgaggccattgctgccttagttaatgtcatggccgacaacacccgctttctgcgggaaatagcgggacaacagatgcagcaacaaggcgggcgggcatatccacaaggaccccgtgaaacatcatatctggatttctcagagacacgtcccccgttgtttgtcaaggaggaagatcctctagaagcggatgagtggatccgcgttattgaacagaagttcgagcttctctga

SEQ ID NO: 37346 - DNA, 171 bp, Zea mays
  Peptide Sequence Number=SeqID_80721
atggccatgatgggttcaacatcggaaaagatgtacctctgccagcatatccttgagagtcttttactttgtcgggtgaagaagcagcaaacttttgttgcttctgttcaaaggtggtaccaaaagaagagcaccaagactaaagctgcgggaggaaaggtcctccgttaa

SEQ ID NO: 37347 - DNA, 327 bp, Zea mays
  Peptide Sequence Number=SeqID_80722
atgggcaagaacaagaaaggtggaagttcgtcgcaccattccggcgacaagcggaagcacgtgccaagtcccccctcggaggactttggtgacgccgagtacttggaggaggagttttcctccgagtctgaggggtcgccggtctacgcctctcccccggtgtcgtccgatgactcagacaattcccaggggatcgccgccaaggtgtggacgtacatccgggctgtcgagcgctccgggctcgagggctcggatgagtcggaggtctcctccgacgaggggaactcctccgactcgtccgaggaggagagcggcggtgattattag

SEQ ID NO: 37348 - DNA, 126 bp, Zea mays
  Peptide Sequence Number=SeqID_80723
atgggtatgaaaattgacccaaacccgtaccctaatagggtaaaacccatcgggtttcgggtttcgggaggtgatgctggcaacatggatgacttcgaggagttgcaggaatatgacgagttctag

SEQ ID NO: 37349 - DNA, 276 bp, Zea mays
  Peptide Sequence Number=SeqID_80724
atgaacaagagagaggggggcgtcatcacattgcgggccaccgtagcatcatcctgggcttgcgaatcgtcccctgtgagagctccgactaggggaaccgaggaattgctcaccggcgtgtcctctccatcgtggatcggcgtcactgtcgcttgggacctctgcgccatactcaacgacggtttaggtcatgttggggcgtggatgttcctcatccgtcgatatcagatctggcgaccagagcaaattactggttacgtatcgtctgggttctaa

SEQ ID NO: 37350 - DNA, 129 bp, Zea mays
  Peptide Sequence Number=SeqID_80725
atggcacaacctctaagtcaagatgaggaatgggtacctcaagacaatggcatggatcaatggggagacatgaacatgaagacaaggaggaagaagaagtaccacagggtagaagtgaaagtcgcctag

SEQ ID NO: 37351 - DNA, 2145 bp, Zea mays
  Peptide Sequence Number=SeqID_80726
atgacgacatcaatagggggagcagcagcaccctcggcaccgactccaccttcggcggagtccgacccagcctcggacagcgacacggatgaaggatctccacctcgaagaaagatgtcagcaccgcgcctgggccattgtcgccggggtctcctccaggaacccggcccgagcagacggctcgaccggtcgcttcgtagcctcagccagctgtcccccgaggacatcagcccggctcatggcctcgggaacccgactccggcgtcggccccgccagtggacggcccggccaggctctggccgacgaagcttcttttcgagccaactccgcctctgtccatgatgacaccgatgcctctggctctagctcatcgcagagcgggccgcggccaacaggcgagtcctagtgctcgaaatgaggaagaaacacggctttacgccaaaatacatagatgttcaggtcccgacagccacaatgaacagacactggcactcaaggtgccattacaaacggaactccggttccactcccgcgggtatgaacaacctccacatcggagagcctgtgggacgacgaactccgggcgactcgccagcgacctctgcagcagcagcgatggtcccgggacggacgctgccgccggaaggctctcgttcgcgtccccactcaagggacgagaaccagacattaaagccaaagagccagaggtcggtccgcgagtagcgctgacggtctcatcagcggagaagctttctccagctgccaccacctcagcaccgacggcggcgtccacctgtccaccaacaccgcaccggcgagcgccggccgccccaaagcgcaccggcagcaacagttcgccttccccggcatggctggagggtgcctcctccgaagagctggaggatggtttccacccccagaagctggaagaagaggtggcccgccgacccgtgcgggaggtagagctccgactcgcctcgctctccgccccagcaaggatgatgaagatccttgaagccgagggcggggcagaggtcgtagcccggcttgcttctccccaccatcaaactgatggcgactctccccgcttgcgtcctcagccatcgcggactgagtcttcaccaacacgctccaaggtcctcccccttacgacacgggggctgggtcccacgcgtcatgcaagctggcccaggacagaaaaagccaaaccgccgcgcgcagagcgcgtaactgcccagcggttacaacgactcctccactttcgcccggaccagcagatgaaagggcggaccgccatgcacgcggcatgcaaccgcaccaagggggcgcaccctttcgacttcgacgcgtccagcatggaggcccaggcccacacgtcatgtaaccggcgcgccgattactacgtgcgagaaactacaccgccacttgcgccagtaccacgccttctcgactgcaaaaccggtgccgcgactcgaggcaaccctgcgcatggcccaacagtgccaaccaagcacatcggtcacgggttagtctgccgcggagaaggcgcgacggtcgatatggccaaaagtgggccgacagtaatggcggcggcaggcgggtgggagcagcagtcaaatcgtctgcaggctcacgtcccctcctatgacagcgagagagccctctcccacggcgtgaagacgacgcgcccgtgttccgttcctcgaacggctcacgcacgcacaacagctgccccgcgaaccactcgtcccatcgcattaactctgcggcagggcaggcggcacctttggcaggcgaagcaggcgacgcttcacctccgccatgatgaccgcgtcaaaaaagggatcgggaaaggggatactccgaaagggatccttctccacgaaggaagcgggccccgagccctcctactgatcagaggttcgaaggctggcccctcgaaagggctcgacagccacctcgaagcactcgggctccgcgcccactactggtcagaggttcgaaggctggcccctcagaagggttcggcagccgcctcaggccgctcgggctccgcgcccactactgatcagaggctggcccccgaagggttcgacaaccgccttagagcatgcagagcgagggatgactctgggtacgtctga

SEQ ID NO: 37352 - DNA, 891 bp, Zea mays
  Peptide Sequence Number=SeqID_80727
atgcggcccggccgcacccctccaccggcggtcacccaagatggtgacctcgggcttgatggtgggggaaagcgagccgggttgcggcccctgcccctccctcagcctcaaggattttcatcaccaggactggggaggggagtgcgccgagttgaggtcggcccccgcgtgggcggcggcccgctccttcactcagcgatcagagggaagggcgggtgtcgtccgtggcgctggcagctgcaccgtgcctggctctcggacgcgagtggcttcggagccgctcgcggcgccggcgtccgccacggcagcttgaagaggttcttctgccgcacccgccctgaggtcggtgctgccgctgttcgaccccccggagcagaagtcgtcgtcgtcgccgccgctggagtaggtgacggcgcgccgttcgtcggccttccgttgctccgcaggccttccccctcggagtggggttgctcgggtaaccggccgagccgcctgctcgggccggattcccggagaagtccctggaccgcgccgccgtccgaggctgggtcggacctcgctgaaggcgtcgtcgatgccgagggtgctacagcccccttcagcgtgaagtcccgagcctgcaggatcagattgtcttgtagcgtgtgccttctgcggccgtcgaggccagaaaacacaccctcgctgcgttgtaaagccgtgtctcctttcctcttatttcgagcatctggactttccgtcggtaacagggatgtttgcgtgggcgagagttgcttctcgcggaaggtgatgagtgagccgaagcaccaggtcgcccacctggaggtctcggggccggacccctcgggcgtggtagcgtcgcagggactgctggtaccgcgccgagtgtag

SEQ ID NO: 37353 - DNA, 666 bp, Zea mays
  Peptide Sequence Number=SeqID_80728
atggcccccccctgcgacgtggtcggtccgagcccggggtcgggcgaggcggaggctcctccgaggtcgaagctgagtccgggcctgggggtcgggcgaggcggagaccgtcgtccgaggtcgaggttgagtccgagccccgggggtcgggcgaggcggagtccagcgtccagcatcgaggttgagtccgagccctggggtcgggcgaggcggagtccgtcgtccggcgtcgaggttgagtccgagctctggggtcgggcgaggcggagcttcctatggcgcccgaggctggacttagctgctgtcagcctcactctggcgagtggcacaacagtcggagcagcgcaggcggtgctgttttcctgtcaggcgatccttgcattgaatgctcctacgatacggtcggttggcgtagtgatccggccaaggttgcttctccgcgaagcctgcccgagctgggcctcgggcgagtcgaagctttgtgctgatgagggttaccagctgagattaggagtcttagggggcgccgaacatggtgtcttcattgagttgctaacgggtgatttgccggacccggtcccgtttgatagggtccgagggctcgatgcctccctctggtgggatttcgttacagaatcgctcctgctggtctcagaaatgtcctag

SEQ ID NO: 37354 - DNA, 1149 bp, Zea mays
  Peptide Sequence Number=SeqID_80729
atgggtccacaggtcccaatggggggcaatccccaaatatccttcacaaactgccgcgaagatgcctgcttgcgagatggagttgggactgagattgtgcagctccaccccgtagacgtgcagaatcgcccgcataaaacggcttgttggcactccgaacccccgctcgtgaaaggagacgaagctcagcacgtaccccggtggcggggacggggcggcttcgctcggaggggccatccactccggctgcgagtcaccggagagagggcgaagcaaaccatcagcaacaagggcctccagatcatccgccgtgacgatggagaaaggccacgggtcgcgcggcgaaacaacggtcacccggtcggccatcaccaagcagaagaggtggcggcggagaggacgagggaccgggaaaggggatactccaaaagggatccttctccacgaaggaagcgggccccgagccccctactgatcaggggttcgaaggctggcccctcggaagggttcaacagccgcctcagagcactcgggctccgcgcccactactggtcagaggttcgaaggctggcccctcggaagggttcaacgaccgcctcaggccactcgggctccgcgcccactactgatcaggggctcgggctacgctctcgaggtaccctaggacatttccgagaccgacgggaacgattttgtaacggaatcccaccagagggaggcatcgagccctcggaccccgtcaaaaggggaccgggtccggcgaatcacccgcagccaagtccagcctcgggcgccataggaagctccgcctcgccagaccccagggctcggactcaacctcgacgctggacgacggactccgccttgcccgaccccagggctcagacacagcctcagcctcggaagacggtctccgcctcgcccgacccagggctcgggctcaacctcgacgctggacgatggactccgcctcacccgaccccagggctcggacacaacctcggcctcggaagacggtctccgcctcgcccgacccagggctcggactcaacctcgacctcgaaagacggactcgacctcgacctcggaggagcctctgcctcgcccgacctagggctcggaccgaccacgtcacaggggggaccataa

SEQ ID NO: 37355 - DNA, 447 bp, Zea mays
  Peptide Sequence Number=SeqID_80730
atggcgcaccgtctagcattggctgccctgaggtgcaccgtccactcgcagtgcgattgttggctttgcattggctactcggctctggcatgttcaaaatctgcacgccaggctcctcctccagctcctgttcgagatggtggtggctccatgtttggaggaattgggtccaccattgctcaaggtggtatggcgtttggcacgggtagtgccatggcacacagggctgttgatgctgtattaggtccccggaccattcagcatgagactgttgcctcagaagctgctgctgctgcccctgcccctccagtgatgaatgctgatgcttgcagcatccattctaaggctttccaagattgtctcaacaactatggcagcgagatcagcaagtgccagttctacctagacatgctgaacgagtgccgccgtggtggtgtgtctgcctaa

SEQ ID NO: 37356 - DNA, 606 bp, Zea mays
  Peptide Sequence Number=SeqID_80731
atggccatgatgggttcaacatcggaaaagatgtacattcgacaggtgaggaagcaacgaacttttgttgcttttgctctaaggtggtgccaaaggaagaatctcaagagtgaagcctcgggaggatgttgtcctccttttaaaaacattatacttttaagcgagagatatgccgccgcatacgaggaaaaccgcacggtgtgggtagaagatggtcagcgtattaatgagttgagagctgacgtcagacatctgcaagacgagcttgctgagcgggatttggcaatcgattgggctgtcaattcactttcgattgcttgggaccgggaagccaaagctcgtgctcgtgtggcagagcttagtgcggccattgacaacttgcaggtgtattgcaatactttacatgaggaagtccatgtactgtatttgcgactgcacccagatgtgcctgtcgaccctgttgcaatgggagccggaccctcaggaacagcaggtgaaggacttggtggggaattggacctttttaagtcccctccttttatgaacctggctgacgaatggtcccctacaacagacagtgaggcaaccaaagacgatagaaactag

SEQ ID NO: 37357 - DNA, 237 bp, Zea mays
  Peptide Sequence Number=SeqID_80732
atgaccaaggagagcgggagcagacctgggaacggctggccacgaagcgcggagaattcgtgctcgacggtgtttgagaaggggaacatggcgtcgcgacgagctctagtgaaattaggaggtcacgttggggctatacgatcacaatgggctagtgattcaccgtgcacaactaatttggggagaggaggaggaggcgtgcgaattttggcttctatcgagctcactggtgaaatg

SEQ ID NO: 37358 - DNA, 366 bp, Zea mays
  Peptide Sequence Number=SeqID_80733
atggcgccgccgtgtctgcgttgctccgtcacggggccgagtggggaaggagagccctgggccgttgatctgtcaagggagctggctgctgctgagctgctttctttgggcaatgattcacctaatggccttgttccccacagtggaaacacacatgacttcctccttgcgctggcgctgcttggttgttctggttggttgctggggcaggaagacgggctgcctggttgctctaacgctggtattgatttcctccctgctagttattctgacggtactgctgctgctgctgaggaaactgcctctggtactgctgctgctagttctgacactgatgttggtgctggtgctggtgaccctgcttga

SEQ ID NO: 37359 - DNA, 168 bp, Zea mays
  Peptide Sequence Number=SeqID_80734
atggctagtataggccaagtgcttgaacagggtaggaagaactctagattcagatgtctgagaacaggcgcagaggtgcgaggcgtgctcagccagaacagcaggcacctcaagagggaggcagcaccgcagcagcatttgccaccgcccacccccgatgaccattga

SEQ ID NO: 37360 - DNA, 237 bp, Zea mays
  Peptide Sequence Number=SeqID_80735
atggagataggattgcgtgaacagtgccggggtactgttcacctatttataggcacagggtgcaacctgcgtaaaattacatttatgtcctttataatcgactacaataatgacacaaaacatcatgggtctttaagtcaatccatctttaagtcggttcgtcccttcgtcttgagatctatcattgtgccgaagctctctaggatcttcggctacgaagcatacccccaacagtag

SEQ ID NO: 37361 - DNA, 210 bp, Zea mays
  Peptide Sequence Number=SeqID_80736
atggccatgatgggttcaacatctggaaagatgtacctcagtcagttttgcctcgatcggaccaataccagaaaggccaacacacaatgggagtggagagatggtgagagtagcgtgtaccctctgtggcaagaggctggacggtggtgtatctgtgctctcggttggcgtgaacccggtctggccttgagaaacccggtggcgagttga

SEQ ID NO: 37362 - DNA, 522 bp, Zea mays
  Peptide Sequence Number=SeqID_80737
atggggaggtcgggctcgctagtcagcggtggagggcacgcgcaggcacgacatcgagggcgcgcgctgacagacggtgccctccaaccagtgaccaagaacggggaaagaaagggggagactgacgggcgggtcctccttgccggcgactccgcgtgggtgaagaaggaacggggcggccacggttgggcaagcggtctcggttcgatggcatgggaccggtaccgacgaccaccggcgactaatcgacggaacagagaaaatgggggagagagaagagaaggtacggcagggaaattcacctcgggtggggcaaggacgagagcgaggctgggcctgacgattgaggagcacgattgcggacggcggtcgagctctaccggcaacgaattcgggcgtaggggacttggcgacggggaagctctagcgagcttgaagaacaggcgcgcgcagctcagggttttcaatccaaattcaattcaaattaattcaaccatgtgcaacaattcaaagaatatttaa

SEQ ID NO: 37363 - DNA, 363 bp, Zea mays
  Peptide Sequence Number=SeqID_80738
atgtcaacaaatgggaaaataagggcatggggggattgctcacctcgagaggaaactctggaatactggagcaacggcggggacacagggatgcctcgagtcgacgacggcggggcttcggctgcatgggggaatgccggtgagagtggaccaggtgaaacaaagagcctgggggcaaaccggaaggtgtcccgcgttgctggcgaaggggcggagctcaccaaggcaacagacagggcagacgctcgacgatggccacggaaaaacggcgggtcttcagcggagctccacgggcgcgcgcgtagagcgagagaaagcgagggagttcagctgagggcgcaactaggcgaggggagcgagtga

SEQ ID NO: 37364 - DNA, 543 bp, Zea mays
  Peptide Sequence Number=SeqID_80739
atgtacatcgagttctcaactttgaacatccaaataaataaaggtttcactgctaagctttcaggatatggttgtgttgacttcaataccgaggtgatatttaatgcacctgtgatatgttttcttcggtctgcagcaaacctttcggtggagaccttggagaagggtttactcaatcagtttgtctattgctgcaacaagtcggggctagaccgttccaaagtaaatgtaaatggaggcgtgattgcccttggacaccctctgggtgcaacaggtgcccgatgcgtggctactcttctaaatgaaatgaagcgccggggcagagaatgcagatttggtgttgtcaccatgtgtatcggatctggaatgggggtagcagctgtgttcgagctgtgttcggcccggctggaggtatcgaccatcactcgtcactgtaaccccatggtgatcggcgaccgtgagcttccatgttattgcgttctgatacttaagacttttattatgactatgtatgagatattgtctcttattagtactggatga

SEQ ID NO: 37365 - DNA, 858 bp, Zea mays
  Peptide Sequence Number=SeqID_80740
atggccagtcttaggtgcaccgcacgtaagtcggtgatccctttcctgctctcttgccttgtggagcgtccacttcgccgcacggtgtctggacagtcgagtcacatggagagactgcaccaccccctacgcgaggaccaggaatgtcgacgtcaggagagggagcagcaggactcttccccctcacctcagcacggggtggagtctaaaaggcatccctcctctatgccccagctagaggtgccccctacaccaccaaagggaacaataggtgatagaggagacctcgacggagacgacgacggtggcagttcgagccacaacaaggagccttcagaggagcaggagccggaaggatgggtcacccaacccatcacttgtgacaccactcgcggttgtcatttccttgacgtactaaacacattgctgcgtcgagcctttgaccaacaaacttggtcaatcgagtaccactgtgtagtctaccagcacagtcatgggttatacccggaccaatgggaggctaattgcctggtgcaccatctggatgatgatcttcggggtgcagaggcctactcagagcattatactatcactgagcgggatactgccgaggtagccattggagtggctgacggtctcgacctgaagtactacccccgctgtttgaccgacaataccatgagtgtgattgtctcatccgttggtgagggcaatcccaggttgagcagcatgatcaacccgttcgccatgctcaacactgagctagaccacacccttgacgagttggacgagttaggcaaggatcgttcagagatcatggaactgcgtgctaagcgcgcggagtgccgccatcagtag

SEQ ID NO: 37366 - DNA, 426 bp, Zea mays
  Peptide Sequence Number=SeqID_80741
atgggatatgatctgagaccgctcggaggcaccgcggcgcgcgggttctgtgttgccgccgcgcacggggcaagcttgagcgccgcctggtccatcgggacgcggccgcactcccccgtgccgtgcgtcgaggaggagggaggcgcagcagggcgggtgggggagatgttcctctgggactggttctacggggtgctggcctccctcggcctgtggcagaaggaggccaagatcctcttccttggcctcgacaacgccggcaagaccacgctgctccacatgctcaaggacgagcggttggtgcagcaccagccgacgcagcacccgacgtcggaggagctcagcatcggcaagatcaagttcaaggccttcgacctcggcggccaccagatcgcgcgccgcgtgtggaaggattactacgcaaag

SEQ ID NO: 37367 - DNA, 618 bp, Zea mays
  Peptide Sequence Number=SeqID_80742
atggaggggatgctccaaggcgtctgctgcagtatgccatggggagttggaggagcttttggagctctgagcatcggccatggagagaaggggaggagctgctgctgcagtttctgggcgccatggaggaagagcagaggcgtcgctgatgtggccgagcaggagagggcgtcgagctgctggtcggccatgggagaaaaacagcaggggagggagggaaggacgccatggctgggggcactggcacagggagtagagggaggcgcctgctggcttgaggaagaagaagaggaggagggcgccatggatcagagctcgcccacgccctggacagtagagggaaacgctgggggagctcgattgctggccgaccacggagaagacgactccctgctgcagccgctcgccaggaggaggagtagggagggcgctcggctgctgctgtgcgaggaagaaggagcagggggcgccgcgccatggctggccgagggggaggagctcctgcgcgctggctgctgctaccgtggagcagggaggaagaagctgctggaggctgaaagaaaaggaggggtgggagtgcaaattgccaagtgcaagggagagggatcctatttatag

SEQ ID NO: 37368 - DNA, 978 bp, Zea mays
  Peptide Sequence Number=SeqID_80743
atggaggacttcgaggagttccaggattacaacgagttctacgtccactgtgtcgcacggtgccaggtcaagtccagtcacctggagagactgcatcgtcgcctgcacgaggaacaggagcaccaacgccaggagcaggagcagcaggactcttcccccttgcctcagcaggaggtggagtctaagaggtcgccttcccctgcacctcagccagagatgccccctgcaccaccacagggcatcccagcttctggaggagaccttgacagagacggagacgacgacgacgtcggtggtagttcgaccacggcacggagctctcggaggacccagaaccggagggatggatcgctagacccatcactcgtgacaccgctcacggtctaccagcatcatcggaggttatacccggaccagtgggaggctacttgcttggtgtgtcgtcctaatgatgatctccggggtgcagaggacttctcagagcactattctattactgagagggatactgcagagacagccatacaagatgcagcacgacgagtactttctcagtattactctttgttcagaggggtagctgatggccttgacctaaagtactaccctcagcgttcgaccgacagtgctggaggtgtgattgtctcaccagttggtgagggcaatcccaggctgaacaacatggtcaacttggctgccatgctcaacatagagttggaccacgcccttgacgagttgggcaaggttcaggcggaggttgtggaattgcgttctgagtgcgcaacacgccactatctggatggtggttctcctgcccctatcgggattcagcacccttatcgttcaccgccccatggtcgcttcgactatggttctctggaggacatggttgctggagtgacttggccgtccatcttgccaccgggttggacagtcgagtgggaccctacctcggctgaggaggagcgtgaagagtga

SEQ ID NO: 37369 - DNA, 237 bp, Zea mays
  Peptide Sequence Number=SeqID_80744
atggagctccaggcaaggtgcgtctgcgtcgtcgcgatgctcctggtggccagcttcgcggggctggatacgacgcacggcacgggggagtgcggccgcgtcccgatggaccaggcggcgctcaagcttgccccgtgcgcggcggcaacacagaacccgcgcgccgcggtgcctccgagcggtctcagatcatatcccatcattatcctatttgttcgcacaacagcgttctcgtag

SEQ ID NO: 37370 - DNA, 453 bp, Zea mays
  Peptide Sequence Number=SeqID_80745
atgctggtagactacacaacggtactcgatggaccaagtgtgtcggtcgaaggcccgacgcagcagggtgtcgagagcgtcgtggaaccgacacccgcgagtggcgtcacgagtgatgggtctagcgatccatccctccggctccggctcctccgagagcttcgtgccgtggctcgaactgccaccgacgtcgtcatcgtctccgtctccgtcaggggggcatctctagctgaggtgcaggggaaggcggcctctcaaactccacctcctattgaggcgagggggaagagtcctgctgctcctgctattggcgtcgacgctcctgctcctcgtgcaggcgacgatgcagtctctccaggtgactggactgacttggcaccctgcgacacagtggatgctccgccaggcgagaaggcaaaaaggggatcacagacttacatgcagtgcacctga

SEQ ID NO: 37371 - DNA, 465 bp, Zea mays
  Peptide Sequence Number=SeqID_80746
atggccggaatgcctctcctgagctcctctggtccgcccgagaatttctccccgtcgttcttccccctctgccctcggactcgtggcctcttccccgccattgagttcgccgttgcgttctctccctctctgcccaatcccggcgaccccggaacccccctagcacgtgcatgccccaacttcggcgacctcactgccgcggagaggagcagcgccgcccgcagccgttcgtccctcctgacaacgagcagtccgaggttcctgagtgtgttgttggagaccttcctgagcaacaaccaggagggccatcaatgggggtcggggcgtagtgctcgctctgccaaggttggggtgcagaggttcattcgatttggttttgttagtcacccaccttggggaggtgtactgcgtttgtacgactggcgaaacctaacgagcagctatgcactaggggagtctttgtaa

SEQ ID NO: 37372 - DNA, 1830 bp, Zea mays
  Peptide Sequence Number=SeqID_80747
atgtgcggcccctggggaaggatgtcttcgcacgagctccgggagtcttcgtcgcgaatgctggaggttaccgggggtcggtggccaaagaatcttccgatcccctgggcagagggcgaagacatgtctacgtctcgtatagctcgtggattgaggattttcccttacggacgaaatattgttgctgttgtgtcggcagtgatgaacaaggatcgccaggatgctgcgcagaagcgccgggcggtcatcaggctccctgatcctaggcgtgaagcgaagagagcgcgggggagcgcgaaggctgccgcccccggtggtagccagccgacgctggccgcgaaaccggccgcacccggatccagcaaggtgccggagagcacgaaggccgtcgtcgctggcagaaccaagtccaccccggacgaagctacgaagagtggcgccttctgtgctggcggcgagatttcgttggccactgccgtcaaggacgaggcgggcaccatgtcctgccggctgagagaggcatcgcagcagctgtcgcagcagctaagtcaagcggccgacttcgccgaccgcatggcatcgggtgcccttactgcagatgtgtctgccgaagtcgagagacttcgagcacagcacgcggacgtcgtctgggagaagtcggttgtggagagcaagagccgcaggctggcggagaaggtggccgccctggaggccgagaggacggacctccggcgccagctggaggaggccaaattggcgcgggcggagggaagtctcgccagccaacgcgccgaggaatgggaggtgcggttcaacgctctgcgcggccatgtggagaaggccgaggcctctaagcgctcggaagttgagcggacgcacgcacagctcgtggactcgtaccgcgagctgggtgcgcggactgctgacttcgaggtgcccgaccgagaggcatgccttcgcttcctcgagtggctgcaagaggaattgttggtactcccgaccatcgtggagggtttcatgtcctttgcctccctcgtcacctgcgaaggggccatgaacgcgctgtctcgcgagggctgcagacactacgaggtcttcgaccaaacagacgagagctttggacacaagctctttaaggccgaagaccctgttgtgaagcagtcagcgggggcactttttgataggatgtggggggcacatggtcgggaggctgtcagggagcgatctgaccggatggagcgcgccgaggacgtcgaggacttcggaggtctagtcggcgcgccgcctgaggctgcggagggcaaaccggtgctgcccttggatgctggtgaaggcccatcggacgtgctcgtgcctgctgctgccggcgaagaccctgtgtcggcccctgtgccgacggtcaaaggcgctcaggaggtggtggcggagctggcagtcgaaggccctacggccgcagacgcgccctcgcagtctgatgattctgggagttcggtggtgtggacggaagagtcttcggatgaggatttggattattttgcggcattggatgtggctgcggcggaggcttctccgtgtgtgatgggtgctgacattcctggtccgagtgttgggtgtaggcggcgaagggcggtggcgaagcgtagagtgagtgaggtggagggtggtcgtcttcgtgtggacagggctggcaagcgggaattgttgtcctcgccagttgcggcgagtgtaggtgagggggagttgcgaagtctttttgagggtgaggagctgaggataatgttgtttaactatagggagatgggtatcatcccgaaggttgaaccaatgtaa

SEQ ID NO: 37373 - DNA, 420 bp, Zea mays
  Peptide Sequence Number=SeqID_80748
atgacggtggcagacgtgcgggagcagcgggcacgtcgacagccaagctcacgtcccatccgggggcagcgagagagccccctctcacggtgtgaagacaacgcgcccgtgatccgttcctcgaacggctcgcgcacgcccaacggccgccccgccaactactcgccccgtcgcgttaactccgcggctggacagggaccgggaaagggggataccccgaaagggatccttccccgtgaaggaaccaggctccgagcctccttactgatcaggggttcgaaggctggccccccgaagggttcaacagccgcctcagatcgcgtgggccctatacccactactggtcagaggttcgaaggccggccccccgaagggttccacggccgcctcaggctactcgggctccgtgcccattactga

SEQ ID NO: 37374 - DNA, 708 bp, Zea mays
  Peptide Sequence Number=SeqID_80749
atggtgcctgcggaggccatagccattgcggtccgcctctactcgctctccgcggctgcggcggccgccggctcgctcctcgcctggctcgtcgccgccgccgccggcctctggcggcgcatccgcgctgccagtgcttcttcccacaacaagcgcggctccagcgttcgcgccgttattggcaacgatgatcgggagccacagccgcctctgccgtctcgggctgccatcactgaggagccgcggcggccggtcgctctcgctccggccgagctgctgtccccgtcgtccgtgagcgagctgacgaacacgccatcgtccaaggtccggttcactgcgcactactacagcggcgcattaggagacgacgacgacgacggaggaggagtggtggacggcgtgaggaaatgcgcggacacggatgactgcgaggtggagattatggttctcagaaggtcggtgtcagagccagcgagaagaagaagagcgaggaccttgttggccgcggcggcggcgccgtgggaggagagggagacgatggcggtgaggcggaggagcgacctgggctgctggtaccgccacgtcgacatggcggcgctcgacggcagcgtcgtgaggctgtgggacggcggcgtcgccggccgcgagagggaggacgaagagagggcgcaggattggaattgcaacgactgtcgttataggagttag

SEQ ID NO: 37375 - DNA, 477 bp, Zea mays
  Peptide Sequence Number=SeqID_80750
atgcccccgcctcggctaaccctacgcgcagatccgcagccgcctgacccgccaggaccccgcctctccttccccttcgcgctcaaacaaccaagccgaggtccgcgcagccacacgaactgccatgacctcgcacgatccgtcatgcccccgcctcgcacgatccatcgtgccttcccctccgtgcaaccgcccgacccgccaggaacccgcctctccttcccctccgcgctcaagccgaggaaatgcacccacaaatttggaagccgcggcaatggcgcccgatttggctatggcgtgcatgatctccatcggctgatttggaaaccgcacaatctacgtcggcgatttggaaagcacgatctcgctgacttaggaacgaccaagcaggagcctactcctcatttgcccctgttcagaggatctcagagtcttaacttcaggatcacaaattgtctccaggccactcaaaaataa

SEQ ID NO: 37376 - DNA, 312 bp, Zea mays
  Peptide Sequence Number=SeqID_80751
atggaccacatgggtcttagccacaagagtatcaaggggaggtgggatcagttagatggaaataggatcgcggcctcgcggggcatggctggccgtctccagctgctgggctcgctagtggccgctggccgggcaggcgaggcggacgcgcggctcggcaaggccgggcagcagcaccagagcggcgtgcatggctggggtggctgcggcaacgcagcagccatgggcatggttgggccgcaggggctgcgagcggggctcgctggtggctcgccagagaaggagcgagcaggcagcgcagatgctctttag

SEQ ID NO: 37377 - DNA, 222 bp, Zea mays
  Peptide Sequence Number=SeqID_80752
atggggtccaggcatagtgcttgctctgccgaggctgggtgccgagattctttcgttttgcttttgttagtcaccctcctgcggggagagagatacttgatcagagatggttggtttacaggtggtgacaaggatgatgattatgactatggtaatggtaaagaagaaggcgtcgaggggaatccccaggagttccaggacttcgacgagttcgaggattag

SEQ ID NO: 37378 - DNA, 1047 bp, Zea mays
  Peptide Sequence Number=SeqID_80753
atggccagagagcgtgtcaaatgcgtttgcggtatcttcggactcaagtcaggcattacagtagaccagaataatacgaatgttaatgaaccgccgaaggtaggctgggcaaaatggttccataaaaaaggatacaagtattcctgtgatgccacattttgggtcacaaagggcaagataactcccaagtatttatctaacagaacaggcagggtagctgggcaaaaagaagaggcacaaaatagtcaaggtcatgatgataagcaaatgaatacgaaggatgctaaattagttggataccctcatagtgatgaagaggaacatcttgatttcacatccctttcatcctttgaaagagtagaaggtcatcttaattttgttcccctggccagctactgcaatttacttgaaccagggaagcatactctatattcaggacgctttgctccagttggatgtttaagggaagttccagtgagggggatcgaagggcacgaaggatacattagattaattgaggccaaaaagaaaggaaagggagatttattagtccacaaaataatatgtacgaggagatttattagtccacagaataatatgtaccaggactgcaagatcgttgaaggccagatatacacaaagaggttgaatgaaaaacagatcacatcgctgctaaaggttcaagtaggtaattctccagagtacataactgacaggaagttaggtaaaggtggttttggtcatgtctatgttggtcgaagggtttctggtggagctgcccgcactggtcctgatgcatatgaggtcgcattgaaattagagcatcgaaacagtaaaggatgcaattatggccctccatatgagtggcaggtttataacactctcaatggttgctatggcataccatcggtccactacaagggtcgtcacagcgactactatatacttctcaacagtttttatgcacttatatttttagggaatggatatgcttggtcccagcctttgggacgtgtggaattcaatggggcaggccttttagactaa

SEQ ID NO: 37379 - DNA, 1290 bp, Zea mays
  Peptide Sequence Number=SeqID_80754
atgagcttgcggtatgatcttatttatacgcccaatgcgttgaaaattgaaagaccccgcctgtcagtgaatgttgctattctagcaaaaggaaggtatcttcggactcgagtcggtatcacagtaggagaagtccaaaataatacgaaggttgatacagcgccgaagattttcatccgaaagccactaaaagcaggtccagagggcggattgttctttgtggatggacctggtggcaccgggaagacttatctatacagagtgctgctcgcgacgctacgcagccagggcaagattgcagtggcaacagctacatctggcgttgcagcttccataatgcctggaggaagaaccgcccattcacgcttcaagatacctctcactattgatgatggcactgtatgtagcttcacgaagcagagtggaactgcagagttgctacggaaagcatctctcattatctgggacgaggcttctatgaccaagagacaagccgttgaggcactggacaatagcatgcgcgatataatgggtcggcccgaactaccattcggtggtaaaaccattgtcttcggtggggatttcagacaagtcttgcctgttgttcgtaaagggtcaagggctcaagtggtcgcttcttcgctatggatgtcttacgtatgggagtccatgtcccacttaaagcttgttagcaatatgagggcaaaaaacgacccttggtttgcggagtatttgctacgcgtaggcggtggaactgaggacacaaatagtgacggcgacataagtattcctgacgaggtatgtgtgccttatagtgggagtgacagcgatcttgacaacctaatagacttcgttttcccaaatctcaacgaaaatatgtctaattcgacctacatcacttcaagggcgatactgtcaacgcggaatgactgggtggatatgataaatgctaagatgatcgatcgttttcaaggggagcatatggtgtaccatagtttcgatagcgccatggatgatccccataactactaccctcctgagttcctaaacacactgacgcctaatgggctgccaccacatgttttgaagctcaagattggatgccctattatattgcttcggaatatagaccctgcgaatggactttgcaatggcaccaggctggtcgttcgtggtttccaaagaaatagcattgacgcagaaattgtactaggtcagcacgctggaaaacggattttcttgccacgtatacctttgtgtccatccgatgaagagatgttccctttctag

SEQ ID NO: 37380 - DNA, 264 bp, Zea mays
  Peptide Sequence Number=SeqID_80755
atggaattactcagcaagtcttacccgactaaagaaaagactctcaagggtatgctggttatgtgggagtcaaggatttcaaggggggtaatcaagatcaaggaaggtaatgcaggaattgttttaacaatcaactcctataacttaatgcagcaagcaagtgagaaagatttttttaaaaacatcaagggaggtggcaaatgcaccggggccttgccttcgttcacaggtgatcaggctccagatccacagatgtcaaagtag

SEQ ID NO: 37381 - DNA, 1140 bp, Zea mays
  Peptide Sequence Number=SeqID_80756
atggccgccggcagcggctatggcggcggggtagaggcgaaagcgaccaccacggctgtgtcggccgcggcccccgcggaggttcccacgtcggcggcctccgtcgacatctcgctgccgctcctgaagatgtcgcctcgcatcatgcaagtaccccgtccccacatctatcttcgatcctcttgcttcggctcgcgctcgcgctcgcgcttgcgcccggcctggtcacgcttgctgaaggtttctgtcaaagaagacaacggcaatgagtcttctgttactgttcggttgtatggaccaaatacggacttggtgattgataggaaaagggaattgcaggcgataccatatctctcagctgcagggttcggggctcggctacttggaatatttgagaatggagtagttcagtcattcatctatgctcgaacactgtcaccagcagacatgaaagaacctaaaatagcagctgaaattgccaaggagctacgcaaattccatcaagtagacataccagggtctaaagaaccacaattgtggaatgatatattcaagtttttgaagaaagctgcagcattgaagtttgaggataacatgaagcagaagagatatgaaaagatctcatttagagaaatacaagatgaagttcaagaacttaaggatctcttggacattctgcgcgcgcctgtggtttatgcacacaatgacttgctttcaggaaatctgatgctcaatgatttggaagggaagctatattttattgattttgagtatgggtcatacagctaccgtggctatgacattgcaaatcatttcaatgagtatgcaggatttgattgtgactataatttgtacccagataaagatgcccagtatcacttcttcaggaattatctacacactgatagacctagtgaggtggatgcacaagatatggaagtactttatgtggaaacaaacactttcagactagcatcgcacatttactgggcattatgggcccttattcaggcaaaggtatccccaattgactttgactatcttggatacttcttcttgcggtatggtgagtacaagaaacaaagggagtcctgcttctccttggcacaaagctttctctccgagctaaaaaatggctag

SEQ ID NO: 37382 - DNA, 306 bp, Zea mays
  Peptide Sequence Number=SeqID_80757
atggcgccgagctacctgccgcgatgtcgtccacgagcggacgcggcgtcgacgtggcaccaagctcggcgccaagatctatggcgccgagctcgaatatataaccacaaagattgtctagctcagttggcagagcgcaaggctcttaaccttaaggtcgtgggttcgagccccatcctcggcgccatagatcttggcgccgagctcggtgccacgtcgacgccgcgtcagctcgtggacgacagcacggcaggtagctcggcgccaagatctatggcgccgagatgtgtaaactcggcgccatag

SEQ ID NO: 37383 - DNA, 1014 bp, Zea mays
  Peptide Sequence Number=SeqID_80758
atgccaactggccgcggcatggggaaccggtgcccgtccagtcttgcgcggtcgaacgggacgccgacctgggagcaaccagaccaccccttgctcacgggcttcccactcccgcgcgggctgggcgccggcaaaggctggtcgccgccgccgccgccgctcctgccgcccttcctcacgaagctcagcagcttcttgagccccttggacagctccctgtgcgaatcggccgtcgctgagaccgagagcgtcgccgtcggcctctcagggctgccccaccgcttcctcggccgcgcctgtggcgacggcgaggccagcgccgccgcgtcgaacggcagctccgacaccgaccgcacgtggcgcggcgcgtgggcgtgggcgtgggagtcgccgagctcctggggcagcggcggcctcggggtcgtcatggtcacgtcgatggccggcagcaggtcgtgcaccccgcgccgtccgcagcctggccggcgccgccgcgcccgcgccgcccgtgcccgtgccgcgcttcaggaacggcctcggcgtggcgcactcgccgaactcggcgggcacgacgccgaggctgttccgcctctggtggtgcgagtgcgacggcctcgccgggctcccctccgcgccgccgcccaccgtcctgctcctcggcagcgtcgcgccgtcgcttctcggggtgctcggggtcgacacggccgcgtcttgttgcgtgtgcgtgtcccgacccgcgcacctgagcgcgcgcgggctcatcggcgtggcgcgcacgcctcgaggttggtgaaccttaccattcgccggttggtgctgccgctgctcggccgacacggccacgcgcctggcgtcgcgccggcgcatgtaggcgtcgtaccgcctgccgcggtgcaggctcagttactccagacggggatgctggagttacctggtagcttgactccaacgacggcggcgtacatggcagggcagcgacgagccgacggacgacctggccaagttctggcatag

SEQ ID NO: 37384 - DNA, 546 bp, Zea mays
  Peptide Sequence Number=SeqID_80759
atgacgagaactgaggagctggggttggaactgaggataagaagcggtgttaacctatcttcaagcgcgcactgtggtagcgttgctagttgctacggcgttttaactgttgcggttagggggaggaagccgcctgatagttctagaacatctggagtggtggtggtgacactcatggcaggacttttcaccatcactagaaaaaccctggacaagttcgtgtacaaatgggctcataatgacatgcaagttcactcgcttggcttgacagtcacaaatcacggttcacatggtttcggcaatacacgctatcgccggtacccattccagtacagaatcttggctgacgatttgtcaaccagcacctccacggcgccaacgggtgtctgcgtgcgcatctatgcaccctgtatctctggatttccacgtcagaactctgggtggcaccatcaggaatgcttccgccatcactgtattagtccttggaagttagctcgtccagcgtccatccctttcatcaaatggttttcgaagagaaaactgtag

SEQ ID NO: 37385 - DNA, 1230 bp, Zea mays
  Peptide Sequence Number=SeqID_80760
atgactgatgaacctgagagcagattgaagatgacggtcgtacctgaggaacgtaagatctgggtcgcaacacgacgaatcgaagcgattaactccggatctgaggatgccgtcgcggacctcgaccagctcggaatcgcccttccgccggcagattcgccgccacgtcgcccgatctcacccgacttcgacagaagcgtcgagaggaagcgaagtggaccgggaactttcctcggacgcgcacgcaccggtgcatatatggggctcctgaaccagctgtgggacgacacggtggccgggccgcgcccggactccggcctcggcaagctccgcaagtacgcctccttctccccctcgtcgtcgtcgtcggcggcggtggcggcggcggcggcggcgggctccgcgccgcctccgggcgccgtgacgcggagcttgaccatgctgcggcggccggcggcgctgtccgtcgtcacgtcgccccgcagcgagtccagctccgcgccgtcgtccccgtcgcccgcaagcggcgctccggattcgcccttcggcgcagcgacgacgcccaggggagagggctggacgaagaagctgcgcgggaaagccaggatgggcggcggcggcggtgacgacgcccccggcacgccgaggagccccaccgtgtacgactgcagcgagaagccatcgccgcgctgcatctcggccacctcgggactggcccagtccatcaccgtggagccactggcccacgacgccatggaggctgccacgacgccgccgccgacgacgagaagccatcaccgctactcccccactccatccatccatccacccatcgcttttctctctgctttggagagggagccgcacgcagtggttgctgccgctggtccgccagggtcccggccgctgtgctcattccaccggtcggcggtggactttcaggcttcttcgatggtgtcgagagtggaggaaatgtcgaccacggagtgcgcggacctcggggaggagttctggctgcagaagaacttccttggccaacctccgccccatgcccttcctcctctcaccattgttgtccgtctcgctccaatcccgttgcccccactgcgcgaggtagcctccccaaacatctttgttcctccttgcgggcttgctggattgcggcgaccgctatggatggaagggcgcggtgggggaggcgcggattgcggctctggcgcggtgggcgag

SEQ ID NO: 37386 - DNA, 477 bp, Zea mays
  Peptide Sequence Number=SeqID_80761
atggcatcctcaacagaagaaaacatgaaggctttgctcaaagtccttgttgactgtgccgaggatgccaccaaatcactgggtggtttagtagatcatgctttagaccacatgcatgatgaagagatcgtagctagaaccttgtttgccatcaaagaaagactagaattgctacagcaagatgccttagaggcaaaagtgcaagcatttccagaaattgctaagtaccagggggatgacataagtcttgaacctacaactccgtcgacccctcaaacagttactgatcgatcttttgatgaagacgagttgtactatcccgaagtcagtgatgagtggaatcctctaggtccagttcaagcaaatccttttgcagattcgtttccaggttcaaataccagtacaccattgcagggttcaaatatagtcccttccttacctgtgaacttggagtccgatgctgaacatagtgtttag

SEQ ID NO: 37387 - DNA, 423 bp, Zea mays
  Peptide Sequence Number=SeqID_80762
atggaggctttgaatgtgtcttggaatgaattgctagctcttgtattgaatgttgaaggttggaatgcttggagtttggtaaggcaatggggtttaggggccaagattgatcccgttttggtgcttgatgccaaagggggagaaaataaaggccaaagcaatagatggatcagctaccacttgagtaattttgaaaatggaaaaattgaattggaaatgagatggctttgttcagccaaagtctactcagtctgggtgcaccggacagtgtctggtggtgcaccggacagtgtctggtggtgcaccggacagtgtccggtgcgccaggctggctatggcgaacaggctgctctcgggacttcgacggcggtgtacgactataattcaccggtctgtccggtggtgcaccggactgtccggtga

SEQ ID NO: 37388 - DNA, 147 bp, Zea mays
  Peptide Sequence Number=SeqID_80763
atggggtccaggcacagtgcttgctctgccgaggctgggtgccgaggtggtgacaaggatgatggttatgactatggtaatggtaaagaagaaggcgtcgaggcggatctccaggagttccaggacttcgacgagttcgaggattag

SEQ ID NO: 37389 - DNA, 264 bp, Zea mays
  Peptide Sequence Number=SeqID_80764
atggggcctcgccgaccaagtgcaggggcgcgcgcgagggaggaaaggagcaacatgggggaggggaagagggataacctgtgctcacggcggattcctggcgacggtggagattggcacggggagactcgacgtgctacggcagtgttccgggccagatggatagtcaccaggcgatgcagcgctcgatgtctcgtcgacgccagtgaacttggtgagcggctgaggagaaactgcgagagcgcaagagcaggaaaaggataa

SEQ ID NO: 37390 - DNA, 474 bp, Zea mays
  Peptide Sequence Number=SeqID_80765
atgggaacagtctccgaagcttcagtttcgcttccctcacgctcaaccctggtggcttcaaactggagcttcgttcgattccgagagacaagcttcgatgatggtaagaaggcgaagcgccaggatttttacaccaggcggacacccgctcgcactcgctgcgtggtggaccgcagagaccaaacagtaactccgcagcgtggggccgctacgcgctgggaaattgaatcgtttctcgacaacgagctcagggaaggtgttttttggaccttcggctccccgaagcttaagagacttttttcacgggtcaagctcgttacgaaaaacgatctagcaccgcgaaaggggctactgttgggtctatgcttcgtcgccgaaggtcttcaaggaagaagcggctttcggctgaagctgcttgtgagaggtggccggagcttcctcttcatgaagcttcggtattacaaaccgacttaa

SEQ ID NO: 37391 - DNA, 591 bp, Zea mays
  Peptide Sequence Number=SeqID_80766
atggcgcctcctgtcgacgcggtcggtccgtggtgccctaggttgggcgatgtggaggctcctccgaggtcgaggtcgagtctgtcttccgaggtcgaggtcgagtccgagcccctgggtcgggggctgagcccgagtccgagccctagggtcgggcgaagcggagttcgtcgtcttccggggctgagtctgagtccaagccctggggtcgggcggagcggagttcgtcgtcttctggggctgagcccgagtccgagccctggggtcgggcggagcggagtttgtcgtcttcaggggctgagcccgagtccgagccctgggtcgggcggagcggagtttcccatggcgcctagggctagacttggctgctgtcagcctcactctgtcgagtggcacagcagtcggagcggcgcaggcggcgctgtcctcttgtcagaccggtcagtggagcggcgaagtgactgcggtcacttcggctctgtcgaccggagggcgcgcgtcaggataaaggtgtcaggccacctttgcattaaatgctcctgcgatttggtcggttggcgtggcgatttggcctgggttgcttcttggtga

SEQ ID NO: 37392 - DNA, 441 bp, Zea mays
  Peptide Sequence Number=SeqID_80767
atgaacaaaacgccggcattcaagatgccattacaaacggaaccccggttccacctccgcgggtacgaacaaccccacacgattggggggcctccggagcaacagaagaccgacgaacggctcgtcgtcgcccgctccagcagcggcggcgacgacgacttctgctccggggggccaaacagcagcagcgatgacctcggagcggatgctgctgccatgaggccctcgcccatgccctcactcgagaggcaaggacgggcagagggccaaagagttggaggtcagtccgtgggcggcaccggctatctcgtcggcggaagaacctcttccagctgccgtggcggaaggcggcgccgggagcggctccgaagccactcgggccagagaaccaggcacgcggcagctgccagcgccgcggacggcgaacgcctttccccctga

SEQ ID NO: 37393 - DNA, 267 bp, Zea mays
  Peptide Sequence Number=SeqID_80768
atgggacacacgagtggtgatgtggagaaccttagtagggatcctgacagattctatggtttttcttctgaaggtaatattgaaccaacagttgagtctgagatatttaaagcactggaaagagcaaaacggatggttggcaataggaaagaatcatgctactcgaggtgtggaagaactgacaaaggagtttctgctactggacaggagttagcactatgtatattgccgaacccagataaaaatgataggcaaatacgtctctaa

SEQ ID NO: 37394 - DNA, 315 bp, Zea mays
  Peptide Sequence Number=SeqID_80769
atgacgtcctccagcatcctcgcgggcgtcgtcgtgtgcgggtccccctgcgcgctcgcctatagctccccctgcacgctcgcttacagaagcccccttgtggcggccgaggaagatgacaagagttttatgtttacttgtactcaacttaagatggttctagagaatgaccaacattctgatgtggatggcaaaagcttgtatatagagtttcttcaagagtacgaggagaagaaaaatcagagcccaaagcccagagctgccgatatggagacagagacagatagtactaattgcgtaggagtacacacttga

SEQ ID NO: 37395 - DNA, 1449 bp, Zea mays
  Peptide Sequence Number=SeqID_80770
aataaggaaagtcagcaacaacaacccagtactcccacagagcagcaagtgcttgccgcgcagcaagctgcaataaaagaggctgagcaaagcgccgccgccgcgaaagccttggcccagcaagaagtgcaacaatattcagacaaacaggctttacaggggcgattgcaggaagcgccaacatttgcaagagcggctaaagcaaaagctacacatatcgcaaatccaggaaccgctcgctaccagcagttcgatgataatccggttaagcaggtagcgcaaaatccgttggcgacgtttagtcttgacgttgacactggcagttatgcgaatgtaaggcgtttcctcaatcaagggctgttacctccgccagacgctgtgcgggtggaggagatagtcaattatttcccgtctgattgggatatcaaagacaaacaatctattccggcctctaagccaatacctttcgctatgcgctacgaattggcacctgcaccatggaatgaacagcgaacattgctgaaagttgatatcctggcgaaagatcgcaaaagtgaagagttaccagcttctaatctggtctttcttatcgacacttctgtcttcgttgaattattggtcaaagaacttcgtgagcaggataacattgccatcgtgacctacgctggcgactcccgtattgcattgccttctatctccgggagtcataacgcggaaattaatgccgcaattgattcgctggatgccgaaggcagtaccaatggcggtgccgggctggaactggcttatcagcaggcgacgaaagggtttattaagggcggcatcaatcgcattttattagccactgacggtgactttaacgttggcattgacgatccaaaatcgattgaatcaatggtcaaaaaacagcgggagtctggtgttactctgtcgacgtttggcgtggggaatagcaattacaacgaggcaatgatggtgcgaattgccgatgttggtaacggcaactacagctacattgataccctctctgaagcgcagaaagtattgaatagtgaaatgcggcagatgttgattaccgtagcaaaagatgtcaaagcgcaaattgagtttaaccccgcgtgggtaacggaataccgtcagattggttatgaaaagcgccaacttcgggtggaacattttaataacgacaacgttgatgcaggggatataggcgcaggcaaacatataacgttgttattcgaattaacgctgaacgggcaaaaagcatcaattgataagttacgctatgccccggataacaaattagcgaaatcggacaaaacgaaagaactggcctggttaaaaattcgctggaaatacccgcagggaaaagaaagtcagttagttgaattcccgctggggccaacaataaacgcgccctctgagatatgcgttttcgcgcagcagtag

SEQ ID NO: 37396 - DNA, 237 bp, Zea mays
  Peptide Sequence Number=SeqID_80771
atggtgcggccatggcatcccggcgcggcgccctcacgcgacgcggcatcatggcccccggcgcggcccagctacctgctcgcgtcgggcatcgcggcgcgtgcgcagctcggccccgacgtgttcggattgcaagtggcaatgagattgatggttcttggtattgactctggtaatggagaagatgaagccgtggaaggagacttccaggagttccaagattacgacgagttctag

SEQ ID NO: 37397 - DNA, 147 bp, Zea mays
  Peptide Sequence Number=SeqID_80772
atgtatgagatgcacccggctttgttccttaaatccgggtgtgacatgaagttcgtggttgccgagtgtgttgccggagatttccctgagcagcaacctggtgaaggcaagtgtcctctgacccattacgtcctacttactttataa

SEQ ID NO: 37398 - DNA, 879 bp, Zea mays
  Peptide Sequence Number=SeqID_80773
atggcgaagccgactacatatcaagttcctctaattaatcagctaaggccgcgcgatcagaagaagaaaatggtgaatagaagcagggcgtggggactgaccgatggggcccacgagtcagtggcccagggcggaccccatgcgagacgcgagcgtgggcgcactctgacgggtggggcccgtggatccgcggtccagagagaggggagagaggataagcgcgaggaggctgccaggcggggtccatcagtcgggatcgtcgttaacctcagccgcgcgcacggtgtgggcgccctggctaggaccggtggcttcgtgtggggcagaaaaggacatggggcagtggcggttggctggagagccccggcacgacggtgtagtgccattgctggtgtccaccggtggcttctcaatggagaagggaggacggggatagtgaaagagaactccagtgggggaattcacctcgggcgaggcatggttggtggtggagctctgagcggcggtggcggacaacagtcaggaacggcggaggggccctgccgtggaggatctggagttcagatggctcggcggcggaagagctccgacgagcttgaatgcgagcgagcgcagctcgggtgggggcgctgggatgaagagagtgaggtggggagggaagtgggcacgtgcagcgacttgaaaaagggtcggagcagcggtttcacgcagaggcgtgatgtgggcacgaccacctcgacgtgcatgtgcacggcttgcgcgggcgagcggttgaaggaggggaggggactgccaggtgaggccatggggtctgtgggtcagcgtcagcatgctcaacgggcaggtgagggagcatcgacatgtgtggcccaggggtag

SEQ ID NO: 37399 - DNA, 444 bp, Zea mays
  Peptide Sequence Number=SeqID_80774
atgaatgagagaaagcatagggagatggaggagcgaaagcacaagatcggtggaccgcagacccgccgcacgcccctctcatcttcctccctctgctcggcttccggctcgcgggtctccctccctagcccccctggccgcgcgcctagcagctgctccctcagctcgcgcgcccctggtccgagcgttcctgcgcccgagacctgctcctccaccatcgcgcgcctgggcgctgcccctggtggctgcctgctctccctgcgcgcgcccaatcttcctgagtcgtgcgcgccatggtgcttgccgtcactttgccagaccgtgtccggcctccttcccaaggcaattcttcctgctcgacggcgcccatatcctctgttcctccctcagcgtggttttgagctcctttctcactgcgcatgccgcacccgggctcggacttag

SEQ ID NO: 37400 - DNA, 315 bp, Zea mays
  Peptide Sequence Number=SeqID_80775
atggcagttattcctgctcgacggcgcccatatcctctgttcctccctcagcgtggtttcgagctcctttctcactgcgcgtgccgcacccgggctcggacccagctcgacgccctccctgctcgtcccagttcctctctgcttggccctggtcaccgagctgagtgcctgctcacgtcgtgcctgctcgcgtcgtggtctcccagctcgtcagcacttgttcaagtcgtctcgactcgctcggccgtgatctcgtcccggctttcagctgcgctcgtccagatcgccgctgtcgagttccatcgtcgagtctag

SEQ ID NO: 37401 - DNA, 447 bp, Zea mays
  Peptide Sequence Number=SeqID_80776
atgggcaaaagtaagaaaggtagcggttcttctcctcgctctggtgacaagcgcaaacgtgagccgactcctccttcggaggacttcggcgactcggagtactcggaggaggagttctccttcgagtccgagggatccccggctcccgtctctcccccgacgtcgtctgatgattcagacgactcccaggggattgccgcggaggtctggacctacatccgggtcgtcgagcgctccaggctcgagggctcggatgagtcggagtactcctcggacgaggaggactcctcggactcgtctgaggaggacagcggcggtgatggtggtgatggcggtgacgacggaggcgacggtgatggcggcggcgacagcggcacgggcggcgacggcggcaacaagggcgaccatggcagcggcagcaagggcagcaacaagaccagtggctag

SEQ ID NO: 37402 - DNA, 291 bp, Zea mays
  Peptide Sequence Number=SeqID_80777
atggctgagagcggttgcctgctcctggctgaggcgcattctgctttgctggggcattggggcctgactgctgctgggctgccttcttcggacattgcatcacccaatggccttgctctccacagtggaagcacgctctgtttccacactgaactggaagacgaggcgcctgctgattctgcctctaaaactgatgtcctcctaattgattgttctggcgattctgatactggtgctgaggatactgcctttgaaactgctgctgctggggtggacgctggttctgcctga

SEQ ID NO: 37403 - DNA, 390 bp, Zea mays
  Peptide Sequence Number=SeqID_80778
atggaaaggatgttaaatgaacgtctgtccacgataggaggtcgaaggctacatcattgtgatcctgaagaattgaaccatgaagaatccggagatgagaattctggtttcagccatgaattcgatcccttcggcgatggccgtagaggttatggtgatggtcgccacactaatttcgataatttgtgtggaaggcgtcatgcacacggacaccgagtaagatttgaagacgaggagtttgaagaccgtgatcgtgaggcatctgatgagaacccctttgcaaatgatggaatgtttggttggcatcatcatcaccaacatgctaactttgaagatagcgagagttatcatgggcatcgccatagaaatgacccaaacaatattgcctga

SEQ ID NO: 37404 - DNA, 444 bp, Zea mays
  Peptide Sequence Number=SeqID_80779
atgacccgcacggagctcgcgaatccctcggagacgaagaactggcaatcagccccacatgccagccagcacgcgcatccgaccggcgcaaggaagaggctgccagtgggccccaatgtcgtgtacctcactgcatacctgctcacccttgatgcacagtatgatgtcttggctcagcaccaccgtcagatgattgcccgagtagaagatgcaaagaagcgcaaccgtcagctccatgttgatctcacctcaactcaagcccgtgcaactgccttagaaagtcgtgaagccattgctgttgaagccctgaagcaagctaaggatgagcacgtccaaaagttgatggaggcctacttggtcacccataaccaacgtagagccctgcggatccaagagcccgcttcatccaacccagttcaatctgtcagagatgaagatccctag

SEQ ID NO: 37405 - DNA, 249 bp, Zea mays
  Peptide Sequence Number=SeqID_80780
atgcccctcataaaagtttacaacaacgactcaaacacttatggactaaaaggtcattctacttttaagtcggaccttcggcgacaaagcatggtcccaacagttgcaatgggagctggaccatcaggaacagcaaatgaaggacctgatgaggagttggacctttttaggccccctccttccatgaaccttgctgacgaacagtctcctgtagcaggaaatgaagcgacaaaggatgatgaagactag

SEQ ID NO: 37406 - DNA, 1821 bp, Zea mays
  Peptide Sequence Number=SeqID_80781
atgtgcccccaaccgtcacaggctgagtcttctccaacacgctccaaagccctcccctgcggcgcgggggctgggtcccacatgtcatgcagaccggctccgagcagaagaaggcaaaccgccgtgcgtggtgcacgcaaccgcccagcggttacaagtgaccctccacttttgcccagaccaacgggcgaaaggggcgggcagccatgcaggcggcatgcaaccgtgccaagtagacgcgcttctccgactcccgacacaccagcatggaggcccaggcccacgcgtcgcgcaaccggcgcgccggatgctgcatgcaagcaactgcaccgccacttgcgccaccaccgcgcctcctcgattgcggaaccaataccgcgactcgaggcgacccagcgcgtgacccagcagcgccagcctgacgcggcggtcaacgcggccaaaggtggtccggcagtaatgacgatggcaggcgcgcgggagcagcggtcacgtcgtcagccaagctcacgtcccatccgggggcagcgagagagcctcctctcacggcgtgaagacaacgcgcccgtgatccgttcctcgaacggctcgcgcacgcgcaacggctgccccgccaactactcgccccgtcgcattaactccgcggcgggacaggtggcgcttctggcaggagcagcgggcgacgcttcgccttcgccgaaacaaccgcgccaaaaaaggctccgagcctccttactgatcaggggttcgaaggctggccccccgaagggttcaacagccgcctcagatcgcgtgggccctacacccactactggtcagaggggttcgaaggctggcccccgaagggttcacagtcgcctcagacgccgagcgagggatgaccaggggtacgttcgatacataaccaaggctcgggctgcgctcccgagctcaccggagacaccatgttcggtgcccatcgagggtaacatggcgctctcccccccctcctccttgcggaaaggcgacgtaggggcggctcggactcgggataggtcccggaagacggcgaactccgctccgcccgacccagggctcggactcgggctaggccccagaagacgacgaactccgcttcgcccgacccaaggctcggactcgggctcagccccagaagatgacgaactccgcttcgcccgacccagggctcggactcgggctcagccccagaagatgacgaactccgcctcgcccgaccctagggctcggactccgccctggcctctgccaaacgacctccgcctcgcccgactcaggagctcgggctcggcctcggccatggaagacagactcaaccccggcttcggaggagcctccacgtcgcccgacctagggcacaggcccgccacgtcaacaggaagcgccatcatcaccctaccccgagccgactcgggccacagagaacaagaccggctccgttgctcctccgacagccacgacatcacaccagcagggtgccaagatctcttcggctgccacattggcatggccttcttagagaaggttggccgcgcggggacgaggacgggacaggcgctctctcggggccgctcgcttccctcacccgcgtggacgcttgtaaccccctactgcaagcgcacccgacctgggcgcgggacgaacacgaaggccgtgggatttccacctctctcacgcccgactccggccgcctcgcttccccccttcgcgctcgcccacgcgctcgacccatctgggctggggcacgcggcacactcactcgtcggcttagggaccccccggtctcgaaacgccgacactttt

SEQ ID NO: 37407 - DNA, 126 bp, Zea mays
  Peptide Sequence Number=SeqID_80782
atggaccaggaggtgcatccaaacaggcttgccctagaatctaattctaattcagcccaattcagaccaaacaaacaggcccttaaggaatttagggatggacagcggacttctcaatgtttctga

SEQ ID NO: 37408 - DNA, 264 bp, Zea mays
  Peptide Sequence Number=SeqID_80783
atgatgcttgttgacatttttagtgttcagaagtctaaaactacttgttcctccattatctcgtatcatttaacacattaccatgtgctcctgctggagttctacaagtgggagggcaatctctcccagctgctgcagaacgtccgcaacaagcttaaccaagtcgcttcgagctggtctcgggaggagaaggaccactgcctggaggagatggagaagtcgttctcttactcaggaggcctcctccgccatatattcacatga

SEQ ID NO: 37409 - DNA, 558 bp, Zea mays
  Peptide Sequence Number=SeqID_80784
atggcgtcgaagcaaaactcagaccgcggtcgagcgcgtcggttccgcggtgtgaggccgcccgtttgcgaggcacacaaggtggaggatgacaggggcaaagccagcgtccaagttcacagggtgggaggagtcttgatgagggagaacacttcgggagacggtggtggccttggtggcggcagagcgcggtcgagaagttgctcgtgggagccggcagagggatggagcagcggccggcaaagccgcatcgaggccagcgtccggcagagctccgcgctgcggtggggggaagggagggagagggactggaaggcgttggtggaggtcagtgacctccttgtaccacacacggatcatctagagcgcgtagaggatgacggccatgctgctgagctccacgatggggttggtcgcccgtcagcgagcagtgacggcggcatggagaactccgtgggcgaggatctggtgcctcttggcggcgtcagggaggcgaatccgaatgtaactattgttgctttaagtgtttataaccaaattgacaaaaatataaaatga

SEQ ID NO: 37410 - DNA, 297 bp, Zea mays
  Peptide Sequence Number=SeqID_80785
atgccacagaggttaatgttgatttttgtgcctaaagctgtttgtgcgattgggagatgtgcaattaaattggagagagctgctgaaaggtgcatcagtgttttgctcgagctgattaagataaaagttaattatgttgttcaggaagctataattgttatcaaagacatcttcagacgctaccctaacacgtatgagtctatcattgctacgctttgtgaaagtctggatactttagatgaaccagaggctaagggtattttttgggtcgctatcaaacatgtcaagaatgagtaa

SEQ ID NO: 37411 - DNA, 1797 bp, Zea mays
  Peptide Sequence Number=SeqID_80786
atgggggagcccctcctcgcctccctctctatggagaacagcaacagccacccctgcacgctcctctccatggaccctgccggctcgcacctggcctccgccgagtcctcgggcggcggtagcgccgcgaccaatggggttggcaatggtgttgaccgggaactctttgtcattccgcggcgtgagtcggcgcaccctgttccgccggacatcaacctcccgctctctgcagatcactcaccgctgcctccgtcgtggagcctcgacacgttcgacatacttgatgtcactcttggaacacacaactacgagtctgaggttgcgcttacgcttccaaagccgaccggcaacggcaatggcagtgccgctatcggcgtcggcgcgaggaaatacgctaagagaggcgacagcatctggggcgcgtggttcttcttcaataactacttcaagcctgcacttgtggagaagtcaaaggggaagatggtgcgagacgcgtccaggaacatctcgggctttgacaagtctgatctacgtcttgatgtcttcctggtgcagcatgacatggagaacatgtacatgtgggttttcaaggagcggcccgacaatgcccttgggaagatgcagctccggagcttcatgaatgggcattccaagcatggggagccgtctttcccgttcagtgccgataagggctttgccaggtcacaccgcatgcagcgaaagcactaccgtgggctgtcaaacccgcagtgccttcatgggattgagatcgtggcctcgccaaatttgtccgcagttcctgagtctgacttgaagaggtgggctgaactgacaggcagggaacataatttttcagtaccatctgaagccagtgactttgagtcatggaggaatcttcccagcactgattttgaacttgacaggccacatccaccggccgcaaagagtgccactcatggccagaagaagggattgaatggttcaggtctcaacctttcaactccaccatcatcagacgatgggatggacctttcaccgaaatgtgccaaacgccgcaaggatttctttggccatggcgtagaggaggactgtgtgatggcgaacaattcttgttccgacagagagcaagaggcagaagctcacactggtgagccatcatggatgcacgagttcactggtgtggctaagcatgcaagcggccctgtcactgctgccaagacgatatatgaggatgaggaagggtacttaatcgtggtgagcatgcttttctccgatccacatagtgtcaaagtatcatggaggaacacgctgacgcacggcatcgtgaagataacatgcgtgagcactgcccggatgccctacattaagaaacacgacaggacgttcaagctgacggaccctttccccgagcactgccctcccggcgagtttgtgagagagatccctctggcgacacggattccagaagacgcgaagatcgaggcgtactatgacgagacaggaactgggctggaaatcatggtccccaagcaccgggttggaccagaggagcatgaagttcagatctgtctctgcttcgttgtgagaagcaaagctgtgctgcctatggcaagattgaaacaggcgtccgagtcgaggttatggatccaagagcagccaaaacaaatactgaaaagaatcgagattggcagggacacctcgatgtatgtcgtttctgatgcatgctggaaatctgctaatccggcaggcactggtggtctgcgggtgtgccaccatgaagatcagcttcgcgggtaa

SEQ ID NO: 37412 - DNA, 423 bp, Zea mays
  Peptide Sequence Number=SeqID_80787
atgggcgcaattaaggtcaaggctcagtccactcaagggacacaatctcgcctcgcccgagcccagcctcgggcaaaggcaaccgaccccggaggatttacgtctcgcccgagggccccctcaagcaacggacacaccttcggctcgcccgaggcccagtcttcgcagagaagcaaccttggccagatcgccacgccaaccgaccgtatcgcaggagcatttaatcctcggcctcggaagacggtctccgcctcgcccgacccagggctcggactcgacctcgacctcgaaagatggactccgcctcgcccgaccccagggctcggactcgacctcgacctcggaggagcctccgcctcgcccgacctagggctcggaccgaccacgtcacaggggggccatcattaccctacccctagctag

SEQ ID NO: 37413 - DNA, 351 bp, Zea mays
  Peptide Sequence Number=SeqID_80788
atgcgctacaaatcctgtctttctcaaaatgcacatttgttagtcccaaaatgtgctctccctttagaagcttctgaagaagaagatcaagaagatgagccacctcaagaggagggcaatgatcaagggggagatgcaaaagatcaagacaaggaggatgaggtagaggaagcactttcaagattcggattggttgatggcgatgcaagaggagctcaacaacttcacgaggaaatgaggaaactaagtggggtcttccgcaacaaaacaatactaacatgggggtggtggacaagggaacaattcttcgacttggtggccaaggatattcccaaagtcgaaaggttttga

SEQ ID NO: 37414 - DNA, 553 bp, Zea mays
  Peptide Sequence Number=SeqID_80789
agggcgagctgagccggagctctacctcccgtacgggccggcgggccacctcctccttcagcgttcatgggagagggcactcaccggcttagcggaaggggcggacttcgacaacgcgtggccgagcggccgcaagcgtcgtcagctccagcatgcctggttcgctggctcagctggctctggcacggcttccggtgccacctcccaccgctgggcggagtgcggctatctgcccaccatatgggcggctgttgcgccgcgcgcaccgggggaccgcccaagacgtcgcgcgctgctagggcgacgttcgtgttcttgggctgtcctgcccgtgctccggcacgacgcctccgcgcggaggtcggtgctcgcccgtccaggaggacttgagtggggatctgccggtaggcaggtggctgccgtcgtcggagctgaggtggttgtcgctgctgtaggagtgggcggcggtgagccgcttggagttcgtcgtccccgtgggcctcctgccgtgtttcttccccatttcgagcaccaagactcgcctgtcggctag

SEQ ID NO: 37415 - DNA, 321 bp, Zea mays
  Peptide Sequence Number=SeqID_80790
atggcgggcggaattgagctcgccggagctaagggaaaggggctggccggtgaggggacagggagttgtagcgtcaccaaggtgccagtgtcagaatgcctggtcccgaggttgagctgcgccaaaaaccgtgtcaaaagaatttggtttgagttcaaactttcccagaatgtgttcaagagaacacagatgatctttgagaagagaaaaaccctgagggacactggggtgtcacagccttccccccttaaaggaatctcgtcccgagattcgggccagagtcctcccggggtgaagcgaagggtgagacttaatgggtga

SEQ ID NO: 37416 - DNA, 219 bp, Zea mays
  Peptide Sequence Number=SeqID_80791
atggagcatcgtcccgggttggaaaggttgctagagactacccatctggagcttgacgggaagctattcgtcaacacgcagcaggcccctacctggcgcgccaactgtcggcgtttcgaccccagggggtccctggaccgacgatcagagaggttttggcaccctgttcatgtgatgtcgtggccgtcggaggagagctggagccctgcggaaggatag

SEQ ID NO: 37417 - DNA, 624 bp, Zea mays
  Peptide Sequence Number=SeqID_80792
atgggcgcgattaaggtcaaggctcagtccactcaagggacacgatctcgtctcgcccgagcccagccttgggcaaaggcagccgaccccagaggatttacgtctcgcccgagggccccctcaagcaacggacacaccttcggctcgcctgaggcccagtcttcgcagagaagcaaccttggccagatcgccacgccaaccgaccgtatcacaggagcatttaatggctcggacacagcctcggcctcggaagacggtctccgcatcgcccgacccagggctcggactcgacctcaacctcggaagacggactccgcctcgcccgaccccagggctcggacacaacctcggcctcagaaaacggtctccgcctcgcccgacccagggctcggactcgacctcgacctcggactccgcctcgcccgaccccagggctcggactcgacctcaacctcggaagacggactcgacctcgacctcgacctcggaggagcctccgcctcgcccgacctagggctcgaaccgaccacgtcacaggggggcatcattaccctacccctagctagctcaggctacggggaacaagaccggcgtcccatctggctcgccccggtgaacaaataa

SEQ ID NO: 37418 - DNA, 588 bp, Zea mays
  Peptide Sequence Number=SeqID_80793
atgcagcccggctgcagtcttccgccggtggtcatctacaaggatgaccaccagcctcatggtggagagaagcgagccgtgttgcggcctccccctaccctcagcttcaaggatgttcatcatcctctaggggtggaaggcgagccgagtcggggccctgccctccgcatgggctggaggacgggggcgaggacctttctgcacgcgctgaggcgtccgccgtcgccgacagataggccaggcttacaagggcggacctcaccgggctggtgtacacgtgtgtgctacctagttacaaaagggagagaaattcgacccctcagacttgctcctatggatagaacttacagagatgctccagcaccagggggaggtacttcctcagtcatagctggacggtcacccttgggtcggcgtattcccgttaccttgaagcgtccttcccagccgagggagagttgcggagcccttcttggtttggtacttgccgtaggactaggtcccgaccctgggttcccatctgcgttcgacgagggagcccttgtcttcggctgtggccatttctatatgaacctgtcgggagtctag

SEQ ID NO: 37419 - DNA, 375 bp, Zea mays
  Peptide Sequence Number=SeqID_80794
atggcagaagagcgcgagctcccaggcggtgagaccgctggagggggtgaccctgacatggatccccccggcgaacaccggcgcgcctcatccagaggctcgggaggcggaagggcgtggcagatttccccgctcgtgccccaaagcgtcgcgggcaagtctcccccaatgcgcactaaggcacccaacctatggcatgggggcccaaccctgcgtaactcgcgcaaggaacatgcaaccgccctactgttatacgcccttccatctccaccgcaactagcggtcaagaaggcgaaccgccacacaaggagcatgcaaccgccctgcggttatatgccctttcatctccactgcaaccagcggtcaagaaggtga

SEQ ID NO: 37420 - DNA, 744 bp, Zea mays
  Peptide Sequence Number=SeqID_80795
atggcgggcgtcggctccgcgctgcgtcggctctacctctccgtctacaactgggtcgtcttcttcggatgggcgcaggtgctgtactacgcggtcctgacgctgcgtttgagcgggcacaaggccgtctatgccgccgtcgagaggccgctgcagttcgcgcagacagccgccatcatggagataaactctgaaatttctagtgctatagttcgagtctgtgttttacctacatggagattggttggtgaggtctccggtctctgcaactcttccacagattggatccagacccagtcacaccttcttgttactaccctggtcataagctggtctatcactgagatcatcagatactctttctttggaacgaaggaggcatttggctttgcgccttcctggttattatggcttaggtacagcacctttatgttgttgtatcctactggtatctctagtgaagttggtctgatctacattgccttgccttacatgaaggcatcggagaaatactgtattaggatgcccaacaaatggaacttctcatacgattacttctattcatctgtccttgccctcctgatctatgttccaggattatccttgatgatgatgtggttttttttaaagaataacagtaagcttctggccagagctgttggcgagatcttattggatcaggtcccgttaactcttgtggcaatcatgcatgctgtgaagttcgttgcggtgatgttggtgtaa

SEQ ID NO: 37421 - DNA, 237 bp, Zea mays
  Peptide Sequence Number=SeqID_80796
atggggaagcgcgatttcgagcgcctgcaccacgtggcgttcttcgaggccatggccacggagctccccgacgaatacgcctcccaggaggtcaaccacctcaccctctcctacttcgccgtcggcggcctctcccttcttcgggagctcgaccgggagcagacttcagatgataggccccttagtatgggagtacctgggataagaaggaagaagaggagcatccaaagctcgtga

SEQ ID NO: 37422 - DNA, 477 bp, Zea mays
  Peptide Sequence Number=SeqID_80797
atggcccccttgtggcatggtcggttcgagcccaaggtcgggcgaggcggtgattccttcgaggtcgaggctgagtccgagctcgggggtcgggcgaggcggagaccgttgtccgaggtcgaggctgagtccgagcccgggggtcgggcgaggcggagaccgtcgtccgaggtcgaggttgagtccgagccctggggtcgggtgaggcggagaccatcttccgaggtcgaggtagagtccgagccctggggtcgggcgaggcggagaccgtcgtccgaggtcgaggttgagtccgagccctggggtagggcgaggcggagaccgtcttccgaggtcgaggtagagtctgaaccctggggtcggcctcaccctggcaggtggcacagcagtcggagcagcgcaggcggcgctgttttcctgtcaggtcagtcagtggaggggcgaagtgactgcggtcacttcggccttgtcgtctag

SEQ ID NO: 37423 - DNA, 403 bp, Zea mays
  Peptide Sequence Number=SeqID_80798
gctggcccctcggaagggttcgacagccgcctcagagcactcgggctccacgcccactactgatcaggggttcgcaggctggcctctcgaagggttcgacagccgccccagaacacgcagagcgagggatgactctgggtacgtccgatacatggccgaggctcgggctacgctcccgagaaaggcgacgaaggggcatatgaaaaaagccaagtcagcccttgaccgtcctctcgccctgtgcagaggctcgggggctgctctcgcaaacccggctccggccaaaccgttgacagcgtcaacataccagcccgagaactcgaaacctgactatgcacccgggcaacgaccagttcgcatgagggaacaaccagaccggccgaggcatcatgaaaggcactaa

SEQ ID NO: 37424 - DNA, 165 bp, Zea mays
  Peptide Sequence Number=SeqID_80799
atgtcgagatattacgccaagaaggagatggtgaccgatgacaagcccgctacaagccacgggaaggctccatcgggagagtcccgcaacaaagggaaggagaaggaatcctcttccctcaagtcgcatcggagtggcgacaagaaaaagaagatgaggaaagtg

SEQ ID NO: 37425 - DNA, 489 bp, Zea mays
  Peptide Sequence Number=SeqID_80800
atggcagtcgtcagcccgaccgccggcggcggaatcgacgacgtcttcctgaaagggaaatgtgtccttgggccatttctaagaaaaatccaattgaaaatgccttggctcgagcagccaaaatatgctcagtctaggagcaccggactgtccggtggtgcaccggacagtgtccggtggtgcaccggacagtgtccggtgcgccaggctggctctggcaaaaaggctgctctcgggacttcgacggcggtgtacggctataattcaccggactgtccggtggtgcaccggactgtccggtggtgcaccggactgtccggtgggcggttcacaggcgaactcgtcgctctcgggaattcatcggcgacgtacggctataattcaccggactatccgatgtgcaccggactgtccggtgagccaacggtcggccgggccaacggtcggccgcgcaatctgcgcgggacacgtggccgagccaacggctag

SEQ ID NO: 37426 - DNA, 495 bp, Zea mays
  Peptide Sequence Number=SeqID_80801
atggacagcgaggggcgagctgcaaagggcgtccatgggagagggttggggtttcctgcgcttgaagagtccctgcacgtgagtagagagggagggcatgagcgccgtggggaaggagaagcaggggctcgcgtccagggagctgaggaacagggagctcgcgccaggaggaggataaggagggcgctcggctgctcggctgccatgggagggggcgagcagagctggtgctcggccatggaaatgcgcgtccgcgcctggacagtagagggaaaggagggcgctgtccctgccgccaagcctgaagggggcgcgctagagaggatagtctgggcactgggaggtggaggcgccatggctgctggcttgctccctgcgcgctggcgagaaggaagggaggaagctccctgcgcaaaggaagaagaagacagggaagtcggctggagaagagagaagagggttcaacaaaattttcttgtgaactatgctacttaa

SEQ ID NO: 37427 - DNA, 153 bp, Zea mays
  Peptide Sequence Number=SeqID_80802
ggagacatcgagcagtccgagattcctgagtgtgttgttggatacctccctgagcaacaacctgatgatgatgaggaggatggttatgattatgcttatggtaatggtaatggtaaagaagaaggcgtcaaggcggatctccaggagttctag

SEQ ID NO: 37428 - DNA, 141 bp, Zea mays
  Peptide Sequence Number=SeqID_80803
atgacccagctcttcgagttctacgaagctgaagaccctgagcatctgtttgatgatgatgaggaggatggttatgattatgcttatggtaatggtaatggtaaagaagaaggcgtcaaggcggatctccaggtgttctag

SEQ ID NO: 37429 - DNA, 219 bp, Zea mays
  Peptide Sequence Number=SeqID_80804
atgaggggtaaccccgggtgtgcaatcgggctccaaacaccgatagctggcgcgccagatgaagaaggaattctgcaccgcatagcggatccatcagtgataaagctttccttggaaatctccgagaaagccggaacaaggcggcaaatagcggaaccccctgcgccccaggcgaaaactaccttccgcaagtcaagagtcgagaattcactcgcctga

SEQ ID NO: 37430 - DNA, 342 bp, Zea mays
  Peptide Sequence Number=SeqID_80805
atgaacttagaagaaatggaacctgaacttcgaccttactatgagaggaagaagaaagagctcggggacggcggcgcttcgggctcggggaccgtgacagcggcgcttgggctcggggactcggcgctcgggctcggggacggcggcgctcgggctcggggaaggggacgacgacgcttgggctcagggacggcggcgcactcggcgctcgggctcggggacggcggcgctcgggctcgtgctcggggacggggacacgacggcagcctggcggcgcaactgtgtcagctcgggcgggaagagttagggttcctgccgaccaacaagccttttatattgtaa

SEQ ID NO: 37431 - DNA, 141 bp, Zea mays
  Peptide Sequence Number=SeqID_80806
atggaaattgaaataaggattaaggtgtggtaccgttctttggaggacatggttgctggagtgacttggccgtcctccttgccaccgggttggacagtcgagtgggaccctacctcggctgaggaggagcatgaggagtga

SEQ ID NO: 37432 - DNA, 1113 bp, Zea mays
  Peptide Sequence Number=SeqID_80807
atggggagcacccacgttgctttcgtcttgctgctgttggaggagcgcaacttcgtggaggttggcacctttcagccatcgttcagcttcaaggattttcatcaggcagcctggccgcatccctcaccaatggtcacacaggagggtgaccatcggttcgatggtggggagaagctagccgggctgcggcctctgccccgccctcagcttcaaggatcttcatcatccttgctggggaggagggcgaggcgagctagggcctgccttcgcgtgggctggcgtcccgttttcccctccggcatctgggggtggaaaccatcctccagctctgcgaggaggcgtcctccagccatgcgggggaaggcgaactgctgctgcctagccagggtgcagcattccgtcctctgcttgagcgactatggccggtcgcaccggggggtctcacaacacgtcgtacgccgcgagggcagtactcgtgttctgggacggtcccgttcttgttttcgtggcaaggacgggagtgaggacctgtcggtgcgctttggggcggctggcgctcgcaggtacggtgttggtgggcaggtggacgccgccgtcggtgctgatgtggtggcagccggagaaggtttctccaccgacgagatcgtcggcgtcacctgcgctccgggcctccggctctttggctttaatggctggttctcgtcccccgtgaggggacacgaacgaaagccttccagcggtagcgtccgccctggggccatcgctgctgttgcagaggtcgccggcaagccacccggaaggcgtaggagtcgctcagctcggtcggccttgccactcaaggcttctcttgctcagttaaggaaacctcggctgctctgcgatgagctggagccggaggcagcggcatcagcatggacagaggcggagtcggctcgaaaagggggcttcgtcggcccagaagcaggtggcttcctaggccgaggaggcgcgttgccgacatcctccttcgaggtggagatccttccgcccgtgtcaccgtccgaggccaggccaaatcccgccgaaggtggaaacaacgccaagggtgctgttgttccctctgttgatgtctga

SEQ ID NO: 37433 - DNA, 444 bp, Zea mays
  Peptide Sequence Number=SeqID_80808
atgggcgattcggtggtgaaaatttccctcgcctcgctggtcggtttgctgaccatagccgtctatctggtgctggtgccattgatggtcttcttcctgctgaaagacaaagagcagatgctgaacgccgttcgccgggtgctgccgcgtaaccgtgggctggcaggacaggtgtggaaggagatgaatcaacaaatcaccaactatatccgcggcaaagtgctggagatgatcgtggtggggatcgccacctggctggggttcttgctcttcgggctgaactattcgctgctgctggcagtgctggtcggcttctcggttcttattccgtacattggcgcatttgtggtgaccattccggtggttggcgtggcgctattccagtttggcgcaggcgctggacggcaacctgttagtgccggtgttgttctccgaagcggttaa

SEQ ID NO: 37434 - DNA, 531 bp, Zea mays
  Peptide Sequence Number=SeqID_80809
atgtcggagagcagccccgtaaggcaccgcgcctccgtctacggcggcacgagcgcacctcctgctacttcaagcgtcggcagaaagagaggaatggtaagcgaggaggaagaggtagtggtggcgatcgccatggatggagtgggagactgggagctcgcgtggggttttgggcggaggccgaagggggactgggggatcacatattcaaccccccctctaggtgctctcagtgtgaccaatgtgaagctcaacaatgacaaggagttccaagggaagtccttgttcaagccgaggaacaactccgctacgaacccacaactgctagtgtatctcgaggcgaacagcttcgatgcaagtcgtggctgcatcatgttgcgctgcgctgaggtgactagcaaggtggtgctctacaagagcagggacatcatgggtcccggcatgaatgctcttgcggtgggggcaccgagcgactcgcacacggagctctatgaagatggagagaatagagacactaaaagaataaggtga

SEQ ID NO: 37435 - DNA, 306 bp, Zea mays
  Peptide Sequence Number=SeqID_80810
atgcaggtggcgtgcaaccgcaccgcgagggcgcaccccttcggcttcgtcgcattcagcatggaggcccaagcccacacgtcatgtaaccggcgcgccggttactacgtgcaagaaaccgcaccgccacttgtgccaatgtcgcgccttctcgactgcggaaccggtgccgcaactcgaggcaaccctgctcatggcccaacagtgccaatcgagcacaacgatcacggatcaggaccgggaaaggggatatttcgaaagggatccttctcagcgaaggaagcgggctctgagccctcctactga

SEQ ID NO: 37436 - DNA, 282 bp, Zea mays
  Peptide Sequence Number=SeqID_80811
atggctaagtacaaccgaagcaacccggcagtgaagcggatcctgcaggaggttaaggagatgcagtccaacccctcacccgacttcatggccctccccctcgaggaagacatcttcgagtggcaatttgctatccttggcccgagagacagcgagtttgagggtggaatctatcatggcaggatccagcttccctcggattatccattcaagccgccgtccttcatgctactcacggttacggccaagttcggtaagagtgagagttttacagtcaagtaa

SEQ ID NO: 37437 - DNA, 726 bp, Zea mays
  Peptide Sequence Number=SeqID_80812
atggattcttggttgctagcccagagggacccagcagctgtgccactcttcaacaccaggactcaggagtcattctttagggtgcatcagcttttggatctccctgtgtttctgtcagtcgtcagtgccgagtcagagggtcacctatcctatctgccaggttttctttctcttctgacctctggtggcagatacattgaggagtggtttggcttatatcgcccagctcctaaggacacagttccagcgccagctccagtaccagatctcagggttgaggatgaggccatcagacagttcgaggctcagggtgccgttgcagatacttcttccgatgatgatgaggacctggggattccgccaccgcctcttgtgccacctcgctcccataatcatgaggtcgttagctctagtgttgctcttgctgcccctctagctattgaccctgccttggctgctattcttcagtcgcttactcagcagcaggctcatatggtcgcagagcaggcccgtcaggcaacagagcaggccagacaggccgctatccagcaacagttgtccaagcggatgctttcgatgtttcagaccattcaggatcgacaggacaccctacaacagcagctcctagcagacagggtcaagcaccgggcattcatgacacatattctccagcataccaacgttcagcttccaccaatgcagtctgctcctcctctggctctttag

SEQ ID NO: 37438 - DNA, 708 bp, Zea mays
  Peptide Sequence Number=SeqID_80813
atgttccagttacagatgtcaaaagaatatgctgagcagcgccaacagtacgaggataggttgaacatgcttcgtcaggaggccaaagctgagattgatagtttggagaagagcattgatggccaggcaggacccagctcatcatttgatgatatccagttcccggcggagtctgatgatgatatcaacaatttgacccaaccaatccgactttctcaagacgaagtctcaataggccaggctgatttcagtgagtttcaaaggatgatattcaagcgcctaggtgatagagtgctgaagaagcctagggagtacatatccccgttcaagatccctcgtaatcgacctgagatactcctggccaaggctgttgcacttaggcggaagatcgcatctgatcctgagctgaaaggccaggctgatttcagtgagtttcaaaggatgatattcaagcgcctaggtgatagagtgctgaagaagcctagggagtacatatccccgttcaagatccctcgtaatcgacctgagatactcctggccaaggctgttgcacttaggcggaagatcgcatctgatcctgagctgaaaagattgcgatatgaacgaaggctttatgccgaaggtccgaaaaaacaccttccctttgctagaatagcaacattcaatgacaagtggggtctttcaactttcaacgcatcaagcgtataa

SEQ ID NO: 37439 - DNA, 403 bp, Zea mays
  Peptide Sequence Number=SeqID_80814
atggttacccgccaccagcgtatcagtgctgatcgccagggtctgtttctcggggatattgagaagtgcgcaatcgtcgccgatgcccagttcgacatcaagacgagaacttcttacacggtcaaaataacgggcaatcagggagaactcgccacatgccatacgttatgcctcagcagggcgaatcacaggtgctgctttatcgagtacgccgttgacgaacttatggctgtcttctgcgccgaacgatttcgccagttcgatcgcttcgttaatggccactttgtatggcacatcgctacgtttagacagttcgtacagcgcaatgcgcagtactgctttttctacctgtcccagttcttccagcaagcgggacaggtatggcttcatcagttcgtcgaag

SEQ ID NO: 37440 - DNA, 402 bp, Zea mays
  Peptide Sequence Number=SeqID_80815
atgggctcgctggcagcgattccgttctggtatctgatgacctttttgccctggcagctctactcgctggtggtgatgctggggatctgtatcggcgtctatctttgtcatcaaacggcgaaagacatgggtgtgcacgatcatggcagcattgtctgggacgaatttattggtatgtggatcacgctcatggcgctgccgaccaatgactggcagtgggttgccgccgggtttgtgattttccgtattctggatatgtggaagccgtggccgatccgctggtttgatcgcaatgtgcatggcggcatggggatcatgatcgacgatattgtcgccggggtgatttccgcaggcatcctgtattttatcggtcatcactggccgctgggtattctgtcgtag

SEQ ID NO: 37441 - DNA, 327 bp, Zea mays
  Peptide Sequence Number=SeqID_80816
atggcccgcacccgcgcctataaagcccccagggacttcgaccgtacccctctgcacgcgcttgacctcaccgaagcccaaacccaccagcgtttgcccgtgcacggcgtatccgtggccgcccgatccccctaccaccatagaccggccaacagaacccttcccaaccccgtccaaccctcggagaaggctgagcacacctcggtgaagctccccgagcaaggaatcggagtttgcttcgctggagaggccagtccatggtcaccggactccacccgaccaccgcctctacgtcaccctggagagctcactgtgccattggattga

SEQ ID NO: 37442 - DNA, 420 bp, Zea mays
  Peptide Sequence Number=SeqID_80817
atgggggacccagttcatagccaccgctctcatgcacttcccctaccctctcactggatcgcagggcccactgaacaaccactcaaccgtgtcggcgcgactaggttaccaatgcacggcgactacctcctgcctttatactccagccgcacctgcctgccttccctgttcacctcacccaagcccaaccaagccctagcaccggggcggagggagttgtgttcaccgcgaatgcctaccgcgtccaccatcgacaaacggggatccgtgcttgcgctcgggagccgcaagggcgttgctggtgaagtattcgcgggtgattgggaagaatcgaccacagaggcctctagaattcgtcgccggagattgtcttccgccgcgcaccatggagagctatggcgattctccgaatctcggtaa

SEQ ID NO: 37443 - DNA, 279 bp, Zea mays
  Peptide Sequence Number=SeqID_80818
atggccactcaaattcaagagcttgaggatcagataggggccagggagaacaccattgaggttctggaagatcagctcctgaccacgcagcaacaaattgaggaagccaaccagcatttggatatgcaccatcacaaaattcaagacatggaggcagaaggggtcgatgaggatatcgacatcgaggaaggacaggagccggagcctgcatccagcttggacactgctggctcagggagaccaccttcctgttcgaacttgctctcctgggcaggttga

SEQ ID NO: 37444 - DNA, 177 bp, Zea mays
  Peptide Sequence Number=SeqID_80819
atgcagttggtggatgacctgaagaatgatggacatgaccagtggatgctcgccaagcgaggccgaagtgaccgcattcacttcgtcgctccactgaccgacctgacaggaatacagcgccgcctgccctgctccgactgccgtgccactcgccagagtgaggtcaacagcggctaa

SEQ ID NO: 37445 - DNA, 1757 bp, Zea mays
  Peptide Sequence Number=SeqID_80820
atgagggacgcgggaccagtagacttcgtcgggggaccagttcgactgagtcatctggtgtcgaagacgtcgctagatggtggagacgctgccctcgttcgaaatggtcccgtgggggtttttgaggatatgcaacagttggggtattttgggaacggcattgggcgtgtcctaggggcggaagaggttcccgagcccgatggcgaattagtcgtgtttgaggcattcttcaccgtcggccttcgcctacctgcacattgtttcgtggcggaggtcctgcagagatttgaggtccagctggtgcgaagtccggccttctctttggatctgcacggccgagacccggccgcgttcgtttgtgaagtggaggacggggcaatgaggattgtggggcgccctcgggggaaggatgtcttcgcccaagctccgggagtcttcggcgcgaatgttgaagtgatggagaaggatcgtcatgacgcggcgtggaagcaccgggcggtcactagggtcggggaccctttccgcgaggcgaagaaggcgcccagcaagtcttcggcgggtgcgagggctactgctattggcgtgggcaagtcgcctcggccgagcccgcgaaggagcaaaggccgccgtcgccgggtcagatgcggggcagctggctgttgtcccgactccggtggtagccacttcgccaacggtggcggttgggaccaagggctctgtgtcccagcagctgaggcatgcgtcgcagtagctgaagcatgcggccgcctttgccgaccatgttgcgtcgggtgccttgacttcggagttgcacaagccgaggccaaacttgcgtgggtggaggccagtctcgcccgccaacgcgccgaggagctagaagcgaggctcagcggcctgcacaaccgcgtggacaaaactgaggcctcgacgcgtgtggaggaggagctgggggtactcccatcaatcgtgatgggcctcatgtcctttgcctccctcgtcacctgcgagggggccgtgaatgctttgtcccgtgaggggtgcgggcacttcgaggtcttcaaccagtcggacgaaggcttcgagcacaaaatcttccaagtagaggacccggtgctaaagcggtcggcggggtcgctcttcgataggatgtggggccctcacggtcgagagacgatggcgcatcacgaagaggttgaggatcttgatgatctggacagcacgctgcccgaggcatcgggggtggagctagcgtcgccatccgatgcgggcgagggcccctcggcgatccccgcgccgactggagctgatgaagaccccgcgccagcccctgtgctgacgggtgaggacgcctcgaaggcggttccgacgtttgggccttctcaagcaaccgctgctggcaatattgattttgtggcggcctcaaccgtagtgcctgccgatgatagtttgtttggctctgtgtctgagtgttttgagtctgatggtgaatatgggagttcgtttccttggacggaggagtcctcggatgaaggtttggattattttgttgtgttggatgtggctgcggcggagacttcgccgagtatggagggtgccggggatcttgctaaccgggttggtaaacgagaattgttgtcctcgccgattggggcgagcaaaggcgagggggatcttcggaatctttttgagggtgaggaattgaggataatgctgttcaattacagggagatgggtatcatcccgaaggttgagctgat

SEQ ID NO: 37446 - DNA, 534 bp, Zea mays
  Peptide Sequence Number=SeqID_80821
atggccataatctcaaagatttggggccaatccgcgcttgaactcgacctctctctgcgctgcctcatgctcgacgctgagtctttgggaaccaagctaatcagaagttcagcttaccacccacagactgatggtcagacggaaaggtcagccaaacctgctagcctccacacacaaacgacaaaggaacctgagaggaagagatccctcaacgggatcatggccataatctcaaagatttggggccaatccgcgcttgaactcgacctctctctgcgctgcctcgtgctcgacgttgagtctttgggaaccaagctaacagaagttcagcttaccacccacagactgatggtcagatggaaaggatgggtcgagtgcgagggcaagcgcgaaggggggagagcgaggcggccggagaccggcgtgagagaggtgggaatcccgcggccttcgtgttcgtcccacgcccaggtcgggcgtaaggagaggatccaggtgtacaatgggaggcgtagcagagtgctacgtgtctag

SEQ ID NO: 37447 - DNA, 594 bp, Zea mays
  Peptide Sequence Number=SeqID_80822
atggagcctggtggagggacagatgtcggagcagttgagtccttgctgacgtcctcttgcttccgtaagggggctgagagccgccgtcgtcacagagctgggcgatgtggaagctcctccgaagccgaggtcgagtctgtcttccgtggccgaggtcgagtccgagccctaggtcgggcggagcggagttcgtcgtcttctggggctgagcccgagttcgagccctgggtcgggcggagcggagttcatcgtcttctggggctgagcccgagtccgagccctgggtcggctggagcggagttcgccgtcttccgggacttagcccgagtccgagccctgggtcgggcggagcggagttcgtcgtcttctggggctgagcccgagtccgagccctgggtcgggcggagcggagttcgtcgtcttccgggacttagcctgagtccgagccctgggtcgggcggagcagatcttcctatggcgcctttggccgggcctgactgcctgtcagtctcactctgtcaagtggcaccgcagtcggagtggcgctggcggcgctgtccttctgtcaggccggtcagtggagcggtgaagtga

SEQ ID NO: 37448 - DNA, 300 bp, Zea mays
  Peptide Sequence Number=SeqID_80823
atgccgccctctccgagtggcggtagtgcagcggcgccgagcgccgccgctatagcaacgggcgctaccacatcctctgttagggttagccgtgctggtgggccgggccaagttaattatgagctgggtcattcgaagatgtcatggcgtagggtgaaagagatggaatccttgggattttttcctattggttgttgtcaggtcgtcggggcagagactttcctgaggccgaatggtgaagtcttggttttgagagcttattccttgcttgtcttcgccttctctgccacgattttctag

SEQ ID NO: 37449 - DNA, 210 bp, Zea mays
  Peptide Sequence Number=SeqID_80824
atggataagatcaagaggattgaggtacctaaagccaaggtggcgaagaggttcttgcaagaggttaaggttgatcaagctgagaagagacatgaggaagtgtcattttggtccttgtttgaggtgaaacatgaaaactatggagaagatgagaaagtcataggaaggtgctcaagaaagttcaagttgaatggaaagaagaaggactaa

SEQ ID NO: 37450 - DNA, 1167 bp, Zea mays
  Peptide Sequence Number=SeqID_80825
atggacagagcagcccgtgcagcggcagcagcagcagcagtcgctgcgcaggccgagcttggagatcagccacagactccgtcagatcagattgtgtaccgtgttcgtcgcctcgcctcccgacctcgctcctccactcacaccactgcctccactccaccacccactctgcctgctcccgtcacccctgttgcgccatccaccaccacagccataccctctacctccactacaccagcttccactgctcctcctcccgctcccgcttcagctcctcctatccctccacctcgattccgagagcgcgatgagactgaggtacgaccacttgctgcggatcccagactttttgaccttcagcgtgctacagcggcacgagtacgtaggttcagatacgtacccgtggagtcttggttaccggctcagagggaccctgctgcagttgaccttttcagcaccaggattcaggaatccttcttcagggcacagatgtctgcacagattgctctgcgagtgcaccggcttttggatcttccagcttttctgcttgccgtcgatgctgactctgaggtgcacctcacatatctgcctagccttctgactcttttgactaccagcggcagattcgccagctctttggatttcacgagtcgtcgactcgacttcacagcttatgatacggcacctctgaccctcctcgtcgccctcacggcgctgattcggcctccacagtttcagggcacacttgaggcctcacgccttgtctttgggtcctaccgtcctgtgcctgaggctcctgtgccagcttctgctccagtttttgactctcaggtcgaggatgctactcctaatcagttcgaagctcaggatgcatcagttgatgatgatgatgatgatgattttgggattcctcctccgcctccgcctcctatgcctccacgctcacatgatcatgaggctgggagttctagtgctacccctgctgcccctcgtgctattgaccccgcacttgcttcgattcttcagactctcactcagcagcaggctcacttggcagccgagcagccccgccaggcagcagcccatcagcagttatccgagaggatgctctcgatgtttcagaccatacaggacagacaggattcccttcagcagcagcttctctag

SEQ ID NO: 37451 - DNA, 321 bp, Zea mays
  Peptide Sequence Number=SeqID_80826
atgcccgaccaaaatgagccccacagcccagagtctagtggtatgccaccgagcgcaatggataaaattagggaagagatgactggactatttcgagatacgctcgaatcctcgttggagcacccgcgcaagggtaacactcccccttggtcctcgcaagaaccaagtgctcactacgagatgatcctttgccactccggcgcggtggatccctcgagaccgcttacaaacttgagtcgggtcaccaacaagatcttcacggtgatcaccgagctcccaacgccaccaagccgtctaggtgatgccgatcaccaagagtaa

SEQ ID NO: 37452 - DNA, 1251 bp, Zea mays
  Peptide Sequence Number=SeqID_80827
atgtcttcttcctcccttatgcgtcgtgtctttccatctctcaagcccccggatggggggtatccgccgcctttccgcctcctcgttggaggaacgcaactccatgggagttggtacctctcagccatcgttcggcttcaaggattttcatcacgcagcctggttgctccctcccgccggtggtcacccaagacggtgacctccagctcctggatggggagaggcaaaccaggctgtggtcccgccctcagcatcgggtgtgttcgtcatcctcgctggggcgggggtcgaggcgagccggggctctacctcatgtgcgggtcggcgaaccacctcctcttccagcttctggtggtggcaatcgccctcccgtgctacgacggagtcatcctccagtcatgccggggaaggcgaactgttgctgtccagctaggatgcaacattccgtcttccccctcgcattcgcggcgaggacggcagcgaggatctaccggagcgcttgggagcggcccgctctttggctttgatggcctgttcgcgtcccttgagcgggaccccgaacaagagccttccggtggccgcgttcacccggggccacggctgctgctgcagaggtcgctggcgagcctcccggcgttcgtcaccccgcaggcccgaggtcactcgtacccacggggacggaaccggagttccttttgtgatggcactttgaatgccagtgttttttgttcattgtggctgccggggcctgaacatccgacgccaaagtcgatcagccgaggcctcggatcgggctggcgcccttggaagccggttggccgaggccccaggggtaaccggccgagccgcctgctcgggccggattcccggaggagtccctggaccacgtcgccgtccgaggctgggtcggactttgctgaagacgtcgtcgatgccgagggtgctatggctcccttcagcgtgaagacccgagcctgcaggatcagatcgtcttgtagtgtgtgccttctgcggccgccgaggccagaaaaacacaccctcgccgcgcttgcgaagctgcgtcttttttcctcttgtttcgagcatctggactctgtcggtaacagggatgtttgtgtgagcgagagttgcttctcgcggaaaggacgagtgaggtatccgtatcccagaggcgtgggaatccctcggctcggtcggccttgccgtttacgcgtactttcacccgttcatgaggccctgtccccgacttag

SEQ ID NO: 37453 - DNA, 354 bp, Zea mays
  Peptide Sequence Number=SeqID_80828
atgccgagcagtcggtcgacgtcgtcccgccactgcttcatggcccctggtgaggccgtggagcttggagggtgtcgcatcaactccctggctgctgacaacgctcctggagccgccctctacgcgtgcacagcagcagtgcctggcactgggcgattgggaacctgtggcgtggaagaaacatcttcttcctccaccaggaaattctttgatgtctcggcgcggtgctccacgatttgcaccatcatgctgagcgaggatgcaagcaaaaacctaatgcctagccccctacctggcgcgccaaatgtcggagagggaattctccggccgggtggcggagtgcacccgccctaa

SEQ ID NO: 37454 - DNA, 645 bp, Zea mays
  Peptide Sequence Number=SeqID_80829
atggcccaacctccgacgtgggggcctaggcccacatgtcacgcatctggcgtgccggttcctgagtacgaagaaggcgaaccgtcgtgtgaagagtgcacccccgcctatggtagtgcacctcttcgcctccgccaaaaccaacagcccagtccctggcacaagggcccgggcccaccagtcatcctccttgggcgtcggttcctgggtgcagagaagtcacaccgccgctcgcgtcagtaccacgcctcctcggggccgccgcagaagactgagaaggtgaattttcaaaaccaatacaatggtatcgaggcaccccgaacatggcccaacgaaaaccatcaagtacggaagtcacgggtgatgtgccgcctcagcatttattgtgacctgtccactcagctggcaggcggcgtgcctgtccaggccattgccaaacagtacgcccatgctgcaaggtgcactgtgtccatcatcacttatgcgttgccagggaagcttaccatgcacgccaataccacgcagatcgcggatgtcagggtgcaagaggattgctccagcaaactccaagtattaaatccattatattcctgggcccacatgtcggggctcagcacccttatacgcgccccccttgggctataa

SEQ ID NO: 37455 - DNA, 1611 bp, Zea mays
  Peptide Sequence Number=SeqID_80830
atggactactctgcaccagcagggtcgcgttggaagctagctccgggcagcctcaccagcggtggcgaccacctctactccgagcggccgcctctgcaccaacggctcaccagcaacggtggccaccttcgccctggtggcttgccagcaacggcggccatcacaatgcacacgaagaggtcctcgctcccgtcctcctatgggggtgaggaaaagaccatccaagaacgcggtcgccacctccacggcgtacgacgtcttgtacgaccccccggacggcgtcggaatagtgcggccggcggcgcggaggacaccatggatgtggcggacctgcgcacggcgcgaccgtcgcccgtgcggtggacggatagccacgccccgatcagcggcaggaggcagcgtcggaggcgccaccaaagccatcaaagccaaagagatggagccgcagcacggctcgcttcccaccccaagaaactggggcgcgcgtgggatggagccgtggctcagcccgctgcccacctccacgaggctggcccctccaacagctgcacgaagaaagatgggattgacgggaccaactcgctggagagtttggaaacaaagaacacaagctcttcagcagaaaggctgggcacgctcgagatgaagtcacaaggccatggtaaactatggcgacacaaagcaggaaccttgaaggcaaaggggcgcagagagctcgaaggcgaaagggcgccgcgagtgggagagaagcaagacatggtagctactcaaagggtgaacccctttttaaaggcagatttccccgctcgtgccccgaagcatcatgggcaagaaaagtcacagcgccactcgtgccaataccgcgcctcctcgaggccgtcacagaagactgagaagataaattctcaaaaccaatgcagcaactcaaggcaccccgcgcatggcccaacaaagacattaagtgcagaggtcacaggccagtcagccgcgggggcaggcgtggtagtcggcgtgaccatgggcgagccggcagtaactgcatcaacgagcgcgcaggagcagcgagccaatcgccagtcaaactttggccccacctgcaggctcgcatcctcccctgaggcgggcccggggccactgtcggacgtatcagttgaaccggacctccgtgagggagcaccggacccctgtacgcccaacaaggacccccgattacggcccgagactcccaagcggagacccgatgcggccacgtggctcgttgcccgtgacataagccagcgggtggagcctgacgtaaggcccctagaccgcgcggactctgcatatattgcggaaaggacgcgccgcctgtccaccctgctgacaggcgatgtgccccctcaacatttattacgtcctgtccactccgccggcaggcggcgccagggccaccctgtagacggcgcacctgtccagtccactgtggaaacagtgcgcccgtgctgcgcggtgcactgtactcatcatcccttatacgagaagcttccccctgcacgccaaggctacgcagatctcggggcgggtgcactccgccacccggccggagaattccctctccgacaaatagcttga

SEQ ID NO: 37456 - DNA, 792 bp, Zea mays
  Peptide Sequence Number=SeqID_80831
atggctgttgtcggtaccctgaatcagggataccccttactacagtatgaaggcacggtgcccgtacgacaatctctagtcacgcggatgcaatcagttggaccggacctccacgaggaagcactagacccctgtacgcacagcccggaccccgaatacggtccgagactcccaagtaagcgtgccgggtcccttggatggggtccggatccctccgagcttaatcctatgcgcctgcgctccccactcaagcggagacccgatgctgccacgtggcttgttgcctgtgacgtgatgtgccacctcagcatttattgtgacctgtccactcagctggcaggcggcgtgcctgtccagttcattgccaaacagtacgcccgtgctgcaaggtgcattgtgttcgtcatcacttatgcgttgccagggaagcttcccctgcacgccaataccacacagatcgcggatgtcagggtgcaagaatattgctccagcaaactccaaggggatttcgtggtggaggaagaagctgtgtcctccgtgccacgagtatccaacctccctgtgtctggggctgctgctagagttgctgtgccaccctccaagctccacggcctcgtcaggggccatgaagcagtgaccgacgacctccgggcagagctcaaccacgggcgtgcgggagaggacgcccggatctctttagagagggcgcgcaagcgccggcaaaacatcgagggtcgcaacctcgatcaagacttcgctgcggtagcaccgcaggccccaatgggcacctag

SEQ ID NO: 37457 - DNA, 936 bp, Zea mays
  Peptide Sequence Number=SeqID_80832
atggtgtgccgcctacttggatgggatacgtcggcgtttggcggaaggatttgtgccggcaccatcctccccggtgaatttgccgccagagagttcgtgctctttttgtcttcaacctccccagcaggttggtgctaccgatcttgcctttcctctggtggaggtgcacgacctcgtgggggcggcgctcttccaccggtgcttggcttcaaggatgttcatcagccttgcagtggtggagagcgagctgagccacggcttcgtctttcacatgagctggtgacccgcctcttcctccagcattcggaggaaaaggatgatcaccagccttgtgaaggttggagaggtggtcgcctccgctggcgagccgctcggagcagaggtggccgccggcgctggcgagccatcggtgcagaggtggtcgccgccgctgatgagccgctcggagcagaggtggtcgccgccgctggcgagccgctcggagctagctacccacgcgaccctactggtgtggaggtagttcatacctgtagagtagagatggagctaggacttcgcttgaaggcggatataatacttttgctttttgtaaggctcgatttgtcgaggctgcagaccagcatacctaagaaagagttagcaatggcccccaggaggctcacggtacgggaccaagctaagcggctacacggctccggaccaccccaggagacaagctttcgggtacgggaccaggctaagcggccacacaggctctggaccaccccatggaatgggctctcgttctttagaaccggcccccaggctatcgggccctcctgcttttgcagagaggtcctaaactaccaacaggccggacttatgagggcggacctcaccggggctggtgtacacagatgctccagtggtcaggaagaggtactccttcagtcgtag

SEQ ID NO: 37458 - DNA, 1050 bp, Zea mays
  Peptide Sequence Number=SeqID_80833
atggacaagattgagctgaaattttacaaaaaccttgacaaatgtgttttcaagggatccctggccggttcaacaggcccaacaagtgcaacccctgctccagtgccaaatgccaacaacgaggaggagcagttcagttatcaactttctggtctcgaggacctgccctctgatgattctgtgggtcttttcaacgacaacattatccctcaagaggttcacttccctcaggaggaagccccaaataatgaagatgttgtgcttgctctaccagttttccccccagcggatttgattttggagggaaacaacgatcagggggaggagaatatgaatgtggaagaaaacatcaatgtgggctgcatgcaacacttcgagcagcccattcatgatcctgcttatgaagattacctggccaggaaacacttctcatcttgggctgaaatgttccccaccaactcagaatttattcgtgttccaaaaatgtgggctgctttctttatgggcctgcttctgaggtcatattcttttgagtggaccaagaaatttttgttgtctggagctctttctgcattcgttgagcccaacatggaaactgtccccatcaagattccctccaaatgtctgctccctcctagtcaggaattgcataaggaatctcagtttgcttcgcctacagatgttgtcaatagaaagaagcattcaatcttggttgacactgaagttagaatgagtgccaggctcagagagaaggctagaggttttaagtcttactctggaataaggaagaattgcttgtgctgtgctaggccgtcaccaccctctatctcccacaagattattaagaaattgggggctgagttctgcaaagttgatccctccaagctatgccctgatgcattaaacagctccagatcctctagctctaccattcagaggccacattcttcttctagtagcagggtcgagctgcgtgcaacgcctgaagatcagagggatgaatcagaagatgatgatgatgcggggcctcgccccccagctgggatgtaa

SEQ ID NO: 37459 - DNA, 141 bp, Zea mays
  Peptide Sequence Number=SeqID_80834
ctcgcaataccataagccgtttttgctcacggatatcagaccagtcaacaagtacaatgggcatcgtattgcccgaacagataaagctagcatgccaacggttacggccaagttcggtaagagtgagagttttacagtcaa

SEQ ID NO: 37460 - DNA, 694 bp, Zea mays
  Peptide Sequence Number=SeqID_80835
cccagatgggtcgagcgcgtgggcgagcgcaaaggggggagaggcgaggtggccggagtcgagcgtgagagaggtggaagtcccgcggccttcgtgttcgtcccgcgcccaggtcagggcgacgtgggggttcctccgaagccgaggttgagtctgccttccgttgccgtggccgagcccgagccatggggtcgggcgaggcggaagtcgttcggccgagaccagggcggagtccgagccctggggtcgggcgaggcggaagtcgttcggccgaggccagggcggagtccgagcccctggggtcgggcgaggcggagtttcgtcgtcttccggcccgagtccgagccctggggtcgggaggagcggagtttcgtcgtcttccgggtcttagcccaagtccgagccctggggtcgggcggagcggagttcgccgtcttccgggtcttagcccgagtccgagccctggggtcgggcggagcggagttcgccgtcttccgggtcttagcccgagtccgagccctggggtcgggcggagcggagttcgccgtggtgcctttggcggcgctgtccttctgtcagactggccagtggagcggtggagtgacggcggtcacttcggctctgccgggggcgcgtgtcaggatgaagctttatgctgatgggggttaccagctgagaattaggcgtcttaagg

SEQ ID NO: 37461 - DNA, 135 bp, Zea mays
  Peptide Sequence Number=SeqID_80836
atgtcgcacgtgttcgaagactactatatcaaggactgtggcgtcatctcggcgccagagatgccacacaggaggaccagcagcaatgaccagttcatcatcctcgctaccatcaggatcacaaatggattatga

SEQ ID NO: 37462 - DNA, 1059 bp, Zea mays
  Peptide Sequence Number=SeqID_80837
atggacggcggccgcagaaggcacacgctacaagacaatctgatcctgcaggctcgggtcttcacgctggaagggggctgtagcaccctcggcatcgacgacaccttcagtgaggggcctcggccaaccatcttccaagggcgccagcccggcccgaggcctcggctggtacgaacaaccccactccgtgggggtgggcctgcggagcaacagaagaccgacgaacggcgcgccgtcacctgctccagcagcggtgacgacgacgacttctgctctggggggccgaacagcggcgacactgacctcagggcagatgctgccgccaggaggcccccgcccatgccaaaacttgtgaggcaaggacgggcagaaggccgtagagttgaagaagaacctcttcaagctgccgtggcggacgccggcgccgtgagcggctccgaagctactcgcgtccgagagccaggcacggtgcagctgcccagcgccacggacgacgaccgcccttccctccgatcactgagtgaaggagcgggccgccgcccacgcgggggccgacctcaactcggcacactcccctccccagccctggtgatgaaaatccttgaggctgagggaggggcaggggccgcagcccggctcgctttcccccaccatcaagctggaggtcaccatcttgggcaactgcaccgccacttgcgccaccaccgcgcctcttcggttgcggaaccaatgccgtggctcgaggcgacccagcgcacgacccagcggcgccagcctagcgcgacggtcaatgcagccgaaagtgggccggcagtaatgacggtggcaggcgagcgggagcagcagtcacgtcgtcagccaggctcacgtcccatccaagggcagcaagagagcctcctctcatggcgtgaagacggcgcgcccgtgatccgtccctcgaacggctcgcgcacgcgcaacgaccgccccgccaaccactcgccccgtcgcattaactccgcggcgggacaggcggcgcttctggcaggagaagcgggcgacgcttcgccttcgccgtaa

SEQ ID NO: 37463 - DNA, 1414 bp, Zea mays
  Peptide Sequence Number=SeqID_80838
catggaggacgcggaggccggcgcggcgcggaagcggaagaggggcggcgccggcgaggaggccggcgggggcgcgtacgacggcaaggagaaggagctgctgggcgaggacggcgacgacgggcggtacgagggcatcgcggaggaggccgtggcggaggtgatgcggtggctggaggcggagatcgcggacgacagcgccccgcagccggcggcggggttcgtgaccatcaacggcaacgaggagagctgcgggccgtccttctccgccgcggcgtccacggtcatggcctccgtcgacacccgcgccggagcgccgcccccgccgcccgtgccgtggccgtggccggagccggatcccgagccggagcgtgtcgtccccgcgccgggcgtcggagtggacgtggcggcgatggaggtggaggcggggacggggacgggcggcgaggcggccgacgaggagtggctggcgcgcctgctcacctgcggggccctgctggagggcgtctatgcgaactcgccggctgggaccgggagtggttcgttttggcgcgggtcgctccgtcgttttcaagtgttctgctctgctcgtttcgtcgtccgctcctgcatgcttcgcgactgccccctggaaccagtgttcacgttattatccggtcgcgtccagcagcttcacgatgctcagatcccgttcaggactcatcaggaggcacagccagccagtacgaccgtgcacgcgccaggcccgttcagcgtcgactgctgtcgcgccgcgcggccaggccgcagccgttgccgtctgacaggcctgccaacaccagctgcacgctctattgctccaaacaaacctaagactggaccagaagggtccagtactccagtccacggcgcgacgtgccaggtcgtacgtcccaccatctccatcgatccgtccgccggtcttcttcttcttcccctcagccgccggacgcgctgccgagtgccgggtcatctccggcctaacccgtacgcgccgtgtgctccgcaggtactcgtcctgctcctgcacccgcactcgccgtggatgagaaaggacgcggcagcgccgcagcagacgcgcacactctgctggatcagtcgatcacgtcagccaggcctgctggcttctgcagcctttggacagacgcctcaggcatgcagttgcagcctgcagccaacaccaactctggccaggcacaccggactgtctggtggtgcaccggacagtgtccggtgcgccaggctggccggcggtgaaccagctgctctcgggaaaacgcagaggcatacggctataattcatcggactatccggcgtaaggagaggatccaggtgtacaatggggatgtagcagagtgctacgtgtctagcggagagagagagctagcgccctaa

SEQ ID NO: 37464 - DNA, 171 bp, Zea mays
  Peptide Sequence Number=SeqID_80839
atggcggaataccggcaaagggcaacagctatccagcgcgcaatggtcgactctgcaaaagtgaacagtgtagctatagtgccacgtagaagtcagagcaggaagtcagaggggcaccggactgtccggtgccgcaagaagacaaagctccaatggtcgaccaagctctga

SEQ ID NO: 37465 - DNA, 603 bp, Zea mays
  Peptide Sequence Number=SeqID_80840
atgcgacgcgcggcgtggcccacggtgcatagtccttacgtcaggctccgcccgctggcttacgtcacgggcagagggccacgtggcagcatcgggtctccgcctgggtggggagctgagccgtacaggatggggcccagacacgtgtcggtgctggacccctatctggtctttgaccagggcttaagcattttctgccctggcgcatcgggaccccgctatgaactagccactctcgggaaaattgagtcgtgctccgctataattcatcggattgtccggtgtgccaccagactatccggtgagtcagcgggcaacggctatccagtgcgcaacggtcgactctgcaaaagtgaacagtgtagctacagtgccacgcagaagtcagagcaggaagtcagaggagcaccggactgtccggtgtggcacgagactgtccgatgtcgcaagaagacaaagctccaatggtcgaccgagctccaaaccctaacggttggtgacgtggtggcacaccggacactgaacaatgagtgttcggtggcgcaccggactgtccggtgcgcccatcacaatagcctccccaacggctaccttggtggttga

SEQ ID NO: 37466 - DNA, 2361 bp, Zea mays
  Peptide Sequence Number=SeqID_80841
atgatgctcaaggatctggcagcaattcagcagcatcaccaccagcagcagctggccgcggccgccgccgacgagaacatgtctaacttgacctccgcctccggcgaccaggccagcgtctcgtcccaccccgtcccgcctcccgccaagaagaagcgcagcctccccgggaatccagacccggacgcggaggtcatcgcgctgtcgccgcggacgctgatggctacgaaccgctacgtgtgcgaggtgtgcggcaaggggttccagcgcgaccagaacctgcagctgcaccggcgcggccacaacctgccgtggaagctcaagcagcgcaacccaaaggaggtggtgcgcaagaaggtgtacgtgtgcccggagcccggctgcgtgcaccacgaccccgcgcgcgccctcggcgacctcaccggcatcaagaagcatttcagccgcaagcacggcgagaagaagtggaagtgcgaccgctgcgccaagcgctacgccgtgcaatccgactggaaggcgcactccaaggtgtgcggcacgcgcgagtaccgatgcgactgcggcaccctcttctcaaggagggacagcttcatcacgcacagggccttctgcgacgcgctcgcggaggagagcgcgagggcggtgaccgccgccgcggcggtcgcgggccagcaccatccgggaccggccgggatgctcttctcgcaggccgccggcgggggcgacggcggcgcggggttacacctgccgccaggcgtgcttgacccgtcgcagacgctgggcggcggccacggcatgtcgttgcaagagctgtgcctgaagagagagcagcagcagcagcagcagttcgcgccgtcgtcgtggctcacggcgcaacatcaccagcaggagctggagctgcccggatcggccgtgttcggattggcgaggccgctagaccagcaggagtacatggggaactccacaacggagagcacggcgggcctcagcggcttcgtcgggttctcgccgtccgccgccggtggagcggcggcctcggcgcacatgtcggcgaccgcgctgctgcagaaagcagcgcagatgggtgcaacgctgagccgaccgtcgaaccagggacagatggcgggcactcacagcagcagcaccaccaatgctggcactggcaccgccaacgccgcagcagctgctgcaagcaacgtgcctggcactggcgctgctggtgccctcggcttcgggtcaccacatcactttggagcggaggagaggaccacccggccggctgatcgcgacgccggcaatggcagcggcaatgccgccgccgtagcggccggaggcggcaatgaaggcctcaccagggacttcttggggctgagggccttctcccacggcgacatactcagcatggccggtttcgacccctgcatgtcgtcggcgtcgccggcggcgatgtcatcggcggcttccaatccatcagctcaaccagcagtggacaagcaaccacttaagcagaatagcgatgacatagggtgggagtatggaactattgtcaatccaaatgattggaatgtcataaaatgcaagttatgtcctatggttgtcaaggctgggatttataggcttaagctgcatattgctggtagaaaagggcaagtccgagcatgccccaatgcaactcaagaggatagagacaagtgcagtaaagctcttgatgattctaggaaagctaaaatagctaggctaacagaaaaacaagaggttattgatgcagttgcagatgagatggatgttaatgatgacacgggccttgatgacattggcagctctcaaccaaggacaatgggtcctatggacaagttcacaatgtctcttgactccaattctttgggttccacacaaaaaaaccttcaccaacaaaagatttctgaacatgtaatgaaagaaaggttgcatatattgaagagatatgttgctaggtggatgaatacctttcaatgccataaaactgtgatgagtttgaccaagtgttggaagctgctggccgctttcggtccagcaaccgatgcaacttttgctcaaggatggatggttgatggtgctgagaaggatgaagaagggtctgatgttgagccggtgaccggtctcacatggaaattgattgctgagacatgtggtgctgaagaggtcacaaaactacgtaggagtgcaagattgactgttcaaagagaggttgaagacacaccgctgtctgaaactgaaagtgaagaagcaccacaagaggaagatgttgactttgagtcagatcaagatgatgtgatcacagctggatatgagctagatgcggaggaagacaacgatggctga

SEQ ID NO: 37467 - DNA, 732 bp, Zea mays
  Peptide Sequence Number=SeqID_80842
atgggcgcacgggccggcggcgggcgcacggggcggcgggcgcacggggccggcggtcggaacacggggcggcggcggctggcgaacggggcggcgtcggccggcgaacggggcgcaccggtgtgtgcgacggggcgactggcggcggccgtcgacggcgggcgaggcggcgacggggctgtgggcggcggcggggcaatggcggcagggcagtgggcgacggggcggctcaatttcagacggcggcggcgacgcgcgggcagagagaaacggcgcgtgggtgaaaatgaaacggcccgcagggtcggatccgcgttaaaacgccttatgtccgacggttatggactcggccgtcgaactgttgccaccaatccggtgtgcacgtgcccagaccccgccatgccctgcaagcacgtcctcttcgtgctgtttcgcgtcctcgacctctccgacgaggcctgcgtctggaggcagacgctgcgcccgtgccaggtcgcgtggctcgtcggcacgcccacgtacccggacgtgctcgccagcgcacgcgcccgagaaaggttccactggatgtggtcggtccgaacggtcgttgaacctactgacgcccggtggcaggaggcatcgtcgcggaggccgctcgacggcgcggcatgcccggtgtgcctcgaggagatggcgccgcaccaccgtcatagggcagcggcaccaccgccgccgcgcaggcaatcctga

SEQ ID NO: 37468 - DNA, 1011 bp, Zea mays
  Peptide Sequence Number=SeqID_80843
atgcccgccacgaacgccgcaatctccgcccgcactccacaatccgcccgccggcgcacatccggcgtggcgacctcggccttggtcgccagccccactagcctccgcgggcatctgccgggccaggcacacctccggcgcggcggcctcggcctcggtcgccagacctgccggcctccacggacgtgtgccaggctagcctccgcgggcatctgccgggacaggtacacctccggcgcggcggcctcggcctcggtcgccagacctgccggcctccacgggcgtgtgccaggccaggaggaggtcatcgagtcaattatagctgggatgtggaacgtcgtggaggtcatggctgatgcctgcgtgcggtgcctggtgttgtccgttctcgatagcgggcagaacgggtgcgagaactacccatttctggagatggatagggagcacgacgacatcgtcaactgtaccacccctagcttcactagatgttctattttttctccagctatgaacttccaccatccacaaatttctaaactaggacaggctgagacatactaccagtaccagacatgccagtacttggttccccatcttgctggctacattcatcaggttctttaccagttaattttcggaagttctcaaagcattcctccatccctgatatatacagcttcatcctgtcaaaatgccgagcaaggtctagcccatcttcatccattttctagcaacagaatgctgtccaagccgcacaggttgactacaaacttggatacaatgtccatctccactaatgtcagcgctagggtgcagaggctgggggcaatccccacaaagatagtaaagcggcgttcagtgagtcaggctctcaataacaggaaatgggtggatgatatcaaaggagccctaacggttcaggcggaggaatccatcaaccacattcttttggcatttgtgctctccagggagtatgactaccataaagttatagagattgctaaattttga

SEQ ID NO: 37469 - DNA, 243 bp, Zea mays
  Peptide Sequence Number=SeqID_80844
atggtggcggcccgccatgagcaagttgcttctagcttcccttgctgtgaggacttgcggctcgacatcattctcactttcttcccacaatctcatggggtggatgatcgccatagccttctctccgacttccagctgatccaaactttgcaaagtacatggcacaatttttatcactatttggagatgggtcttcagaactttgtggagtatcaggagtgtcaaaaaggcacatttttgtaa

SEQ ID NO: 37470 - DNA, 321 bp, Zea mays
  Peptide Sequence Number=SeqID_80845
atgcgccgctatgtacaacaagctccgacgcagccgccgcttggacacgatccagagcagctgcatcgtgttgtccatcgtcaagcagggggcctcatgatcgtcgccaacgtcggtgactctcgggttattttgggcaccgcttccgacgacgacgacatcacgctgtccagctcatcatccaccggaagcccaacctgccacatcaaggactgtggtgtcatctcggcgtcagaggtgacgcagaggaggaccgacagcaatgaccagttcgtcgtcctcgccaccgtcgatgtagcttttgtgtcagttcgcctttaa

SEQ ID NO: 37471 - DNA, 468 bp, Zea mays
  Peptide Sequence Number=SeqID_80846
atggcgctttccccccctcctccttgcagaaaggcgacgcaggggcgtatgaaaaaagtcgagtcagtccttgaccgtcctctcgctctgtgcggaggctcgggggctgctctcgcaaactcggctccggccaaaccgttgacagcgtcaacataccagcccaagaactcggaacctggctatgcacctgggctacgaccagttcgcatgagggaacaaccagactggccgaggcatcgcgaaaggcatcaagacctcgaaggagtcaaaccactcctccgaggcctcgggggctacacccggtgggaaaacaacgtcgtctgcgctgctccgactgttgtgccacccgtcagggtgaggctgacagccaccaagaccggcctcaggcgccataggaagctccgcctcgcccaaccccagggctcggactccacctcgacctcggaagacggactccgcctcgcctga

SEQ ID NO: 37472 - DNA, 2382 bp, Zea mays
  Peptide Sequence Number=SeqID_80847
atggagtttcccataagggtgaacggctgctgtactcaaaattgtcagtctagagaaaagggtgaagggagcataccaaagattgctgaagatcatgtgctccagatgatgataaacaaaagcaaaattggagaaagaagattagttgataaagatatgtcaagcttgatggctcagaaggaagatgtagctagattgacaaaggataaggaagatatggttaggctgctgaaagataaggaagatataattagattgatgaaagagaaggaagaaatggttttgctgattaaggagaaagatgatatggttacctcgaggaaggagaagattgatggaagagatcaatcagccaatgcatatgcgaataaatcaactacatataatgatgaaaccattaggatgataaaggaaaaagaagacagtaatattacaattatgaaactaaagagcaaattggaagctgtaaaatcattatttgaagagagccacaaccagttagaatctgcaaaggaggaggttcttaagcttcaaaaggacaaggaaaatagtgccaatataatatcaaaactcaggcaagagctttcgttagcacatgaatcttataagacacatattcaagaactggagagtagtgctttgcaggcaagcaaattctttgaacatagaataaaagaagtagatctcatgctcgaagattctataaagaaaagaacagatctagaggaagtattaaaatctagaatggatacttggaagaagaaggaaatcatggtgaatcaagttttacgtctacaaatacagagcatccaggatttgaggttatcttctgtttccattaggcatgaaatccaaaactgccagcgaagatggtctgaagaacttaatggccttggacaaagtctcaacatactgataaatgattctgaaaattatcatgctgctttagaagaaaatagaaaattatacaacgagattcaggaactaaaaggaaatataagagtctactgccggataaggccttttattcctggggaggatcagaaatctactacaattaaatatgttggtgataatggggatctgataattgcaaatcccacacgccatggaaaagaggggagcaagtcgttcaaattcaacaaagtttttggccccactacttctcaagatgacgtattcaaggacattgaaccacttattagatcagttcttgatggttataatgtttgcatttttgcgtatggtcaaactggatcagggaaaacatacacaatgactggacctgaaaatgcaacagagaatgaatggggtgtcaattacagagctctgaatgatctgttccatatttcacataatcgtggggataccatcataagaatgctcatgtaccctaccggaacagcaaacttacacaagtcctacagagttctttggatcaacccagatgtctcatcttattcggagactttaagtactttgaagtttgctgaaagggtttctggagtggagctaggtgcctcaaaggcgaataaagaaggcaaagatattagagaatttatggaacagctctcactgctcaaacataaaatggcaaagaaagatgacgaaattaacagattacaacaactcaagacgcaaactccaagggtcaggactgcaaaacgtgcagattccccattgaaacattcgtcgtcgtccccaggcatatctaatttaggaagcaaaatccaacatagaaggacagtatcaagtggaaaggcaatgagcattgccagtagagctgggtctgataccttctctgacaccagtgacaggcactctgaatctggttctatgcagtctgttgatgatatcctaccacgtagggggattatgggtcttccgaagctctctattggtgaaatgggtcagaattctgctgaccctgagcttgtttgctttgactatgctgattcagaagagagattaagtgatatatcagatagtggtctttccatgggtacagagacggatgtttcagtaagcagtatagttgagttgacacgttttcaggagcaggaaaacatacctagcactctgaaagaacaagagagtgcacgaaaaattccaaatgatcagttgtccaaggtggccacccgagttcagaagacaacagtacccaaactagctcaaacttccttgtggcctaaactaagagatcctccagcccttagatccccaggcccttgcctgcttgacaggtgggcgtcagactccgtccatagtgagattttctctatggccttcgctgcctacatggagagggagaatcacaacacaaacaatatctgtaccaaggacgtccatgacttcgaagagatggacataagtcaagtttga

SEQ ID NO: 37473 - DNA, 708 bp, Zea mays
  Peptide Sequence Number=SeqID_80848
atggaggaaggatgtgaggggtggggtggatgggagtggagtaacgaactagtggtgggggtagtgtggaaggaggccccggagtcaaccacccaatcggtggtgggagggggagatggtggtggcgaaggggtggctgctagcgcaaccagcaagccccaacgacgtgcgcgtctgcagtgggacggcggcagcagcgccacccgcgcctgcacacgagcggcggtggaagtgacgcccgcgcttggtcccaagcggtcgtggcagcagcacccgtgcatatgcggatctactccagggacccacgtgcttgagcgtccaggaagcagaggggcaggggcagcggccggggcaaggggaagggccggcggcggctggagggaggagagggctgggctggcggcgccggagaggtggcactgcaggctgctgcacggcggcgggtcctgcgcgcctgggacggcaggggcacgaggaaggaggccggcgcgcaggagcgcggcccaggcagccgacggtggggtggccggcagcgcgaggaagaaaggagggggtcacgggaggggtcggcggccgacggctggggggttggggaagccgacggctgtgggtgggagaagagagatgaaagtggctctggtaccaagttggagaatgaaaacgttaaccctaattagggttgggtgtggtaatgatagacttaggtaa

SEQ ID NO: 37474 - DNA, 846 bp, Zea mays
  Peptide Sequence Number=SeqID_80849
atgatctcgtctcgcccgagcccagcctcgggcaggaacagtagaccaaggcagattcacgcctcgcccgagggtctcctcaagcaacggacgcaccttcgactcgcccaaggcccagctcgggcaggcttcgcggagaagcaaccttggccggatcgctacgccaaccgaccgtatcgcaggagcattcaatgcaaggatcgcctgacaccttatcctgacgcacgctcctcagccgacaaggccgaagaaaacagcgccgcctgcgctgctccgactgctgtgccactcgtcagggtgaggctgacagccgccaagaccggcctcaggcgccataggaagctctgcctagcccgaccccagggctcggactccacctcgacctcggaagacggactccgcctcgcccaacccctgagctcagactcatcctcgactccggaaggcggtctccacctcgcccgacccctgagctcggactcatcctcgactccggaaggcggtctccgcctcgcccgaccccagggctcggactccacctcgacctcggaagacggactccgtctcgcccgacccctgagctcggactcatcctcgactccggaaggcggtctccgcctcgcccgaccccagggctcggactcaacctcgacctcggacgacggtctccgcctcgcccgaccctcggggctcggactcaacctcgaccccggacgacagtctccgcctcgcccgacccccctacccggactcagcctcgacctcggagcagcctccgcctcgcccgacctcgggctcagaccgaccacgtcacagggggggcatcattaccctacccctagctag

SEQ ID NO: 37475 - DNA, 687 bp, Zea mays
  Peptide Sequence Number=SeqID_80850
atggcggtcatggcggggccgttccttgcgatggcgagcaacgccgccgtcagcgccagcgccaacagcacgggcaacggtgaggtcaagcggcggcgccggacctcgtccaccaacgccctccagcgcaccgcgtccgacgtctccgcctacgagctccaccaccaccaccacggcgtggtgacgaacaaggacgagaaggcggaggccgagcagcagcagcccgccgtgcctgaggcgtcgccggtactgcagcacgccaagtgcgagtgctgcggcatgtcgcaggagtgcacgcccgagtacatccgcggcgtgcgcgccaggttcgcggggcgctgggtctgcggcctgtgcgcggaggcggtgacggaggaggccgataagaagaagggcgggccgctggaggaggcgctcaaggcgcacatgggcgtgtgcaagcggttcaacggcttcggacggacgcacccggtgctgttccaggccgaggccatgcgcgagatcctccggcgccgggccacggccacgctcggccccaggtccaggtccagcatcaaccccagggaggtcaacagggaagtcgccaaggccgccggcaccgggatctcacgcagctccagctgcatgaccttcatcgccgaccacgacttcaaccaccgggcgtcgtcgtcgatcaacaaaaactga

SEQ ID NO: 37476 - DNA, 72 bp, Zea mays
  Peptide Sequence Number=SeqID_80851
atggccttgagcttcgtggcgcccggtataccggagtttatggcaccagagctgtacgaggagtacaactag

SEQ ID NO: 37477 - DNA, 483 bp, Zea mays
  Peptide Sequence Number=SeqID_80852
atgggcgggggcctcctggcagcagcatccgccctgaagtcagtgctgctgctgttcggccccccggagcagaagtcgtcgtcgtcgccgctgctggagcgggtgacggcgcgctgttcgtcggtcttctgttgctccgcaggcccacccctatcgagtggggttgttcgtacctgcggagggggaaccggagttccgtttgtaatggcacttcgaatgccagggttttttgttcatcgcggctgtcgaggcctgaacatgggtaaccggccgagccgcctgctcgggccggattcccggagaagtccctggcagcgattgtccggtcgtgatgatgacgtcgtcctccagagtggggatccttggaccgcgtcgccgtccgaggctaggtcggaccttgctgaaggtgttgtcgatgccgagggtgttactgcccccatccagcgtcaagacccaagcctgcaggatcagagtgtcttgtag

SEQ ID NO: 37478 - DNA, 301 bp, Zea mays
  Peptide Sequence Number=SeqID_80853
tgccaacacaagtgcttttgtgccaatctatgcaaagtggtggacaaagtgcaaatcatgtcaaaagccaaaatctgctcagtctgggttcaccggactgtccggtggtgcaccgtacaatgtccggtggtgcaccggacagtgtccgatgcgccaggctggctcgggcaaacaggctgctctcgggacttcgacgacggtgtacgactataattcactggtctgtccggtggtgcaccggactgtccgtgtccggtgcgccaacggctctcagactccaacggtcggcttcgccaaataa

SEQ ID NO: 37479 - DNA, 642 bp, Zea mays
  Peptide Sequence Number=SeqID_80854
atgcagggttcttgcctgaccgccatcgcagcaaaatcaaccaaggacctccctacactgaccactcccctactgcccttgcccctttcgggtaagtactgggcctcattttccagagagtgcaggggctacggggtaaaattcctaagacccagtgcacactacccctggacggcgggttctatttcagaaaaacgcaggggtttgtttgtgaaatgtggaccgaagggggtatggagcgatctggtctacacaatcgaccaccgacgctccagattcaacccacgcgtcatgaacacgtataatccgctccgaccgttagatccgatctcaacgcacaaaggacgaccacgcaccaatcttgatctaagtcgttcacgtccgcatcaacgatccagatcgcaattacgcaaaccggtatgccatgatataatcctgaccgtccgtcaagatcggacggcgcacgtgcttcttcctaacctgagaactcgccacagcggcggacagtcatccccccacggcggcgcgctcaccggagaccgcgccctagcgttcaagtgcccccgattctcgaaattggttgatgcaatacgatgctggggacatggcaaacacgacaatgcaggatttaccggtgattga

SEQ ID NO: 37480 - DNA, 426 bp, Zea mays
  Peptide Sequence Number=SeqID_80855
atggatgcttctgacgccataagcagcacatgttatggccaacaggaagttgggtcactagccacatctattaatgttccaattgtgagactgaaaaagatctggattctttcacatgacatcgtcgttgattcagctcacgtctgccaatcagaatttttaatacaaataatcatttattcctgttgtgttcttatgtcactaacttgtccaatgaaaaagagtcaggggcagaccgatggaagagtgaaacacggcggtgatagtgcaaggtgggacaccattagtgctctgtctggggttcggtttgttcctcttgtagatctggaagattgtttagagccatctaagacaaatgtcactactcttccaaatggcgtcaggattgcctatgagacatcatcggtactgcgtactgccatctaa

SEQ ID NO: 37481 - DNA, 843 bp, Zea mays
  Peptide Sequence Number=SeqID_80856
atggcgagccaacgcctatgcaacattgacagtacaacgtcgtgtctgtcaccgtgcgagggcaccagccgccagccgcaacccgcaggggcgctagcagacgagcagagcaggctagcagcactgcagcagtaccacagcggcgcagcgcagtctgcagccggccagccgcagcccgcaggcccagtgaccagccgtccagccgccagcgtgctgtactgctgtttcactattccagttccaggcttccaggtttcaggccagcgtgccaatcgcgaggatgggcggacccgcaactctggtgagcgattggtgggcgctgagtcagcgtttccgcacgccagcgccacagacagtttccccaagggtccgcgcaaggctccagtcaagcccagggttccggcgacggtgaggaggtggattccgcgacggcgcggagtggattcaaggcgaggtcgtggctatctccctccttactggtttgggttccgattcgtgcgcaaggccgaagcagggacgcggcgcggcgtttatagtcgcgggggtgtgaagattgtaacaagaatcccaagattagtggatcaccagtgccacggcgcgcggagatatcgcgattctgtttcgaacggaggtggaagacacgctgatgtgtgggacctgctgctcagtgaagtggagggttcaagtcgtgggcacggccgctttgtgggcccagcacgtcaggcaggtgcggcattccagtgggcccgcgtgtcggcacagcacaatgatattgcgcgcattgctaggaatttcatcaagatgaacctcttcgtgaggcaaatcaccatcatggtgaactaa

SEQ ID NO: 37482 - DNA, 345 bp, Zea mays
  Peptide Sequence Number=SeqID_80857
atgtccggtggtgcaccggactgcctggtgcaccacccgacagaaggcaagtattgcctgccaagaatgcctccaacggctcctagctgccttggggctataaaagggacccctaggcgcatggaggagacacccaagcatactttgagcattcttaatcattcacacttcgtctttgcgcactcgattgatattcttagtgatttgagctccgttctagtgtgctttcactttgatccttattgtaagggcgagagactccaagttgtggagattcctcgcaaacgggaaagagtaaagaaagaagaacaccgtggtattcaagttgatcattggatcacttga

SEQ ID NO: 37483 - DNA, 1074 bp, Zea mays
  Peptide Sequence Number=SeqID_80858
atggtgaaggtcgtacaccgcaatagtgcatccgcgctaagtagagcagcgcgagcggatggatgtggcagaagaatgggtggggaggcgggggatccaaaaactataggaagccagcaccgacgggcaccgcgtctgcgcgattacgcaagagatgacaatgttagtgcgaagtggagaactgcgatgcttcaactgatgcaacccttttggaggttggagctcgccgcatgcgtgctggcctctatgcttcatcacggaagtgaagaggcggatggggagatgaaacggaaggggcctacttgctgtgccgtcatacagatgttcagaacacggaagcgaagtgacgacgcatgggagctaggggtgtgggcgagcaccggcttcaggcacgtgtcgtcggcgagggacagtcgcgtgaacatatattccagggcattcatcctctccgcgtccatctactctgtggcggcggcgcccgcggaggatcgtccttgtccggcaaagccgccacctcggtctcgaacgccggtaaggtgggcctcggcgtcggcaagctcagcgctttctccgatcgttctctcgtctccgctcactgacgccgccgcccccaagtccagacctgacaagggcggcggcaaaggcccttcctcctgtctcgacttggatgtcgaatggatcgccgagcacgcgcggcaggtactactgtactatactacgttacgcttacgccacacctcacggttagggatggcaacgggtaaactatccgcggatagtgtctctggacatccatatccgcgacttatatccgatatccgaacccgtacccgttacccgctatggataacaaatagtatccacatccgttacccgcgggtaacggatatccgtggatatatccgtttgcccactacacatacaacatatttaaatccagcaaattcaaacatgatatcatatttgtctagcaaatttaaatatgataaaaacatacaaccatacagaatttgtccagcaatgaaatctgatacatgtattaaggcatacagcgagcaatataaaattgtctag

SEQ ID NO: 37484 - DNA, 1893 bp, Zea mays
  Peptide Sequence Number=SeqID_80859
atgggggtgaagaacctctgggacatccttgactcctgcaagaagaagctcccgctccagcacctccacgccaaccgctccccggccttcctcagggacaaggtgtacctcaagaacctcttccaccgcatccgagccctcatcgccctcaactgcagcctcattttcgtctcagatggggcgattccttcagtcaaattggctacttataggcgccgactgggattaaatgctgctgaggatggctgttttacatcggattcagattcattcttgtttggtgcaaagacagtttatagagatgttttcataggagagggtggttatgtaatttgctatgaaatggaagacattcagaataagcttggtttcggcaggaactcactgatatcacttgcagtccttcttggtagtgactattctaatggagtccatggctttggcccagaagcagcatgccgccttgttaagtctttaggggatgacaccgttcttggtcaaattttgtccgatggagttaaacctgcaagaaaatgtaaaggaaaaggcagtggcgccaatgcagggacggttggtggaacgtgcccaaaagcaagtacctgtgaggttgggattaaccaagattctggtagtcaatttcgtgacataataaatgcatatctggagccaaaatgtcattcaccagattcagaagctgtgcagagggcatgcagccagcggccatttcttcgttcacaactccatcagatatgcgagcaatactttgcgtggagccctgtgaaaactgatttatgtgtacatgagagaattcccctgagctatttccttgaaaacatgtctacagatgaatatatccttccaaagattgctgagagagaacttcgaagattttcaaatctccgctccacgtcttcagatctaggaatgaaaccttcgctgaatgagattcctgtaccgtgtcctgtactggcgattgtgaagcagcgaaaagttcaaggaagtgaatattatgaggtttcatggagaaacatagatgggctccaagtttcagttgttccaggggaacttgttagaagtgcttgcccagaaaaaataactgaatttttggaaagcaaggatgctcagaagaaacaaaagaggagagctaggccaaagaaatctggtcaagctgccgtaaaagacgtggatgcgcagctccaagaattgctacttggaattgaatctgaaagtggtagctttccatgtacggccaatggccctcagacagcagctatacagatggttgcaccgctccaggaatttgttgatctatcttctccatcaccacctatacgatcttgtaagattgccaggtccagaaagttgagtgattcagacacagtaacaatggatgggattcatctgcagcaccaaagtctgcagattggatcgatggagtcaaattcggcactgggtcttgagccaattgatctgtcatcaccctcgccttgtgctgctcataaaccccaggctgctccagaagcaccaccactgtgtatggaggcagaaagaagagccctttgggatataagcaatttggtcgagaaagaaccctcctgttgcaagcatgaacctggaacaaatgtgcaggtggaagagtcaccattgttcaggcatgggactgggatggcaggcgaagctgattcttcacggagaggcgatgcgcagagtagggaagtagtagaagctgccatgatcgacctctcttctccatcaccagttaaagtcgataatagtagaaggaatggtaagaaggattgtgaggctggcagcagcagtcagtctccagaacacgagaggaaagcgagggagctcagattgttcctagacagtataagagacgagttgtattaa

SEQ ID NO: 37485 - DNA, 1731 bp, Zea mays
  Peptide Sequence Number=SeqID_80860
atgtctccatccggcgagctgctggcttccatctcctccgtcttcactgtcgccttcgtcctcctcgcctgcgtcgagctcggcgacgccgccgccgccgccgtcggcgtctaccgcctcatccagtacgacctcgccggcgctccgctcggctcccgcgccgcggtcctcaaccaccacgctgccgcgctcccgctccccgccggcgcagacctctcccgctccgccctcgtcgcgccgctcctcgacctcccgctctctttcctcagaggtcagctaactctagcactactgctgcatcttcttaattattatgcactactaccaaaacttatagacctagtaccgccttttacctttgttgctcaaaactcttacgatgccttctcagagtacctggtggagaaaaaacatctggggggattactcattctgctcccgacaaataatgacagtgtggatgacaaggggcaattcaaaggtgtactgactgagctggagaagttgcttctgcatgaacaagttccatatccagtgtactttgctttgcatgacgacaatcttgataacctgctggcagatatccatagaattgcctccacaggtcaaccagcctctgcaacaacaggaggttacaaacttgtcgtatcctcagcagagcctagaaaagtgtcatctccaaccatttctaatatccagggatggttacctggatttaaaggagagggtgatagcgaacagcttccgactattgccatagttgcaaactatgacaccttcggtgctgtacctgcactttctgtgggaagcgacagcaatggaagtggagttgtggctcttctagagattgcgagactattttcacgtctgtattcaaatcctaagacaaggggcaagtacaatattctctttgggttaacatctggtggaccctacaattacaatggaactagcaagtggcttaggagttttgatcagcgtgtacgcgagagcattgactacgcaatttgcttgaacaatgttggttcctggggcaatgacctctggatgcatgtatcaaagcctccagaaaatccctatatcaagcaaatctttaaagaattttcagatgtttctaaagaaatgggtgtttcagttggaatcaagcacaagaagattaatgtctcaaatcccagagtagcatgggaacacgaacagttctcaaggtttagggtgactgcacttactctttcagaaatgtctacccctcctgattttttggaaagcactggcggtcttcatgacactagagaatctacagatgctgagtcagtaatccgagctgccagattagtttctgagagtcttgcgagacgcatctatggactgaagggaaggaacatagatgtttttgcagagaatagcagcttagccattaatcctcactatatccggtcctggttggatctgttgtcacggacaccacgggttgcaccttttctgcagaaaaatgaccccttcatagcagcactggaaaagtctcacctggttcctggttttctggcaagacatgacattggtatcctggtgcaggaactgtctgcacacactactgatgtgcgtgttcaaagtgatgcgcttgatggcatgttcactttctatgatgcgacgaaagcaactctaaatgtctaccagaatagcatggtctgtaatgctcttatatactgtcctgataaattacctggcgaatga

SEQ ID NO: 37486 - DNA, 501 bp, Zea mays
  Peptide Sequence Number=SeqID_80861
atgaggggcgatggccgtggcggcggagggagacagccttcctacgcggcgccggacggggcgaatgcggtggcgatcccggtcgcctcaaggaagatggtgcagagtctcaagaggatcctggccgaccgctcggagggcgagatctacgccacgctctgcgactgcggaatggaccctgacatagccgtcgagaggctcatctcccaggacccctgcacaactaaggtggagcctgacaaagctagagtggttgcttgcaaccggcctcacaggatgctgtcacttggccttaggtaccagaaccttcatctcctagacgacgtggacggcccacgtgaccttgagatccgacgcgtgccgagacagaaatcgttggcgctgacgccgtccccgacggggagctcgcgggagacagcccccacgtttgttgcgtccccgccggggacgtggggtcattgggctggtccagactcttcatccctctgtgactccccgtag

SEQ ID NO: 37487 - DNA, 417 bp, Zea mays
  Peptide Sequence Number=SeqID_80862
atgtctttgccgagtgccgttgccaaggcactcggcaaagggactggcaaaggggcccactggagggttctttgccgagtgccagtccaccagacactcggcaaagaaacctcctttgccgagtgcctactagggctctcggcacagagactggctgtggggtccactagaccagtctttgccgagtgtcgccgttggcactcggtaaaggatccgtcaccgtcacttggcgccgtgacggtgacttttctttgccgagtgccaaatggcactcggcaaagtctttgccgagtgcccgacaaaaagtactcggcaaagaagctgttgccgatgacggtgtcgccgactgtagctaaatggttcgtgccaggcgcacgaggatcaatggacaatgtttacaggttcgggccgctttga

SEQ ID NO: 37488 - DNA, 201 bp, Zea mays
  Peptide Sequence Number=SeqID_80863
atgcataatgtggatgacataatgccgacttctaaggcagaaaagataaccctcaacaaaaagacacgaaatgaagaccttcgagtggattatcttcaaaaatccactcaaagctcgggggctacacccattgggtgcacctccggtgcacccaatgaatcaccatttcaagagaagacaacaccaacttctaaggcataa

SEQ ID NO: 37489 - DNA, 309 bp, Zea mays
  Peptide Sequence Number=SeqID_80864
atgggcaagaacaacaaacgcaagcgcgagccgactcctccatcagaggactttggcgactcggaatactcagaggaggagttctcctctgagtccgaggggtctccagctcccgtctctcccccagtgtcgtccgatgactcggacgactctcaggggattgccgcagaggtctggacttacatccgggccgtcgagcgctccgggctcgagggctcggatgagtcggtcgcccgaggaggacggcgaaggggtgatggccgagctattattgtcaacatttatgcatttgaaatagagtccgagtga

SEQ ID NO: 37490 - DNA, 312 bp, Zea mays
  Peptide Sequence Number=SeqID_80865
atgaacgtcgacgagcagggagcggaaccgggggtgacggacagggggaacggacgcgagttccgatcggggaacatggatagtgagcacgaactctggcgagcagcgaggcacgccgacgagcagggcgctgctccggcttccgtccacaacggcgtcaacaaacctcccaagttatcgggcccacatgcacctgtccttgtctcaaagacctcagacagctatgcatgtgcaccaaacaacttaacaggatctgtccgagtgccccgaggaccccggataaacgacttaccgccaagatcgcaagattaa

SEQ ID NO: 37491 - DNA, 786 bp, Zea mays
  Peptide Sequence Number=SeqID_80866
atgggtcggcgcgagacggagcgcgaaggggggaaaccagagggagacaggcgtaaaggggaaacctgcggccttcgtgtttgtcccgcgcccaggtcgggtgcgcttgcagtagggggttacaagcgtccgcgtgggagggagcgagaggcctgcacgcgccgtcccgtcctccccgtgcggccaaccctcccgtacgagtgccctgggccttccttttataggtgtaaggagagggcgcaggtcgagtccgagccttggggtcgggcgaggcggagttcgtcgtcttccggggccgaggccgagtccaagccttggggtcgggcgaggcggagttcgtcgtcttctcgggccgaggccgagtccgagccctggggtcgggcgaggcggagttcgtcgtcttccggggccgaggccgagtccgagccctggggtcgggcgaggcggagcttcctatggcgcccgaggccggacttggctgctgtcagcctcactctgtcgagtggcacagcagtcggagtggcacaggcggcgctgtcctcttgtcaggccgtagcccccgagcttcaaagggagtgtaaatactcgcttggaggcttttgtcgcacttttttgcaaggggaccagcctttctcggttgcgtttcgttccagtgggtgcacgcgagcgcacccgccgggtgtagcccccgaggcctcggaggagtggtttgactccttcgaggtcttaatgcgtttcgtgatgcttcagccggtctggttgttccctcatgcgaactggccgtag

SEQ ID NO: 37492 - DNA, 1119 bp, Zea mays
  Peptide Sequence Number=SeqID_80867
atgctggacgcgtcgaagttgaaagggtgcgcccccttggtgcggttgcatgccgcctgcatggcggtcctccctttcacccgctggtctgggcgaaagtggaggaatgctcgctggtgcggtgttggtggacaggcggacgccgccgttggtgctgacgtggtggcagccagagaaagcttctccgccgtcgaggctgttagcgccgcctacgggccgacctctggctctttggctttaatgtctggttcgcatcccttgagtggggacgcgaacgagagccttccggtggctgcgtccgtcctgggaccatggctgctgctgcagaggtcgctggcgagtcgcccggagcttgtcgccccgcaggctctccagtgtggcggttgttcatacccgcgggggcggaaccagagttccgtttgtaatggcaccttgaatgccggtgtctgttcattgtggctgtcggggcctgaacatccgaagccgaaggcagtggtgtcagcatggacaggggcagagttggctcgaaaagaagacttcgttggctggagcctggccgggccgtccactggtgggaccgacaccggagtcgagttgtcgaagccacgagccgggctggtgtcctcgagggacagctggctgaggcttcggggtggccggccgagccgtctactcgggccgggttcctggagaagaccctggcggcgatggcccgggcgcggtgctgatgtcgtccttcggagcagagatcctccgaccgtgtttccgtccgaggcttggtcggacttcgccgaaggtgtaattgacgccgagggtgctgctgctccccctccgtcaagaattgtttgtccgagcgagagttacttttcacggaaggtgatgagtgaggattctgctatcgatatagtcaagaaggcccgaaaaatcgtttcggcagaagagttttcgagcgtcaagacttgttcggtccgcagaatcacttatccgagcgtgagttacttatcgcagaaggtgatgagtgaggtatccgtatcccggaggcataggagtccctcggctcggtcagccttggctgcttacgtgtactccgtcgttttcaggatcccactttcgaagtag

SEQ ID NO: 37493 - DNA, 444 bp, Zea mays
  Peptide Sequence Number=SeqID_80868
atggcgctcgaggctggacttggctgctgtcagcctcactctgttgagtggcactgcagtcggtgcggcgcaggcggcgctgtcctctcgtcaggccggtcagtggagcggcgaagtgactgcggtcacttcggctctgtcgactggagggcgcgcgtcaggataaggtgtcaggccatcctcgcattaaatgcttctgcggtgcggtcggtcggtgtggcgatctggccaaggttgcttcttggcgaagactgggcctcgggcgagccgaagctttgtgctgatgggggttaccagctgagattaggagtcttgggggtacccctaattatggtccccgacaaaactggactgtgtctgtttagtcataccactcaagcgcaaccattcgatgtactcatccatccacagaaaaaagttgcacttcttaaggatctaatataa

SEQ ID NO: 37494 - DNA, 543 bp, Zea mays
  Peptide Sequence Number=SeqID_80869
atgaacgtcgacgagcagggagcggaaccgggggttcgacggacagggggaacggacgcgagttccgatcggggaacgtggatagtgagcacgaactccggcgagcagcgaggcacgccgacgagcagggcgctgctccggcttccgtccacaacggcgtcaacagtgagctccggcggcgagggaaagaacgaggaggaagtgagagacacatgggcgcggtgtggcgcggctggtggcggtgtcgagttgggcggctcggtcgggctctcggcgctgctccaggcgggtgcgtcggggcggcacgctgcgcggtcggggctcctgggcgcgcacggcgtagggtcgcgcggggtgttgggcctggctcagggtcgctcggcgtcggggcgacgcgatcctgcggcggctgcaggcgcgtgtgtcgggctggccggtcgcaggggcagggcgcgggagagaagggcaggtgggggaggagagaggagagagaagagggagggaggagtggcggcggctgtgcagggagtagggcgcggctag

SEQ ID NO: 37495 - DNA, 1344 bp, Zea mays
  Peptide Sequence Number=SeqID_80870
atggcggtgggttgcttcaaccccgtgctctcgccgcttgttccttcgccgccgggtaggcgcgtccgagcggcgctgcggtgccggtggcatcgtcacccgctgaccgcggtctccctccggcggctcccgtgcggcgcggcagctggtcgtggcacgcggcggctcgcggcggcggcagagtcgcaggccgtgcaggagcagccggcgcgggcggaagaggccggcggggcgggtgccgctgaggcgtcctccaagctggttctggtcgttggcggaaccggcggcgtggggcagttggttgtagcatcattgctgagcaggaacatcaagtcaaggttgctcctaagagatccagaaaaggcgtcgtccctgtttggcaagcaggatgagagtgtactacaggtttacaaagcggacacaagaaaccctaatgatttggatccacagatgtttgagggagttacgcatgtgatatgttgtactggaactacagcatttccgtctaagcgctgggatggagataacactccagaacgtgtagattgggatggcatcagaaatcttgtcagtgccttgccacagacagtcaagagactggttcttgtgtcatccattggtgttacaaaatacaatgagataccatggagcatcatgaatctctttggtgtgcttaagtacaagaagatgggagaagactttgtctgcaattcagggataccattcacgattattagggctggaagattgacagacgggccctacacttcgtatgatcttaatacacttcttaaagctacagctggagagcgacgagcagtagtcataggcaaaggtgacaagcttgtgggggaagttagcagacttgtggtagcagaagcttgtatccaagctttagatattgaatccactgaaggacaaatatatgagattaactcagttaaggcacggaagcttcgcatcttgtcatggtattatggatgggtgaagggcccggaactgacccagagaaatgggaggagctattcagatctgctcgatcaattagaatttgtgccgaataattcaatttcggttatccttgttcctggaatggaaagaagagaggagactgtgggttatccttccgtgaatgaaaaggagggagaaaacggcggaaacaagacgtgtggggtcacaaacagggtcccagcgcacgaagctggcggtgttcacggcgccttgtgcagtcactttgttggagatgctcttacactgacaaaggttaactggtcggcggcgcccacaggtttcctcgaccactgtccactaatcttatacagggttttcaatttcggcatttaa

SEQ ID NO: 37496 - DNA, 690 bp, Zea mays
  Peptide Sequence Number=SeqID_80871
atggacacgcacgtcggcaaattaatcgactcggtgggctccatcttccgcggcagcgacgtcctgccctggtgcgatcccgacatcatcgccggtttcgagagtgaggttgctgaggctgcaaatgaagaacagaaaaccgagagcctgatgaggctctcctgggcgcttgttcactctagacagcctgaagatgtcaaccggggcatcggaatgcttgaagcttcattggacaggtctagcagcccagaggaaacaagggagaagctctacttgttagctgttggtcgttacagaactggggattatacaagaagccgacagcttttggaaagatgcttagagatccaacatgactggagacaagccataactttgcaaaggctcgttgaagaaaaaaccaaaagagatggtatgattggcatggctatcatcacaggcgcctttggagttgtgggtcttgttgctggtggaagagatgaggatatcttctctgttgaagtgaataagaaaaaggcgggcaaaagcttggtggtgggtgacagtgctcatcattttttgctccgtgtgaaggggtgctcacttgtcttttttcgcggaatttttccaatgaagatccccaagaaatccagcaagcaaggactgtctgagtcctcatggctcacaacaagcttccaagtatccttttga

SEQ ID NO: 37497 - DNA, 321 bp, Zea mays
  Peptide Sequence Number=SeqID_80872
atggcagaaaacacgaccacagaactggaggcggcggacgacctgatggccacggatcggcgacggctggcggcgcgcaggagaagcggaggtctccaatcagtggtggcgtgcaggtctccaaggatcggcgcgcaggactggaggtctcaggtctccaagcggaggtatcccgtgcgacgcgcaggagaagttagggatataaggaactacacggtgcagataagcaaatggttatttcctgaaaagaaatcaagagtgaaagaacataatcttccatataaagctgaaaacaagtgtaaacatttaataagcaactag

SEQ ID NO: 37498 - DNA, 2493 bp, Zea mays
  Peptide Sequence Number=SeqID_80873
atgagcgggcacgactccaagtacttctctaccaccaagaagggggagatccccgagctgaaggaggagctcaactcccagtacaaggacaagagaaaagatgctgtcaagaaagtgattgctgctatgactgtaggaaaagatgtctcatcattgttcactgatgttgtgaactgcatgcagactgagaacttggagctcaagaaactagtatatttgtatctcatcaactatgctaaaagtcaacctgatcttgccattcttgctgtgaacacatttgttaaggattcacaagacccaaacccattgattcgtgctttggctgttaggacaatgggttgtatccgtgtggacaaaatcacagagtatctctgtgatccacttcaaagatgtctcaaggatgatgatccctatgtacggaagactgcagctatttgtgttgctaaactttatgatataaatgctgagctagtagaggatagaggatttctggaggcccttaaggatttaatatctgacaataatcctatggttgttgcaaatgctgttgctgctctggcagagattcaagatagtagtgttcgtccaatctttgaaatcaccagccatacactgtcaaagcttctgacagctctgaatgaatgcacagagtggggtcaagttttcattttggattctttgtcaagatacaaagcagcagatgccagggaagctgaaaacatagtggaacgagttacaccccgtctccaacatgcaaattgtgcggttgttctttctgctgtcaagataatccttctacaaatggagctcattacgagcacggatgtagtcaggaatctctgtaagaaaatggctccccctcttgttactcttttgtcagcagagcctgaaattcagtatgtagccttgaggaacattaatctgatagttcaaaagaggcctacaatactcgctcatgagattaaggttttcttttgcaagtacaatgaccctatatatgttaagatggaaaaactggagattatgataaagcttgcctcggatcgaaatatagatcaggtgctcttggaattcaaagaatatgccacagaggttgatgttgactttgtgcggaaagccgttcgtgcgattgggagatgtgcaattaaattggagagagctgctgaaaggtgcatcagcgttttgcttgagctgattaagataaaagttaattatgttgttcaggaagctataattgttatcaaagacatcttcagacgctaccctaacacgtatgagtctatcatcgctacactttgtgaaagtctggacactttagatgaaccagaggctaaggcatccatgatttggataattggagaatatgccgaaagaattgacaatgctgatgaacttcttgagagtttcttggaaacatttcctgaagaaccagcattagttcaactgcagctgctaaccgctactgttaaattgtttcttaagaagccaactgaggggccacaacagatgatacaggctgttctcaataatgccacagttgaaacagataatcctgatttgagggacagagcttatatatactggcgacttctgtctactgatcctgaggctgcgaaagatgtagttttggcagagaaacctgtgatcagtgatgactccaaccagcttgactcatcacttcttgatgagctgctagcaaacatttctaccctttcatcagtttatcataagcccccagaatcatttgtcagccgtgtcaaggcagctcctagggctgatgatgatgagtttgctgatacagctgaaacagggtattcggagtccccatcccagggagttgatggggcgtcgccttcctctagtgctggtacttcttctaatgtacccgtgaaacagccggcggcagcatccccacctggtccagtggtaatgccagaccttttaggtgatttaatgggtatggataatgctattgtccctgttgatgaacctgcagcaccttctggccctccgctacctgtcttactgccttcgaatacaggtcaagggctgcagattagtgcacaactaacacggcgtgatggccagatatactatgatatatctttcgagaatggcacccagggtgtcctagatggatttatgattcagtttaacaagaacacatttggtcttgctgctggtgaagcacttcaggcctggaaatctttacctgatgacaatgaatttacaaaagaattcccgggctctgtaatcagcagtatagatgctacagttgagcgccttgcagcatcaaatgtgttctttatagccaagcggaaaaatgcaaacatggatgttctgtatctgtccgcgaagatgccccgcggaatcccctttcttatagaggttacagctgcggttggtgttcctggtgtgaaatgtgcagtcaaaactccaaatagagagatggttcctctcttctttgaagctatggaggctctcaccaagtga

SEQ ID NO: 37499 - DNA, 276 bp, Zea mays
  Peptide Sequence Number=SeqID_80874
atggctaagtctgccagtcagactggcaaacaggtcgccagagctgtcaggggcggttcaaccgccccccctgggcggttcaaccggtctggtcaaccctggtcagcctgcaggcaactttcagctaccgtcggaacagtcggaaaggcagtagtcgcatgcggtcatgaagtcccgcatggcactggggttaccaagtccggagaaatcccaacagaagtcgggctcgtcatcttcctcggaccccgagggcccgtaggtcgagacgtccgttag

SEQ ID NO: 37500 - DNA, 882 bp, Zea mays
  Peptide Sequence Number=SeqID_80875
atggccaccactcagttcgccatggttgaggagctggcctcgctcatcaaggacaacctgcacagcaagcatctcatcctctccaccgaggagtccctcgtcgcagccctccaggagctgcactgccgtgaagaggacgacggcgcggcggatacgatagagctccagcctgccggggcctaccaccgccttctcttgcatcgccttgctgaaatttatggcccatctgttcttgttagtgatatgatatggaagtttgataacagcgatgatttcatgtctgttgtgctaacccgaaatgatacagattttcaaaaacctcagaaggcagatattgtccaaaaagacatttctgttaaaagctcgcgtctgaaagacaatacagactcgaaacctctgaggcagccagcagtacatcctgcagcatcattaaaggagagggaagctgcttatcgagctgctcgtgagcggatcttctctgtggatgatgccaagggaaacgataggtcatacgtgaaatgtcggcaggttcctgttgttgctcaacggatgattgcccatgcactcggtcaaaaggttcaaaataccacagaggcagttgcctccacagaaagcagaggaaaacataaacagctgccaaatgggaaaagtattccgacacatagcaggaacaacttctgcccagttacaccagataacaaagaagcggagatgaaagcggttattggttggatgttaattgttggacttggacccagagaggatatgtggcccggcgctggttcgaaaattcaagctcagatggggaaagatgttgctggatacgcattacatgccaagccaagtggaagagaaacgcccctcctgtcactcgtatggtaa

SEQ ID NO: 37501 - DNA, 1260 bp, Zea mays
  Peptide Sequence Number=SeqID_80876
atggccagtctgttgtcattatccatagtggagctgaggcttaaggctccaaaagctgctcttggtatcaaggacctcaagactgatatatctaaaactggaggactggatccagttcttaatgttcaagttaatatcatacctttatttgtgcaagcactggattcagacagcattggaaacaacacattggtgtttagtaaattggattggtgggttagtggacaatattgttcagccatggacacttcagaccatagctctttcctgtttgaggatatatcactctcatgtgatcttcatcagagggataaagcaattagagtaaaaaatttggacttgatgcttggtccaattgttgtgaatttggaagagaaattactagcaaaaaagaaaccatctgcctctactgttgctgagcaaaaggatgaaccttctgtggataataaatcagcagccagatctgaagggggcaaacttgcatcactaaataagaagatcatggtgagagttgtctcactgagtcaccaggttagcttcaatatgtccaaacttgttctgaagtttttgcctaaagatcatggcctctcaatcaacaatgaaattggtagcatatctttgagatgtacaaggttacaaccacaagacttcggagaggtcacaacacatattcggttggaaactgatgtaacggagattcatcttctaatggatggcgctacctccgtattagaggttgtaaaagtttcaacagttgtttcagctaacattccgtctcagccagcattaccagttcaagctgaagtagatatcaagattagtggattccaatgtaacctcattgtaagcagaattaagcctctgattagaataaactcagataaaaagaagcctcttgttcttcatgaaaatcctcagcaaaagaaggcacccaaagaaaaattagcattgtctttggcatgtactatgtcagttcccgagttgactcttgtgcttcatagtcttgatgacgtaccactttaccattggcatgagctctgcctagaggtgacaatgagctctaaattttacactataaaattgacttgggggactggtatggacccattgaagatcctgcggttagctccttttcataggtcccacatgggtgtcgaagtttgcatacattgcgggtctacccttcaaagcgttcccaagcgagaatttggatccatacttcttgcgcaaaagggcatgccaagcaaatgtggtaactag

SEQ ID NO: 37502 - DNA, 6306 bp, Zea mays
  Peptide Sequence Number=SeqID_80877
atgggcatgtggctaaatcagtgtatactgctgtgcgcttgttacatgactagtgcattcaaaagtcattatactaaatttggaatttatgatgcaattttggtagatgatgaatttgttaaatcagaaattgctggtgacaacaatgagtacatttccaactctttcagactaccaggattgccctccagtctccttgatgagatttgttgtatttttcaatcagctaatgtttctgccagtaagatgatagaccgaggaactcaattgcatggcaagcttggtgacttaaaatttcttgttcctagtaaacaccaacagtcaatgaaagaaggccaagataatgatgaggaccatgctaaatctgctatctctgttaatatatctggaatcagaatgcacttctgtttttcctatcttgagtcactctgtgcaactgcaatgtcatacaaagtgtttatgaaaagcattttgcctcctaagaaacgatctgtccaggagaatgcttctcaaaaatctaccaagaaagccaaaagagcactgcttctcaaaatcaatgttgcacagtgctctattgtgtatgatggtgaaatgaggctggaagatatgagtattgctgatccaaagcgtgtaaattttggttctcagggtggtcgtgttgtaatcatcaacgaagctaatggttccccaaggatggcttatgtaaattctaccagtcttccagatcataagaatgtccacttctccacttctcttgagatctatcagtttggtgtatccttgaataaggcaaagcacaccatgcaggttgaacttgagaacttcagattgacgcataaagaggaccagcttgataataaacctgtagaggaaaccaagctttttgatgtgcgtaaagcaaagtttgtccagcgttctggtgggttaaatgatattgcagcctgctctctcatcaatgtgactgacattgcagtaaggtgggaacctgatccctatctggaattgcttgaagtagctacacggcttaaatctgttctgcatagaatgaaactccagaattctgttaccgaggtaaaagatgaaacattgaacatggatattctttccaaaaaggaatcaccctcagaccatggtcagcaagaaaaggcacaaaagaagcgagaatcagtgattgccattgatttggaatcactgaaaatttcaggtgaacttgctgatggggtggaggcaatgattactgttggctacatattttctgagaatgcaaagataggtgttttggttgagggaatatcagtcagcttttgtggtgcgtggatattaaaaagcagtcggatgcagttatctcgtatcccaatttctgtttctgatagcaattctgataagaaattacaatctgcagctgcatgtgattgggttattcaatgccgtgatgttaatatttgcttgccttttaggttgcaactgagagctattgatgatgctgtagaagacacattgagggcctttaaacttatttctgcagcaaaaacatctgtgttgtttcctgagaagaaatctagtaccaccagcagcaaaaagagcaaaccaaaatcaacggcatttcggtatgtgcggatcatcgtacgtgacctgatagcagaaattgaggaagagcccatgcaaggatggcttgacgaacatatgattttaatgaagaatgtattttgtgagtccacagttaggttgaatctgcttgatgagctttcttcaggtaaaaataaggattcccccaaggcaaaactggatagttctgaaaagaacagtggttgccctgatgttgatgcatatgttcctggcacacactccattgaaaaactccgggaagagatctatagacaagcatttcagtcatattaccaagcatgccagaaattgccagtatcagaagggtcaggtgcttgttcaagtggcttccagtcaggattcaagatgagtactcgtagagcatcagttatgtcagtatgtgcaaaagatgttgatgtgagcttatcaaagatcgatggcggtgatgaaggaatgattagttttattaaatctctagatccagtttgtgacaaagatgacatcccgttttcccgattgtatggtagcaattttagtttgaaaactagatccttatctgcgtacttgagagattacacatttccactcttttccggaaccaatggcaaatgtgatggacgccttgtgctgggtcagcaggcaacctgttttcagccccaagcacgacaggatgtctatgttggcaaatggtggagagtaaatctgctacgctctgcaactggttataccccaccaatgaaaacatatgctgacataccactgtattttaaaaaggcggaagtatcatttggagttggttatgagccagtttttgctgatgtgagctatgcttttacttgtgcacttaggagggcaaatttagcaaagaggtggtattttgagcgtcctgagccccctagaagagagcgcagcttaccctggtgggacgatatgaggaactatattcatggaaaatttaaattgtgttttaatgagacaaagtggcatctccctgcttcgacaagtccttatgagaagcttgatgagctgttaatcataactgacttcatggaaatacattatgtggatggttatgtcagtctttcttcgaagtatctgagggtgtacctaactagcttagagagtctagcaaagaagtccagcttggaaattccacaccatccagctatacctttccttgaaaccccctcctttttcatggatatttcaatagaatggggttgtgattcaggtaatcctatggatcattttatatttgctcttcctgcagagggaaaaccacgggataaagtttttgatgcatttcgctcaacttctctgtcactgaagtggagtttctcacttaagccttatactactgaacccatagaacaccaaaagaagagtaatttgaatacaactgctccaactgtgaatgtgggggtgcatgatttggcgtggctaatgaagtggtggaacttggtttttcttcctccccataaactaagactgttttccaggtttccgcgttttggagttcccagatttgtacggtctggaaacctcccacttgacagagttatgacagaacagtgcattcgttttgatgccatgcaattacaaattaacaacatgcctctacaggcggatgatcctgcaaaaggtttgacactacacttcacaaagtttaggtacgaaatagctttcagccgtgggaagcagatattcacctttgattgcaagcgcgaacctcttgatcttgtctaccagggcatagacctgcacttgttgaaggtatttattaacagaattcctgaatcatcaacttctatggattctaagatagaaaataaggttctgcagacaaaagataaagatagtcttggttgtgaaaaaggaaaaaagaaaactagtccaaccgagaaaagccgagatgatggattctttctttattctgattatttcacaatacggaaacaaactcccaaggctgatgctgctagattatcagcatggcaggaagatggcagaaaaaaaactgaaatgccattgatcaagtctgagtttgatgggggggatgaaagtgatcatgatcaatcaggtagtgatgatgagggatttaatgttgtggttgctgatagttgccagagagtttttgtctatggactaaagattctctggaatttagaaaaccgggctgctgtcctctcttgggttggtggtttaactcaggcatttcagcctccaaaaccatctccttctcgccaatacactcaaacaaagattctcgagaagaaacagttaattaaagaagctgagatgtccaaggatggggctctcagctctgtatcctcaacatcacagccttctgaacctcaacaaatcaagagttcagagtcaccaccttccaatggatctggcaagccagatctgacatcaagtagtgaaaatgcacttaagcgttcaaataatagtgattcagaagaggaaggtaccaggcatttcatggttaacgttgtccaacctcagttcaatttgcattcagaagaagcaaatggtaggtttctgctagctgctggtagtgggcgggtcatggttcgttcatttcattcaattgtgcaagttggtcaagagatgtttgagaaagcaattggttccagtaatgatgctactggtgggactgggccagaaatgacctggtcacgtgttgagctctctgtcatgttggagcatgttcaggctcatgttgctcccacagatgttgatccaggtgctggtattcagtggttgccaaaaatacaccggcgatcatctgaagttaagagaacgggtgctttacttgaaagggtatttatgccatgccaaatgtatttccgctacacgaggcataagggaggaacccctgaactaaaggttaaaccactgaaagagctgacatttaactcaccagacataactgctggtatgacatcacgccaatttcaagttatgatggacgtattgactaaccttctctttgcaagaactcccaagaaaccgaagagtaatctaagctatcccctggacaatgatgatgacaacattgaagaagcatctgatgcagttgtacctgatggagttgaggaggtagtattagctaagattggtgttgaggtaaaagaaagagctcggaagctactgcttgatgatatccgggccttatctatctgtggtgaaacatctcatggtcagagtcagtcaccaaaggctaatgacattgcatggattgttactggttcaaggttaatgctggtcaaacaactgaagaaacgactcgtgaatgtccgcaatggtaggaaagaagcatattctatgctaagaaccgctatgcagaaagctgcacagttgaggttgatggaaaaagaaaagaacaaaagcccttcatttgccatgagaatttctgtgaggataaaaaagatcgtgtggagcatgttagcagatggaaaatccttttctgaggccgagataaacgatatgttgacaaccaagctgtttgtcctaaaaaatggacttgctaatgcaaaatcatatactgttgtatcaccctggaatccacctgctgaatggggcaaatgtaactctagatgctttaagatcataaggaatgcaatgcttcgtgttaatgcctggcagggagctccaactggtgggaatccagttatcgagagtttcttagtagacatctatccactaaaaatttatctgactgaagcaatgtacagaatgatgtggggatattttttccctggagatgaacagcaaccacaaaagcgacaggagcttttcaaggtctccactacagcaggaacaagacgaaagaaaaacacttctgttgcagagacaaacagtcccaataaccagtcatcaaaagaaactacatttgcacagaagcctgaacttcgaaggacatcttcatttgacaggacatgggaggaaacagttgctgagtctgtagctaacgaacttgtttcacaaatggagggtcaaacaaatacccaatatgaacctcaagatgctgctaaggattccaagttattacgtcctgtccgctctacccgcgaggataagaaaattgtagagcccaatgagttgaaacaatctagacctcaaaaaatgatggacttccgcaatataaaaataagccaggttgaactgcagctcacatatgaaggattgccatttgctgttagtgatggtaaaaagtttaaagctaaatctagcagccaaaaagaaccatctacagctttaatcagtgccgctgattttaatttaagtgacagtgatggtgatgaagctggcagttctgatcaacttccagcatttctaaaaaaacctagtgatggagctggtgatggatttgcaacctccgttaagggcttgttcagtacacagaaaaagaaagctatggcatttgttttgaagacaatgaaaggagacgctgatcatgatttccatggtgaacggagtgagaacgaaattgagttctctccatttgctcggcagttgactataacaaaaacgaagaagcttatacggcggcacacaaagaagttaaacaagtctaaggttcataaagttacagctactgagctagaagtggcagagctgccaccgcgtgctcctgggtacaacacggactcctcctccgactcgtcatcggcggaaacaagcccaaaagattag

SEQ ID NO: 37503 - DNA, 327 bp, Zea mays
  Peptide Sequence Number=SeqID_80878
atgaaaataggatggggagaactcggtcagtatacagtctatctgtgtcctgtgcggctgtgtcggatcggaaccgaaagcgaggaggaggaggatatccaatatcccttcttcaccgagggcacgcatgagcttctcaaggcacgcgtcgacattgcacactactctctgccccgtgccaaggccaggatcgagagggccaagcgccaccatgaggatcccgatgaggaccaagaggcggaggccgaactcgtcgtgaagcaggctggagagtttgtgctagagtgcagcgagattggagatgatcgcccgctgaaagggaattag

SEQ ID NO: 37504 - DNA, 324 bp, Zea mays
  Peptide Sequence Number=SeqID_80879
atgacgcgtgtcgtcgtctttaatcccaatagctcttacgatacgcgcttcgccatgctttgcctcctcgtgatcagccccatctgggtcatgtgggcggaagatctcaacacctgtcagatgttcgacgacaagcccaaaccaggatttatcaacattctcacaagtattgagtcacgtttgatgctgaggttgtcttttgcaatactgcctaactcaggggttatcatgaggaaggatggctcctacctgcaagatatattttcattgagagcgtggtgggatcttactgcaaagttccctataatgctcttttcgttctaa

SEQ ID NO: 37505 - DNA, 609 bp, Zea mays
  Peptide Sequence Number=SeqID_80880
atgaccagggcgaacagacggccggcgagcgcagcaggaaacaagaagccggggcgaactcgagcaggcagccatgggagggaggttagagccaggggcgcggtagagagagcagaggcgcggccgagtctgctcctagtcaacggccaccaggacgaactcgagcagggcggccatctggggacagggaagaagggcgcgcagcaggggcacccgacgggagccgagcgcgagaggcagacggccgagcggaaggaagatccaagctgggggccgaacagggctagagaagagagaaaggagaaggctggagcggaagaggaaggaagccgcggcagagagctcgccgctcacgcggccgtgacgagcagagcacggcgggccagggcgagcagagagagcagaggagatccggccgacggcgtcgttgggcgagcaggagccagggaggaagaagaacgcagagagcaaggagacgcgcggctggagagaggtggagggaggagagagatccaggcgccgagttggaggagaagaaggagcttgggcgagccgagggagaagctgggagctgtggcgctgtggagaagaaggatagcgcgtaattaa

SEQ ID NO: 37506 - DNA, 576 bp, Zea mays
  Peptide Sequence Number=SeqID_80881
atggcgcctcctgttgacgtggtcggttcgtgccctagattgggcgatgtggaggctcctccgaggtcgaggtcgagtctgtcttccgaggccgaggtcgagtccgagcccctgggtcgggcgaggcggagaccatcggctgaggccagggctgagtccgagccctggggtcgggcggaacggagttcgtcgtcttccggggctgagcctgagtccgagccctgggtcgggcggagcggagttcgccatcttccggggctgagcccgagtccgagccctgggtcgggcgaagcggagtttcctacggtgcctgaggccgggcctggctgcctgtcagcctcactctgtcgagtggcacaacagtcggagcggtgcaggcggtgctgtctttctgtcaggtcggccacctttgcattaaatgcccctgcgatttggtcggttggcgtggcgatttggccagggttgcttcttggcgaaggctgggcctcgggcgagccggaactttgtgctgatgggggttaccagctgagaattaggagtcttgagggtacccctaattatggtccccgacagtag

SEQ ID NO: 37507 - DNA, 2097 bp, Zea mays
  Peptide Sequence Number=SeqID_80882
atgggaaactccgctccgcccgacccagggctcggactcgggctcagcaccggaagacaacgaactccgctccgcccgaccccagggctcggactcgggctcagccccggaagacgacgaactccgctccgcccgacccagggctcggactcgggctcagccccggaagacgacgaactccgcttcgcccgacccagggctcggactcgggctcagtcccggaagacgacgaactccgcttcgcccgacccccagggctcggactcgggctcagccccagaagacgacgaactccgcttcgcccgaccccagggctcggactcgggctcagccccggaagacgacgaactccgcttcgcccgaccccagggctcggactcgggctcagcctcggaagacgacgaactccgcttcgcccgaccccagggctcggactcagccctggcctcagccgacggtctccgcctcgcccgacccgggggctcggactcaacctcggcctcggaagatagactcgacctcgacctcggaggagcctccacatcgcccaacccagggcacggtccgaccgcgtcaacaggaggcgccatcattaccctaccccaagctgactcaggctacggggaacaagaccggcgtcccatctggctcgctccgccagacaagctccagcgctcctccgacggccacgacaccacacgaaccgggtgccaagacctctccggctgccacgatggcatgtacttagggcgctatctctcctccgctagacacatcgcagctgcagaagcgaacaactctgccaagctcgactctaatccacgacatctctgcttcgcgccgccgtccgcatcctccgccgtccagcctcgtcatgccggctggcctcatccccgtcggccgccgccccagcaacgatgcctggccgtagctgtatttctcatcccgcgggccgccgccgccccagatgttgacctccaccagaggctgtgctcttcgtctgcagcgtcgagcacgagcctgtcgatatggtggcggaagaaggagatgggcaaggagggcctcatggcggtggcgctgctcaagcggctcgcagctctgcccccggtggggtgtcacccgcgcctggagcagttcatgcgttcgcacgtgtcgcagctcctccgtaccgacctcctcgccgagctcctccgccaggaccatgccagcctctcaatgaagggccatagcggagcggctggcgggtggcggctgctgcataccggtttagggtttggctttggggccttgggggcggcggctgtgtggcggctacgggctgctcgcctagtcgactgctcctctgctcgcgcggaccaggagcctgctcgcctgcttctctactgtgtggtggctgcgggcttctcgcgcggaccaggagctgaggcaccgagcaggggcagccggccgtcacttctgccggcgcaggggccacatgcgggcggccgggcaagcaggcgcagggggccgggcaagcaagcagtgcagcaagcaggcgcagcgcaggcggccgggcaagcaagcagcgcaacaagcaggcgcatggggccaggggccacacgtgaccagcagccagcaagcagcgcagtcgcagcccggcagtctatgattgcagctgcagaagcgaacagatctgccaacctcggctctaatccacgacatctctgcttcgcgccgccgtccagcttcgtcctgccagccgacctcatccccgccggccgtcgccccagccacgacgcctggccgtacctgtatttctcatcccgcgggccgccgcccgccgccccagatgttgacctccaccagaggctgtgctcttcgtctgcagcgtcaagcccgagcctgtcgatatggcggcggaagaaggagatgggcaaggagggcctcatggtggtggcgcagctcaagcggctcgcggctctgcccccggcggggggtcacccgcgcctggagcagttcatgcgttcgcacgtgtcgcggctcctccgcaccgacctcctcgccgtcctcgccgagctcctccgccaggaccatgtcagcctctcaatgaaggtttaa

SEQ ID NO: 37508 - DNA, 1074 bp, Zea mays
  Peptide Sequence Number=SeqID_80883
atggcctcagggcggacgctgctacaaccttgccctcgcccacgccgccgctcgaggggcgaggacacgtacaaagagccggaggcccgaagcgcggatggtggcggtgatcccgtcggcgacggggacttctcgagccgcccccacctcggcaccaacgacaggagccgtcagcccaccggcaggtccccactcagatcctcccggacgagtggagcaccgacctccgcgcggaggcgccgtaccggtgcaaaggcaggactgccccagaacacgaacgccgccctagcagcgcgcaacgtcttaggcgggtcctcccgtgcgtgcagcgcgacaaccgccctcgcggcaggagggggcaccgggagccaagccggcgagcccaacgcgctgaagctgacgacgcccgccgtcggccagccccgcgttatcgaagtccgccccgctcatagggccacgaggatgatgaacatccttgaagctgagggcgggaccaagatcgcagcccgacttgcttctccccacccaggggctggtggtcaccgtcttggaccagcgggcgaaagggcgggcagccatgcaggcggcatgcaaccgcgccaagtgggcgcgcccctccgacttccaacgcacccagcatgggggcccacgcccacgcgtcatgcaaccggcgcgccggtcgctacgtgcaagcaactgcaccgccactcgcaccactaccacgcctcctcgactgcagaaccagtaccgcgactcgaggcgaccctgcgtacgacccagcagtgccagcctggcgcgacggtcaatacggccaaaaatgggccggcagtaatggcggtggcaggcgggcaggagcagcggtcacgtcgtcagccaagcttacgtcccatccagggacagcgagagaaacctatctcacggcgtgaagaaggcgcgcccgtgttccgttcctcgaacggctcgcgcacgcgcaacggccaccccgtgaaccactcgccctgtcgcattaactccgcggcgggacaggcggcgcctctggcaggggaagcgagcgacgcttcgccttcgccataa

SEQ ID NO: 37509 - DNA, 999 bp, Zea mays
  Peptide Sequence Number=SeqID_80884
atgctcttccgccttccgggcctcttgctttcaccacgctcctcttgctttcaccacgctccttgtgctccggtgttcgctggagggatccgcgtcagggccatcccccagcggtctcaccgccggggagcttgtgctcttcgtttcctcccagctgcactctcccgccagtggtcatctacaaggatgaccaccagccttgtggtggagagaagcgagccaggctgcggcctcccccctgccctcaacttcaaggatgttcatcatccttgctggggtggaaggcgagccaagttggggtcctgccttccacatgggctgcgtgtctggctccctggcttggatggctttggcgccgcctccagcgtcgcctgccgccgccaagcggggcgcggctgttcatccaccgcacggttgatggtcgcgccgtgcgcaggtctgccgcatccgtggcgcactgctccgacgtcgcctagggggtcatacaagacgtcttacgccgcggaggtggcagtcgcgttcttggatggtcttgtcctcacccccgtagggggacagggggcgaggacctttccgcacgcggtgaggcgactgtcatcgccggaggacgggggcgaggacctctttagaatggtgcacgcattgaggcggccatcaccgttgtcacaccgtcttggaggatttcgcaagggcagtggccgcgagctttccagcgcgactctgctggcgtctgaccaacaggccgggtttatggggacggacctcaccgggttggcgtacacaacttatagagatgctccagcactagggggaggcactccttcagtcgcagctagacggtcaccctcgggactaggtcccgaccctgggttcccatctgcatttgacgagggagccctcgtcttcggctgtggccatttctgcatgaacctgtcggaagtctggacccgtagggagtccagaagggttttcgggggaaggcaggcttcggccccatag

SEQ ID NO: 37510 - DNA, 1686 bp, Zea mays
  Peptide Sequence Number=SeqID_80885
atggttcaactctttttgcaagtgccggcagaatgcggcagtgttaatacagttgtcgtggaagggaggagatctctttttcacaatgttgagtccataatcaagtcattgacaaaatcagcaggcaggtatgaagctcggctgtggctctgtgccactgtctcgttggtccattcgctcagtgactgtggccagagggacctgtttcttgatctcttagagaggaagaattccaggcgtgatgtcgctgctcgcttgctgcgtatgattttcgataagaaacccagaatggttgggtctattctagcaagaaaaggccatatactggaggatttcttccgaggaaatccaaacaggataatgcagtggtttggccactttgctgttactggggaatccacacatagaaagggagctaaggcactttcgcagtttgcgtttgtaaatcgtgacaggtgctgggaagaacttgagtggaaaggcaagcatgggcaatctccggctgtagttgctaccaagcctcactattttcgtgatcttgatgttctcgagacagtggagaatttcttagagtatgtcccagatttctggtcttctgatgagcttgctaattctatcaaagatggtgaaatactgcaaatcgatgaagaatattttgtagatcaatttttatacttaatgtatgaggagaattccaaagatgcatggcatgtggttgaagattttttgatggacgagcagttctcttctctttgccagcatcttcttatccatctggatgaggaaaggcttcttggtttcttaaattctttaggcaagctcatcaatcctactatgcagtgcaaggaattgacattcccgtgttgttggcttgaagttcttttatcaggacattatgatcacatatctcttgatgatcttgtctttttgaactgtgtcattgccaagggtagacaactttggcggctcatgaacgatgaagaacaacacgaagaatgggggcaaatggaagaacttttgaagggcggaaaccatttgactgatgctgatcattttgctctcatgaaggaacttgtggagacagaattacctggtgtgcttaagtgggtaggcattcagtcctggataattttctgtgaattgtcgaaagaatgcaaatcaggagattcttgtgaatcttttttctctcataacaaaatagaatttcacaaggctgatgattactcattggttcggaattatgggttctcaatttcacatatgcctgatattgatgttgaagatctaactagaagcagccataaaaggagaaagaggaataggagaaagcgccataggtacgagtctgatgaggacaagtttgatgaactgcttgaacttggatcatctgatggaaagaatggtgttgagtcacagcgtggaagctggcgcctttcaactgatggtttctctgcttcttgggacattatgcattctgggattgctgaacgctgcatgagatccaggacaactctctttagttgggatgctgaaggcattgaatatggtccaggcatttccttgaaacccatttggactttggagttagttgtagagaactcaggtgatgcgcgcaagtacgagtctttattgacacttccagtgatcctgaggaagagatggctgttgaagcaacttaaaaagtga

SEQ ID NO: 37511 - DNA, 549 bp, Zea mays
  Peptide Sequence Number=SeqID_80886
atggcgcgggggctgggtcccacgcgtcatgcaagctggcccagggtagaagaagccaaaccgccgcgcgcggtgcatgcaaccgcccagcggttacaagcgtccctccactttcacccagaccagcaggtgaaagggcggacagccgtgcaggcggcatgcaaccgcgccaagtgggcgcgccccttcgacttccaacgcacccaacatggaggcccaagcccacgcgtcatgcaaccggcgcgccggtcgctacgtgcaagcaactgcaccaccactcgcaccactaccacgcctcctcgactgcggaaccagtaccgcgactcgaggcaaccctgcggaccgggaaagggggataccccgaaaaggatccttctccgtgaaggaaacaggctccgagcctccctactgatcagaggttcaaaggctggcccctcggtcgtgcctcggaggggtttaacagccgcctcaaagcgcgtgggctccacacccactactggtcagaggttcgaaggccagcccctcggaagggttcaacagccaccttag

SEQ ID NO: 37512 - DNA, 432 bp, Zea mays
  Peptide Sequence Number=SeqID_80887
atgggggaggctacaagcgggagagaccggtcggtggtggaggctgtccgccggcgggagagaagatggggcgttgcaggctgtccagcgggagagaagatggggcggtggaggctgacaagcggcggtggtgctgggcactggaggccgcgaccgctggtggaggcgagcaagcgggcgggggcgcagggctggatgtcgtggccgcggattagggtttcatggagatgggcctcggacaaattggcagatgggcctcacacggcgtatgtgcctgtcttcatttttttgcaagattgtaatctcgctgacggggagtacatcctcatgccggagcaaggagttgctcacgaggtagcccaggatccagcaccagagcctgccatcaaggatctgtctgccccagctttggaaggcaagccccggttttaa

SEQ ID NO: 37513 - DNA, 972 bp, Zea mays
  Peptide Sequence Number=SeqID_80888
atggccgccgcgggtcccgggctctactccgagatcgggaagaaggccagagatctcctatataaggactaccacacggaccagaagttcacgctcaccacctacgccgccaacggagctggtgtttgccactgttattcttggcggatccttccctgtagatttagcccatgcgagtccaaatgtctaccagtggtttacttgaaagctactactgcataccagtgcttgctttactcagattttattctgctgcttcaggccattactgctgcaagcacgaggaaagatgaagctatctttaatgaaatccagagccagctgaagcacaacaatgtgactgtggatgtgaaagcaacttcagaatcaaatgtgataactacaatcacagttcatgagctgggcacaccaggcttgaaggcaattttatgtgttcctttcccgtaccagaaatctgcaaaggctgaactccagtatttgcaccaccatgctggtgttgctgcaagtgttggcctaaatgcaaaccctgttgttaacctttctggtgtattcggaactaaagctattgctgttggcgctgatgctgcatttgatacttcttctggggacttaaccaaatacaatgctggactgagctacacgacgcctgactttgttgctgcagcgactttgaacaacaaaggagacaacattgccgcttcctactaccactcggtgagtccaaccacagccgtcggaggagaactgagccacagcttctcgaccaacgggaacaccatcacctttgggacgcagcatgccctggaccctctgaccactgtgaaggcacgcttcaacaactacggcatggcaagtgcactgatccaacacgagtggaggcccaagtcactggtcaccatctccacggaggtggacaccaaggccatcgagaagagctctaaggttgggctctccctggtcctcaagccctga

SEQ ID NO: 37514 - DNA, 394 bp, Zea mays
  Peptide Sequence Number=SeqID_80889
tttcgccctattcaccccccctctaggcgactttcaacaacgccactcaccccgctccgactgctgcgccagccacccgggcaaggctaacaacagcaagttcggcctcaggcgcaacaggaagctccgcctcgcccgaccccatggctcggcctcaacctcggcctcggaaggtgatctccgcctcgcccgaccccagggctcggcttcaacctcggcctcggaaggtggtctccgcctcgcccgaccccaggactcggcctcaacctcggcctcgggaggaatcgcgtcctcgctcgaccccgacctcggcctcaggagaagtctccgcctcgcccaaccatgggctcggaccgaccgcgccgcgggggatacatcattaccctacccctag

SEQ ID NO: 37515 - DNA, 132 bp, Zea mays
  Peptide Sequence Number=SeqID_80890
atggcgggcggaaattcgctcgccggagctaaggaacggtggctggccgatgagggtaaatttggcacgactttgatatttggatcttctggctttgagtttggaaaagcagagaacacagatgatctttga

SEQ ID NO: 37516 - DNA, 534 bp, Zea mays
  Peptide Sequence Number=SeqID_80891
atggagtcgtggcggaggcggacgctgctcaaggtcatcgtcctcggcgacagcggatacgtgagcaagaagttcagccagcagtacaaggcgacgatcggtgccgatttcctcaccaaggaggtgctcattggcgacaggctcgtcaccttgcagatatgggacacggcgggacaggagaggttccagagtcttggcgtggcgttctacaggggtgccgattgctgtgtgctggtttatgatgtcaatgtcaagagaagctttaatacgctcgatacctggcatgatgagttcctcaatcaagctggcccatcggatcctcagcgctttccgttcattttggtcgggaacaagattgatttagatggcgggagcaaacggatggttccggagaagaaagcgagggaatggtgcgcctccaagggcgatattccatacttcgagacctctgcgaaggaggaccacaacgtcgacactgctttcctatgcatcgccaggctcgccttggagcatgagcatgaccaagacatgtga

SEQ ID NO: 37517 - DNA, 2085 bp, Zea mays
  Peptide Sequence Number=SeqID_80892
atgggacagtcaggcagagacagtcaggcgtgcacatggaaggataaggtggctgcacacgccgtcattcgcgacggtttctccgcaagaggtttcaggttccagcccagcggaagtgcagaattttgttgttcagtgcagggcagctggacagcatctgctaactggaactggatagtcgatcccctgaacggtgataaattcatcaaagttgctgaggttcagggaacagaaataaagccattcgtggagagtttatctaaatgcccaaagcatggacttcacaacccacttaaagctccagagaggtacctcatgtatggagatatatctgcaaaagctgcgcatatgctgggccaacctgcagtcttagatttctttgctaaacttatccagagggtatctcccaagagctaccaacaagctcttgcagaagttcaagtttctcaaaagtttttggaaaacttttgtggagaccaggtacgctttctggcaaggtcatttgctgtaccaggtaaccatcttggacaaagaagtaatggctaccgttggccatatggcccagttgcaattatcacaccattcaattttccgttggagatccccttactacaattgatgggagcactatacatgggaaataaaccagtactcaaggttgacagcaaggttagcattgtgatggaacaaatgattaggttgcttcatgattgtggattgccagcagaggatatggatttcataaattctgatggtgccgtaatgaacaagcttctgttagaggctaatccgaaaatgacccttttcactgggagttcacgggtagcagagaaattggctgctgatttgaaaggccgagttaaattggaggatgctggttttgattggaaaattcttggtccagatgttcaagaggttgattatgttgcatgggtttgcgatcaggatgcttatgcttgtagcggtcagaaatgctctgctcagtctgttctattcatgcacaagaattggtcttctagtggtctgcttgagaaaatgaagaaactttctgaaagaaggaagcttgaagatttaacaattggtccagtccttacattctatagtgaagatctagtagaaaatactgatgaccccgataaaatttttgctagcttcgctactgcagttactacagaagccatgatagagcacatgaacaaccttctcaaaataagaggatcaaaggttctgtttggtggtgaaccgttagcgaatcactcaattcccaaaatttatggtgccatgaagcctactgctgtatttgttcctctagaagaaattctaaaaagtgggaacttcgagcttgtgacaaaggagatatttggtccattccaggtcgagtttttagatacatggatgtacttgggagatccgttaacgggacaacctacgccggaattcgagcgaggaccacgggcgctccacagaaccactggtgagccaggacccaaaaattcagcttggcatgcacggttacaagtaggcatacatgaaactatatacggcaacgtaacatttccgtcccactgcaaaatccaggacttctgcatcgccgacctatccgccgccgccacgccgggcggctacccgtgcaagcccccgaaggacgtgaccgccgacgacttccactatggcggcctcgccacccccggcacggcgctgaaacccttcaagatctccctgggctcggccgtcgtcaccacgttccccggcctgaacgggctgggcatctctgccgcgcggatggtgatggtcccgggcggcgtcgcgccgctgcactcccacccgggaggcaccgagctcatcttcgtcatcgagggcagcgtcgtctgcggcttcatcagcgccacgctcaacagggtgtacaccaagacgctgtacgccggcgacctgatggtgctcccgcagggccagctccacttccagtacagccacggcaacaccacggcggtgacgctgtcctcgttcagcagcgacaaccccggcctgcagatcctcgacttcgcgctcttcgccaacgacctgcccacggaggtcgtgaacaag

SEQ ID NO: 37518 - DNA, 918 bp, Zea mays
  Peptide Sequence Number=SeqID_80893
atggcaggggcaagcgacacctctggcaggcgaagcgggcgccgtttcacctccatcatgatgaccgcgtcaaaaaagggatcgggaaaggggatatttcggaaaaggatccttctcagcgaaggaaacgggtcccgagccctcctactgatcaggggttcgaaggttgcgcccggcggggttcggcaatcgccccagagcactcgggctccgagccctttactgatcagtggttcgaaggctggcccctcggaagggttcgacagccgccccagagcacgcagagtcagggatgaccctgggtacgtccgttacatggtcgaggctcgggctacgctcccgaggtaccttaggacatttccgagaccagcgggaacgatttgtaatggaatcccaccggagggaggcaccgagccctcgggccctatcaaatgggtccgggtccagcaaatcacctgcagcttgaaaactcagagcctgaccatgcacccgggctgcggccaggccgcatgggaaaacaacaaggccgaccaaggcatcacaaaaagaattaagaccttccgaggcctcgggggctacaccagacgggaaaacagtactgttcgccccgctccggctactgtgtcaaccaccagggtaagactaacaacagtaagtcacagcctctcccgagttcagcctcgggcacaacagggagctccgcctcgcccgaccccaggtctcgacctcagcctcggcctcgggaggaggtctccacctcgcccgaccccaggtctcgaccttagcctcggcctcaggagaaggtctccgcctcgcccgacctcggcctcggccttgggaggagtcaccgcctcgctctaccttggcctcggaccgactacgctacaggggatacatcattaccctacctcaagctag

SEQ ID NO: 37519 - DNA, 1542 bp, Zea mays
  Peptide Sequence Number=SeqID_80894
atgccgccgccctccctcgtctccatcctccccgccgcgtccatctcgccacgaagacgccaagcaaagcaccccaagacccccaccgcgagccatcccttcttctcccgaagacttgtgtcccaaccgccgcgccacgcctcgatctccccctccgctgccggcgggagcgggagcgacgagctccaccttctcgagaagccgttacctgccgtcgcagaggataacgaggccgaggaggagctcgagtctgctccggtgtcatcaacagaagaagcgctcgcgccttttctcaagttcttccaggtgaagagcaccgaccccgacgtgggcgcagacaccgcggatggcgaggtgccggaggaggcgtcaaggagagatgtattgtccgccgctggtgagcgtggggttagttactacgaccccaagcccggggacttcgtcgccggcgtcgtggtccggagtgacgggaggacgctcgacgtcgacatcggttccagcggcgaaccagcgctgatgctggccaaggagtcggcgccggtgcccgcggaggagttcgggtacctagcgtgcgacgtcgcgtccaagtgtgcggcggagtttgcagcggaagggcgggtcggcgtcgtggtcaggcaattcaggggaggaggagagggggacggggaggcgatcatcgggaggaatgggaaggagaaagttgcgccggtgctgcgcgccgataatataactctaatatacttatttcctgctctcaaaggcttgaagctcaagctgttaaagcgtggttccgagaatggttttaataaaatgtatggggtattgaagtttgtagaaataaaacagctaaatgtacccatcaagatcaaaatttatgagtggaatgctagtggcttgctatctagaattgagggccttcgggcattccttcccaaacctgagatgatgactagaccaagaaatttcactgacctaaagaacaaagttgatcaagaaatgcatgtctgcattacgaggattgatgaagagaccaacgaattgataattagtgaaaaagaggcatgggcggtgacatgccttagagaagggactctcttgcaaggcacagtacgcaagttgtttccatacggtgcacaaattaggattggcgagactaacagaggtggtttactacatatctcgaacatgacacatggcaagctgagatctgtggctgatgtgctgaaagtcggcgagacggtgaaagctcttgtcataaaatcaactccagacagaattgctctgagcacaaaggacctcgagagcgaacctggattgcttatcactaacaaagagaaggtgttttctgaggctgaagagatggcgcgaagataccgggagcaaattgcagagccacagccacctggatccattgccgcggaagactcctgtgacgatgctgtccccttcaacgacgaatcccggtcctatgctaactggaagtggctgaaatttagcaagtccgacgacgtggcaaaccccaaatctggcgtcgaatcgtaa

SEQ ID NO: 37520 - DNA, 1164 bp, Zea mays
  Peptide Sequence Number=SeqID_80895
atggcgggcggaaattcgctcgccggagctaaggaacggtggctggccgatgaggggacagggagttgtagcgtcaccaaggtgccagtgtcagaatgcctggtcccgaggttgagctgcgccaaaaccgtgtcaaaaggatttggtttgagttcaaactttcccagaatgtgttcaagagaaaccctaggtgacactagggtgtcacatgggtcgcaaccctcgtcgtcgaggctgtggccatcatcagagcagctggagaggcagtggtcacatgcggacatgaagtcacacatggcaccgggatcacggagtccggagaaattccaactgacgtcggggtcatcctcttcctcggaacccgcgggtccggaggttgagacggccgtcagtcggtcccaagttgaccacatatggtaccccggaaggtcaggatatgcccttacaaaagcgcttaccgaagcggggtcgcttggtgggtcgaagctgaacctaaagggaacaggatggaaaactgaaggtacctgctggctggtagacggcggtgaagttgcatcggagatggaatgcgtcgttatctcaggcgcgagactgatgcccgacaagtccctcgcaaaggtgccggcgtcatcggtccgcctggggctggcgttttgctgggacgcgacacccgtcgttgtctcaggcgcgaggataacgcccgacatgtcccccgcaggggtgccagcgtcatcgactcgctctggtccgacagccgtcgaggtgctgcccctgcctggccatggttgccccgtctccgtctcctctgacgaggagggtggaagggttgactcgggtgttcctcttccgccacgtggagatgtcgtcgtcgagttcgtctccgccggacgagccgacgaccgtcgttgttgtcgtgctgcgggggaaggagtaccatgtcatagccgccgtcaggggacattaactcgaggctcccaaagcagagcaccgtcccgggctgaagagtctgctgaagattgttcatctagaactcaacgggaaagtattgtcaacacgcagcgtgcccctacctggcgcgccaactgtcggcgtttcggacccggggaccctcaaccggaccgactagtgaattttgtgtcgcgtgcccctgtccagatgggttga

SEQ ID NO: 37521 - DNA, 813 bp, Zea mays
  Peptide Sequence Number=SeqID_80896
atgacggctagcaacgccgcgtcaatcaccggcaccgccacgcacggcgcgacggggtccgatgggagcatggtggtgaggtcgagggggagccaacagatcgggctccagtacggcgacggttgtcggcagtcgcagactcagtcgatgggggcgtcgtgggacggtgggagcagatctcagctgttgaatgaacacagtgctgacataagggacccagcagcaggggctttctctggcgtcctggtcgaaacaaccccaccacctccggcacaagcacacgaagccttcgcattcctgtccggcggaaccgctgaaggaagggagccgaacgagcaagcaagccaccaacgaaggttgctagggccggagtggatggggttcatgctgcgggtgaggctcgcctccttcttcgtcggcgcggctgccgccgccgcgggcgggggctacttcctctacaaggactacaagctcgccaacgactctctggccctcaaggtacgcactccgcccctcttcctcctcgcttcgcatcagatcttagattgttgcgctcgtatcgctactggtgctctcggtggtggtgattctgaagcagtaatgcttgaagcgcatcggcatgttgcgtgcgggatggggggatcgagggtaaaccctcgacaggagggcgtgcctttgagctttagccctggccgtcatgccacacacatcttgtttgatgatccgatgacggtcgtatggtttggttttactaagaataccagttttggtagattgatgcaaggttgggtagcatttctgtctatcatgtag

SEQ ID NO: 37522 - DNA, 546 bp, Zea mays
  Peptide Sequence Number=SeqID_80897
atggaattagaaaagagatggccatgttcagccaaagtctgcgcagtctgggtgcaccggactgtccggtggtgcaccagacagtgtccggtgcgccaggctggctctggcgaacttgctgctctcgggacttcgacggcggtgtacggtataaatcaccggactgtccggtggtgcaccggactgtccggtgagccgttcacaggcgaagtcgtcggtctcgggaagccatcaaaggcgtacgactataattcaccgaactgtccggtgaggcactggactgtccgaaggaaacaaatccgcatcggacagtgtccggtggtgcaccggactgtccggtgcgccagtcgacagaaggcaagaattgccttcctacaatgctctcaacggctcctagctgcccttggggctataaaagggaccccttggtgcatggagaagacatccaagcattctttgagcatagttgatcactcacacttcgttcttgcgcacttgttcgacattcttagtgatttgagctccgttctagtgagaaactcgtga

SEQ ID NO: 37523 - DNA, 1056 bp, Zea mays
  Peptide Sequence Number=SeqID_80898
atgggcaattcattggttactgctacgtactgtgatctgaacccaatggcaatgcaagcagcgcaagggaaatggcctccttctgtcaactacgcaaaaaggcgtatatatgacatcactaatgttcttgaagggataggactgatagaaaagaagcttaagaacaacatccgttggaaaggagttgatgactctcgacccggagaagttagtgatgatatgtccattttacagatgggaagggtcggggagaagctcgatatcgactttgttatatccaccggggacaacttctacaagaacggcctcaagggcgtgcacgaccaggcatttaaagaatcattcatggatatctacacagctcaaagcttacagaaaccatggtactcaggaaatcatgattacaggggcaatgcgctcgcacagcttagcccagtcttgaggaagatcgacgaccgattcatttgcatgagatcgttcatcgttaacgcaagtataacagaaaaacaacttgtggacttcttctttgtcgacaccactccgttccaactggagtattggactcaccctggcaagcatcgttatgactggagaggggtggcgcctcgaggcaagtacatagccaattatctgaaggatatggatgtggctatgaagagatcaactgcaaggtggaagattgtggttgggcatcacaccatgaggagtgtgagtgagcacggggacaccgaggagcttctggaattactactttcagtcctcaaggacaatgacgtcgacttctacatcaatggacacgatcactacctggagcacattagcagcagagacagtccactccagtatttcacaagcggaggcggttccaaggcatggagaggagtcttccatccaaacaaggacaagctccggttcttctacaacgggcaagggttcatgtccctccagctgaaccaagaccaggctcacttcatcttttacgacgttttcgggaacatactgtaccgatggagctcgagacatcctcaatcctccacctatctcgatgaggaataa

SEQ ID NO: 37524 - DNA, 1725 bp, Zea mays
  Peptide Sequence Number=SeqID_80899
atggggaagtctccggcgaagtggatcaagtccgtgctcttcgggaaaaggtcgtcgtcgaggtccggctccaccaaggccaaggatttatcgaagggtacgactaacaaagcagcagctgctgctgctgctgctgccgggaaggagcccgcgttctctgagagctctccggtcatctcggagcctgtgcttgttagcgcccacaacaatgagaccgcgcgggaggccgctaagggtgagaattccagcgtgcaagaagtgccagtgactgatgtcagtcaagacttggagaagcagggcactgttgggtctgatacgtctaatgatgctgagaggttgagggaagagcaagcggccgtgaaggcacaagctgccttccgtggttatctggcacgccgagcattccgtgccctgaaagggatcataagactacaggcactgattcggggacatcttgtaaggaggcaagctgtttcaactctccgtgccacatggttgattgtgaagtttcaagcccttgtccgtggaaggaacgttagactttctaatgtttccattcaagcaactacggaactttcccaacagaacttcgggggttctaaacctggttcctggaaggagaagttgtcttcaaatgcatttgctcggaagcttctctcttcaccaattgtggttgaggctcttcacgtccagtatgatgagatggaccctaattcggccttcaattggttagagaggtggacagtaagtcatgtctggaagcctatttcccaaccaaagagagttggcactgatgctaagcctcatacaaggaaggccagttatgcaatggaaacagagtcagcgaaattaaagcgtaatgcacggaagagccctgcagtgccatttgagccttctcaaacaaacaccaccattgaaaatgagaagacaagacggaatccaaggaaattaagtagcactcctgctgagtcagttcccgatggccagttaacagaacttgagaaggttaaacgtagccttaggaaggttactagttccacggttgaaacctcaaaggtgcctagcccaacaactgagattcctgaccgtcaagaggtacaatgtgagagaccactaagaagtgcaaagcaagctccaattcatgttgagaatcaagaacctcagaatgttaatctatcggagaatgcaaagatggatattctggtaccagatatccagcctgacgtggaagttgcttcagatctagtcacaatcacaaatgaagaaaaagttgatgagacaccgtctgttgttgctccagcggctgaaattatgccactgcaagacatcaacagcgaagaaaatgctttggtgaatgatgtggaagagagatccaaagaagaacattcatctactgataacctgaaaggcagcaagaggaggtcttcattctcagctaaacctgaatatccagaaaatggctccaaaaattctccagccctgccaagctacatggctgctacacaatctgcaaaggcgaaactgcgggggaatagttcaccaagacttagctctgattcagcagagaaaaacgggttcactcgtcgtcactcccttccgtcccctaacaatggtaagataatttcacattctccacgtacgcaaaggccaacccatgctggtggcaaggacggagcaaaaggcgacaaggctatgctgtcatcaagagatgcgagcggtatgtag

SEQ ID NO: 37525 - DNA, 216 bp, Zea mays
  Peptide Sequence Number=SeqID_80900
atggcgttgtgtggaatttggagaggatttgatctctttgatgtcaaactggagagggaactcatagcggcggaggttgtggtgctggcggtggcgggtggcgaccgggtggctggggcagggacgcaggcggcaccgcggcaggacatgcctagagtcttggatggcagggtcggcgccgacggttgctcggtagagccgtcaaccgtagagtag

SEQ ID NO: 37526 - DNA, 531 bp, Zea mays
  Peptide Sequence Number=SeqID_80901
atggcggatcctcgccggagccacgcgattcggccgatctgggcccctacaacgtcattcgaaggcccctacgcacaattcggacgatggcgaaacatactagggctcaccgtaggtagggatggcgacaagggagtgatccacggcgtgatgcgacgccgcggcagagcactatcgtcggatcccagaaattccacggccgaaccggtctccgagaatcccggggaagggatcagatatgcattgaatcaggtgaagactctcagcgaaatccatggcggcgttcacggcgttcgttccctgggtctggcgagggagcagggcggtcacgggcatgattgggtgcggacaacctccatcaacccggttggtcaacaaccgcatcggccgcgacgaagtatgcgcggagagcacggcgcggaggagacctcggcggtagatgtaatcgtggacattactccacaacccatcacactcaatcaaagatccaaatcagacaagtatcataagaacaagcactcaagcatatag

SEQ ID NO: 37527 - DNA, 462 bp, Zea mays
  Peptide Sequence Number=SeqID_80902
atggaacaggatgctgatcccacaacctcactcctcggtggtggcccagcgagcaccaacctcgaggacgtcataggaggttgtgacgatgtcagagttggcggtcgtctgcttgatgaggatgaagaggaggaggaagatgtccctttgattcgcaagagtagccgcagcagcaggagcagtgacatcccaattgatcctgtcgggcaagagataacccggacattttctcacgcttcgtcgaccttggaaggtggtctagttcatgaggacacgctggcgcttgacgttgttggtcagagtcactcggctcctttgggtacgaccgagggtgcttcagcttctgagggtgctgctaaggacgatccagcccccgagggtggtgctaaggacgacccaacccccaagggtggtgccgaggacaacccagcccccaaggatgccgggccaggctcctcttag

SEQ ID NO: 37528 - DNA, 549 bp, Zea mays
  Peptide Sequence Number=SeqID_80903
atggagaaaggagggggagggcttaccacagcggtcgcgtgcgcggacgacgagacggggtcggagcggagcgatgaccgtgtggtggtgagggcgagggtgtggggtggagaagcgagagccggcgttcgggggaggaagaacggcaagggagagaaagagggaggtgggcgtggggcacccgagcggtggagggcgagtgggggaagaggaataggggccagggtgcgggccccatcggtcagccgcggcagcggcgcaacctaccgctcgttgcgtgcgctggagcgtggcgattgggctgggcgcggagcgcgcgcgctgggccaggttgggccacagggtggggggcacgtgggccgcgcggctgggaggagcaggctgcgccgccggactgccagtgtggttgggcctatcgagggagctaggtcgtgcgccagactgagcaggccgagagggggagggagggggtgttgggctgagggcgggctgggcctaattcccttccttttcctatttatcttctattcaaatctattcggtggataa

SEQ ID NO: 37529 - DNA, 594 bp, Zea mays
  Peptide Sequence Number=SeqID_80904
atggggggggagaggttccttcgcgacggggctgcggcgccgagaagccgcccagaagctgaaccaaaccggggacaagtcgtccaggtgttcgacgaaatggaccaagtggatgtgaggtttaagggggatgagatagggacaatgctggttacacaaggtattattttaatgcctactggcacaaaatcaataactaaaaagctcccaacggcgctcctgacgcttaagggcatgatcgacggcgacaaggctgaggcgacggagcaggtggccgcggcacttgcccagctcgaggacgccttcacggcgtgcaacaaggtgcagcatttcctcgtcggcgacgacatcgggttcttagacatcatcatcgagtcctacgtcggttggtgcagggccgtggagcggatcgccgcgcagtcggtcctggacgagatgagaacgccgcggctcgcgacatgggcggcgcggttctgcgagcacgaggccatcagccaggacatgatgcctgacaccagaaggctcgttgagttcggcgaggcgctccgagcagcacttgtcgccaatgccaatgccaacgctcaacggatgtaa

SEQ ID NO: 37530 - DNA, 565 bp, Zea mays
  Peptide Sequence Number=SeqID_80905
atgggtcgccatccaacatccccttcccatcgaattgttggaccttcatcgttctttggcctcgcagatgaatccgagatcgcattctcgcgaagggcaatgccagggtgtattatgttcaaatctacccctcttgagaatgaggacgaccttaggataacgttcggacccattgtgtgcaccaatgagacaaccctggttcctggagctgaggatgcaaattcattgtttgatggtcatgaggaagatattttaggtgtgggtgaaaactgtacaccagacccaagcaccgcactcaaaggaaagcgcaaggtgttccatgactctctaaagcctaggaagaaaaaggaactgagagatgactacatgataaggattgtcgatgtatttgagtccaggacctttagctcgaacaagtccatttcatcctatgacctgatgttgcggcctgatgatgaccaaaatgatgacgaaattactgaggaattcatagttcctctagttgctttggatatgtgtgggagctcgtcaagtggggtttcaagaagagccatggcagaaacat

SEQ ID NO: 37531 - DNA, 1392 bp, Zea mays
  Peptide Sequence Number=SeqID_80906
atgacaagactacagaagtctgggaagtttctgcaacctgtcttggactcctcaagaaattatttgactagtacattctacaatgcaagcttgaagaggagagttctgtcgagggttgagtgctttgtgtcttcagatccaataaacaatggttggttgaaaccaaggaggtcagagaacttcactagtttggagagcgcatgtgttcagccagaatacaaactaccagtcaggacacgtgctgactgtaaagcagagcagtatgaaataacaggctcacctttgagcccttctgatgttcctgctgatgccgttatgattggagatacaaacgagatttctccctggtggcaggagtttccaaagcgctggacggtcgttctcctctgcttctttgcgtttcttctttgcaatatggaccgtgtcaatatgagcattgcaatccttccaatgtcgtcagagttcagctggaatccagcaaccgttggtctaatccaatcatctttcttttggggttaccttctcacacagtgcattttgattcttggaggtatttgggctgacaggtttggtggtaagggtgttgccatgcctgctatgaacaacatcctttccaaatggatcccagtctcagagagaagcagatctcttgccttggtgtacagtggaatgtaccttggatcagtcaccggcctgtctttgtcacctctgttgattagcagatttggctggccttctgtcttttatgcatttggatctcttggaaccgtttggtttgcactgtggcaaagcaaagcacacagctctccagatgatgatccggagctaagtaaagctgaaaagaggcatatactgggtggcagtgccttaaaggagcctgtcacttccataccatggaggctaattctatcaaaggctccagtgtgggctctcataatatcacatttttgccataactggggaacattcattcttctaacatggatgcccacatactacaatcaggttttgaagttcaatctaactgagtcggggcttctctgtgtcttgccatggctgacaatggctgtttttgcgaatattggtggatggattgctgatactctagttcagagaggggtctctgtaacaaacgttcgtaagggtagcgatgctttttcacagtctggcctgtattcaaatcaccaagacataggaccacgttatgcgggggtacttctcggactgtcaaacactgctggcgttctggcaggagtttttggtactgctgccactggctacattcttcagaaaggttcttgggatagtgtgtttaaggtgtctgttgtgttgtacatagtaggaacggtggtttggaatgtcttttcaactggagagaaaattctcgaataa

SEQ ID NO: 37532 - DNA, 318 bp, Zea mays
  Peptide Sequence Number=SeqID_80907
atgaagctggggaacatgatctggcatagcccgtgtcctaggatgatgcctcagaagtgggagaaactcccgacaaacgagtacatcgagaaagacataactcccactgtcggcaagacgcactgcagtggcttcgacacctacctcggcactgcatcgacgattggggtgacttcagtcaccgccgtaattgaagacttctatcggggatccaacgactcggccttcgtccgagccatactccaaaaggcgctagccacctccgaacaattgttccgggagacggacatctacatcaccgcggatgagcgggcctag

SEQ ID NO: 37533 - DNA, 759 bp, Zea mays
  Peptide Sequence Number=SeqID_80908
atgggtgcaccaaaggtgcacccatcggcagaagcagaaatcgtgccatataataaacccataggccggaccaagaatctttgggctgattatttcaaaatcaactcaaagattaggggcttatgggggacagatatcccccggtccactagaaggcgagaaggcctcacgtggggcctcaggctagttaccccgcaaggccatcccttcgtgggtcgggctaaagctactagcggaatgggtcgacctgagaaggcaacagactcaagcccaaatccaccccaggaagtagggtattacgcctctcagagtggctcgaatctacagaaaatcgtctgtccctctcacgtgcgtccaacacgagccattgagttacagtcaacaacaccgtcctacccaaaagcaccgcaaggggtaaccctaggtgtgcggtcggactctaaacgccgacagtctcttcctcaaacagacctcgaaatcgggtcggtcgacagatcgtgggttgctaggatgtcgtgctacatgggtctcgagctgagccttggggtcgagctagagaagttgtgctaccgcctgggccagcttctagactatgttggggcccatggcacttccctggtggagcacctagacaatgccccgtgccgcatttgggatattgctgacttcgatgtccaccggggagcagcagtggcgctgcttatggggaagatatgcttcgactgtagcctccaggatatcgtcgtccctttcggatga

SEQ ID NO: 37534 - DNA, 633 bp, Zea mays
  Peptide Sequence Number=SeqID_80909
atgggcaagagcaacaaacgcaagcgcgagccgactcctccgtcggaggacttcggcaactcggaatactcggaggaggagttctcctccgagtccgaggggtctccggctcccgtctctcccccggcgtcgtctgacgattcagacgactctcaggggcttgccgcggaggtctggacttatatccgggccgtcgagcgctccgggctcgagggctcggatgagtcggagtactcctcggacgaggaggactcgtccgaggagggcggtggcggcgatggcggagacgacgacgacgacgatgaggcgacggcgacgatgacggtgacggcggcggcaggggcggcaacggcggcagcaagggtggcaacggcggcagctgtcggtgttttgggtccgaccgctcacccggggttgcccctcaaggttcgggctgctttgagatgcgtaacaccctacgtcttggcgatggacccgggggatatctgtcccccacaagcccccgatctttgggttgattttgagataatcagtccaaagatcctaggtccagcttgcggaccccgaacttcattgagtgcaccgaaggtgcacccaatgggtgtagcccccgagcttcgagtggatttttga

SEQ ID NO: 37535 - DNA, 537 bp, Zea mays
  Peptide Sequence Number=SeqID_80910
atgggcgggggcctcttggtagcagcatccgccctgaggtcagcgctgccgctgttcggccccccagagcagaagtcgtcgtcgtcgccgctgctggagcgggcgacggcgcgccgttcgtcggtcttctgttgctccgcatgcccccccatcgagtggggttgttcgtacctgcggaggtggaaccagagttccgtttgtaatggcactttgaatgccagtgtttttgttcattgtggctgtcgaggcctgaacatggatgtttgtgcgagcgagagttgcttctcgcggaaggtgatgagtgaggtatccgtatcccggaggcgtaggagtccctcggctcggtcggccttgccgcttacgcgcactcttacccgtccatggggctctgtcaccgacgcagtcgagaaggctcgaaggatcgcttcggcagaagagcttccgaacgtgaagacttgttcggtccacggaatcacttatccgaacgtgagttacttatcgcagaaggtgatgagtgaggatccactttcgaagtag

SEQ ID NO: 37536 - DNA, 435 bp, Zea mays
  Peptide Sequence Number=SeqID_80911
atgggcaagagcaacaaacgcaagcgcgagccgactcctccgtcggaggacttcgacaactcggaatactcggaggaggagttctcctccgagtccaaggggtctccggctcccgtctctcccccggcgtcgtctgacgattcagatgactcccaggggcttgccgcggaggtctggacttatatccgggccgtcgagcgcttcgggctcgagggctcggatgagtcggagtactcctcggacgaggaggactcgtccgaggagggcggtggcggcgatggcggagacgatgacgacgacgacgacggaggcgacgacgacggtgacggcggcggcaggggcggcaacggcggcagcaagggtggcaacggcggcagcagcaggggcagcaacagcggcggcagcagcaagggcagcaataaggccagtggctag

SEQ ID NO: 37537 - DNA, 348 bp, Zea mays
  Peptide Sequence Number=SeqID_80912
atggcgctcttctttccgtcctcctttgagggcgaaggcatcgaaaagatggctcgacatgtttttgtcccctggcttgggacatttgcttccttctttcaagtgatccgtgtccactcctttgtgggcaaggtggacaatggagtttttcgggaaagcttcttctccagcgggtctactatgcggtgcagggttccctcttcatccactatggatgagatggttccaaagcagaacatagttttggggcaaaggacgatcttgcacttggaggtgatggccattgagatagcttggatcaaggacaccccctacctagcgcgcccagggttaactgtctacgtttag

SEQ ID NO: 37538 - DNA, 1647 bp, Zea mays
  Peptide Sequence Number=SeqID_80913
atgcccacatacctgatgggttttcatttgaacccattaataaacccatgggtagagaaattagcccaaacccatgtcctaatagagcaaaaatccaccgggtttcgggtacccattgctatctctcgtggagtaagcgtgaaatggcagaaggagctctttccaggcatagagattgacactagccagcctccgattgttttcaagactcagttgtacacactaactggtgtgccacctgaacgccaaaaaattatggtgaagggaggaatattgaaggacgatgcagattggtctactttgggagtgaaagatggccaaaagttgatgatgataggcacggctgatgagattgtgaaagctccggagaaaggtccagtgtttgttgaggatctaccagaagaagagcaagtgattgcactgtatgcttcctgtgcacatctgtcattacaactttgggcgataggtgggatccccatccctgaattcagtaaactatcattttttggagacatacatgaaatgggaacatatgttttgtatgttccaatggcattgggtgttggactgatgggtcacagtgctggtctttataaccttgggaatacatgctatatgaattccacattgcaatgtctgcattctgttccagagctgaagtcagcgctgctaagctattcagatactgtaagaggtaatggcattgaccaagcttctcataatttgactgttgctactcgtaatacctttggtgatcttgatcaaagtgttcgccctgttgcacctctacaattcttgcagacactgcgtaaaaaatacccgcaatttgcacagcagcataataatgtctacatgcaacaggatgcagaagaatgctggacacagttggtgtatacgctttctcaaactcttacctcagattcaagtgaatctgcagctcttccgatgaagcaactatttgggatagatctcgcaggagaggtgcatagaatagcatataattatagaagaaaaatatggtacaggtccagttcaaaccagcaaaagattatggtccactgtgcagaaagtggtgaggagagcatggagacagaatcagtatattcccttaagtgtcatatatctcaagatgtgaaccatcttcatgagggaattaagcatggcttgaagacagaacttgagaaagcttcacctacactgggtcgaactgcagtttatactagagaatcaagaataaatgagctgcctaggcaaaaagttgattacccactggaattggatgtttatgaattttgctctgatgaactgaaacagaaactccaagcacctcggcagatgctgagagatgcagaaaatgcaaagtttggattgaaagcacaagggaaagctagcggctttaaagaaaatgagaaacaattaactggcgtctatgatttggttgctgtcttgacacacaagggaagaagtgcagactctggccactatgttggctgggtaaagcaagatgacggaaaatggatcgagtttgatgatgacaacccaaacatccgcaaggaggaagacattttgaaactatctggtggaggtgactggcacatggcttatatctgcctatacaaagcccgcatggcggagttgaagagttag

SEQ ID NO: 37539 - DNA, 942 bp, Zea mays
  Peptide Sequence Number=SeqID_80914
atgcaggcagcatgcaaccgcgccaagtgggcgcacttctccgactcccaacacgcccagcatggaggcccaggcccacgcgtcatgcaaccggcgcgccgaatgcttcgtgcatgcaacagcaccgccacttgcgccactaccgcgcctcctcgactgcggaaccaataccgcgactcggggcgacccagcgcacgacccagcagcgccagcctggcgcggcggagaagtgggcgacgcttcgccttcgccataatgaccgcgtcagaaaagggaccgggaaagggggataccccgaaaaggatccttccccgtgaaggaaccaggctccgagcctccctactgatcagaggttcgaaggctggcccctcggaagggttcgacagccgcctcagatcgcgtgggctctacacccactactggtcagaggttcaaaggccggcccctcggaagggttccacggccgcctcaggctactcgagctccgcgcccattactgatcagggggctcggactcgggctaggccccggaagacggcgaactccgctccgcccgacccaaggctcggacttgggctaagccccgaaagacggcgaactccgctccgcccgacccagggctcggacttgggctcagccccagaagacgacgaactccgctccgcccgaccccagggctcggactacgccctgacctcagccgacggtctccgcctcgcccgacccgggggctcggactcgacctcgcccacggaagacagactcaacctcggcttcggaggagcttccacgtcgcccaacctagggcgcagaccagccacgtcaacaggaggcaccatcatcaccctaccccgagctgacttgggccacggggacaagatcggcgtcccatctggctcgctccgccagataggcgatgatggcgccccgcatactctgtga

SEQ ID NO: 37540 - DNA, 1377 bp, Zea mays
  Peptide Sequence Number=SeqID_80915
atggagagtcatgatctccgggcagaatgggaatcacggcttgtgggtggttatgagattgatggttctggttatggttatggtgctgctagtccactacagccaaacaggatacttgctgagtatgttgatgtgtactcacccttgctctacacaccaaaccccccccaggttgtcagcattgcaaccactgctcaggagaagatgaagctgtggaaggagacttccaggagttccaagattacgacgagttctaggtgtgggttagcggcaacccccagtcggctgcctgtgaaggccgcgttatctacgtttcttttccgcactttgatttattgtaagacctatatggacgtctcagacatggctcgacttagacacactgcacgaaagtcagtcatccccttcttaccctcccgccttgctgagcgtccgcttcgccgtcccgtggccggacagtccagccacttggagagactacaccaccgcctgcgtgaggagcaggaacgtcgacgacaggagcagcggagctcttccctctcgctccaccaggagatagagtctgtgaggagctgctcccctatgcttcctctggagccgccccctgcaccaccactgggcgccccagcttctggagtagctgctggaggagacccagacaacggaggaggcgacgacagctcgagccacgacaccgacttctctgctaatcctgagccggaaggatgggttgctcgacccatcactcgcgacgctgctcgcgggtgtcacttccatgatgcgctcgacaccctgctacgtcgggcatttgaccggcatacttggtccgtcgagtatcgctgtgtggtctaccagcatagtcgcggggtctacccggaccgctgggaggcgacttgcttggtgcgctgcccggaggacagtctccagggtgcagaggcctgttcagagcactattctatctctgagcgggactcagctgaggcagccatgcaagatgctgcacggcgtgcgctttcgcactactgctcggttttcggtggggcagctgacggtcttgacctgaagtattacccccgccgttcatctggcagcacaggaggcgtgattgtctcacctgtcggtgagggcaatcctaggttgagcagcacagtcaacctagccgccgtgctaaacacggagctggaccatgcattagacgagctgagtagggctcgtgctgagatcgccctgctgcgggctgagcgcgcggaacgtcgttttctggatggtggttcccccgctcccgttgggactcagcacccgtaccgctcacctcagcgtggacaccagtcttatggcaatcccgcctgcaagaccaagatcaacctagaaccatag

SEQ ID NO: 37541 - DNA, 174 bp, Zea mays
  Peptide Sequence Number=SeqID_80916
atggagagtcatgatctctggccagaaagggaatcacggcttgtgggtggcaatgagattgatggttctggttatgactatgatactggttgtcagcattgcaaccactgctcaggagaagatgaagccgtggaaggagacttccaggagttccaagactacgacgagttctag

SEQ ID NO: 37542 - DNA, 219 bp, Zea mays
  Peptide Sequence Number=SeqID_80917
atggggaagcctatcccatcactcctcatgctcctcctcggccgagtgaccgcacttgtacccaccataaccggaatgggagaccacgtctcaggtcgcgtgaggagggcaatctgcgggcaggttcactcagaccacgcatccccatggatccgtgtccacagaccatcatggttcttgttatcaaagtggatacaaccaattcctgacctcgcgtga

SEQ ID NO: 37543 - DNA, 408 bp, Zea mays
  Peptide Sequence Number=SeqID_80918
atgaatgctgggtgtcgcaggtgggaaggtgaatcgtcaaagtctcccgcaccgaacaaacagtcacccgcactcgctgaacggtgggccacagggtccaagaagagcagctcacaccaattcctgaagagcgttggcatcaaaacatcggcatcctccaaggcatcatcatcaaataaaagtgagcttcgggaacaacttgcagctgaagcgacggctgctgttcaaggtgaactcgacctgcttaggaagaaatgtgaagaagctgaggaacagcaggcgaggacacaaagggagttggaggagtacaagaagataatagagaagaacagcaaggagatggaggagaccaatgtgctcatcaagaagctcttgtccttgcatggtaactcttcttcgtcgacatga

SEQ ID NO: 37544 - DNA, 522 bp, Zea mays
  Peptide Sequence Number=SeqID_80919
atggaattactcagcaagtcttacccgactaaagaaaagactctcaagggtatgctggttatatgggagtcaagggtttcaaggagggtaatcaagatcaaggaagtaaaaagaaaaaggaaacagatgaatagtactgggctgatttcaacccagcctgcccacgagaaccgcgaagaccatgatcgtttggtcgtgttcccgtcgagtggtggtctcttagttcaaattggaggctcgcttactaccctacggagttcggggaggggtcaatttatagtgctagcgggcggtggccgcgaatttcgagcaagacgcgcggcggtcggaggtggagaagaacactggcgcatgcgaattagtgtcctacgccgtggcaacctcaccggcgttgatttgacagcagtagcgagttacagcgacgcggtggaagggttgagccacgcggcgcacggccgggaggcggcggtcgacggtgagcttatcggctacagcagcaaagcagaagggcagtcacggtga

SEQ ID NO: 37545 - DNA, 486 bp, Zea mays
  Peptide Sequence Number=SeqID_80920
atgccgccacgcacaaggctaacggcgcgcaagtcaactggaccaatcagtgtgccctggcatcaactggcccctcgacatgaaagcagtagcagtgggagtaatgaccccataggagatcttgaagcccgagatcagcttgctgatcaggacttagcacttgactgggcagtacagtcccgtttgctggcatgtgctaaggaagcaagggctcaggcccgaattaaggaacttagctcaactgtcgatgacctgcaggtctattgcaatacgttgcatgaggaagtccatgtactgtactcgcaactacaccctagtgcacctgcacaccctgctgaggcggaagccagaccctctcacgttgcgggacgcgcgctgggtgtggagttagacctttttgagccccctccttccatgaggttggttgacgtctggactcccacacctgacgatgaggccgccaagagtaatgggaagcaggactaa

SEQ ID NO: 37546 - DNA, 369 bp, Zea mays
  Peptide Sequence Number=SeqID_80921
atggagagtcatgatctccgggcagaatgggaatcacggcttgtgggtggttatgagattgatggttctggttatgattatggtgctgctagtccactacagccaaacaggatacttgctgagtatgttgatgtgtactcacccttgctctacacaccaaaccccccccaggttgtcagcattgcaaccactgctcaggagaagatgaagctgtggaaggagacttccaggagttccaagattacgacgagttctaggtgtgggttagcggcaacccccagtcggctgcctgtgaaggccgcgttatctacgtttcttttccgcactttgatttattgtaagacctatatggacgtctcagacgtatga

SEQ ID NO: 37547 - DNA, 354 bp, Zea mays
  Peptide Sequence Number=SeqID_80922
atgatgaagttcaagacccagggtgcagttgctgacacatcttcagatgatgatgaggaccttgggatcccaccaccgtctcctgtgccacctcgctcacatgatcacgtggtgggtagttccagtgctgctcctgctgccccacctgctattgaccctgctcttgtcgcgattcttcagtcacttactcagcagcaggctcatctagcagcagagcaggctcgacagactattcaggaccgtccggacactctacagcagcagctcttggcagacagggccaagcaccgggcattcatgacacatattcttcagcacaccggtgctcagctccctccagttgagagcacctag

SEQ ID NO: 37548 - DNA, 87 bp, Zea mays
  Peptide Sequence Number=SeqID_80923
atggacgcgcccactttcacactcggttttggaagtggactagctttatgtggggttaaggtcaagcagttgcttttagttggtcag

SEQ ID NO: 37549 - DNA, 129 bp, Zea mays
  Peptide Sequence Number=SeqID_80924
atggctggcaaccaccatcagcacaaaccgcaaaggctgatgggcgcggttcaggttaaggcctcgtctaccaagggacttgatctcgcctcgcccgagcccggcctcggttgtgaactgaattcccag

SEQ ID NO: 37550 - DNA, 147 bp, Zea mays
  Peptide Sequence Number=SeqID_80925
atggagagtcatgatctccgggcagaatgggaatcacggcttgtgggtaaagtgtgcgacctctgcagagggttagaaactggtaaagaagaaggcgtcgaggcggatctccaggagttccaggacttcgacgagttcgaggattag

SEQ ID NO: 37551 - DNA, 300 bp, Zea mays
  Peptide Sequence Number=SeqID_80926
atggcgcaccggatagtccggtgccccctgccgaccgttgcgctggcgaccgttggctcaccggacagtccggactatcacaaggatatagctcaacgaataagagctcggaagggaagaggacaagaagggagagaaagagacagagagcagaagttcttctacaaaaagaagggaggcaaagcccacgccggcaaggagcgggactcagacgagaattcctccaacgatgacgatgaggacatcgtcaccctcgccaccaacaaggacattgtagcatcccaaaaattcaaatcctga

SEQ ID NO: 37552 - DNA, 786 bp, Zea mays
  Peptide Sequence Number=SeqID_80927
atggcgcctcctgttgacgtggctggtctgcgccctaggttgggcgatgtggaagctcctccgaagccgaggtcgagtctgtcttccgtggccgaggttgagtccgagcccccgggtcgggcgaggcggagatcgccggctgatgccggggcggagtccgagccctggggtcgggcgaagcggagttcgtcgtcttctggggctgagcccaagtccgagccctgggtcgggcggagcggagttcgccgtcttccgggacttagcccgagtccgagccctaggtcgggcggagcggagttcgccgtcttccgggacttagcccagttcatcgtcttccgggacttagcccgtgtccgagccctgggtcgggcggagcggagttcgccgtcttccgggactttagcccgtgttcgagccctgggtcgggcgaagcggagcttcctatggtgccttcgaccaggcctgactgcctgtcagcctcactctgttgagtggcaccgcagtcggagcggcgcaggcggcgctgtctttctgtcaggctggtcagtggagcggcgaagtgacggcggtcacttcggctctggggggcgcgcgtcaggacaaaggtgtcaggccacctttgcattaaatgctcctgcaacttggtcggtcggtgcggcgatttggtcagggttgcttcttagcgaagacagggcctcgggcgagccagggacacatttgccgttggaggggggcctcgggcgagacggagaccctccggggtcggctgcccttgtccgaggctag

SEQ ID NO: 37553 - DNA, 597 bp, Zea mays
  Peptide Sequence Number=SeqID_80928
atgcaggtggcatgcaactgcaccacggagacgcaccctttcgacttcgacgcatccagcatggaggcccaggcccacacgtcatcagtcaaatcgtctgaaggctcacgtcccctcctggagcagcaggggagccctctcccacggcgtgaagacgacgcgcccgtgttccacccctggaacggctcgcgcaacggctgccccgcgaaccacccgtcccggcgcattaacttcgcggcggggcaggcgacacctttggcagggaccgggaaaggggatatttcgaaagggatccttctccgcgaaggaagcgggccccgagccctcctactgatcagagccgcctcaaagcactcgggctcaacgcccactactgataaggggttcgaaggctggccccccgaagggttcgacagccaccccagaacacgcagagcgagggatgactttgggtacgtccaatacatggccgaggctcgggctacgctcccgagaggctcgggggctgctctcgcaaacccggctctggccaaaccgttgacaccgtcaacataccagaccgagaactcggaacctgaccatgcacccgggctatga

SEQ ID NO: 37554 - DNA, 1839 bp, Zea mays
  Peptide Sequence Number=SeqID_80929
atggactccatggagcagccggagcccaaaaccgcgggccactactacgcccttcaggttggctccgttttcctgacgggctactacaacgtcctgacgaaccagccgcacctggcgaaccagttctacacggacaacagcagtgttgttagactggactgcgagacgggtcggtggtcgtttggagagacggtggaggttatcaatgatatgatgatgtccatgaaactaagcaaggttgaggttaaaacagcgaatttcttagagtcatgggctggggcgattacgctgttggttactggcctagtgaaattgaagcactaccctgttcgcaagcgatttgctcagaatattgttcttgctccaaaggaagatggatattttatattcagtgacatctttaagctcatttgtgatgagtatgatgatcagtacccttttgctgattacaattgtgctgacaacatgccccaagtggaagcgtcttacacaatggctgaaatagggtctgattatttggatggagaacctgaggcacaggagactgttgatcctgctgaaaatcatgtgcagcaccaagattatttggaatataaggctggcaatgtgattgatgatgaaactcatttggaagagcatattcccccattccccagttcaacggatgttaaaagggattcacctcttgctcttccccaccctccatcacctaccctcgaagaacctgtggaagaagcacccaagacatatgcttcagtgttgcgaacgaaatcaaaggcaacgctggcgattacagagtcacagcaggctcaacagctggcccagcagccacagtctgcctcagtgcatgaaaagtctaacctggacaaccaccgggatgttagcgtccctgaggatgaagaagagtttctttcggtttatgttgggaatctttcgccatctacttcggtctttgatcttgagaaagtgttccaggcttttggaagaattaaacctgatggagttgctatccgaagccgcaaggaggctggagtattctttggctttgttgagttcgaagacatgtctggtattcagaatgctttaagtgcatctccagtagagttaaatggccgttttgttcatgttgaagagaggaggcctaactgcggattccctcgtggaaggttggtaattgtgattgtaattacttactctgcaggaagaggccgtggaagagctgatttctcaagggaccaagctgccccggaagacgacgaactccgcttcgcccgaccccagggctcggactcgggctcagccccggaagacgacgaactccacatcgcccgaccccaggactcggactcgggctcagccccggaagacgacgaactccgcttcgcccgaccccagggctcggactcagccctgacctcagccgacggtctccgcctcgcccgacccaggggctcggactcgacctcggccttggaagacagactcgaccttgacctcggaggagcctacacctcgcccaacccagggctcagaccgaccacgtcacaagaggcgccatcattaccctaccccaagctaactcaggctacggggaacaagaccggcgtcccatctagctcgccccggctccagcgctcctccgacggccacgacaccacacaaaccgggtgccaaaacctctctggctgccacgatggcatggccctcttacagaaggttggccgcgcggggaaaggacgggacggcgctcgcggaccccccgggttcgaaacgccgacagttggcgcgccaggtaggggcctgctgcgtgttgacaaacagcttcccgtcaaactctag

SEQ ID NO: 37555 - DNA, 825 bp, Zea mays
  Peptide Sequence Number=SeqID_80930
atggcggtggcaggcgggtggaagcagcagtcgagtcatcagcaagctcacaccccctcctgggatagcgaaaggaccttctcccacggcggaagacgacacgacaagcggcacctttggcaggcgaagcaggcgatgattcacctccgccataatgacctcgtcaaaaaagagcactcgggctccgcgcccactactggtcagaggttcgaaggccggcccctcgaaagggttcaacggtcgcctcaggccactcgggctccgcgcccactacagatcaggggttcgaaggctgaccccgaagggatcgacagccgcctcagacgcagagcgagggatgaccctgggtacgttcgatacataaccgaggctcgggctgcgctcccgaggctcgggggctgctctcgcaaacccggctccggccaaaccgttgacagcgtcaacataccagctcgagaacttgggactcgactgttcacccgggctacggccagctcggccccggaagacgaagaactctgcttcgcccgaccccagggttcggactcgggctcggccccggaagacgacgaactccgcctcgcccgaccccagggctcggactcgggctcggccccggaagacgacgaactccgcctcgcccgaccccagggctcggactcggccttgacctcggacgacagtctccgcctcgcccgacccggggctcggacacgacctcgacctcggaagaccgactcgaccccgacctcgaaggagcctccgcctcgcccagggctcggaccgaccacgtcacaggaggggccatcattaccctatccctag

SEQ ID NO: 37556 - DNA, 258 bp, Zea mays
  Peptide Sequence Number=SeqID_80931
atggcccaacagtgccaaccaggcgcatcggtcacgggtcagttagccgcgggagaaggcgcgacagtcgatatgcccaaaagtgggccggcagtaatggcggcggcagggaccgggaaaggggacactccgaaagggatccttctctgcgaaggaagcgggccccgagccctcctactgatcaggggttcgaaggctggcccctcggaagggttcgacagccgcctcagagcactcgggctccgcgcccgctactag

SEQ ID NO: 37557 - DNA, 150 bp, Zea mays
  Peptide Sequence Number=SeqID_80932
atgacgaatgggcaggtagagcgtgccaacaacatgattctgaagggacttaagttgaggatctacaacgacctcaacaagttcggttcagacatcaaaagggggagcaacagcaccctcggcatcgtctccaccttcggcggaatctga

SEQ ID NO: 37558 - DNA, 714 bp, Zea mays
  Peptide Sequence Number=SeqID_80933
atggggagcgcccgcgttgcatcgcgcccttttgtggaagttggcacctttcagccatcgctcggcttcaaggattttcatcaggcagcccgattcttcaaggatcttcatcatccttgctggggcggagggcgagctgagctggagctctacctcccgtacgggccggcgggccacctcttccttcagcattcagaggagagggctctcaccggcctagcggagggggcggacttcgacaacgcggggccgattggccgcaagcgtcgtcagctccagcatgcctggttcgctggctctggcacagcttccggtgccacctcccaccgctgggcggagcgtggctatctgcccgctgtatgggcggctgtcgcgccgcacgtaccgggggaccgcccaagacgtcgcgcgctgctagggcggcgttcgtgttcttgggctgtcctacccttgctccggcacgacgcctccgcgcggaggtcggtgctcgcccgtccgggaggacttgagtggggatctgccggtgggcaggcggctgctgtcgtcggtgctgaggtggtggcaactggagaaggcctcgtcgtcgacgagatcgtcagcgccatctgcgctttgggcctccggctctttggctttgatagcttgtcctcgcccctcgagtggggacccgtgtcttccccttgtttcgagtattggaactcgcctgtcgactag

SEQ ID NO: 37559 - DNA, 261 bp, Zea mays
  Peptide Sequence Number=SeqID_80934
atggcgaagaggtcctcgcctttgtcccactacgggggtgaggacaagaccatccaagccatggagctggggagcacagcggaaggcggaagaggcaggcaccagcccatgtgggaggcgaacccgcgactcagctcgctcctcaccactgcagggctgatgaacatccttgaagccaagcaccagtggaagagcatcgctcccgcaaggtcgtgcacctccagcagaggaaaaacaagaccggtagcaccggcccgctag

SEQ ID NO: 37560 - DNA, 771 bp, Zea mays
  Peptide Sequence Number=SeqID_80935
tcacgtggcaaacagcgcctgaccccaccacgtgggcggctccagggccactacgtggctggaggagacgatatactccaaggtctcaacagtgggtccgggcccccacgggaaagtactggacccctggatgcacagcccggacccactgggcaaggtccagaacctccacggatcccggccggagatttcctctccgacatttggcgcgccagcatgatgatgcaaatcgttgagcaccgcgttgagactttggaggatttcctggtggaggaggaagctgcttcttgcacgccacgggttcccaaccgcccagtgccgggcactgctgctgtgcacgctgcgcagcagcatacaactgcacagacatcccggactgcgtcgagggcagctccgggggcattgtatgcggccagggagttgctgcgccaccctccaagctccacggcctcaccgggggccatgaagcagtggcgtgacgacgtcgaccgactgctcggtatggcgcactctggctcgaccaggtctaggccgcggtcatcccggcgccaacatgaggcgacagcatctgtgcgctcaccctcggtgaggggtgcacagaccgacgacctccgggtagaactcaaccgcaggcgtgcgagagaggatgcccgggtctctctggagagggtgtacgtcactgccatcacagcagcatggcactcgacaccacaaactggagttgcccagacgggcggctcaggtgccgtcacccatgatggcaaaaagtaa

SEQ ID NO: 37561 - DNA, 363 bp, Zea mays
  Peptide Sequence Number=SeqID_80936
atggcgcggcttaccggtgatggtagaggtccggcgaagggtcggccgaggtctgggggggtctctggcgatcacgtcgaggtgcgggtcaccggcggtggtgaccggagtcgaccgttgggcgcagttgatcgttgctccgttggctcactggacagtctggtgatatatagcgaagtgactccgagaaaaacccgagagcgaccagtttgtgaggtgcctcggcctaggcagtggacagtgtacggtgcaccactggcagcacctatacttgattttgctccaacctttgtagagttccccaactcattttctttgttggtttatgttgaactttatgcacctgagataaacgataactag

SEQ ID NO: 37562 - DNA, 873 bp, Zea mays
  Peptide Sequence Number=SeqID_80937
atggtgaccaccagttcggtggtggggagaagcgagccaggctgcgatcttggtcccgccctcagcttcaaggatcttcatcatcctggctggggcggaggccgggctgagccggagctctacctcccgcgcgggttcgtgggtcaccttctccctcagcattcaagggagagggcgctcaccagcctagcgggagggtcagacttcgacaacgcagggctggtcggcggcgagcgtcgtcagcttcagcgcgttgggctcgctggctcagctggctctggctcggctcccggtgccccctcccgccgtaagagcggttgtcgcgccgcgcgcatcggaggaccacccaagacgtcacgcgctactagggcggcgttcgtgttctggggctgtcctgcctttgccccggtacggcgcctctacgcggaggtcggtgctccgctcgtccgggaggatccgagtggggatatgccgatgggcagatggcttccgtcgtcggcgctgaggtggtggcggctgaagaagtccttgtcgccgaaaggatcaccgccaccatccgcgctctgggcctccggctctttggctttgatagcttgtcctcgcccctcgagtggggacgtgggcgagggcattgttgcagcggcgttcgccctgaggccatcgtcgctgcagtttggccactgggagcggaggtcgttgtcgctgctgccggagcaggcagcggcgagccatccgtcggccttctgttgctccgcaggccctccaatcgtggggggggggggttgtttgtacctgcggaggtggaaccggagttccatttgtaatggcaccttgagtgccggtgtcttgttcattgtggctgtcggggcctga

SEQ ID NO: 37563 - DNA, 567 bp, Zea mays
  Peptide Sequence Number=SeqID_80938
atggtcgatacggccagaaatgggtcggcagtaatggcagtggcaggcgggcggaagcagcgatcaagtcgtcagccaagctcacgtcccctcctgggacagcgagagaatcctctcccacgccgtgaagacgacacacccgtgttccgttcctcgaacggctcgcgcacgcgcaacggctgccccgcgaaccactcgtcccgtcgcattaactctgcggcaggacaggcggcacctttggcaggagaaccagggatcgggaaaggggataccccaaaagggatccttctccgcgaaggaaacgggccccgagcccccctactgatcagaggttcgaaggctggcccctcggaagggttcaacagccgcctcagagaactcgggctccgcgcccactactggtcagaggttcgaaggtcgtcctctcgaaagggttcaacggccgccgcaggccactcgggctccgcgcccattactgatcaggggttcataggctgtcccccgaagggttcgacagccgcctcagacgcagagcgagggatgaccctgggttcgttcgatacataa

SEQ ID NO: 37564 - DNA, 576 bp, Zea mays
  Peptide Sequence Number=SeqID_80939
atggctgccacccaaggggtcgccccctttttaaaggtgactctccccacttgcgtcctcagccgtcgcggactgagtcttcaccaacacgctccaaggtcctccccctacgacacgagggccgggtcccacgcgtcatgcgagctggtccaggacagaagaagccaaaccgccacgcgcggagcgcgtaactgcccagaggttacaagcactcctccactttcgcccaaaccagcggggatcgggaaaggggatactccgaaagggatccttctccgcgaaggaagcgggccccgagccctcctactgatcagaggttcaaaggctggcccctcagaagggttcgacagccgcctcagagcactcgggctccgcgcccattactggtcagaggttcgaaggctgacccctcggaagggttcgacagccgccttaggccactcaggctctgcacccactactgatcaggagttcgaaggctggccccccgaagggttcgacaaccgcctcagaacgcgcagagcgagggatgactctgggtacgtccgatacatggccgagtgtcggggaccataa

SEQ ID NO: 37565 - DNA, 1041 bp, Zea mays
  Peptide Sequence Number=SeqID_80940
atgcattgcgcccttccaccttccgagcccccggatggggagcgcccgcgttgctttcgtcttgctgctgttggaggagcgcaacttcgcagaagttggtacctttcagccatcgctcggcttcaaggattttcatcaggcagcccggctgcatcccctcaccgatggtcacccaagacggtgaccaccagtttgatggtggggagaagcaagccgggctgtggcctctgccccgccctcaacttcaaggatcttcatcatccttgctggggtggagggcgagctgagccggagctctacctcccgtatgggccagcgggccaccccttccttcagcattcaggggagagggtgctcaccggcctagcggagggggcggacttcgacaacgcggggccgatcgtccgcaagcgtcgtcagctccagcatgcccggttcgctggctcagctggctctggcgcagctttcggtgccacctctcaccgctgggcggagtgcggctatctgcccgcccgcgacgcctccacgcggaggtcggtgctcgcccgtccaggaggacccgagtggggatctgccggtgggcagatggctgccgtcgttggtgctgaggtggtggcggctgaagaagtcctcgtcactgacgagattgccgccgccatctgcgctccgggcctccggctctttggctttgatagcttgtcctcgccccttgagtggggacgtgggcgagggccttgtcgcagcagagtctgccctgaggtcatcgctgctgctgtttggccgcccggagcggaggtcgttgtcgctgctgccggagtgggcggcggcgagccacctgggattttgtcgtcccgcatgccctccaatgtggggggttgtttgtacctgcgggagtggaaccggagttccgtttgtaatggcaccttgagtgccggtgtctgttcattgtggctgtcggggcttgaacatctaggtattttgggcgtaataccatgtttttccctcattttgagcactaggactcgcctgttggctagctga

SEQ ID NO: 37566 - DNA, 126 bp, Zea mays
  Peptide Sequence Number=SeqID_80941
atgtccacggatgaagaaacaggccgcgcgcagaccgctcaccgacgacactgctctgggcttggtgcacggtgcgggatccgtgcgtacccttcagccgagtcaattttgctaaaggaaccctga

SEQ ID NO: 37567 - DNA, 597 bp, Zea mays
  Peptide Sequence Number=SeqID_80942
atggctgtcggagaggttttggcgccctgttcatgtgatgtcgtggtcgtcggaggagcgcttgagccctgtggaagcacagctatcggggctgtcgggtccttgctgatgcctccttgcttccataaggggctgagaaccgccgtcgtcatgaagcacgcggggtgccatcattacttgtttaccgggcccgaggtcgggcgaggcggtgactcctctgaggtcgaggctgagtccgagccctggggtcgggcgaggcggagaccgtcttccgaggtcgaggctgagtccgagccctggggtcgggcgaggcggagtctgtcgtccgaggtcgaggctaagtccgagccctggggtcgggcgaggcggagtccatcgtccgaggtcgaggttgagtccgagccctggggtcgggcgaggcggagcttcctatggcgcccgaggctggacttggctgctgtcagcctcaccctggcaggtggcacagcagtcggagcggtgcaggcggcgctgttttcctgtcaggtcagtcagtggaggggcgaagtgactgcggtcacttcggccttgtcgactgaggagcgcgtgtcaggataa

SEQ ID NO: 37568 - DNA, 543 bp, Zea mays
  Peptide Sequence Number=SeqID_80943
atggaaaaggccagcctagaacacggcctactacctgctcccttggtcgccgctcattggctagccgctgcggatgtgtcgcgtgtccatccgcagcagcagctgcctctgacctgtcccagactcccagtcagtgaaataaatgccgcgaccatcaccttccccgcacggatgactctcaccttcccgccctttctcgtccggacggcgcgcctggcgactagggtcggggcgccgctcgccgccttggcccgcgccgtcgcggaggcactgcccctgccagtccgaggtccgagccccgtctcgctgatctccaggccgcccgagtcgacgcctgcttcctcggtcctcgcgtcttctccaacctgccgccggaccccgccctgcgctcgtgggccgatacatatcaagcccaccatatatattggcccatccgtgatacgggccagggccccttttaaacagctctaccgtatatggtctaccgactaccggcagagctacagaactgctacctcgcaggcgcacttgccgccgccttag

SEQ ID NO: 37569 - DNA, 852 bp, Zea mays
  Peptide Sequence Number=SeqID_80944
atgcataaggggagcgcgaagacatggttgcctttcaagggggtcaccctccttttaaaggcaactctgcccacttgtgtcctcagccatcgcgggctgagtcgtctccaacacgctccaaggttctccccctacgacacggaggcccaggcccacacgtcatggaccgggaaaggggataccccgaaagggatccttctccgcgaaggaaacgggccccgagcccccctactgatcagaggttcgaaggctggcccctcggaagggttcaacaaccgcctcagagcactcgggctccgcgcccactactggtcagaggttcgaaggtcggcccctcaaaagggttcaacggccgcctcaggtcactcgggctccgcgcccattactgatcaggggttcgtaggctggcccccgaagggttcgacagccgcctcagacgcagagcgagggatgaccctggcggccaagtctggcctcgggcgccataggaagctccgcctcgcccgaccccagggctcggactcgggctcggccccggaagacgacgaactccgcctcgcccgaccccagggctcagactcgggctcggccccggaagacgacgaactccgcctcgcccgaccccaggactcggacttggcctcggccccggaagacgacgaactccgcctcgcccgaccccagggctcggactcagcctcggccctggaagacgacgaactccgcctcgcccaaccccagggctcggactcggcctcggccccggaagacgacggactccgcctcgcccgaccccagggcttggaccaaccatgtcacagggggagccatcattaccctacccctagctag

SEQ ID NO: 37570 - DNA, 963 bp, Zea mays
  Peptide Sequence Number=SeqID_80945
atggcggacgcactgggtctgacgcagttcctgggcgccgtggcggagctggcgcggggtgttgcgcaggctcccaccgtgcggccggtgtgggaacgccacctgctggaggggcagcgcaacccgccgcgaataataagcgacgggttggacttgtggtacgaggctgaaatggctgatgatgatggtgacaacatcattccatcgtctctaaacctaaaggacgacgacatggcgctccgctccttcttcttcgggcccggggagatcgcggccatccgcgaccagctctcgccggaccttcggaagcgggcgtcgaggttcgacgtcatcgcaggatggctgtggaagcaccggaccatggcgctggccccggactactccgccgacgagccgatgctgatgctcgtcgtcgtcaacgcccgcggccgcgaccgcgaggccaccggttgcgccggcatccccaccggctactacggcaacgcgttcgcgatcccggtcgccgtgtcgacgtccggaaagctgtgcgcgaaccccgtcagctacgccgtagggctggtgaaggaggccaaggacaaggtggacatggagtacatgcggtcggcggcaaacctcatcgtgcaccgcgggcggcggagcccgcgcttcaccgtcggcatgtacagtctgacggacgagaccaaggccaggttccacgacctcgacttcggatggggcaggccggtgtacgggggaccggcagaagccgtcggtaccccggccttgccctggctgtcaagcttcatcttacccttcaagaacgctagtggagaggacggcgccgtcgtgccggtgtgcctgcctcgcctggccatggacaggttggtcgacgagatgggcaagatgcggcggcggcgctcaccggccgaggtgcagcagcctcgccatgggtttcccgtcatcgtcaagaggtctgcactctga

SEQ ID NO: 37571 - DNA, 2130 bp, Zea mays
  Peptide Sequence Number=SeqID_80946
atgccgagctgcctcctccctggcatcgcgccacgcccaccgccggccgctctccgcagcctcctcctccgccgcagcagaatggcctcctccgggccggcacgcgccttccagctccgcctcaacccactcaccggcgactccgagtggctcgtcgtcgacgaggcggaaacggaagcggaggtggctgcgcctgcgccgacccaccataagcagctccttgccgccacctcctacctcgacatgctcaacgacgcctcccgcaaccgcgcgtaccgcctcgccattgacgccacggtaacggaccccacctctcgcgtcctcgacatcgggtatgatgaatccagagctgggaccgggttgctgtccatgatggcggcgcgagctttggcagctgctggaggtgaaggtaggggaagcgtgtcagcatgcgagtcctaccttccaatgggcaaactaacacggagggtactcagagccaatgggatggaaaataaggtaagtgaaattcttgattctgagctgctgggtgagggtctcatacctactctacagcatgcgcatgacatgctattggtgaaaaatccaaagacagttccatatcgagctactacttatggagtgttggttgagagcacgtccttgtggaagatgcatgatctgcacagcaatgaagcaaatgctgaagatggtgtgaggcttattcccagtggaacacaaattgttctttctgtgaagtcacagcaacatgcgatgcaatgtgatgcgctggcagatgaaataagattgctgtcagaacccttcaaagtttttgaatttgacttttcggaacgtccagatagtcatcgtgaaacaaagattgagataaaagcaacagctgatgggcatgctcatgctattgtttcatggtgggtgcttcagttggattcttctggatcagtcttttactcaactgctcctagatgggtgagacaatccagtggtgtcgatttaccacaatatgccaatggcacgaaggattggtgtgatcattggaagcagtgtgtttggtttatacaagggacaggggctcctgcaaagaaagatcaaactctttctttgagcgctagccataatcaaactagcatctcatatcagttgaatataaatgatgaaggaagtagaagccccaaaagtaatcatctaacactgttaccagaaagggtagcactttatggtgataaagtttggagatcagcgttgataagtgtaatcaggaattatacgagcgaaagatcctctccgatctgcattgtggctgatgacagcgtgttcctagctctcattgtttcttttctgttaccatcttcaaaagtcctcgctatgtttccatgtcttagagacagtggcctcaactatcttcaagctgttgcagatgcaaataatttatccatggaccggattaaagtgattggtaaaaaggcatcgtcccttactacaaatgacttaaatcatgaaaaggttaatatgttagtgggggaacccttttatcatggaagtgaagggatgctgccatggcaaaatctgcgtttctggaatgaaaggactctgcttgatccgttgctctctgaggatgcattcatcatgccttgtaagggaatattaaggttctgtgccatgtcacttccggacttgtggagaagccgtcgtagccttaaagatgttgagggttttgaccactcagttgttaatgatactttaggggcctgtggtgacctgcctggagagcaacaaggcccttgcctaccttattatgtgtggcaatgcggttataccaagaaattaagtgaagtttactctctcatggatttgaacttttctgagcctatccactcttgttttggtgaaacaaaggttgagtttgcccacgatggaacatgccatgggttcgctgtttggatcgactgggtacttgacaaggaaaattccatagtgataagcaccgggccagagagcagatactggaagcaaggggtgcagctgcttagcacgcctgtacaagtgaacccagcgaattcggtgatgcacgtggaggcgaatttcgatgctgacattggggagctcacgtttaaatccaccacgctctcatga

SEQ ID NO: 37572 - DNA, 600 bp, Zea mays
  Peptide Sequence Number=SeqID_80947
atggggaagcctgtcccatcactcctcatgctcctcctcagccgaggcagggtcccactcgacagtccaacccggtggcaaggcggacggccaagtcactccagcaaccatttcctccagagaacctgtaaaaattatgccacaagcaaggctgagtatactaatactcagctagacttacccggggcactccgtccccacacacatcaaccgtccccatcgattccctgtcagcagatcagggctcaccgccttggcgtacaatgccccactgaccccgactggccgtcgtgcagtgaccgcacttgtacccaccataaccggaatgggagacctcgtctcaggtcgcgtgaggggatatgtccactgccaggttccctcaggttatgcataaaaccggggcttgccttccaaagcagtggcaggcaggtcctctggtgcaggctcgggtgctggatctggggctacctcctgagcagctccttgctccggcacgaggatgtactctccgtcagcaagattacagtctatcgaaatgcaatgaacatgtatgtcatgattatgcaagatttaagaacattactaaagaaactaagttaa

SEQ ID NO: 37573 - DNA, 1077 bp, Zea mays
  Peptide Sequence Number=SeqID_80948
atggctgccccgcgaaccactcgtcccgtcgcattaactccgcggcgggacaggcggcacctttggcaagagaagcgggcggcgcttcacctccgcaataatgaccgcgtccaaaaggtgcgccacgttattcgatttcgtatcctattcctctttctctctcttacaacagggaccgggaaaggggataccccgaaagggatccttctccgcgaaggaaacgggcctcgagcccccctactgatcagaggttcaaaggctggcccctcggaggggttcaacggtcgcctcagagcgctcgggctccgcgcccactactggtcagaggttcgaaggctggcccctcggaagggttcaacggccgccttaggccactcgggctccgcgcccactactgatcagggcgggaacgatcttgtaatggaatcccatcagaggaaggcatcgagccctcggaccccgtcaaaaggggatcaggtccggcagatcacccgcagctcactggagacaccatgttcggcgccctccaagggcaacatggcgctttccccccctcttccttgcggaaaggcgacgcaggggcccaagtccggcctcgggcgccataggaaactccgcctcgcccgacccagggctcaaactcgggctcggccctggaagacgacaaactccgcctcgcccgacccagggctcggactcgggctcaaccccggaagacgacgaactccgcctcgcccgacccagggctcggactcgggctcggccctagaagacgacgaactccgcctcgcccgacccagggctcagactcggcctcggccccggaagacgacgaactccgcctcgcccgacccagggctcggactcgacctcggcctcagccgacggtctccgtctcgcccgacccaagggctcggactcgaccccgacctcggaagacagactcgacctcgacctcggaggagcctccgcctcgcccaacccagggctcggaccgaccacgtcacaggaggggccatcattaccctacccctagctagctcaggctacggggaacaagaccggcgtcccatctag

SEQ ID NO: 37574 - DNA, 1497 bp, Zea mays
  Peptide Sequence Number=SeqID_80949
atggctgaggacgcaagtggggagagcccggccgcatcccctcgccagcggtcacccaagacggtgaccaccagcccctgggtggggagaggcaagccgggctgcgatcttggtcccgccctcagcttcaaggatcttaatcatccttgctggggcggagagcgaggtgagccggggctctacctcccgcgcgggttcgtgggtcaccttctccctcagcattcaagggagagggcgctcaccggcctagcgggagggccggacttcgacaacgcggggctggtcggcggcgagcgtcgtcagcttcagcgcgttgcgcttgctggctcagctggctctggcttggctctcggtgccccctcctgtcgcaagagcagttgtcgcgccgcgcgcaccggaggactgcccaagacgtcgcgcgctgctagggtagcgttcgtgttctggggctgtcctgcctttgccccggtacggcgtctctgcgtggaggtcggtgctccgctcgtccgggaggatccgagtggggatctgccggtgggcagacggcttccgccgtcggtgctgcggtggcagcggctgaagaagtcctcgtcgccgacgggatcagcaccaccatccgcgccccgggcctccagctctttgtacttgtcctcgcccctcgagcgtagacgtgggcgagggcattgttgcagcggcgtccgccctgaggccattgctgctgcagttcggccacccggagcggaggtcgttgtcgctgctgctggagcgggcggcggtgggaaccctcggtcgctcttcgatgagccgaagccgggggcagcggtgtcggcacggacagaggcagagttggctcaaaaagaagacttcattggccggagcctggccgggccgtccgctggcgggaccgacgccggagttgagttgtcgaggccacgagccaggctaatgtcctcgggggacagctggctgaggcttcggggtggccggccgagctgtctgctcgagccggatttctggagaagaccccgccgacgatggtccgggcgcagtgctgatgtcatcctttggagtggagatcctccaaccgcgttgccgtccgaggctcggtcggactttgtcgaaggtgtagttgatgtcgagggtgctgctgctccccctccgtcaaggcccgagcctgcagcatcgtatctggacttatttgtcggtaacaaaattgtttgtccgagcgagagttacttttcacggaaggtgatgagtgaggattctgctatcgatatagtcgagaaggcccgaaaaatcattttggcagaagagtttttgagcgtgaagacttgttcagtccgcggagtcacctatacgagcgtgagttacttatcgcagaaggtgatgagtgaggatcccactttcgaagtagtcgaaaagcacgaaagatattctggcagaaaagatctttttctgaggaaaaattttgacgcagagggggttccccccttctag

SEQ ID NO: 37575 - DNA, 471 bp, Zea mays
  Peptide Sequence Number=SeqID_80950
atggaggaggccaccgacatgttcagcgaccgcaacctcgtcgacaagggcagcttcggtcgggtttacatagcgtgctcaaggatggacgaccccaacctggtcatgctcatcagctactgctccaacgacaagcaccggttcgtggtctacaagctcatcatgcccagagacaacctgcaggacatcctcaagggcattggggaggtgatgctaaacactggacgtcagaagaacagaagatcagcttctcaacctgaagacaggagaggtactatagtttcaggccgatctgaggacagcaagctgtcagctctaaaggcctaccagcgtgctaagggcctattgtcggcgtttcgaccccggggggtccctggaccgacgagtaaattgtcgccacatgccccagcccagatgggtcggcgcgagacggagcgcgaaggggggaaaaccggagggagacaggcgtaa

SEQ ID NO: 37576 - DNA, 285 bp, Zea mays
  Peptide Sequence Number=SeqID_80951
atggcgctggcttggctcgggcgcggcgctgggcgtgcgggggggcgcgcgagcgtgctctggcgcgggcagaaggcatcgaacacgtggagagatcgcaaacgtgcgaatctcgccatgaatccgacgcagacctcctcctggcacctagggctatctcacatgtcttctagtgccaaggtggctctagccaaggtaacacctggggtgttacaattcgcccctcggaaggccatcaagtcccaagtcatggtggactttgtggctgaatgggtcgacacctag

SEQ ID NO: 37577 - DNA, 1065 bp, Zea mays
  Peptide Sequence Number=SeqID_80952
atgggtcggcgcgagacggagcgcgaaggggggaagaagccggagggagacaggcgtaaaaggggaaacccgcggccttcgtgtttgtcccgcgcccaggtcgggtcggggtcgagtctgagcccttgggtcgggcgagacggagaccgtcggctgaggccaaggtcgagtccgagccctaggtcgggcgaggcggagttcgtcgtcttccggggccgaggccgagtccgagccctgggtcgggcgaggcggagttcgtcgtctttggggccgagcccgagtccgagccctgggtcgggcgaggcggagttcgtcgtcttccggggccgagcccgagtccgagccctgggtcgggcgaggcggagttcatcgtcttccggggccgagcccgagtccgagccctgggtcgggcgaggcggagtttcctatggcgcccgaggccggacttggctgctcccgctgacggtgggccccgctgtcaggtcgacatctgcccagtggctcgcgctcgacgcattccgctaccccgttggccatcccctgttcatctgctccatcgaatcggacggggccgttgtgccgtcgcctggtggtatttttagccgtgctctctgcccaaagccaatcgtccgtatcggtcaggggagagaaccttggtgctgtgggcagccgctgtcgcaagaacaggagggaggttaccgccatggcgaggagcctacgtcccgtggtggacctccgcgtcaccaagaatctcgagccggccgaagaccctgcgccatcgcctatcgtctggccgaacgctttggcgccctcgtcctcctcgacacctcctccatcgcgtccagccatccatcgttccgcgcccagctctcctcctcccactcactctgcggcgcggagatcgtgtcccggtgctccagaccgagaggaacctgggcgtcgtcgttcggccggatggatgtcgccaggaggttggagggagccgctgacagggaactccgactcgccatcgatccgctgagcgccgggccaccgctgccgtgggatttcatcgcgccgctataa

SEQ ID NO: 37578 - DNA, 63 bp, Zea mays
  Peptide Sequence Number=SeqID_80953
atgggagcgctcgcccatcttaaggagatggctgccaggcaggttccagaaaagaacaaataa

SEQ ID NO: 37579 - DNA, 318 bp, Zea mays
  Peptide Sequence Number=SeqID_80954
atggggaccctccctggcgggctctttgtcgagttctataaacatcactttaccagtggaggacgatcgacgcgggacacgtttgagaacgtggcccaggacgacgacgaggatgacgacaacgacgacgacgacgctggcgctggcgctggcgctggcgccgcaggtcaggtggagattggaccgtctcagttgcaggatgctcctacaactcagccatcacagctgacaccacgtagaaggcgtccacgagacccttacactccaggcaccgacgctcttggggccaagggcaagggtaagactaggaggaaatga

SEQ ID NO: 37580 - DNA, 456 bp, Zea mays
  Peptide Sequence Number=SeqID_80955
atggcgaccatcaatttcacggtgcacagacgaccggcggtgctggtggctccggcatcccccacgcctcgtgagctgaagcggctctcggatttcgacgaccaagagagcttgcgtttccggatccctgtcatccatttctaccagaggaaggagtccatggccatgggctgcagcggcgaccctgcggtggtcatccgggatgccgtcgcgagggctcttgtgccctactacccgttcgccggacggctcagggagcacgacggaggcaagctcgccgttgactgcaccggcgagggtgtgctgttcgtcgaggccgacgctgatgtttgcctggagcagtttggtgacgtcctgctgccgccattcccatgcctggaggagctcatctttgacgacgccccccctgctgctgctggtgctgccatccttcacacgcctctcctgcttatccag

SEQ ID NO: 37581 - DNA, 168 bp, Zea mays
  Peptide Sequence Number=SeqID_80956
atggcctacacgctgacacaggggcaccagagggcgcagaccatggcggagcgggctaacggcggcgctggattgctccgggttttcaattcaaattcaattcaagtttcaaattcaaaccaaatcaaatatgtgcaacaattcaaagaatatttaggctcaatatga

SEQ ID NO: 37582 - DNA, 168 bp, Zea mays
  Peptide Sequence Number=SeqID_80957
atggggaggctagaaccctgggcaaaatgggaatcacggcttgtgggtaaagtgtgcgacctctacagagtgttagaaactggtatatcagccatgctcacgtgcttaggaggtgaagttggtaacatggaggactttgaggagttccaggactacgacgagttctag

SEQ ID NO: 37583 - DNA, 417 bp, Zea mays
  Peptide Sequence Number=SeqID_80958
atgacaaaggaggccagtttcagaagccaaaacacagttcacagtcttcaggacagcagcaaagctccttcaggccaccagctccaaggggccgaggcagcaggggcttcgaaggaagatatggggatcagcccaggaaaatctattgcttattctatggtgaagacatgggccacactacaagaacgtgtcaaatcaccattcagaagcaaaaagagattgccgaagcagaagcccagcagaatcagccgaagcaggtcttacatactgcttcgtgccactctccctacataccagagtatgtgggcaatcaacctgcagcttctgttgcttcagcaagccattcacaagcttcctggcctcaactcccaccgccaccatcattacaacctacttacactcgaagccagcagctag

SEQ ID NO: 37584 - DNA, 987 bp, Zea mays
  Peptide Sequence Number=SeqID_80959
atggccttactacactcggcgcggtatcaacagtccctgcgacgctaccacgcccgaggggatcagacatcagcagggggagcagcagcaccctcggcgtcgattccaccttcggcggaatccgacccggcctcagacgacgacacggtcggaggatctccgcctcgaagggacctgtcagcaccgcgcctgggccatcgtcgctggggtctcctccaggaacccggcccgagcagacggctcgaccgcccgctccatagcctcagccagctgtcccccaaggacatcagcccggctcatggcctcggcaacccgactccgacgttggtcccaccagtggacggcccagccaggctctggccgacaaagcttcttttcgagccaactcctcctctgtccatgctgacaccgctacctctggctccggctcatcgcagagcggccgagggccccgacagccgcaatgaacaagacaccgacactcaaggtgccattacaaacggaactctggttccactcccgcaggtacgaacaaccccccacattggagggcctgcgggacgacaaaaccccaggtggctcgccaccgctcactccgacagcagcgacaacgacctccgctccgggcggccaaacagcagcagcgatgacctcagggcagatgctgctgcgataaggccctcgcccacgttcccactcgaggggcgaggacaagcagaaggccgtagagccggaggtcagtccgcgggtggcaccgactatctcgtcggcagagaaacctcttccggctgcctcggtgggaggtggcaccggaagcagcgccgaagccgctcaggccggagagccagacacgcggcagctgccagcgccacgaacggcgaacgcccttccccccaatcactgagggaaggagcggaccgctgcccgcgcggagacaggccccaactcggcgcactccgccccatcaaggatgatgaagatccttga

SEQ ID NO: 37585 - DNA, 528 bp, Zea mays
  Peptide Sequence Number=SeqID_80960
atgagtggggttggcgggggagcgaggaagaagctgaggctgtccaaggagcagtctgcgttcctggaggatagcttcaaggcgcacagcacactgaccccaaaacagaagagtgatttagcgaagcggctgaaacttcgaccgcgccaggtggaggtctggttccagaacagaagagcaagaagtaagctaaagcagacggaggtggactgcgagtacctgaagcgttggtgcgagaagctagcgcaggagaaccggaggctgcagagggaggtggcggagctgcggcgtctttgctccgccgcctacccgttttacggtgcagcagcagggttcggcgtggccacagcccgagtgtgccctagctcatgcgataacgacgtcagcgaggctgctatcagtggcgctccatcagcagcggcaccaccgccatccaccttgttcgccagctggcctcctcatttcggacccttcaccgtcgtcgtccccccactgctccgccggcagccgtcggcgacgacctcgtga

SEQ ID NO: 37586 - DNA, 519 bp, Zea mays
  Peptide Sequence Number=SeqID_80961
atgcgggggaaggcgaactgttgctgcctggccagggtgcagcattccgtcctccgtccgggcgaccgtggccggctgcaccagggggtcgcacaacacgtcgtacgccgcaagggcggtactcgtgttctaggacggtcccgttctcgttcttgtggcgaggacgggagtgaggacctgccggtgcgctttggggcggtcgccgcccgcgggcgcggtgttgccggagaaggtttctccgccgacgacaccgtcagcgtcacctacgcttcgggcctccgactctttggctttaatggctggttctcatcccccgcgaggggacacgaacgagagccttccagtggtagcgttcgccctggggccatcgccactgctatcttgccgtccgagatggaggtcgttgtcgctgctgctgcagaggtcgccggcaagccacccggagtttgtcgtcccgcaggccctccgatgtggaggttgttcatacccgcaggagtggaaccagagttccgtttgtaa

SEQ ID NO: 37587 - DNA, 663 bp, Zea mays
  Peptide Sequence Number=SeqID_80962
atgcaggcggtgtgcaaccgcaccacgaggacgtacccctttgactttgacgcatccagcatggatgcccaggcccacacgtcatgtaaccggcgcgccggttactacgtgcgagaaactgcaccgccacttacgccaatgccgcgccttctcgactgcggaaccggtaccgcgactcgaggcaaccctacgcgtggcccaacagtgccagtcgagcacatcgatcacggggaccaggaaaggggatatttcgaaagggatccttctccacgaaggaagcaggccctgagccctcctactgataaggggctgacccctcggaagggttcgacagccgcctcaaagcactcgggctccgcgcccactactaatcaggagttcgaaggctggcccctcgaagggttcgacagtcgccccagaccacgtagagcaagggatgactctgggtacgtccgttacatggccgaggctcgggctacactcccgaggtacttttggagcgcgcctctgggccacctagctgacccttatcaaacggggcacgggcgtccactcggatcacctgttagcaactcactagagacaccatgttcggcgccctatgagggcaacatggcgctttcccccctcctcattgtggaaaggcgacgaaggggcgtatga

SEQ ID NO: 37588 - DNA, 543 bp, Zea mays
  Peptide Sequence Number=SeqID_80963
atggggaagaaggggagcaggaggaagggggaggaagggagaggggcgcgacctcaagggggaagaaggggcgaccacagggcaccatggaagaagaaggggcgctgcaaaggggatggagcagagagcgtcggccatgggactgctcactgcgcctgcaccagggaaggagccgaggggagaaaagcgttgtccctgctgccaagcctgaagggggcgccatggggagaggtggagctgagctccctgcttgctgcatgccgtggacatcacagggaggaagaagaccggctgctgctgcgcgagggagaaggagcagggggcgccgcgccatggatggccgaggggaggaagggcgctgctgctgggcggccatggaagggagggagctcgttggtggctgctgctgccgtgaagaagggaggaagaagggggttggctggagaagagagaaggggagtggcggctgaaaaattagaggggtgggagtgcaaaatagccaagtgcaagggagagggattcgtatttatagaggggcactag

SEQ ID NO: 37589 - DNA, 108 bp, Zea mays
  Peptide Sequence Number=SeqID_80964
atgactgcacgacactgctcgacgccttcgtctacatcaagacgtcttccgctgctctgcgcgtctagtggacatcttgtgatcggtatggctattgtgtgtatatga

SEQ ID NO: 37590 - DNA, 183 bp, Zea mays
  Peptide Sequence Number=SeqID_80965
atggcgtccaagttctctgcgcagcggtgccggtccaaaacagcagccctggataccctccgcaccgagagaaaccccgtgttttgcgtggaggagaaggcaagccgctcaacgctcgtcgatgttcagagcgatgcacaaatcagaatcaccatcgtccgtgcaaacaccgattgggtttga

SEQ ID NO: 37591 - DNA, 1527 bp, Zea mays
  Peptide Sequence Number=SeqID_80966
atggacaaggatcgccaaggggcggcacgaaaacgccaggcgactgtgagggttcacgaagctcggccgaaaaggcagcggggaacggcgaaggcggaggcctccggcggaggcaagccgccgctgccggcgaaggtgggcgcctctgcgcctggcaaggcgccggaggtgacggtgggcgccggaggccccaagctgacgaaggtggtgccgtctgtcagcggagtggcggaggctgcgaaggcggcccgaacgttaccgccgcccggcaaacgcgttgccgacttcggcaccgagattaatgtggaggattatcttgggggttcggacgagggcccgcttgctctagttatgcctggcgcggcgatcgcgacggctgcgccagcgccgaaggcggggggagaggcccttggcgccggaggcgaggtggctgacttcaccagccgcaccgcgtcgggggcccttacggcagctttgtctgccgaggtcgagagacttcggacgcaacatgctgacgctgtccgtgagaagtcggcctccgacagcaagtgccgcaaactggcggagaaggtggccgccctggagaaggagaaggctgacttccggcgccagctggcgggggagaggagggaggccaacgaagccatcgccaaagagcaggctgctcaggcggaggccaggctggcgcgggcggaaggcaatatcgccaaggagctcgccggagagctgcagcggcgacttactgccctggagagccgcgcggagggggccgaggccgcgatgcgagcggaggccgaacggacgcgcacgcagctcatgactgcatatcgcgagctgggtgtgcggacgggtgacttcgaggtgccggagcgagaggccggacttcgctgtctggaatgggtgcaggaggaactgcaggagctccccactgtcttggcggggttgatgtcgttcacctccctggtcacctgcgaggcagcgatgaacgcgctctctcgcgaaggctgccggcactttgaggccctcgaccaggcagatgaggattttgggcgagatatctttgaggtcgaagaccccgtggtgaaggaatccggcggggccctctatgaccggatgtggggttcatacggttgtgaggtggtccgggcgcgggccgaggctgcgagggctcaggcggagcgcggcgagctggtggacgacttcggggcgctgaacagcgcgctgcctgacccggagacgacccctgcggaggccgcgactggagtcgccctggggaccgaccccggaaactgcggaagatgcaccaggcgcccctgcacctgttgcggccggcgaaagaccttcccccaaaggtggccgaaggcgcgcccgatgcccccgcagctgctgtgccgagcgctgaagatccagcggaggtgggggcggaggcagcggcggaggcctcggcggaggctcccgcagcggcagggccttcgcaggtggcataggtggtgtttagggttgaggaatttttggatgttgtactga

SEQ ID NO: 37592 - DNA, 387 bp, Zea mays
  Peptide Sequence Number=SeqID_80967
atgacgcatttcttcagcggcctcatcaatcttcctatgaagatcggcgagacgaagcatcttttctttcttcttctggacctattgatgaatggcttcgaggtccctaatttcttggtccaactcctcctcctgagggcccgttacaatgggccggatcacacgtgggcctctgagctggacgaggccgcacggtgggatgacgccgtcgcaggccttcgtctggtgccgaataaagcgaagggtgtccctgcccgttttgtctgcgtcggatcggcgactgcagcgaaggcctcgagcgaagggtggcgtctttgccttcgccccaacatttgccctccgagggaccagttcgacaaagtcacctggtgccgaagatgtcgctag

SEQ ID NO: 37593 - DNA, 183 bp, Zea mays
  Peptide Sequence Number=SeqID_80968
atggcgcagctcggctacgtcgttgttgctttgcttgtgaatagtcatcaagctcaggtttttcccgttcttgctatcgagagtgaactaggagttggtcgtgacatggaggacgtggacatcgctgacagcaacatgcccatggacaaagtggagaccagtgtccacatgcttctgtgttga

SEQ ID NO: 37594 - DNA, 897 bp, Zea mays
  Peptide Sequence Number=SeqID_80969
atggccctacctcatgctcctccacagtattccaatgttccatcgcatatacctatagttcatagtcagccacaacaacctttgcaaagtcctacaatatataatcaacagttgcaaccacctttgcctcaactatcaagaccaccatctatgccgccttttcctcatcagatgcattcacaagtaccaaattcatttgggttgactcatgcaaatgctccgcaacacatgttacaacaaccaatgtttcatatgatgtttggaattttgcattcggtttcgaatcctcaaactaatttcctccctggccaaccaccattgcctaggcagccagccaccacagcagctgtaccagctgctgctgtcactaataacaaggacgtgctggacttggtcatcagcttggctgctgctaagaagcctgctcgcacaaatacttatgagactccaaaaatgattaagaaatctaaggacctagatgccattggaaaaatgaagagtcatatcacgtggattgataagcagttgaagtctcattctccaaagaacgttgaatcagaaatcttgcttgagcatatcaagaaagagagggaggcagcaaaggctggaaaacgaccatactatctgaagaaatctgaacttcatgaaaggaagctgatgaacaagtacaacgagattaagctagcagatgaagaaacattagaggatggatcacagtggaagctagcaagtgcacctcctaacactgcaaagctaatgttcttccgcgtcacagggtacttgcagatagatgtcggctctatggacgaacactcgaccaagtcagatgaggagtatgagagcctagccatgcgcgacgtgatggcgactagtccgacgatgagccgcaagctatga

SEQ ID NO: 37595 - DNA, 1001 bp, Zea mays
  Peptide Sequence Number=SeqID_80970
gcgtccacaattcccagttgcgcacggttctgccgtcgcgttgcgcgcatgccatctccctccgccctcccgcgctcccttcgccaccctccgcgctccatccgcgctgcatcaacgcccgcgggttttgcctctccctctcactgcgccgcctgcccccgccgcacccctccaccgcgccccttcccccgccgtggatctcgcccgaaggcgccgcggatccaccgtacccccgccctggcgcctcggttccccgccatggacgccctggatccaccacctcctcctcctctccccatcactgcgccgcctgcccccgccgcacacctccaccgcgccccttcccccgccgtgggtctcgcccatacgccagcggatctcgcactccttccttcgatggcgtggtggcgaggaggccagcgacggcggcgtcgagtcgaggttgggcacgagggcgcggaggttgtgggagcggccgtggcctacgcacgcacgcacgccgccgctcccccagttcaaacccaccaccccttccccttcgtcttccattcccagctgtgcacgcgcttttcgattgcttcatctacctcgccatcgcgcttccgcccagccctagtcaccagtccaccgcacccgcgctcccgatccatcgatatggctggctccgtagctccccacgctgtggtcctcggtctcctcctgctcgcggggctcgcagcgacgcagagggggacgacaccggcggcggcggcccctgcgcccgaccccggctgcaacggcatccagctaacctacaacgtaacttcgtggaccgcaccaagatccggcccttcgtcagtgacaagaacaagcagccctaccccttccgcgccaacgtcaccgtgctcaactctagcacccgcccgctcaagtcatgggcggcactcgtcacattcagctacggcgagatcctcgtcggcatcaacggcgaaacccgcacccgccgcctcacagaaccctag

SEQ ID NO: 37596 - DNA, 1146 bp, Zea mays
  Peptide Sequence Number=SeqID_80971
atggtgagagtagcgtgtaccctccatggcaagaggctggacggtggtgtatctgtgctctcggttggcgtgaacctgatctggaaccccagtggcgagttgacatatgcaagggttaagtgctacatatgtcgtgtgattggagatcctcagttgagtataatcgatttggatcgtcgtaacttcacagacatgaagacttgccagcatatccttgagagtcttttactttatcgggtgaagaagcgacaaacttttgttgcttctgttcaaaggtggtacccaaagaagagaaccaagactaaagctgcgagagggaaggccctccatttaaaactttttactgcttattcgggaggagtttttgcctccaatgtaagttattgtaactgcttccgcactttcgtatctccgatgaattgtaatgtctgcgtgacgggtaaaacgctcttgggaagatatgccaccacgcacgagaaagacgcgcgcaagtctaccgggccatttggcgtaccccgtcatcaacttgccccgaggcacgaagacagtagcagtggtagtaacaatccaatcggggatctggaagcccaagttgatcagcttcgatcagaactccgtcacaggaacgatatatgggtcgcggatggtgaaagaataaacgaattgagaacagacatccgccacctgcaagaccaactagcggaacgggatctagcgctcgactgggctgtgaactctcgttcactagcttgggcaaaggaagctagagctcatgcccgcgtggaagagcttagctcagccgttgataacttgcaggtttattgtaatacactacatgaagaagttcatgtattgtattcacaactgcaccctaacgtccctgcggatcctgttgggatgggagctggaccatctggagcagcaggagaagcccttggaggagaactagaccttttcaggccccctccttcaatgaatttggtcgaccagtggtctcctacacctgacagcgaggctaccaaaagagacaagaagcaagaagtttgtggagaaacattgcatatactgaatcaagggaagggtttgctattcattcgcctgggggacaaatatttactaaagaagtggcctaccaagggcccgtaa

SEQ ID NO: 37597 - DNA, 150 bp, Zea mays
  Peptide Sequence Number=SeqID_80972
atggggaagcctgtcccatcactcctcatgctcctcctcagccgagtgaccgcacttgtacccaccataaccggaatgggagaccacgtctcaggtcgcgtgaggggatatgtccactaccaggttcactcagtacattcaaacgcttga

SEQ ID NO: 37598 - DNA, 216 bp, Zea mays
  Peptide Sequence Number=SeqID_80973
atggaccatttgaaccttcaggatgtggacagtttgagtgctaatctcagattgtccggtccactaggacgtagaccgtccggtggtctgcgtaaatttttgaagatgatggcagggcgcatcaagattggtgctgttgggggccttcctcttccgaagaatgttacaggaggcttcggccttgatatgaaggctacgtcctgtgcctataaatag

SEQ ID NO: 37599 - DNA, 666 bp, Zea mays
  Peptide Sequence Number=SeqID_80974
atgaacgaactcactggcattcgaagtgccattacaaacggaactccggttccccctccgcaggtacgaacaaccccactccgagggggaagtcctgcggagcaacggaaggccgacgaatggtgcgccgtcacccgctccagcagcggcaacgacgacgccttctgctccgagggaccaagcagcggcaacgccgacctcaggctcgatgccgctgccaggaggcccccgcccgtgccaaaacttgtgaggcaaggacgggcagaaggccatagagttggaggcaactccccctacgtgcgcccccaggcgccgcgggccgagtcttctccaacacgctccaaggccctcccctgcgactcgggggctgggtcccggaccgggaaagggggataccccgaaagggatccttctccgcgaaggaacctggctccgagccccccattactgatcaggggttcgaaggctggccccccgagggttcaacagtcgcctcagatcgcgtgggctcgacacccactactggtcaggggttcgaaggccagccccccgaagggctccatggccgcctcaggctactcgggctccgcgcccattactgatcaggggttcgaaggctggcccccgaagggttcacagtcgcctcagacaccgagcaagggatga

SEQ ID NO: 37600 - DNA, 1305 bp, Zea mays
  Peptide Sequence Number=SeqID_80975
tccgcaggccatcaatggaaggtcgcgccgcgcattccttgccggcaacgcccgcagtccccgtcgcgccctcaaagctccgcgcatcgtcgtctgctccccgcccatcccgccgccgcgtccgccccctcccccaccgaaggaatccccacggactccgccccgtgtcgcctccccggctccccagaatgcgatcctctctccctcaatccccgccgcctcaactcagatcgccgccctcgctctcgatcctcgtcacgccatccgacgatccactctcctcggccccaacgcgccgacccaccctggctctccatggaaggccgtggaaggtgcgaccactgcgaggagggcctgatgataaggggctccagctggcgcgcggcgcgcgcctgcgcgaggatctccgtggctcgctccgacagccgcgggaacggcaggacgtggaagcgggtggagggcgcggcgtcgtcggcggcgaggatctccggcgcgacgcggcggcggcggccggaacaggggcagatggcgctcttggggatgcgggagctctcggtcttcatcagcgacatacgcaactgccacaacaaggagcaggagcgcctccgcgtcgagagtggacaccatacttcacccattccttctcggcgctcgaccaggaagactacagccagactggctgcattctcggcatgtacctggaccgcggggacaacacacactgtcaagcgctacttgcagctcacgctcaacgtgcccagcggcgagacctccctcactttcgacgatcgcgtcttagacgaaaaatgcttggagctgcagtactatcagaagctgaatagattgctgctggaattagagcaaaggagtggaggagtttctaaagagagttatcagaccgaagtaattgcagcagctgcagctggtgttgcagctgagggtttgtctcctgaagaagcaaaaattcaagcaaagaatgttgctcatctctcagtagcactagcagagaatgcaatagttattctgatgcttgtggaagatcatctgagatcacaagctcaacatttttgcacatcccttacaggtgatagcatcacatcgtccacatcaatgacttcattggccgccagtcggtcaaattctttgaacacagctggtaaagatcccatggctgctggggtctcaagacgagcatctttgtccagtgatgctggtggccttcctctggatacctgcaagttgtttgctaacagtgatcctttagagaaatggggacatgggaacaaacagaacgagaatgactaa

SEQ ID NO: 37601 - DNA, 150 bp, Zea mays
  Peptide Sequence Number=SeqID_80976
atggctgtcaaaaagatgttgattgataaaatgtttgataccatgtacctccttaatttgcttgatggtgtgacttggccttcatccctaccaccgggacagatggccgagagggttattgcttccgcaggagaggacctggaggagtag

SEQ ID NO: 37602 - DNA, 180 bp, Zea mays
  Peptide Sequence Number=SeqID_80977
atggctgccacgccgcgctgggctacagggggcaagagcgccgtcgggggctgcgacgcagggaagctctcgccgccggccgagaacaagggaagaagatctaacccccttaacaggaatctcgccctcgagattcaagaagaggctagcaagaacgacaagatgatcacgaccaattga

SEQ ID NO: 37603 - DNA, 165 bp, Zea mays
  Peptide Sequence Number=SeqID_80978
atgggcgggggcctcctggcagcagcatccgccctgaggtcagtgctgccgctgttcggccccccggagcagaagtcgtcgtcgtcgccgctgctggagcaggcccacccctatcgagtggggttgttcgtacctgcggagggagaaccggagttccgtttgtaa

SEQ ID NO: 37604 - DNA, 279 bp, Zea mays
  Peptide Sequence Number=SeqID_80979
atgggatcacgctgtggtaaagtgcacactctgcagagtgttgaaactgatatatcagcgtgctcacgtggttatgagattgatggttttggttatgactatggtgctgctagtccactacagccaaacaggatacttgctgagtatgttgatgtgtactcacccttgctctacacaccaaacccccccccaggttgtcagcattgcaaccactgctcaggcgaagatgaagctgtggaaggagacttccaggagttccaagactacgacgagttctag

SEQ ID NO: 37605 - DNA, 453 bp, Zea mays
  Peptide Sequence Number=SeqID_80980
atgggcaagaacaacaagcgtaagcgtgagccgactcctccatcagaggagtttggcgactcggagtactcggaggaggagttctcctccgagcccgaggggtctccggctcccgtctctcccccggcgtcgtccgatgactcggacgactcccaggggatagccgcggaggtctggacatacatccgggccatcgagcgcgccgggctcgaaggctcggatgagtcggagtactcctcggatgaggaggactcggacggcggcgaggagggtgaagacgacgacgacgacgatgacgacgatgacggcgacggcgacagcagtggcaggagcggcggcgacggcaggggcagcaccaagggcggcaacggcggcagcggggacagcaccaggggcagcagcaggggcagcaccaagggcggcggcggcggcaggggcagggccagtggctag

SEQ ID NO: 37606 - DNA, 519 bp, Zea mays
  Peptide Sequence Number=SeqID_80981
atggtggcgctgagcgtagaagagtcactggcgcagttgcttgccagaattgatgagggcaacagggaaacttaccggcgcctggattcgatgcaatccaccatggagaacatggagatcacgctcaagggtcaggtggacaaggtggcgtggaaggcgatcgaagtttccccttctacttcgaagttccggtggtggaaaacgcctcgacgttgttccctccagaagctgcgtcaagcggggctacaactggacaagttcgccatcgagccaccaatccttatcgcagaccggttgctggtgccgaagcagcccacatcttcgctccaatcgaagtcatgcccggattcaaagacactagatcaggtggcgccctatccagcattagggaaaacatacagagggtttgagaaattattcaccacaatttatgctttaaaggttgaatttcccacaaaattggttagcgggagacagctagagcaacaaccaaagcaaacacacagaaagagagattga

SEQ ID NO: 37607 - DNA, 303 bp, Zea mays
  Peptide Sequence Number=SeqID_80982
atgcctatccaaggtactggaggagttaggaatatccagccaaatgggggcttgctagcaataaccccctcggtttatgtcacagtgttgcaaaaaattgggcggctgcgtgactctagggtggaatttagatctactgtaagcagtgggaaaagtaggctattttctgtagagtggtttcccagctttcaatccataggatttggtagagaagagtcaaactctcagccaggaaacacactcgatgatgaggatatagagctactaggtgatgatgaggatgctttagaagatgatgaatga

SEQ ID NO: 37608 - DNA, 204 bp, Zea mays
  Peptide Sequence Number=SeqID_80983
atgacaaccctgtcgagtggggcccacaagtcagtgcctgacgcgagtgcagacataggtggccagggcgcacgaattgggccggcggggcacgtttcagcccaccacgcgaaagtgaagagggagtgggcgtgggctggtggtgaggaattggcccaggtcgaggttgtcacagaatgcacaccacatgaaaacccaacatga

SEQ ID NO: 37609 - DNA, 204 bp, Zea mays
  Peptide Sequence Number=SeqID_80984
atggcgaagttggtcatattagaatttgagtcagctgagccagccgccctgaaccgagacctcggccgcgctcagtcgcacaccttccccttctttgtgccctacgggcccatcctatcggcgcgccgccctagggtgcgcgcttgctcgggcgtgcgctctcccacgtgcgcggtggagaaatccctcagccatccgagctag

SEQ ID NO: 37610 - DNA, 804 bp, Zea mays
  Peptide Sequence Number=SeqID_80985
atgtcctccccctacgacacgggggctgggtctcacacgccatgcaagctggccgggacaaaagaagccaaaccgccacgcgcgaagcgtgtaaccgcccagcggttacaagcactcctccatcttcgcctaaaccagtgggtgaaagggcggaccgccatgcacgcggcatgcaactacaccacagagatgcacccttacgacttcgacgcatccagcgtggaggcccaggcccacacatcatgtaactggcgcgccggttgctacgtgcgaaaaactgcactgccacttacgctaatgtcgcgcctcctcgactacggaactggtgccgcgactcgaggcaaccctgcgcatggcccaacagtgccaaccaagcacatcggtcacaggtcagtcagccgcgggaaaaggcgcgacgggactgggaaaggggatacttcgaaagggatccttctctgcgaaggaagcgggccccgagccctcctactgaacagaggttcgaaggctggcccctcggaagggttcgacagccacctcagagcactcgggctccgcgcccactactggtcagaggttcgaaggctggcccctcggaagggttcgacagccgcctcaggccactcgggctccgcgcccactactgatcaggggttcgaaggctggccccccgaagggttcgacaaccgcctcagaacacgcagagcgagggatgactctgggtacgtccgatacatggccgaggctcgggctatgctcccgaggtaccctaggacatttccgagaccagtaggagcgattctgtaa

SEQ ID NO: 37611 - DNA, 879 bp, Zea mays
  Peptide Sequence Number=SeqID_80986
atggcgagcgcccgcattgccttcgtctcgttgtgggaggagcgcaacctcgtggaggttggtacctgtcagccatcgctcggcttcaaggattttcatcaggcagcccggctgcatcccctcaccaatggggagaggacgctcaccagcctagctgagggggcggacttcaacaacgcggggccgatcggccgcaagcgtcctggctctggcacaacttccggtgccacctcccaccactgggtggagtgtggctatttgcccgccgtacgggcggctgttgcgccacgcgcaccgggggaccgcccaagacgtcgcgcgctgctagggcggcgttcgtgttcttgggctgtcccaccctcgctccggcacgacgcctccgcgcggaggtcggtgcctgcccattcgggaggactcgagtggggatctgctggtgggcaggtggctaccgtcgtcggtgctgaggtggtggcagccggagaaggcttccccaccgacgagatcgtcagcgccacccgcggaccaacctccagctctttggctttgatagcttgtcctcgcccctcgagtgtggacgcgggcgagggccttgtcgcagcagcgtctgccctgaggtcatcgctgctgctgtttggccgcccggagcggaggtcgttgttgctgctccagtggtcggcggcgggccacccggagcttgtcgtcccgcaggctctccgatgtggaggttgttcatacccgcgggagtggaaccggagttccatttgtaatggcaccttgagtgccgttgtctgttcattgtggctgtcggggcctgaacatctagttaaggaaaaccctcgaccgctctgcgatgagccggagccggaggcagcggtgtga

SEQ ID NO: 37612 - DNA, 324 bp, Zea mays
  Peptide Sequence Number=SeqID_80987
atgaggatgaagctcaagttgatgaagggcaaaatcaagaagatgagccgcctcaagatgatggcaatgatcaagggggagatgcaattgatcaagaaaaggaggatgaggaagaaccaaggccgccacacccaagagtccaccaagcaatccaacgagatcaccccgttgacaccatcctcggcgacattcataaggggggtagaggaagcactacaagattcggattgggtggtggcgatgcaagaggagctcaacaacttcactagaaatgaggaaccaaatgggtcttccgcaacaagcaagatgagcatggtgtggtga

SEQ ID NO: 37613 - DNA, 429 bp, Zea mays
  Peptide Sequence Number=SeqID_80988
atgggcgagggcgaccctctccaggtcgtcacagctgcccgcgcgctctcctggctatggagaaaaccgctcatggcggcgtcggagaagaagcagtcgaacccaatgcgggagatgaaggtccagaagctcgtgctcaacatctccgtcggtgagagcggtgatcgcctcacccgcgccgccaaggtactggagcagctgaccagccagtcaccggtattctccaaggcaaggtacactgtgaggtcgtttgggatccggcgcaatgagaagatcgcatgctatgtgacggtgcggggtgagaaggcaatgcagctgctggagagtggcttgaaggtgaaggagaacgagctgccgaggaggaacttcagtgacactggttgctttggatttggtatccaagagcacattgatcttggcatcaagtaa

SEQ ID NO: 37614 - DNA, 345 bp, Zea mays
  Peptide Sequence Number=SeqID_80989
atgggcaatgggaactctaattggagccatgatcaaaagatcatggacccgcgtcaccggaatagcctaatcgtgctcaccggagttcaagaacccgccggcgcacgtggaccgggtaagcccctgcaccgttttccaattccttacgcgagccgccgacgacccccgccgcctgtgctcgtggccagggtagctccgaccacctccggcaccgacccgcacatcggcgtggctgttgcgacctcccggacgtcactgaccacctcgccggagctctactgccgccgggggctttacgcaatgtcagtgacccaagccaatagtggaccaagggctgttctgtga

SEQ ID NO: 37615 - DNA, 474 bp, Zea mays
  Peptide Sequence Number=SeqID_80990
atgggaagtgccggacccctgtatatacagaccggacctccgggtaaggcacagggcctccacgggcacgagccgaactcctggtatgggtcccggacccctctgtatagggtccaggccacacacggcagggtcccgggattctgggacaaagagtacccggaccttaatcaagaccaggcgggggtccggagccgatacgtgtccgggccatgccgtgtacgcttcttctccccgctcaggcggagacccgacgctgccacgtggcctattgcccgtgacgtaagctggcgcacggggcctgacgtaaggcctctgggccgcgcgacctctgcattaattgcggataagccgcaccgcctgtccactccactggcaggcaaggtgccatctcggcatttaatgagccctatccactccactggcaggcgatgtgtcgcctcagcattaaatgagccctgtccactctgctga

SEQ ID NO: 37616 - DNA, 222 bp, Zea mays
  Peptide Sequence Number=SeqID_80991
atggacgctgaggacatggaggatgtacaagcccccacggccgtccaggttgtcaaaccagttgattccttcagtataaaccagaaatacttcaagatgtgcccaaggaaacaaaaaagttataatgagccaccacttcaagctaaggagcagtattgctcatatccctacaaggcactcaacaattactccatgtatgcgagatgtagagattcttcgtag

SEQ ID NO: 37617 - DNA, 444 bp, Zea mays
  Peptide Sequence Number=SeqID_80992
atgaagctatttgcattatgctttggaggtcagcattatgtcatcaatattttgcttcagagatgtgaccgttttgaaaaatatactgataattcctgggcgtccccccaatgggtgtgggcaagggatggcttggtctggacgtacatccgggccgtcgagcgctccgggctcgagggctcggatgagtcggagtactcctcggatgaggaggactcggacggcggcggcgaggacgaggacggcgacgacgacgacgatggcgacggtgacggtgacggcagcggcaggggcaggggctgcggcggcggcagcaaggtcggtgacgacggcggcagcaggggcagcaaccagggcggcagcagcaggggcaacaaccagggcggcagcagcaggggcagcaccaggggcggcgacggcggcagcaacagggtcagtggctag

SEQ ID NO: 37618 - DNA, 717 bp, Zea mays
  Peptide Sequence Number=SeqID_80993
atggagcgactaccgtccttcgagcgcctgcgcacgggcctcgtgcggccggcggacgcttccgacggcggcaacgccagcgaccgcggccggaggcgccggcacacgcacgaggaggtggacgtgcgcgcgatggggctcgcgcagcgccaggcttttgtggagcgcgtgcggagtgccacgtcggcacccgcgctctgccccacgctggcgaacgtctcgctggacgtggccgaatcgttgctgggacgcgtcggggtcaagctcggcaagaggaagacgctccacatcctcaaggacggctccggcgtcgtgcgcccgtccaggatgacgctgcttctcggcccaccgtcgtccggcaagacgacgctcctgctggccctggtcggcaagctggaccccactcttgaggtcagcagggaggtgacctacaacggctatgggctggacgagttcgtgccggaagaaggcggcatacatctgccgacacgtccacgaagaaggtcggcggagacggagacggcgagacggcgcggaggcgggtggtggcagtggcgggctgttggcggtggatcagcctcgtgggcgacgccaccgaaggctgagcggggtggtgcctgcacggcgatgggtggcggcggggtggttgccaaaggcagggacggctgcgacgggggagggggcgggggcggagcacggtcggatcgctctggatga

SEQ ID NO: 37619 - DNA, 462 bp, Zea mays
  Peptide Sequence Number=SeqID_80994
atgggcaagaacaataaacgcaagcgtgagccgactcctccgtcggaggatttcgacgactcggaatactcggaggaggagttctcctccgagtccgagggatctccggctcccgtctctcccccggcgtcgtctgatgattcagacgactcccaggggattgccgcggaggtctggacgtacatccgggccgtcgagcgatccgggctcgagggctcggatgagtctgcgttctcctcggacgaggaggactcggacggcggcgaggacaaagttgacgatgacgacgacggcgacgacgacgatgatggcgatggcgacggcagcaacggcggcgggggcagcggcggcaagggcggcaccagaggcgacagcagcacgggcagcaccagaggcggcagcagcaagggcagcaccaggggcggcggcggcaagggcagcagcagcaaggccagtggctaa

SEQ ID NO: 37620 - DNA, 144 bp, Zea mays
  Peptide Sequence Number=SeqID_80995
atgctgtgtcaagcccccccaagcgccgtcccgagggtgaacggaacagagcgtgactgtgagagcgggatgggaacggagcggctccgcccggttgattttttggagcggaatggttccggatctgagaagaatattccctaa

SEQ ID NO: 37621 - DNA, 1311 bp, Zea mays
  Peptide Sequence Number=SeqID_80996
atgaacagacaccatcactcaaggtgccattacaaacggaactccggttccacctccgcaggtacgaacaacccccacgttggagggcctgcggagcaacagaacgccgacggatggctcgctgacgcccgctccggcagcagcgacaacgacttccgccccgggcggccaaacagcagcagcgatgacctcagggcagacgctgctgcgacaaggccctcgcctgcgtccccgcccaaggggcgaggacatgcagaaggccgtggagttggaggtcagtccgcgggtggcgtcggctatctcatcggcggagaaacctcttccggctgcctcggtgggaggtggcaccggaagcagcgccaaagccactcaggccggagagccggacacgcggcagctgccagcgccacgaacggcaaacgcccttccccccgatcactgagggaaggagtgggccgctacccgcgcggagaccggccccaactcggcgcactcccctccccagcactgatgatgaacatccttgaagctgagggaggggcagaggccgcagcccgacttgcttctccccaccctggaactggtgccgtcgtggaccaagtcttctccaacacgctccaaggtcctccccgtacgacacgggggctgggccccacgcgtcatgcaagctggcccaaggcggaagaagccaaaccgccgcgcgcggtgcgcgtaactgcccagcggttacaagcgcttctccactttcgcccagaccagcgggtgaaagagcggaccgccatgcaggcggcatgcaaccgcaccaagggggcacacactttcgacttcgacgcgtccagcatggaggcccagacccacacgtcatgtaaccggcgcgccggttactacgtgcgagaaactgcaccgtcacacgcgccagtactgcgccttctcgactgtggaaccagtgccgcgactcgaggcgaccctgcgcatgacccaacagtgccaaccgagcacatcggtcacgggtcagtcagccgcgagagaaggcgtgacggtcgatacagccagaaatgggccagcagtaatggcggtggcaggcctgcggaagaagcggtcaagtcgtcagcaagctcacgtcccctcctggggcagcgagagagccctctcccatggcgtgaagacaacgcgcccgtgttcggttcctcgaacggctcgcgcacgcacaacggctgccccgcgacccactcgtcccgtcgcattaactctgcggcaggacaggcgacacctttggcaggcgaagcaggcgacacttcacctccgccataa

SEQ ID NO: 37622 - DNA, 459 bp, Zea mays
  Peptide Sequence Number=SeqID_80997
atggccgttgacgacgcggaggacgaccagctcgcctccatgtccacggaggatatcatccgggcctcccgccttcttgacaacgagatccgtgtcctcaaggacgagttgcagcggacgaacctggagttggagtcgttcaaggagaagattaaggaaaaccaagagaaaattaagctcaacaagcagctgccctacctcgttggcaacatcgttgagatcttggaaatgaaccctgaggatgaagctgaggaggatggtgctaacattgatttagactcacaaaggaaaggaaaatgtgttgttctgaagacctccacaagacaaatttatcacatgaaaatatggtacagtagattctgtatcgaaagtgcagccaacatttttgttattgctaactcacatgtgaaaaggcagtcaagggtctgtattgggtacccaggacaattagtcatataa

SEQ ID NO: 37623 - DNA, 681 bp, Zea mays
  Peptide Sequence Number=SeqID_80998
attcaagagcttgtagaggcaattgtactgcccatgacacataaagaccggttccagaagttgggtattcgtcctccaaaaggggttcttttgtacggaccaccaggaactggcaagacactcatggctcgtgcatgtgctgcacagacgaatgcaacgtttcttaaattagctggtccacaacttgtgcagctttgcaggttctcagaaacaagttttgaatgtcttggattcttgttgcttttctacctttggaacatagtttgtgctaacttctctagggatagtgtgttcctgaatgtcttaatgtttattggtgatggagcaaagcttgtccgggatgcataccagcttgccaaaagagaaagctcctttgaagttagcggtgatagagaagttcagcggacaatgttggaattattgaatcaactggatggattcagcagcgatgagagaataaagatccattcaaggaaaatgaatgtaaatcctgatgtcaactttgaagaattggctcgctcaactgatgacttcaacggagcacagctaaaggcagtttgtgtagaagctggtatgcttgccctacggcgggatgctacagaggtaactcacgaggatttcaatgaagggatcgtacaggtccaggcgaagaaaaagtcaagcttgaactactatgcttaa

SEQ ID NO: 37624 - DNA, 612 bp, Zea mays
  Peptide Sequence Number=SeqID_80999
atgaaggccacgatgcgactgatgtcgttggctacatcctccctcatcttcacgctcgcctctgcttccctcatcctcggcgacgtcgctgcggcctccgcctatgcggtcgagctcacgacgatggtatttatagggtcgtccggaggtaggtggtccaaagtacggtcctaccctcatctgccaactatatctgaagaatttttgcataacgtggtcgacaacgtggaagcagaagggtcgatggagatggacaacaagatcaatgagaagatcacaagtagtcatgtgagggcacttcccaaaaaccttattctccctcttccggtgcagcatattgaaggcgacgggattcggagacctgctctcccaatcgtagatgcacgtcgacggttgggattaagagggctacgatggtggcgcagctgtgggcagaggctaaaacctaacttattttgggatgagtttagcgctggcggtcaggcaccttatatacgaccatgtccgcgaaccaataaggacccgcaatacaatctgcacactatccacgaactggtagactcgcactccgataagggctcagatccttatcgcgatcagatagggctctag

SEQ ID NO: 37625 - DNA, 2010 bp, Zea mays
  Peptide Sequence Number=SeqID_81000
atgccgcgtccctatgcgtcggccacctggggagcccttggcctagacggaagctttgccgtgccggatatgaacaggacgattggacgaacaaggcaacccgacctggctcacggtcacggcctcacccatccgcttgccatccaatccgacccggccccatcgagaacgtgcgcgtgcgcgctgcctaggctgatacgagcagccagcaagcaagcaacagatttaaccgccgccgatgtccgtgatggcgcggaggctgagctccagctgcagcagggccgtcgcgtcctcgtgcccttccaaatcttctctgcggcgccgtatatatacccttccttcccgcccgctgctactcgcattctcgctgcgggcctcgcctctgtgtccggcgccgcctctccctcctcccaccccgcctcggtgcgtgcggatccgtccctaattcgtttgtcctctcgtctcgccggtgttcttgcgttatcgtttcagtctacccgttggtttggtattggttatgattttggcgtgtccgtcactccgttgtgctggattggatccgggagcaggtgttcgtttaggactctcgcggcggccaaggagtcgtcgccgccgtcgaccagcgtctcgccgacccagcagcagtcccggagtacgatagagggaggcgagatgacggtcgcctcgtccgtcaggctcgccggcggcaatctgacggtatgcgggcggacggtgctgtccggggtgccggacgcggtggtggccacgtcggcggcgacggagggagcggtcgacgggatcttcctcggcgccgacttcgccgagccggccgcccggcacgtcgtctccctcggcgacctgagggacgttcggttcatggcgtgcttccgattcaagctatggtggatggcgcagcggatgggggagaaaggcagcgacgtcccgcgcgagacccagttcctgctcgtcgagtccaggggcgtcggcgacgaggacgcggcgtacgtcgtgttcctcccgctcgtggagggcgcgttccgggccagcatccagggcggtgccggcgacgcgctggagctctgcgtcgagagcggggacgacgacacgcgcgcggcgtccttcgagcgatccctcttcgtgggcgccgcggagtccgaccccttcgcggccatctccggcgcagtcgccgccgccaagtccgcgctcaggacgttccgggtccgcgccgagaagaagctcccgggcatcgtcgactacttcggctggtgcacctgggacgccttttaccaggacgtcacccaggagggcgtcgaggccgggctccgcagcctcatcgccggcggcgcgccgcccaagttcgtcatcatcgacgacggctggcagtccgtcgccaccgacaccaacgaatcggccggagaggacaagccgcccctcctatctcggctcaccggcatcaaggagaacagcaagttccagaacgcggacgacccggccgccggcatcaagacggtggtgcgcttggcgaaggaggagtaccggctcaagtacgtctacgtgtggcacgccatcaccggctactggggcggcgtccggcccggcgaggagcactaccgctccagcatgcagttccccaaggtttcgccgggcgtcatggagaacgagcccggcatgaagaccgacgtgctcaccgtgcaggggctcggcctcgtgcacccgcgcgccgtgtaccgcttctacgacgagctccacgcgtacctcgccgccgccggagtcgacggcgtcaaggtggacgtgcagtgcatcctggagacgctcggcgccggccacggcggccgcgtgcagctcaccaggcagtaccaccaggcgctggacgcctccgtcgccaagaacttcccggagaacggcatcatcgcctgcatgagccacaacaccgacgccctttactggtacgcgatccgatctattcgctctcgcaatgctgaccgtggagaattaacatgggaccattaa

SEQ ID NO: 37626 - DNA, 426 bp, Zea mays
  Peptide Sequence Number=SeqID_81001
atggctggttctaaggatcacaccaatgtctccaccaccaacatcatcaagccgatcatggaggcactcccggctgatgaccagcagccctttaaggatctcgagcgtgagaaggaggtgatgcgacaatggaccgaacaatgcgacaaggaggaggcggaactgctgcgacaactctccaaacggcgcaaaaagtcgatgaaaaaaaagatcatccgtcaaggggatatcgatatgaaatctctcctacctccgcttcaaggtcctgctccgccaccaccaggcacgcgacaggctccagatacagttggaccgtctgagagtcttctcggacagttcggctacatcgcggaccgtccggcgtatttcgttggaccgttcgaccctacacatgcccgtgcatggatcactcaggtcgcgccataa

SEQ ID NO: 37627 - DNA, 276 bp, Zea mays
  Peptide Sequence Number=SeqID_81002
atgggatccacagaggaaacgcttgaaagcaaggtagctaataatcatggtgttatggagcaacaagctgttcctgtccgcctggtggccactggattattttatattcctacacagatcaacttctacgcacagtataaagcgaagctgctacaacaggccggcgcgcttggcatcatcagtggcggccgggatctctgtccgctcagcttggatcagttccgcaagttcatccaatttatacctgatgacgcgagcaagacgacagctgattag

SEQ ID NO: 37628 - DNA, 159 bp, Zea mays
  Peptide Sequence Number=SeqID_81003
atggtctccaggtgtttcaatgatgctacaaatggggttccaggtgatggttggtctctaatgagcaatgatggtgctgaggatgttcctattgttgtcgactctttctccaaacaaacttattggtgctcatgtcaactcctcccagatgttttttga

SEQ ID NO: 37629 - DNA, 963 bp, Zea mays
  Peptide Sequence Number=SeqID_81004
atgcctgaggacgcatgtggggagagtcgccttttaaaaagggatcgaccccctgggtggagcgcaacttcgtggaggttggcacctttcagctattgctcggcttcaaggattttcattaggcagcccggctacttcccctcaccaatggtcaccaaggacgcttcaaggatcttcatcatccttgctggggcgaggggtgagccggggcctgccttcgcgtgggctatcgtcccgcttcttcctccgacatctaggggtggaaaccatcctccagttctgtggaggaggcgtcctccagccatgcgggggaaggcgaactgctgctgcccggccatggtgcagcattccgtcctctgccgggcgactgtggtcggccgcaccggagggtctcacaacacgtcgtacgtcgcgagggcggtactcgtgttctgggacggtcccgttctcgttttcgtggcgagaacgggggtgagaaccttccggtgtgctttggggcggccgacgctcgctggtgcggtgttggtgggtaggtggacgccgtcgtcggtgctaaggtggtggcagctggagaaagtttctccgccgacgagatcgttggcaccatctgcgttctgggccttcgactctttggctttaatatctggttctcgtcccccgcgaggggacgagaacgagagccttccagcggtagcgttcgccctgggaccatcgctgatgctgcagaggtcgccggtgagtcacccggagtttgtcgtcccgcaggccctccgatgtgggggttgttcgtacccgcgggagtggaaccggagttccgtttgtaatggcaccttgagtgctggtccgctctgcgatgagccggagccggaggcagcggtgtcgtcgtggacagaggcggagttggctcgagaagaagcttcgtcagcccaggagcaggtgacttcccaggccgaggaggcgtag

SEQ ID NO: 37630 - DNA, 147 bp, Zea mays
  Peptide Sequence Number=SeqID_81005
atggaaaggcctaggaagttcgaagggataagtggcaaaaatcaagatgttattgtaattgacgatcatgtgagagcggttcaggagattcacaatgttgctggtgaaatgggtggtgctagtttatatggcaattgcaagatctaa

SEQ ID NO: 37631 - DNA, 222 bp, Zea mays
  Peptide Sequence Number=SeqID_81006
atgtgtgaccacaggaactacaggaacaagatcaaccttcttcctcgacaatggtgcatcccccaactcaagatgatgtataggtacctcaagacgaggggcaggatcaagggggagcacaggaagaacagacctttcagggtagaagagaccttgcaggatccggactgggtgttggccatgcaggaagagctcaacaacttcaaaaggaatgaagtctag

SEQ ID NO: 37632 - DNA, 960 bp, Zea mays
  Peptide Sequence Number=SeqID_81007
atggtcacccggtcggccatcaccaagcagaagaggtggcggcggaaaggactgggtgtgcggtttcctttctctggctattccctcgggttgcgaaaacctaagtgggaggcgagcagcagagacaggcggcacctttggcaggcgaagcaggagacgcttcacctccaccataatgaccgcatcaaaaaagggaccgagaaaggggatactccgaaagggatccttctccacgaaggaagcgggccccgagcccccctactgatcagaggttcgaaggctggcccctcggaagggttcaacagtcgcctcagagcactcgggctccgcgccccctactggctggcccccgaagggttcgacagccgcctcagacgcagagcgagggatgaccctgggtacgttcgatacataaccaaggctcaggctacgctcttgagaggctcgggggctgctctcgcaaacctggctccggccaaaccgttgacagcgtcaacataccagcccgagaacttgggactcgactccaagtccggcctcgggcgccataggaagctccgcttcgcccgaccccagggctcggcccccgtctcggcctcagacgatggactccacctcgcccgaccccagggctcggactcagcctcggctccggaagacgacaaactccgcctcgcccgaccccagggctcggactcagcctcggctccggaagacgacaaactccgcctcgcccgacctcagggctcggactcagcctcggctccggaagacgacgaactccgcttcgcccgacccagggctcggactcagcctttgcctcagacgacggtctccgcctcgcccgacccggggctcggactcgacctcgacctcgacctcggaggagcctctgcctcgcccgacccagggctcggactgaccatgtcacagggggcaccatcattaccctacccctag

SEQ ID NO: 37633 - DNA, 642 bp, Zea mays
  Peptide Sequence Number=SeqID_81008
atggagggtaggggcatgagcataataaaggatggagctaaagcaatgattgtaaccgacaagggagagaatgcaaccaaggtcaggataggtaaaacaccattctcaaatcgagatggaaaagatgatattacaaaagagccacgtccgagcccgcgtggactcattcttcctcctctctctcgtctgaaatcgacgagccgctgccgccgccgcccgcccgagccgcctcccgccctcgcccccaacgccggcccgcccgcgcccccaacgccaccgcccgcccgagccgcccccaacgcggccgcccgcccgagccgccgcccgcagcgagtagccgcccgcccgagccgccgcccgcccgagcagccgcgcgaccgagctcctacgccgccgagcccccacgccaccacgctgccacgccaccgccgcgcgcccggctccactgcgcagccgtgccaccgcaccgcagcaccgccgcgcctccgcgcgccgcgcaggctgcgcgccaccgctcctccacgccgccaccattcgaggcccgccacccgaggccggaacgccgcccccgaggccgccaacgcccgcagctcgtcccggagcgctgccgtccgcccgaacgccgcctctagccctcgttga

SEQ ID NO: 37634 - DNA, 1494 bp, Zea mays
  Peptide Sequence Number=SeqID_81009
atgaatgctgtggtaacttcacacctacccatctgtttatatagtgctgcagaacgagttcccaacaagagtcttcaggcgcagcatgcggacgctgtcctggagaagtcagctgcggagagcaaaaaccgcaggctggtggagaaggtggctgccttggaggccgagaagacggacctctggcaccggctggcggaggagaggagggaggccaacgaggctatcgctgaagcgcaggctgcgcgagcggaggctaaagtggcgcgggcggagaacagtctcgccagccaacgcgccgaggagtgggaggcaaggttcaacgccctgctcggccgcgtggacaaggccgaggcctcggcgcgctcggaagtcgggcggacgcacgcacagtttgtggatgcgtaccgcgatctgggtgcgcggacggcagacttcgaagtgcccgaccaagaggcagcccttcgcttcctcgaatggttgcaagaggagctggtggtgctcccgactattgtgcagggtttcatgtccttcgcctccctcgtcacctgcgaggggaccctgaatgcgttggcccgcgaggggtgtcgacactacgaggtcttcgaccaatcagacgagaactttgaacgtgaaattttcaaggccgaagaccctgtggtgaagcagttggcgggggcactcttcgataggatgtggggtccgcacggtcgggaggcggttaaggagcggtctgaccgggcgatagagcagatggcgcgtgccgaggatgtcgaggaccttggagatctggtcgacgtgccgcccgaggctgaggtcgacccggtgccgcctttgagtgccggtgaaggctcctcggctgcacccgtgcctaccgtggccggtgaaggccctttgccagcccctgcgccaacagccgaagatcccccgaaggtggcggctgagccggtggccgaagaccccatggtcgcggccgggccttcgcaggttgaggattttgggcctgcgcaagcaatcgctactgtcaatgataattatgtggcggcttcgaccgtgggtgctgaagacgattctgatgattctatgtctaagtgttttgagtctgatgattctgggagttcgattgtgtggacagaggagtcttcggatgaggatttggattactttgcggcattggatgtggctgcggcggaggcttcaccgcgtggaatgggtggtggggatcttccgggtgcgagtgttaggcataggcaacgaagggcagtggcgaaacgaagggtgagtgagttgccacgaggtgataggcgtcctcgtggtgaggtgggaggtggtcgccttcgtgtggacggggctggcaagtgggaattgttgtcctcgccggctggggcgagtgtgggtgagggggagctgcgaagtctgtttgcgggtgaggaattgaggataatgttgttcaactataaggaaatgggtatcatcccgaaggttgagccaatgtaa

SEQ ID NO: 37635 - DNA, 1647 bp, Zea mays
  Peptide Sequence Number=SeqID_81010
atgtggctagtgtcctccctccgtgccgctctgtgcctgttgctcgccgtcctcgccagccaccgccagcctgcggcggccgtcgtcacgctgtcgacgtcgtcgcggtggatcgtggacccggccgggcaccgggtgaagctggcctgcgtcaactggccgtcgcacctggagtccgtggtgaccgaggggctcggcaggcagcccgtgggcgccatctccgggatgatcgtctccatggggttcaactgcgtccgcctcacgtaccccatcgcgctggtgaccaacgcctctctgtcggtgctcaccgtgcgccagtccctcctggccaacggcctcgccgagacggtcggcggcgtcgaggctgtggtgaacgccctgggggagaagaacgtcatggtgatcctggacaaccacgtgagcacgccggggtggtgctgcagcaacgacgacggcaatgggttcttcggcgacagggacttcgacccaaacgtctgggtggacgggctgggcagcatggccaccatcttcgccgacgtgcccaacgtcgtcggcatgagcctgcggaacgagctccgaggcccgaggcagaatccccaagattggtacacgtacatgcagaggggcgcggaggcggttcacgcggcgagcccgagggcgctggtgatcatgggcggcctgagctacgactacgacctgtccttcctcgccgcgaggcaggtgggcgtgagcttcgcggcggagaacaagctggtgttcgaggtgcactggtacagcttctcggacgcgcgcgcgtgggagacggagagcgccaacgaggtgtgcggccgcgccgcgcgcgacttcgcgcgccgcggcgggttcctgctcgcacggggcttcccgctcttcctcagcgagttcggcgccgactcccgcggcggcgaccccaaggacaaccggttcttcccgtgcgcggccgccgtggccgcggagcacgacgtggactgggcgtactgggcgctgcagggcagctacgcgctgcggcagggcgtcgccgggatggacgaggtgtacggcgtcctcgactggtcctggagcaagccccgcaacgagaccgtgctcccgaggatccaggcgctgcagcggccgctccaagggcctggctacggcgaggcgctgccgtacaccgtgctgttccacccgctcacggggctctgcgcggtgcgtcgcgcagccgcggtgacgacgacgctggagctgggcccgtgcaacgagacggacgcgtgggcgtacgcgccgccgtcgtcgacgctcgttctaagggacgctgcggccgcggggctcccgtgcctgcgggccgaggggcctggccagcccgcgcggctcggcatcagggactgcggcgaccccatgtcgacgtggcgcctggcgacagactccgggatgcatgtcgccgtcgacgccgctcttgggctgggcggcggcgaggacggcggcggtggcggtggcatgctgtgcctggacgtgggcacggacggcaggagcattgtgacgaacccgtgcgcgtgccagcgcggggacgggacgtgcgacccggagggccagtggttcaaactggtcaccagcacgaggcgcgtcgtgcgcaggccgccaacgctcgcctag

SEQ ID NO: 37636 - DNA, 330 bp, Zea mays
  Peptide Sequence Number=SeqID_81011
atgtcctcctcgacgacacgcatggagaaaggtcaggagcatgaccgactcgccccgtacccgcgtcgacgagcgtcggtcggctcacgacagcgaccgtgggcggggcagcaggttggggtggaagaacagggcaaaggcaggaaagacgaatgggacgtcccacgacagcgaaaacgatggtgcgcgcatgatgtgaaacgtcctcgtgaacgtgcaatagccactgcgcgagtcggtgtcggggctggtgtcggacgaatacagggtggaggcgcctgctcctacgccctctaccgagaatggggtggagcggagatggaggcatga

SEQ ID NO: 37637 - DNA, 84 bp, Zea mays
  Peptide Sequence Number=SeqID_81012
atgtcgcctccagatgcccaggtcttcgtcgtgtccttctccggcaacgagcagagacacattctacttctacaacaaggatag

SEQ ID NO: 37638 - DNA, 876 bp, Zea mays
  Peptide Sequence Number=SeqID_81013
atggatgatattctaatacatgaagttgatagtatcatctctgttactcgtattggaaatcaaagagaaatgagtctgattacgcatgttgaatcaactaatgagtggcgtgattttagagacaccaaagacaagaaaacaaggggctatgttccttggaatgatgatatggataaggtacttcttgatacatttgtggagtattacaataaaggtgatagatgtcagaatgggtggaagtctcatgtatacatagctgctgtgaagaatgtttatgagaagtgtaatgtcaccattacaaaggaaaatattagctctcgcagcaagacctttgataagcactacaatgtcattaatgggttgttgtccactagtggttttggatgggattgggagaagaacaagctcaaagttgatagtgacactgtatgggatgagtatgttgagaggaataaggaagcaaaaggatatagacataaggttgtgaagttttgggatctactcagcctagtgtacaataaagaccaagcaaatggagaggatgctagaacaacaactgaaagttcaaaggaaatgacaaaagagaatgatatcggaggcaaggatgctccattttctgtatcttcctcgagtagtttaaaaagacaaagatcagatgattcatttaactctatgtggtgtgagaagtttgacatgcttactgctgcattgaaagatgacggtctgaagctaccctcttccaccgaagttatcgccgcattacaagaggttgacggacttgatgaagacacagatcttgagctttgtgacatcctcacctctaatgcacaccatccaaacggggcctcagttgatttagtcaattctacaagctga

SEQ ID NO: 37639 - DNA, 330 bp, Zea mays
  Peptide Sequence Number=SeqID_81014
atggagattgaaggatttgttcgagattatttatgccctcggacaaagctacattacagtctccccgatcgaagcaaactaatggaacaaatgctagtaaatgacagcctgcaagctaagggaagaggatcagtagagaactcacccaaagaacaggggaaacggagtctggcgaggctgcgatggctgcctccgtgtgacttggagtggagcggcggattggagcagagcgatgccgcgagcagggagcgggtcggcgtgagcgacgagcagggagcggggcggcatgagcagcgagcgatgtcgcgagtagggagcggggtggcgtga

SEQ ID NO: 37640 - DNA, 852 bp, Zea mays
  Peptide Sequence Number=SeqID_81015
atgaacatgatgagattatctatgatacgctatcttcccttctcttattatgatgttgtacttgtggtcttcaagggggctcgagcggtttctcgagtgcctctccgtggctatgagatcgatggttctggtcatgactatggtgctggtagttttagcaagaatacaggtagcgctggtgtatgcgctggtgtatgcgctagtgtaaacgaatactatacggcaatccccacatgttcttgttattcttcaccatcagtcttaaggttacattattacgttgctctgaactcttatgacaggaaggcattagcagatcagagtggttttggatgggattgggagaagaacaagctcaaagttgatagtgacactgtatgggatgagtacattgagaggaataaggaagcaaaaggatatagacataaggttgtgaagtttggggatctactcagcctagtgtataataaagaccaaggaaatggagagggtactaaaacagcagctgaaagttcaaaggaaatggcaaaagagaatgatactggaggcaaggatgctccatattctgtatcttcctcaagtagtttaaaaagacaaagatcagataattcatttaactctatatggtgtgataagttcgacatgcttacatctgcattgaaagatgacggtccaaagctaccctcttccgccgaagttctcgccgcattacaagaggttgagggacttgatgaagacatagaacttgagctttatgacatcctcacctctaatgcacacaagtttgagtcgatgatggcactcccaatggaaaggaggaagaggtggcttatgatgcagctaaggaagtga

SEQ ID NO: 37641 - DNA, 195 bp, Zea mays
  Peptide Sequence Number=SeqID_81016
atgacgacgagtgaagtgacgcatcgagggcaaggccaagtcgcaatgcaggaacagtcaagagaaaacctagaactcgagattgaatggggaatacgaaggaggaattacctcttcctcgtcttcgctgacgcggtggccgccgtccaatttgggaatcccgatggccagagaaatgagggtccagacttgtaa

SEQ ID NO: 37642 - DNA, 306 bp, Zea mays
  Peptide Sequence Number=SeqID_81017
atgtctctccacctgcagctggtgtacgcatccgctgctcctggaagcttcacgttacaactgttagagtttcttgcgtttcaatcccccctcgttgagtattttggatctcaggcaggtgtgctggagttggagccatccccaatggagcgaccgccgggcccatcgccggacttcccagtcgacgagtttggctatgcagttgagttgcagtccagaccatcattcaccattggccactggcaaaaactgaagaacacaggaagcacgataattgaaccacaaaggccattggccagttcatga

SEQ ID NO: 37643 - DNA, 270 bp, Zea mays
  Peptide Sequence Number=SeqID_81018
atggccctagcggacgttcctgacggtggcacgagcgcggggcggggggccgacgatggccctagcgcggcgatggaagatgaagcggagaggagcccggtaaaaatggagggaaatacttaccagatcgatagacaatttggagacaaagactcacgaggccgtagtccaccccctgccatggtgagagatgttcgacctactggcatccctgttgtccatgtcctcgaccccgtcaaccacacccgtgacctacacgacatgctctag

SEQ ID NO: 37644 - DNA, 288 bp, Zea mays
  Peptide Sequence Number=SeqID_81019
atggcgcgattgggacacgcggtggccaacggcgagggcacggtggcggtgaacactttaccgcgggcgtggtgctttgccactagccttgctgctaccgctgccgccatcgccgtcgtcgtcgctcttgctgtcgccgctgcctccaccgtcgtccttgccgtcgtcattgtcgttgtcgccgccgtcaccgccgccgtcgccctcgtcgtcgccgtcgccgccgctcccttcctcggacgagggaatcgtccgagtcgtcgaacgatgcctgggggggaagcgtag

SEQ ID NO: 37645 - DNA, 330 bp, Zea mays
  Peptide Sequence Number=SeqID_81020
atggtgaaggtaggagtggagttctcaccacggattattgcgcaggcgagcctggccacggagaatggcgggtccgcggcggcgatgcgcctccggcgaggaattgctcacgcaccgcaggtcccaacctccactagtggtcgcggacgattgccccaggtaccgatggccccccttggccctactccgaggacagaggtccggcagcgacgaggttcaccggcggcggcgcgaatcggtgcggtggcgctgttaggggctagcagtgagctcgggtcggtgctgggtagatgggagaggtggagcagggggcataggccgcccatttaa

SEQ ID NO: 37646 - DNA, 930 bp, Zea mays
  Peptide Sequence Number=SeqID_81021
atggcgtcttcgctgccggaccacctcgtggaagagatcctggtgcgccttccccaagacgagcccgtgcacctagcgcgcgccagcctcgtctgcacgtcgtggcgccgcgtcctggtctccgaccgggactgcttcctgcgccgctgccgcggattccacggagcgccgccgctgctgggctacttcgacctcagctacggcaacgacgctaagcgattcgtgcccgcgacctccaccacctcgcccgtccgcatgcctgcgctccatcgcagacgctggtcagcagtcgactgccgtcatggccgcgtgctgatccactacgaggacgaggacgaggacaggtcaaagaggggattcatcgtctgggaccccctcaccggcaggcagcagcacctgggcatgcccagcgctagttacccgtcacacatgtgcctctacacctcctacaccggagccgtgctgtgcgccaaggacgacggcggctgcgaccacctcgactgccaggccgccgccggtccgttccgtgtggtctgcgtagagaccaacctgctacgccctatattcgcatgcgcgaccagctactcgtcgctgaccggcgagtggaatgctccggcgcccaagcccaaccatgacaaccacgacttcttgagaggccatgccaaacacagccttcttgttggcgacgccatatacttcctcttccaagatgaccggaccatcctcaggtatgacctgggtagacactggctgtctgagatggacttgccgccatttatgtggaacgcagctctcatgacggcggaggacgggggcctaggactcgccgccctgcccaacaatgacaatcgcatccatacatggtcatggcatgacgacgatggcagtggtggtggatgctgggtgggagcagagggtcatcgagtttga

SEQ ID NO: 37647 - DNA, 312 bp, Zea mays
  Peptide Sequence Number=SeqID_81022
atggccgaccgagaacgacgctcggcctatgatcgcatggcacaccatggctctaatatgttctgcatacgcgtatccggacggttcgacgcactgacggatagtccgtggatatggccagactgttcggtcatgtttgccaccataggggggccacgtggtggcactgctgtgggtacaaactgtccggcagatagagcttccgatagccgacctaaggatattgtctggcgaaatatcattattgttgggaccatgcttcgtcgccgaaggtcctgcggaaaggaaatagcttcggttgaagctgcttga

SEQ ID NO: 37648 - DNA, 237 bp, Zea mays
  Peptide Sequence Number=SeqID_81023
atgggcggtactggattgccaatggggcaatcgactcgtcctccactcccactctgtctcaggtgtaagcaaggagcacgggctcgagtccagccatacgacctcggcacgacagctcacagcatcgcatacagcaactcgagggccaatctggggcggcaaccaacaaccctcatggttcgcccagcccaatgtagcactagtccaaccgcccacctcaatgagtttagtgtttag

SEQ ID NO: 37649 - DNA, 456 bp, Zea mays
  Peptide Sequence Number=SeqID_81024
atggggaccccgttgacggattatttgctgagtgctggccggcagacactcggcaaagcccatctcgcccctcctctctgcgtgcgcgtcttgctgcgtgaactggcactgatgtccgggtcccgcgtgtcatatgctgcgacgaccggagctcaatccgagagggtgaggagagtggcgaccttgcctcgatttgactcgtgccgccgtggatccttgtcctcatcatcactcgaggccttagaaggggtcaggggccatcgccaaggtgccccgagcaagcgggttggtgctgtcggcatcgggaagggagtactaccagggaattgctcgtcggagttcaacggccgcgccgagccgcagttcgctgtggaccaggctcctgtgcgcgccatcctcggtgagttgtggcttccccgtttcggtcggttcagtgttacatgtcgcaacaagtag

SEQ ID NO: 37650 - DNA, 207 bp, Zea mays
  Peptide Sequence Number=SeqID_81025
atggcgaagatcgacctcaccggacttcggccgcccgcctgcgcgcgtagactgcgcactccgaacctcccctacaccctcggccacctcactggagcagtctcgccgccggatatggttgatggtgtgacttggcctaccacgctgccaccgggttggacggtcgagtgggatgttgctccagcaggaaaggagcacgaggagtag

SEQ ID NO: 37651 - DNA, 339 bp, Zea mays
  Peptide Sequence Number=SeqID_81026
atggctcaccggagtgcccagtctacgcgtgcaggcgggcggccgaagtccggtgaggtcgatcttcgccttccggtgaagttctgccaggtccgagggcttggaaagcttcacaagctaatggcgaagctaaccgagcggctggcgcggcttgggagtgactggagtgggttggcaacggtggccgaggctctggcggcaatggcgggcggaaaggagctcgccggagctaagaggggcgtctggctggcgattgtgagcacgggagaagatctctggtttgacgtgtctaaggcacgcatcccgatgccatcttctggcacaagacagagaggttag

SEQ ID NO: 37652 - DNA, 402 bp, Zea mays
  Peptide Sequence Number=SeqID_81027
atggccaaggcgggccgaggccagctgggcgatggtggggtcgcaagggccaactggccaagggccgagctgagcaccaccaaggcagagaaatcggggaccgggcccggggctcggtgtcagcagcaggaagacaccgctcctgcgccaaggccgcggaccgtccgcgccgtcacagagggcactaccaggcgatccggcgacctgtcgcaggccgccactactgttcaccttgcggagccgaacccaaggtgccaagcttacatggccgattctaaagatctcaacagtgcttctccaaacagcgacacaaggctgactaatttatcggccgcagagcatgaaaacttagaagatgacatgaagaagatggatgaggagatccgacgacaacaagattag

SEQ ID NO: 37653 - DNA, 717 bp, Zea mays
  Peptide Sequence Number=SeqID_81028
atggagggaaagccatcgcgagaaaggaagtcagaactgagacgagagtctcctccactggcgggggtgggtgaattcatccgcggaagggaatcaaagtacaaggaatcaagcagtctcattagctgcgagaagcagatgattcgaatcgagtttttaaccttgcaaggcctcaccgccttggcatacaatgctccactgaccccggctgccgccgtgcataatcgcggcggaagaaagggcggaggggcttaccggcggcgagattgctccggtgaagtggtcgaggacgtaggggaggtctcggggatcccaacggtgtgcgggtcgccgtcggagagaggttcacgggatgccagagaagatatgggtgcgaggaattggtcggagactcactggatagctcggtccacgcgcggcggcggaagaccgaagtccggtgaggtcgatctcgggcctccggtgaagtccggctgggtccgagggcttggcaagcttcacgggctactggcggagctatccgaagcactggctcgacttgaggatggctggagtgggctggccacggtggccgaagctctggcggcaatggcgggcggaattgagctcgtcggagctaaggagagggggctggccggtgaggagatatggagccaggaaatccggtctgtctccctgcccaaacccgaggcaaatccaaggttttgtcgtgtctag

SEQ ID NO: 37654 - DNA, 252 bp, Zea mays
  Peptide Sequence Number=SeqID_81029
atgtcgcgtgcgttcgacgactactatatcgaggattgtggcgtcatcttggcgccgaaggtgacacagaggagaatcgacaacagtgaccagttcgtcatcctcgccaccgtcaggatgccgaccagccataaatacgtgcacgtgatggatggccttggagaatacgaacaagcagtcaaacaaatgtttggtggcagcgacccagcgggttcatgtttcatagcaactgctgatgctgatagttcgtaa

SEQ ID NO: 37655 - DNA, 318 bp, Zea mays
  Peptide Sequence Number=SeqID_81030
atggaagacagactcgacctcggcttcggaggagcctccacgtcgcccaacctagggcgcaggccaaccacgtcaacagggagcgccatcttcacctaccccgagcagactcgggccgcagagaacaaagacccggatcccatctggctagctccgccagctctcttacggaggcaggaggacgtcagcaaaggactcaaccgctccgacaggtgtccctccgccaagatccgtcgctcctccgacggccacgacatcacaccagctgggtgccaaaatctctccggctgccacatcggcatgtacttagggcgctag

SEQ ID NO: 37656 - DNA, 192 bp, Zea mays
  Peptide Sequence Number=SeqID_81031
atggcgtcgctgaaccacatcagcatcgtgtgccggtcggtggaggcgtcgctgcgcttctacacggacgtgctcggcttcgtccccatccgccgccccggctctttcgacttcgacggcgcctgcgattacaggtctgagacctcggattccccccgccacgcatgttcacgctgcgacgtgcccgcctaa

SEQ ID NO: 37657 - DNA, 267 bp, Zea mays
  Peptide Sequence Number=SeqID_81032
atggcgagcttctctaccgcgtccctcgccgcgtgcggctcatcttcttccgctcttcttccccgaaatccgcgccgagctcaactacctcgcgcaaccgactccgtagaaatcggcgccgccgttctgaccggcacgaccccacgcacactccagattgagtcaagggcgccggaatgtccatggggcactgctccggcggggggcgccgccgtgcgggtactgcgccgccgcgctgtcggcttgggcgatagggttggttggtaa

SEQ ID NO: 37658 - DNA, 168 bp, Zea mays
  Peptide Sequence Number=SeqID_81033
atgcaggcggcatgcaaccgcgccaggtggacgcgcttctccgactcccgacacgccagcatggaggcccaggcccacgcgtcacgcaatcgtagggaccgagaaagggggataccccgaaaaggatccttccccgtgaaggaaccaggctccgagcctccctactga

SEQ ID NO: 37659 - DNA, 325 bp, Zea mays
  Peptide Sequence Number=SeqID_81034
atgccctcccgtggcgggcagctggtgcgaagtcctgccttcgcgctggatttgcgtggccaagatcccaccgcattcgtgcgtgaagcggaagacggggcggcaaggatcgtggggcgctacgtgccaaagacagagggtctgcggagctgggacatccgcgggtccaacgacagattgaactgggtctttgacctgaaccgcttgccgtacggtggttatcccggtgtggacgtcgtcgaccgccgcgggaagaaaccgatgggcgggaccgatgaagggcctaagcaggaggctgcctcggccactaagaagaggaaattag

SEQ ID NO: 37660 - DNA, 699 bp, Zea mays
  Peptide Sequence Number=SeqID_81035
atggccgggacgggtgccgcgccgagccacggctgtcccacccgcgcgcgccggggctgcgcgggatgcccgggccaccatgggcgagccgtggaccgcgccggagagggcgggcagacgcgcgtcggagtcaccgaggtctcgtcgcgccatggtcgggcgctggccgagccgcgccgcgcacgtaggccaagccgaggtcgcgcgcccgcgccgggcccgcgcacgcacgccggccgcgctgtggcatggggcacgctgcgcgagcagggggagatcgaggccgcgccgaggctggggcacgccacgcgtgatggagaagaagggagggggaaaaggggaagggaagggggaagacggggacgagctcacctcagcgaatcccgaacggccggctggacgtcgggcgcacggcggttttgcgtgggcgtgaggcaagaacggacgagctacgcgaggtgggccccaccggtggcgacggcggctgggcaactgcccaacacacacgcgcgcgacggaagcggggcaagccgttggggcggctgggccgtgagccagccggcctgtgggccgcatgcggcggggaagggagcccggctgggccacgccagatgccgagtagggccacgagccagccagccggcccaggaaagggggaggcgcgagggggggccgcgggagaaggggaggacacgctag

SEQ ID NO: 37661 - DNA, 1692 bp, Zea mays
  Peptide Sequence Number=SeqID_81036
atggcatccgctaccacctccatctcgtcgcaccctgccgccctccgcgacgtcaaagctgcgaggattggtggcgcgctgaggcaggtgggcgtggcggcgcgtggccagcgcgctcgggcggtgcccccgctgcgcgcggcggagcctgcgaggcggccggtggcggcctccgcggccgcggcgccgccggccgcgcccgtggccgacgaggcggcggtggactacgaggccctggcgcgcgagcttgagggcgcgtcgccgctggagatcatggatcgggcgctggcccatgttcggctccgaaatcgccatcgcccttcaggttcattgaacctggtgtacgagtttgtgtttcgactttcgaccagacaccagagcatggccccaccacccacgcgcaaccgaacaaccatcggcgcggaggacgtggcgctgatcgagtacgcgaagctgacggggcgtcccttccgggtgttcagcctggacacggggcggctcaacccggagacgtaccagctcttcgacagggtggagaagcactacggcatccgcatcgagtacatgttcccggacgccagcgaggtgcaggagctggtgcggaccaagggcctcttctccttctacgaggacggccaccaggagtgctgccgcgtgcgcaaggtgcggcccctgcgcagggcgctcagggggctcagggcgtggatcaccggccagaggaaggaccagtcccccggcaccagggccagcatccctctggtccaggttgacccttccttcgaaggcctggacggcggggctggtagcttggtcaagtggaaccccgtggccaacgtcgacggcaaggacatctggactttcctgcggaccatggacgtccctgtcaacgccctgcatgctcaggtaattttgaagctgcaacacttcttcgattcgttcttagatgtgctagcgattgacggcagcctcttatatcatctgtggccgtgtccgtcttctctcgaccagggctacgtgtccatcggcacgagcgggaaggccggtggtggtgggaggacgccaaggccaaggagtgcggcctccacaagggcaacatcgacaaggacggccaggcggcggcggcggcggcggccccccaggactgccaacggcaacggctcggcgggcgccccggacatcttcgagagccccgccgtcgtgtccctcacccgcgccggggtcgagaacctgctgcgcctggagagccgcgccgagccgtggctcgtggtgctgtacgcgccctggtgcccgttctgccaggccatggaggcctcctacgtggagctggccgagaggctggcggggtccggcggcgtgaaggtggcccggttccgcgccgacggcgagcagaagccgttcgcgcaggccgagctgcagctgcagagcttccccaccgtgctcctgttccccagccgcaccgcccggcccatcaagtacccgtcggagaagagggacgtcgactcgctcctcgccttcgtcaacagcctccgcgccctcggtgaattcccgagagcgaggagttcgtcgctggaacagcctgggcaccggacagtgtccggtgcaccacaggctggaactggggctgcacgaccttacgtcaggttcgacctgatagcttatgtcatgggccacaagcggcgggtctccgcctga

SEQ ID NO: 37662 - DNA, 393 bp, Zea mays
  Peptide Sequence Number=SeqID_81037
atgagagatgctgctgctgccttgttcggtgtcgatagcactcataatcccagactggtaagtgatgctgctggctctaatgaacttgattcattgacttcttctggcactgacgaccgttggcgcgaagtagccgttgctccgctggcacaccggacagtcattatagcggagcggctcccagaattcccgaaggtggcaagttcggagttggatttcctggcgcaccggacactgtccggtggcgcaccggacagtccggggtccggcgctgacacgtgtgcggtcctcgcctccgcttcccgctcaggcggagacccgctgcttgtggcccatgacataagctaccgggccgaccctgatgaaaggtcgtgcagcccctgcatttattga

SEQ ID NO: 37663 - DNA, 786 bp, Zea mays
  Peptide Sequence Number=SeqID_81038
atgtctgagatggaccacagccgaccagttcaatttaagggcattaaaaaaattcccgatacgtcccggatacgtatccggaagtatccgaggagtatctgtatccgatacggtatccgacaccggtcacaagagcaaagttcagtaaaatcaaagaaaaggccacctttgaggcgtggaaaggtctccccacaacttcctgtaccagggcacattccaagaccatcttatgttggtgcgaaaggattgcctgaactatgcaagggccaattacatgatgctcaaggaattactggaatgagagctgcttgcaaacttgctgcccgtgttcttgacttcgctgggactttagttaagccatccattactacaaatgaaattgacgcagcagtccataatatgatcattgaggctggtgcttatccttctccacttggctatcatggatttcctaagagtatatgtacatcagtaaatgagtgtgtctgtcatggggtacctgattcaactcagctgcagggataccatgggggtacctccagaacatttgcatgtggacaagtggatgattctatcaaacattttctcaatgcagctgaagaatgcttggagaaaggcatttctatctgcagggatggtgtgaactacagaaagattggcaagaaaataagcaagcttgcctatttttatggctattatgtggtggaacgctttgttgggcatgggattggaactatgtatcattctgagccactaattctacatcatggtgggtaccatttttga

SEQ ID NO: 37664 - DNA, 312 bp, Zea mays
  Peptide Sequence Number=SeqID_81039
atgaccaatccagccaacgaaaactcagggcgtatggttgagggccaaacatttacaattgaacctatactcacaatggagaaaacagagtgtgttacatgggaagatggatggacgactgtcactgctgatggtagctgggctgcgcagtttgagcataccatactgttctcagctatggttcctgtcccaaggcatcctggtcatgtccgttgctcgccgcaatactcatttcagagttttgagatctgctgcaggccgacatacgggaaaggtttcccccatgtagcagcaacttgcagcctgctgtag

SEQ ID NO: 37665 - DNA, 207 bp, Zea mays
  Peptide Sequence Number=SeqID_81040
atggctgctggactgggagcgcgcccctccgccaccttcgtggccggaaggttccggcctctcgctgcccctctccgccccgtccgctccggcaagttcgttgtgccaaagcgatgcttcattgtatcaagcaggcttgcatgggtggaagatgagcttatggagatacaaaagtatgcttttctgctgctcctatgcttggtttaa

SEQ ID NO: 37666 - DNA, 531 bp, Zea mays
  Peptide Sequence Number=SeqID_81041
atggggagggtccttacctacaatggcacggcacagagagctgacagtggggaggcgagattcatggcggtccgcgatgctgccacgaggaaattcgcgctaaactgcagcctccaacacccgaaacggcgacgatcaaggcggcgcaaggttttctcggggtggttaggtcagacattggaatggggtcatggcggctcggcctttatggtcgcgaggtcatgcgtcggggatttcatttctccttttaatatgatctcttacaaattaggtgttacaaagcgcgtcttcgtgtgcgccgagctccacgagccacctgacgagaaccagaacaacaccaatgacattctccccacctcgtgcgacactgtcgtggacgtcgtgaagcggtgccaacgcctgtttccgctcatggactcgactggcgcgttcgacgcggccgtggcagcgtgggtgactcagatggtcgtgccatcgtcggccaggaacgcaacgcccacaggctcctcaccggagagcacaacgtgctag

SEQ ID NO: 37667 - DNA, 396 bp, Zea mays
  Peptide Sequence Number=SeqID_81042
atggcgagccccgatgactcttggctgggctgccagataaagtgcaccctgggctcatcagcgaggacacacacgacgtcggcaatggtcgccaccccagcgcacaagagttcttggtcggtggacgatgagctggacggccgtgatggcgccatcgttggatgtggtgcccagaacaacctgagagtcgccgaagttggcgacgaccatgaggtcctcctacttgacgatggacaatgtggtgcagccgctctggaccacgtccaagtgacggctacacgggagcttgtcgtccacagcgatgcatgcggccacgtaggactgtttctagaggtcgaactggcagtcgccaagcttttctcgtcgtcgatgagcgacgccaatgcgagcgtgtaa

SEQ ID NO: 37668 - DNA, 531 bp, Zea mays
  Peptide Sequence Number=SeqID_81043
atggatcctggcccacatatgctatgcattcggttttgccccaagaactggatggttcgtaccattcaaaccactcagatcaacaccaactacatccctctaccacgacaagttcctgtctacctagtggtagtcgaggaaatccctgtggatctccctcgcattcgtgtggagaatggagtcattctggaggatagctcggaggagtttctgcctacgcgcaccccgttggcagaatcactagccttcacagctagatcgtcaactttagcgccgccagcaccagcagtccaagcccctgctcctggaggcgacgacctagatgactctagtgatgatgatgaagacgatgatgaagaagaagatgaggaaaacctcaacgatgaagccaacgaagaacatcagaaccactatgtggggttatggcctgtcactaaacattacacctcaatgttcgagacagggcacttccctaacctgctgcaggatgttttgcacgcgttgggaacctacgtccgacccctgtgctag

SEQ ID NO: 37669 - DNA, 990 bp, Zea mays
  Peptide Sequence Number=SeqID_81044
atgagggccaccatcttcccctggccggactgcggcaatgtgttcatcaggcaggagagcctccagctccacgagcccatcaggcacgcagtgttagagcttggcatgatggccatgaacgggagcgcgcacgacgttgtgcctgtgccgactacggagagcggcaacggcggattggatgaggaagctgagcgacagcagccaagggcaatgctagcgtgtcaagtgatcatggaaagggtgaagtggcccaaagaagaggagcaggcagcatcagtgccaaaggcgacggttgtgcaagttgttcaactgccaggagctcaagctcacagacagccagtctgcattgaccttgatgatgctcaagtggtgtttgagaaaatgcagcaaagtgctacctcggtggccagagccatcttcgtcaaccctgagcatggtctgtacccccaaatcttcgacctagagcagttcatctcagggaaggaggacacaactaacaacttcttccatggctactacactattggaaagggaatggtgctggtagctaacaactttggtgatgacctccttgctcgccgcagtgagatcaagcaaccatggcctccacctcaggagttggcatgcttgggtttgaacatcatggttgtctctgtgttccttgctaccagtgacctacatgcaatgacctacatatatgctctctccaggaaaggccaagtttatgagccggataggttgtttaaagtggctgagaagaatgacattagaacgggtgttgtcatggacaatgctctgaccaatcgccgttgcatagatggaaatatggaaagagcatatgagatcatggcagagatggagaagaagagaattgccctagataacgtgacatacaatacgctgatgagggagttttgcttgcttaggcaacttgatgaagctcacacactcattgacgagatgatagaggggtactgctgtcagccatga

SEQ ID NO: 37670 - DNA, 252 bp, Zea mays
  Peptide Sequence Number=SeqID_81045
atggcgacgcctgctgcagcgtggtcaccacctcgttgcggcagctgcgtcgttgatgctgctgggcctgcccttgggcttggatcccagcgcaagcggcgtcttgatgacgatccaccggcggcgccccctgctctccacctctcctggagatggcttctagctgtgagggacgcgtgctgtgcggaccaggaggacggaggcggccccggcgccggagtcggcttggaaaaaggccttcttccatcatga

SEQ ID NO: 37671 - DNA, 395 bp, Zea mays
  Peptide Sequence Number=SeqID_81046
atggcgaagccgaccgttggcagacctggagccgttggtgcaccgtacatgtccggtgcacaccgaacagtccggtgcccccttctagccgttggctcggccacgtgtcccgcgcagatcacgcggtcgaccgttggcccggccgaccgttggctcaccggacagtccggcgccaacggtcggctgacgtggcgtgcatcggacactgcacaggggctgtccggtggtgcaccggactgtccagtatacgcagagtgggtctccgatattgtgccggtggagaagaaggagtcagctgaagataaggtcattggagttgttctgacacaagaaactgaaggaaaggagcatgtggtgacatatctaagtcggaggttggtggatgctgaaacgag

SEQ ID NO: 37672 - DNA, 1872 bp, Zea mays
  Peptide Sequence Number=SeqID_81047
atgcgctggtggaagcgctcctcctccccctcctgccccgcctcctcatcctcagcatcgacccccgcttcccccgcccgcgcctccaccccccgtctcatcggcggttggggtagcggccctagctcacgccgcgatggcagcggggccagcaacgatccgcagccgcggctgatcagagcgcggcggatgcgctacgtcgtcgatgacctcgaggtcggggtctccgcgctcggcgtggactctccggcgaggagggacgcggcggcggggtttgcgcttgagacagtgagctccgcgccgatctcgtggtctccgagcaacatggaggtggcgccggcgagatcctcgtcgacccccgtgctgctgccgcatccgctgccccttccaggcgagggggaatcgccgtgccgcgggccggggaggccgcttccgccaccggtgccaaggatgctcgacggggaggggaaagggcctgcagcggacgctcccggtgttttagagactgggagccaaaggatgacgccgttactcgcacggagcacttcaattctgattgatgatcctgatgttcatttgtggtttgcctattatatcagagtggcggtccaaactctaccaaaggctcatgagcacaacgactttcggttaaatgggactacctgttgtcagcggagaaaggcttttaaagagaagttccaggataagaactgtgatgaaactttgaacttcagattgaacattcctgctaaaagtgctccaagcagtgggttttcaagccctgtacaaagtcctcgaagactgagtaatgtagatttctcatctgctgcaatctctatccaagataccaatgtatggtcagcacggtctctctggtcttctgatgcgatgggatcttcacctccttgtgattcacctgacaagtttgcaggtggtcaggagcgttctcctctctctagtccactgagaagtccagttttaaaatcaagaaacccaagtgcacctccatcaccaatgcatccaaagttgttcccggagaaccatgtttctcgccctgatggcaatggaagtgctagttttcacccattaccgctccctcctgcttctgtaagcccaaagcagacaaatgctagccaccagttagttccaaaagctgagatgccttcggtggctggtcaatggcagaaaggaaaactcttgggtagtggcacctttggatgcgtgtatgaggccaccaataggcacactggagctctttgtgccatgaaagaggtgaatataattccagatgatgctaaatcagtcgagtctctgaagcaattggaacaggaaattaagtttcttagtcaatttaagcatgaaaatattgtgcagtactatggcagtgaaactatcgaagatagattctacatatacctggagtatgttcatcctggttcaatccataagtatgttcatcaacactgtggatcgctgacagaagcagtcatccgtaacttcacacgtcatattctcaagggtcttgcttttttacatagccaaaagattatgcatagttcttgcacccccctccttgttggtcccatgataaagcacaggtctaaggcttcgccttggtcgcggtcattctcacatgggctacgatggcactgtgacctgcgggccgactccccccacctccagcccgagttcttgcattatgctgaaaatgttcagattagtcagtacccccgtcatttggtttgtcaaccacatgacattaagcttattactaccgtgttcaagataacaatattgagtactgcagctcctaatctttcattgaagggaacaccatactggatggctcctgagaatatgaagtgttgctaa

SEQ ID NO: 37673 - DNA, 240 bp, Zea mays
  Peptide Sequence Number=SeqID_81048
atggggagatcaaggctcctaggttcatctgcttatccccttcccccattaatccaagatggtttggtgaggggtcttaagccattcttatatgttcttaacaacctctttcgctatactctttgtcccaagatcatcttagtctcaaatctgtatgggtatgccaggaacttgcttgccaggatcaagcctgatggggatccgttctctgtgtcttgcttcatatggaccgagatctag

SEQ ID NO: 37674 - DNA, 312 bp, Zea mays
  Peptide Sequence Number=SeqID_81049
atgacgaccgcgcatgggagcccgcgtcaatcaacggaacgcaggctggcgtacaccatggacgtggccgatgcggggcccgcccggcaccggaggcgttcgcatctgcggaacggacccccgccgcctgtctgggactctgggtacgcgcgagcgcaacggagggcggtcgcgttcctcggagtcgacgacggatctgttcaactgcagccgcgttgcatagagcgcaggaacgtccgccccgacagctgcgctccatcgaaccccagcgcaggaactggatctgcggcgctcggtctcatggaaccctag

SEQ ID NO: 37675 - DNA, 642 bp, Zea mays
  Peptide Sequence Number=SeqID_81050
atggcgagcagtctcctccaagctacgacaaaattcccccaagcagcaagatttattgccatgtatgctactcttgcaagcagagatgtgtcagctgcacctgtagaattgactgaagctgagactgaatactcagttaatgtcatgaagcatatttttgatggacacgttgtgctccaatacaactgtaccaatacaattcctgaacaattgcttgaacagacctttgtcgcttttgagaagccagaaggtgtcattggtactgacaagttctcaaatcttctgaaattcattgttaaggaggtatctggaacccatcccaacacagacacacgcaccaaagagcaagaatccaccaaccacacatggattgtataccggatgaccgacggtaacacagctgttgcaaagaacaaacaccctaacgcagcaagcaccaatggagctgaccctaatgcagatgcagacgacatgagggggtctagcagagcaaaagtggacttacggagtcacagacaatgtctacggggcggcgggcagcaggagcagaccacacgctcccatgacgactgtgggtgcccaaaccaaagtggcgaacaacgacagagacgggctggagaagctatcggttgtaggacctaa

SEQ ID NO: 37676 - DNA, 450 bp, Zea mays
  Peptide Sequence Number=SeqID_81051
atgcggtcgggggcggaggcggcgcttggacgcggcggcggcgctcgaggaggcagcgacgacgctccgagagacccggcggtgatgtgggcggtgtggggcacggcggagatgagcgagggcgggcacggccgcgacggacgggcgggcgcgcggcggggacgggcggccgggctcgcggcggcgctgacgggcgcgcggcagtggggcggctgggcgctcggtgccgcgagcggacgggcggtggacgggcggcggacgggcgacgccggggcgcccgggtgcgcggcgtcgggctccgaggggcggcgtcgggcggcgtggacgggcggcgctcctaggggcggcgtcgggctcggccgggaaggcacgccggcggggagaagcggcggcgcggcggcggttagaggcggcggcgacaataggcaggcggcggcggcggcggcgtag

SEQ ID NO: 37677 - DNA, 723 bp, Zea mays
  Peptide Sequence Number=SeqID_81052
atggacgagtctgaaaaaggagatcgggcaccctgtgagactcctcaaagctggatgtggggtgtcccaaaggaagaagagaaaaggacactcgaggccattacgattgtggcaattcttcgcgatcgcggggtcatgctagcgggcatgattgagaattacctccatcagggggtgcctcctctcatggacaaacggttgtcgctttttaagatgaccgccgaggcctcgtcagatgtcagtccgttgagcgctccgcttcccaatgatgcgaagatcgctcgctggctcatgaaggccatagaagttcataagggtgaaaatggggtcatcgttccatatgtatttcaaccccagccctcttctccggtgttgcaagaggaccccgttccccctgccaaagagcgtagtggcaaaagagatggctcacgcgcgagcggagctgaaagggaaatggcctcaaccattttctataaatcaattttggtgcataagtccatctatatcaattctaagtcgactgtccagaataccgtagatcatttcgaacaggagaagctttttggaaatttcacatgtgtgcggactgtccgggcccctccggcagatcgtttgcgacaccaaggtatgcctcagacaggaactatgcaaaactcgtatttatactgtggactgtctgaagcagaagggagcaccgtctgggaccaagctcagaccgtctag

SEQ ID NO: 37678 - DNA, 303 bp, Zea mays
  Peptide Sequence Number=SeqID_81053
atggacagccacaaagaaaagctacaagaagctcttgttccatggactcgatctctggaccgcactatcgttgcctcaacccctaggtcgtgctgccctctggcctcctcatcgtacaattcaccaacatctccaactctcttcttcaagcaagagatggagctttccttggtcgggctccaaaatgctaggaaaacatcacttgcagcagctcgcagcgacacccccgcctcctcatcatggaagttgtatctgtttcagaataagcaagtgtcgtatttagtaaaccagctcgtgttctaa

SEQ ID NO: 37679 - DNA, 69 bp, Zea mays
  Peptide Sequence Number=SeqID_81054
atggcgtgtaggcctgcaaatggggtgggtgtaaatgggtattttagttggcttgatgtgagacaataa

SEQ ID NO: 37680 - DNA, 774 bp, Zea mays
  Peptide Sequence Number=SeqID_81055
atgggtatgggtatgggggtaaattcatacccgccaatgtatatgggtgacccgatggagttatttttgtatcgtgggtatgggtatggggtactaatacccggtgggttttgcccacctgaatctttgtttaccattcttcctgtgcttatagttactttggaactttattcttacatggtttaccagctctgttacgcacttgcacaacctttttattggggtaatgatggcaaaaagaggggtggtggctttacaaaattatgcagtctttcaccggcacttcaagagtttgtcggcgcctctgagttagccaggacagaggttgtcaagaagctttgggcatatattcgagaaaataatcttcaagaccaaaacaataggaggaagattttgccggatgagagattgaagaagatcttcaatgtcaattccattgatatgtttcaaatgaataaagctttgaccaagcatatctggccattgaattctgaggttctagctccaaagtacttatttgactatgatttgccaggtcctgtctctcctgatagatcaacacccaaagagaagccacaaaagagagacaggagtgaaggaaagaagcaaaagggtggctcttcaggagctggatctggttttctcgtgccccttcaactttcggatgatttagtaaaatttatcggcactggtgagagcatgttatcacgatctgatgtcgtgaagaaaatgtgggattacataaaagggaacaacctgcagcctcatgtctag

SEQ ID NO: 37681 - DNA, 762 bp, Zea mays
  Peptide Sequence Number=SeqID_81056
atgaatttagaccgtccacgcgtgatccaaccgcgctccgcccctgaccccaacccgctcattcccctccccatcctctctttctccctcgcgcttgactcccctgccaccccttcccgtctccaccccgacgccgaccgcactccgctccccgtccaccatcccagcgtgatggctgggaggaccgcgcctgccccctcccctccttctctctcacgccctactccctcgccgccccttcatcccagatctcgtcatgggcgctaccatgaccaacagttcggtggagcaggcgccgcacgctacgccatgggacggagcccgtccccacccgacaccgaccatctccaccccgagcccgtccgagaaactgcattggagaatggctacacaaagatcatgctgccaacatgtgcttctggaatagcatgccctatgctatctgcaactataaagcttccagtgcctcttgtaccgatcatcagcaagggagtgctagaggaggaggttatggtgagttttgtcgcgactaatggtgagcccacgactacggccacatcaaagctggtctggtggaacctcgtggagcagatgacgatgacgccgacatcctgcacctctgctgcgacgctgccgaccaggacgcgggcccctccgtcgcgcgcgctctacaagtctggatccatcatcgtgctcggcaagactgacttccttaggccagacatgattttgcttttgcatttctatgacatattaacttag

SEQ ID NO: 37682 - DNA, 192 bp, Zea mays
  Peptide Sequence Number=SeqID_81057
atggcgcaggacgagggcggacggcgcggcaaggggcaggcggacggcgaggcgagggcgcggcgaggggagggagcggcgaggggcgggcggatggcgaggggagggcagacggcgaggggtggacgagactgtgataaaaatttgagaaagtttcgagaaagctatgacacactatgtgtagaaacctaa

SEQ ID NO: 37683 - DNA, 3039 bp, Zea mays
  Peptide Sequence Number=SeqID_81058
atggcccgccgccgccgcctctcggcgtcctcgttgccagaggcggctggtgccattcccagtgcgttgcctcccgagctccggtggcctttcgcgcgcctcgaggccctcacccaggacgagctccgggaatccgtctacgagatcttcttctgcgcctgccgctccgctcccggcggcggcacacgcccatctgccgccgccagaggcagcaggggaggcgcggcgaccccaacgagaccaccaccggaggtgtcgtctcctacctccggtggagcaaagaacatggcggtgacgagccgcctgaagcgcgcgctcggcctgcgcgcgaggaacacgaggcccacggtgggggcgggcgggcgccccttgacgtcggcggagatcatgcggcggcagatgggggtgagcgagcagaccgacgcccgtctccgcaagaccctcgtgcgctccctcgtcgggccccagatgtccaggaaggtggactccctcgtgctccccctggagctcctccgccacctcaaacccgccgactttttcgacgccggcgagcaccgcgcgtggcagctccgccagctcagggtcctcgaggcaggcctcgtctcccacccctccgtgccgctcgaccgcggcaacgcctcggcgtccgctctccgggacacggtccggtccgccgagctgcagacgcggcccgtcctcgacgcgcgcgccctgtctgccgtcgtggcggcgctgtgccggcggtccgtggacgcctgccgctgggccgacggctaccccctcaacgtgcacctgtacctgaccctcctccgcgccgtgttcgacgccagggacgagacggtggtgctggacgaggtcgacgagctcatggagctcatcaggaagacgtggaacgtccttggtctcaacgacaccatccacaacgtctgcttcacgtggctattcttggagaagtacgtgacgaccggggagacggagccggacctgctgtccgcggcgctggcgatgctcgagcaggtccgcgacgacgcccggagacaggccgaggccggcacgctggaggcggcgcacctcagggtcttgtcggcgactctggcgtccatgcactcgtgggcggaagaaaagctgctggattatcacgagtcgtttggtgacgaccaaggagctggtggctccattggtgccatggagaatgccgtgtcccttgctgtcttggcggcagcgatgctcagccaggacgtgccgtcgtctttcgcagtggcggtggcggctgccggcggcgatctctcgtcagctagatcgccttcgtcattctcagccagggagagggagatagtggaacggtatatcaagtcgtcggtgaggcgtgctttcaccaggctgcacgaaaccggcaccgccgagaagatggacagcatgatcgtggaggtggacgaggacccttgcgagaccctgatgtatgtggcgtcgcagaccaaggagctggcaaggctggaaaaagaggtgtacgaccgcgttgtccggcagtggcacccgtgcccgacggccgtggccgccgccaccctccacggttgcttcggcgcgctcttgaagcggtacgtgtccagaatggcggcgtgcggcctgagcagcgagactgtgcgcgtcctgcacgcggcctctaagctggacaagtggttgctacagatggccagcgaggacgacccgccgccagaccagccgccgatgaccccctacgacgtggactccatcatctttggcctggtcaagggctggatggacgagcggctcaaggtaggggacgagtgcttgagaagggcccaggaggcagagacctggaacccgaggtccaaggccgagccgtacgcacagtctgcggtggatctgatgaagctggccaaggtcaccgtggatgagatgctggagatccaggtggcgtcggcctgcaaagaggagctgctgcaacgccttgttgacggcatcgatcacctcgtccaccagtacgctatgctgcttgcctcgtgtgggtccaaggacagctacgttccacctctgccgacattgacgcggtgcaaccaggactccaagctcgtgcagctctggaagaaggcggcgccgccgtgccaggtgggcgacctggaggctctcgactgcggcaggatcgacattgtcacgagcagcaagaagcccaggctggaggcgagccggtcgggacgaggagagcgagaccacgcggtgcgccccgccaccagccgcggcacgcagcggctctacgtgcgcctcaacacgctccactacctcctcgccgtcctgcacagcatcgacagggcgctctcctcctcccagctgcaggccccgcagcggcgccgcctcgcgaggagctcggccttcggccacgcccgccccgccctcgacgcggccgtccaccacgtgtccgagctcgccgcgtaccgcctcgtcttcctcgactccgcccagtttttccaccaggcgctgtacctggggggcgtcaccgccgcccccgctcggcccacgctccgcctcatgaagcagaacctcgcgttcctctccagcgtcctcaccgagcaggcccagctgccggccgtgctcgaggtgatgagggcctccgtggaggccttcctgacggtcgtcctcgctggcggcagcgggcgggccttcgcccgcggggaccacgccgccgtggccgcggacttcgcgagcttgaagcgcctgttctgcagtttcggggtgggggaggaggcggtcgagagggagacggtgcgggcggaaggggtgctggcgctcatggccgttccgacggaacagctcatccatgagttgctcggccactatgcttccactccgatgagagcggcgggtgacgagttaccgcagctgccgatgatgccgatgacgcccacggcgagacgctggagccggtccgacgccaacaccgtgctccgcgtgctgtgctaccgagacgatgagcctgccaacagattcttgaagaaaacctttaatctgcccaagaggaggtag

SEQ ID NO: 37684 - DNA, 558 bp, Zea mays
  Peptide Sequence Number=SeqID_81059
atggaggtttggagaagtggcatgactgctaggtgtgtgagcaccgaccaaaatgccactgagatatttttggagcatgtagtaatggatcctggtaacgaggagacggttatgggcgtctatagttgtgcccgcccagtcaggtgcctaggggctcctagtcttgcccaatatttatgggagcaggtccggatcccattagaggggtccggagccttccatttcttatttatgtacatgtggcactcggctggtaccctatggaggtccaagtgggaccaggccaggctaggctatgtgtcgcattcagagctcttcatttggctgcgcttagggtacatgtacccatgggcgctaatagtggcccttaggcccactacatccttagaggctacgagtggggccaagtttccaaacgtctacgtgtcggtgtttcgagaccggggggtcctcgagccgacgagtgaagtgtcgccgcgtgccccagccccgatgggtcgacgcgaggccgagcgcgaagggggggggggaagcgaggaggcaggagatgggtcgtga

SEQ ID NO: 37685 - DNA, 120 bp, Zea mays
  Peptide Sequence Number=SeqID_81060
atgtcggtcggcttctggtatgcaagtgtggagcacagggatggtggtcgatggctaaggttggattgggtcaaggaatcaagtaacaagtactgttctcgcagttctagaattttgtag

SEQ ID NO: 37686 - DNA, 390 bp, Zea mays
  Peptide Sequence Number=SeqID_81061
atggcgaacgatgaccctgtggacgacgaaaaccccagatccaacaccactaataacagcatcaatgacaagttggctgaagtgttcgacatggtctcagtccacaaacatcagtataaaatgccgacgttcgccttccacaccaacaagacgatcaccgaagctttacatcggcctctactgcgagcacaagctagcatggcctctccaccagaggttgactcgtatgtctgttttctggtttctcataccagaattaacgttcttgaccttgtaaggcctcttcttgaccttgatcagtcccgatattgccgtgtttgccagccttctgcatccacctactttctgttcccttctatccctcctgagctaattgttgctcctatgtaa

SEQ ID NO: 37687 - DNA, 1053 bp, Zea mays
  Peptide Sequence Number=SeqID_81062
atgtggcggactgtgtcccagcagctgaggcatgcatcgcagcagctgaagcatgcagccaacttcgccgaccatgtcgcgtcgggtgctctgacttcgaagtttgctgccaaaatcaagcatctccgggcgcagcatacggatgttgttcgggagaagtcagctgcggaaaacaaaagccgcgggctggcggagaggttggctgctgcggaggccgagaagggggatctccggcgtcagttggcggaggagaggagggacgtgaacaaagccattgctgatgcgcaggctgcacaagccgaggccaaacttgcgtgggtgaaggccagtctcgcccgccaacgtgccgtggagctggaggcgaggctcaacatcctgcgcaaccgcgtggacaaaaccaaggtctcgacacgcatggaggtcgagcggacgcatgcgcagttcgtggacgtgtaccgggagctgggtgcgcggaccgccgccttcgaagcgctcggccaagaggtgggcctccgcttccttgagtggttacaggaggagctgggggtgctcccgacaatcgtgatgggcctcatgtcctttgcctccctcatcacctgtgaggaagccatgaatgctttgtcccacgaggggtgcgcgcacttcgaggtcttcgaccagtcggacgaaggcttagaacgtgaaatcttccaggtcgaggacccggtgctaaagcggtcggcgggggcgctcttcgacaggatgtggggccctcacggccgagagacagtccgggagaggtccgaccgggcaatggatcagatggcacatgacgaagaggttgaggaccttggcgatctggacatcacgctgcccgacagcacgctgcccgaggcatcgggggtggagctggcgccgccatccgatgcgggtgagggccccttggcgacccccgcgccgactagagctggtgaagaccccgcgccagcccctatgctgacgggtgaggacgcctcgaaggcggtgggcgaaccagctgccgaagaccccatggcggcggccgggccttcatag

SEQ ID NO: 37688 - DNA, 1002 bp, Zea mays
  Peptide Sequence Number=SeqID_81063
atggaggcccaggcccacgcgtcatgcaaccggcgcgccgaatgcttcgtgcatgcaactgcaccaccacttgcaccaccaccgcgcctcctcgactgcggaaccaacaccgcgactcgaggcgacccagcgcacgacccagcagcgccagcctggcgcggtggtcagtgcggccaaaaaagggccggcagtaatgacggtggcaggcgggcaggagcagcagtcacgtcgtcagccaagctcacgtcccatccgggggcagcgagagagccctctctcacggcgtggagacaacgcgcccgtgttccgttcctcgaacggctcgcgcacggatcgagaaagggggaaaccccgaaaaggatccttcctcgtgaaggaaccaggctccgagcctccctactgatcagaggttcgaaggctggcccctcggaagggttcgacagtcacctcagatcacgtgggccctacacccactactggtcagaggttcgaaggccggcccctcggaagcgttcaacgactgcctcaggctactcgggctccgcgcccactactgatcaggggttcgaaggctggcccccgaaggctgacggcctccgcctcgcccgacccaggggctcggactcggcctcggccacggaagacagactcgacctcggcttcggaggagcctccacatcgcccaacctagggcgcaggccagccacgtcaacaggaggcgccatcatcaccctaccccgagctgactcgggccgcagggaacaagaccggcgtcccatctggctagctccgccagataggcaatcatggcgccccgcatactctgtgacgacggcggctctcagcccccttacggaagcaagaggacgtcagcaaggacccaaccgctccgacagctgtccctccgccaggctccatcgctcctccgacggccacgacatcacaccagctgggtgccaaaatctctccggctgccacaacggcatgtacttagggcgctag

SEQ ID NO: 37689 - DNA, 450 bp, Zea mays
  Peptide Sequence Number=SeqID_81064
atgggcaagaacaacaagcgcaagcgcgagccgactcctccatcggaggatttcggtgactcggaatactcggaggaggagttctcctccgagtccgaggggtctccggcccccgtctctcccccggcgtcgtccgatgactcggacgactcccaggggatagccgcggaggtctggacgtacatccgggccgtcgagcgctccgggctcgagggctcggatgagtcggagtactcctcggatgaggaggactcggacggcggcgacgaggatgaggacgacgacgacgacgacgacgacgacggcgacggtgacggcagcggcagtggcaggggcggcggcgacggcagcaggggcagcggcgacggcagcaggggcagcaccaaaggcgacagcagcaagggcagcaccaagggcgacagcggcggcaggggcagggccagtggctag

SEQ ID NO: 37690 - DNA, 588 bp, Zea mays
  Peptide Sequence Number=SeqID_81065
atgatgaccacatcaaaaagggaccgggaaaggggatactctgaaagggatccttctccgcgaagggagcgggccccgagccctcctactgatcagaggctggcccccgaagggttcgacaactgcctcagagcatgcagagccagggatgcctctgggtacgtccgatacatatatggccgaggctcggactaccctcccgaggaaaacagcgccgcctgcgctgctccgactgttgtgccacccgtcagggtgaggctgacagccaccaagaccggcctcaggcgccataggaagctccgcctcgcccgaccccagggctcggactcgacctcgacctcggaagacggactccgcctggcccgacccccgggctcggactcaacctcgaccccggacgacggtctccgcctcgcccgacccccgggcccggactcagcctcgacctcggaggagcctccgcctcgcccgacctcgggctcggaccaatcacgtcacaggggggccatcattaccctacccctagctagctcaggctacggggaacaagaccggcgtcccatccggctcgcccttgtaaacaagtaa

SEQ ID NO: 37691 - DNA, 279 bp, Zea mays
  Peptide Sequence Number=SeqID_81066
atggcggcagcgacatgctggagctggatatttccccgtcgaggaattcagccccgcctggccgacgataccctcagacgccgccacgacacccaccctaggaactcggtgaagctccaagtcctccgtgcttgctccgtacggccacaacgacgagaagccctggtggtggccctagcggatggtggcttgccgcgacggcacgggaatggcacggcgagcagcgaggaaggagtcctgaccaggaaggaggcgaatcaggtcaactgttcaaattaa

SEQ ID NO: 37692 - DNA, 279 bp, Zea mays
  Peptide Sequence Number=SeqID_81067
atgccagcccagcctgcgcgcccacacgcatctgccccaactgactggtgggtcctgcgggcattgaaaccatcagccgctccgttgacgttttcccctggcgagtcggcctggttggccagacacttcttccccctcgcgcttgatagaatcgcaggtcaagaacaggtaccgcaggatgaggcgcttagaggatgctgtgatgagttcgtgagtggtctaggccgttgtctcccagtcaactttgggttgctggaccgttgtctccttataatgtaa

SEQ ID NO: 37693 - DNA, 174 bp, Zea mays
  Peptide Sequence Number=SeqID_81068
atgaagccgccgcttctgcaatcccgcaaaggaattcacaagagcaaagggttccacggtggtggcttcatcaccgggagcaacatcgtcgtggccaaagacgccttctgcaggagggtcgccaagctctacgatgtcattgtcttcatctgctcaaggaaaggcggcatctga

SEQ ID NO: 37694 - DNA, 378 bp, Zea mays
  Peptide Sequence Number=SeqID_81069
atggcggcggcggtgatgacagtttcgggcacggacgtggccgcggctagccgacctctgggcaaccgtgcgctctcgggaagcccatttccaacgacgatgccactgctccgcccgttcctgttctctggcgacgagagcgggttagggtttctatacttggagccaccacctctctgttgtgtcctctgccgcctccaccttatggttggtgctcaggccttctggacttatgccggcatcgcgtacccaccagtaattacaacagatgggcaggacatgtacttagttcagcaaccacagttcctctctatcgacaattgtaggtcatggttatctgcatttcctgttcggtgcgttatctgggtgcctcaatag

SEQ ID NO: 37695 - DNA, 324 bp, Zea mays
  Peptide Sequence Number=SeqID_81070
atgtcgaaggtgaagaacaataatggttatcttggagtcactgagccaatctcaccaagtcgaccgactgagaaggaccttatgcagacagctgaggttaaaaaggtacatggctctggtgccgacattgacaccatgtgtgttggtccaagacatgcaactcaaaatgtaagaggggctccctttgaaatcctagagttattgtattactatgatgctcatgtggcggttttgggattcaaaattaatggggtctcaattgaccttttgtatgctaatcttgctcatgtagtgattcctaagggttgcttaaacgcaacttag

SEQ ID NO: 37696 - DNA, 216 bp, Zea mays
  Peptide Sequence Number=SeqID_81071
atggggtatacttccactgagcatgttcgacgacaggcgaaggaatgtgagctgcggcatgctgtaggcaatccaaccagctcctccttgtacggatgtgctgttggcctgctgcacgcctgcactagttcttcacgtgcgccctccacaagacaggttacatgctatgatgcgagagaaaattggtggagagctagtttggtggaacacaactag

SEQ ID NO: 37697 - DNA, 1536 bp, Zea mays
  Peptide Sequence Number=SeqID_81072
atgcacatggtcggcgacttcctgaagcgccggatcgcgccgctgcagaggagggcgcgcctgtgttgctggttcaccggcgcgaacgacatcggcaggatccagcgcgggccgagcaccgacctgttctgggatgagatggcggtcctggtccccaggcctccggtgcggctcccagcgccccccgccgtgacccccagccccttggacaagggtaaaggggttgcaagcagcgcctccgccctaggtggcaccgaggggttggaggaagagaggcgacgccgcctgcgtcacgctgatgggtcgctcatttcagagcctccccagaagcgccagaggaccgtaggcggggccgaggaggcaagctcccaggcccacggcgcgcagaggcgcggcttcttccccctctgctcccaaggtcacacctcctccgccggtttccaggcccaccgacgagtctggctctcagcagcaggcatctgctgggagtggtgccagcgatccgcctccgactgctgccaagacaacgccagcagcttcccatgccccagtgggggggggggcgacggctccggtctggtgccgggcaagaagctgcgccagtccccctccgccgtatgttgtcccgcgcccaccaggtccttagcgacactagggcagcaatcttatgggagttggggggcgcttgaggctgagcaccagcgcctcagcgactggcgcacccaattggaggagcgcaccaagttggcgtcccgacaattcctctccgagcggtcccaactcgagcaagaccacaaggagtacaagagggacctccaaaaggtgtgcgccagggagctagaggcgtcccggagggagaagaatgtgaccaggagggaggaggtcgtgtctcagcgggaggccctcacaacagagttccgggccaagctgagtgccctggaccagatcctggaagcccagcgggtccagcagaccaaggctgtggagaggctgcaaaagtggcagcgggagacggacctcgctaggcgggagacggatctcaccttccaggaagaaatgctcacccgacgaggcgagatgttggccgagcacgagctcgaggcggaggagaaagagaagaggttggaggagcggatccggcagttccaggcggtgcaggcggcgccaggtccctgggttatggaggcgaccaggaaagcacttgaagatctccaggtggagcaccgcgccgaggtccagcgtattgccgcgtgggccagtgaggcaagcacgacattggtgctgctagggatgagccctattccagtgtcggagctgccagcgtcgatctccgacgcgctcccgatgctggactccgccgccgatcgcctttggtgcctggaccagattcttggagcccgcttggaggcaaggggtggcaagctctgccgggcggtgatcgaatatatcttgacgtgcttccggagtcacgacccggccatatccttggagccggtgatcgctggttcggtggctgccactgaagacgccgcctag

SEQ ID NO: 37698 - DNA, 360 bp, Zea mays
  Peptide Sequence Number=SeqID_81073
atgcaagagagccatcaaaacccgtgcgaagtttggggtgaaggagttggttcttttctcccagttccacaacacacattttatcatgaggttaaagaagacactatacataagatgacagaggagtcatactgcaaggtggacttaaccagctttgatagatgtttgggattcgggcatgcagatagagaaaccccagttcttcagaatgagagaaggttgaagccagtgaacaccgcttacatgtatgagattgagagccctcgacaagcaaatggagtctacaagaacgtgaaacagcgtccttctgctttgaccaagctaagacacagtgacaccgtaccccagagccttaagtag

SEQ ID NO: 37699 - DNA, 1251 bp, Zea mays
  Peptide Sequence Number=SeqID_81074
atgacacctggcaaggaaaatgtcaataaggcgggaagtaaggatgtcaacacatttttaagcacaagcacaacatgcaagatgtactacaggattaatatcatcatgatagttgtaaataaaaaggaaaattttctggattttcatcagaatttcagggtgtcggataaaggtggagaattgggaaaccatggagaggttcagtgcatcttcaattacctccggtgcgacccagaagatcattattttcttctaactgagagccctctgactgcccctgagacccgagagtacaccagagagatcatgttcgagacgttcaatgtgcccggcctctatattgtagtccaacctatccttgcgctggctgctgggtacactacaaccaagccaccagctgatcaaacaccagatagttgtccacctgcatttaagcatgtgctacgtcagcctataatagaaaatgggaggctaaagaagaagcattgggtgatagaccatcttgtgcatgaggggtttgaaagcactgctcggcatgttgatataccctacctccctatgctggtacctccgaagaaatggaaaggattcctttgcttgaacgaccagaatcagaggaccctgatgaaatgcagaaatggaagtaccagcataaagaaggcaaagaaaactaactgtgagctgcatgctgagagatgtgacactaagctcaaactctcggttgctcgtaaaatgagagaggaggatgaattttattaccctcacaatttatatttccgtgggtgtgcataccctatgcatcctcatttgagtcacctaggttcagatctttgtcggggtgttctagagtatgctgaaggccggccactaggaaagtctgggttgtgctggttgaagatacacttggctaacaaatatggtggtggcattgaaaagctttctcacgagggcaagctagcttttgtggagaaccaactgtttgatatatttgattcagcagcaaatcctgttgatgggaactactggtggacgaatgctgaggatccctttcagtgtttagttgcatgcatggacctttctgatgccttaagaagtccatcaccttaccatgctgtctgtcacctgcctattcatcagttgaatgggaggaatgagcatctgaactacacgctaggtatatcatcaaggccgccgccccgatcgccgggaaagctggctagagcagtggcgcccagcgccctggaatcctag

SEQ ID NO: 37700 - DNA, 774 bp, Zea mays
  Peptide Sequence Number=SeqID_81075
atggctgttgctggagctatatttggagctgcatttggtggctggatgaatgacaagtttggaaggaggccttccatcatacttgctgatgcactgttctttggaggtgttgttatcatggcattttccccgacacctagagttatcgttgttgggagggtatttgttggtcttggtgttggaatggcttccatgacagctcctctgtacatctctgaagcctcccctgctaggatcagaggtgctctagtgagcacaaatgggcttctcatcactggtggccagttcttggcctacctcatcaatctagccttcactaaggtgccagggacctggtggtggatgcttggcattgcaggggttcctgccctggtccagtttgtactaatgctaatgctgccagaatcacctagatggctctacaggaagcaactggacacgacagtacacacctggagcgcccacttggccgttgcggatgggatagctcaaactatgcgagctgctggcgcgggatcgggccagcgcttcgaggtcagccatgacgccggcgttgtgctgagcgaaccagttcccctggcgggggtgcccctcgtcgccggctgggcggagccggagaaggaatcgttgacggcgacgacagtgggggtgatgaagcagggctccacgttccccgcgaaccccatcttcatgtacctgccgcgagagcctgaacagatcagcagcgtggctcaccgccgtcgcgcctccacgcgcagatctagggagaggtag

SEQ ID NO: 37701 - DNA, 1110 bp, Zea mays
  Peptide Sequence Number=SeqID_81076
atgaagtctgttgatcgtccgcccagtaatccaaaaagattaaccattgaatccagtcaggagaaattgaatatccgctgcattccctatgatgttattgtatcatcttggataatgagcgatcgacagcgcgatgctgtcgctaggttgggatttgctagcatatttgatttgcgaactgatgccttagagagcagatcactcatcaggtggttgatggataaattggatccacatgacatgaccatacgcccaggggctggcaaggaactgaagataacaaaagatacggttcatctgattttgggtttgccatgtgctggaggaggcagggagtttactgattggtatggtgaagtggatgctgctgcaaaactgagacgtgatctcaatgttggtaaagaaaaatttgatgttgtcaagcttcaagacaagatagtgcttggcaacgatgatgagctatcaattagatgcttttttctgattctattcaatcggcttctttttccttctgcttcttggggcattacaaacaatgaggtactcatgacttcaaacatggcccgaatgtctgatattgactggtgtcaactcgtttacacagatttgtgtgatgttgccgcacgttggcataaaaggaacaaaacaaacatcacagcaacaatatatggatgctcactcattgttctaatttactatcttgatcacctacatcaccctgcatctcctgttaacaaatatgatgtaaaaatattattactgctaactgttctatatgactttatacagtttcgtagccgttcagaaacgtgttacgtcattgctccagaacggcctgtttctgccgttttcaacatatatgtgccacgtatcaagaatttgattggcaacaagttgcaatgtttgccctcccagcagcggccaatgtttcaatcattgtttgatgctcatgacaaagaggtggataaatactgtgattcccttcagctgagccatcagatgattgtttcgaagcagattgaactctctgaaacatttggtgaaatgatcgatgaagtactgagagctgcaacgcagcgcgattcacagccagaagttatatttcagtaa

SEQ ID NO: 37702 - DNA, 378 bp, Zea mays
  Peptide Sequence Number=SeqID_81077
atgtgctcgtcggattgcagagagattgagagagagaacgtcgtggttcgcgcggctggcgcatggatccgccttgactgcggcaccttctccgcgaattcgttgcaacagcgcgcgcagtcatcggggtctggtgggattcgccctcctcgcatccggatcatgagcttcgaacggatgggggagatcaccggtgctgctcgggctcctagtcggcggacaccgtcgcaggctagggagcgaccagccgaccactgcgcagttttcctcgtggcaaagaagatggagaaccgttggatccgcgatgctggattgaggtcatcgatcgctcgttgggtggctcagattgcataccggatccgtttagataacttctaa

SEQ ID NO: 37703 - DNA, 278 bp, Zea mays
  Peptide Sequence Number=SeqID_81078
gaagaggtctccgcctcgcccgaccccagggctcgtcccccgcttcggcctcggaaggtggtctccgcctcgcccgaccccagggctcggcatcaatctcgacctcagaaggtggtctccgcctcgcccgaccccagggctcggcctcaacctcgacctcgggaggaatcgcgtcctcgcccgaccccggcctcggcctaaggaggagtctccgcctcgcccgaccttgggctcggaccgaccgcaccacggaggatgcatcattaccctacccctag

SEQ ID NO: 37704 - DNA, 405 bp, Zea mays
  Peptide Sequence Number=SeqID_81079
atgactctcaacttcaagctcatcctcgacgagttcaaccgaagaaatggcccaaaggcacacttccctttcattatctgcaacaacaccaccgtgttgggccccgccaactctggagccacggacgattccgtcaaagcgctcgtcgcctccaccgaccccaacgcgctgctcaacaccgtcaccgcggacgtgctcgcaaccccgtctgtggacgttgggggtggactcttcgatggcggtgacgctgacgccgatatctcttcgaatgtgctcgactccgatacctccaactcctacgcgtcgatgtcgtaccagatcgcggtgggcgacacctactggatcatctccaccaccaagccgcagaacctcacgcagtaccaggccagcgattcgaatctgtaa

SEQ ID NO: 37705 - DNA, 387 bp, Zea mays
  Peptide Sequence Number=SeqID_81080
atggcgacggaatcggcggcggagatcgtctgccggctaccggagcagtgcgtggcgcacgccatctcgctgacggcgctcggctacgcgtgccactcgtctgcggtgtcgccggcgcccttcagggccgctgcagactccgacgccgcctgggcgcggttcctgccgccggaccacgcggacgacgtcctggcgtctgcacccgcgctgagccaggcggccaggcccttccatggtgtgccgtgccagctctcggaggtgcacaagaagcgcacactctaccagcccgagttgcccgctgcctccgagtccagacggctcgtcgactcctttttttctcctctccgtgctcagctcaagcggtgccggtgtggaccacgcgcgtga

SEQ ID NO: 37706 - DNA, 249 bp, Zea mays
  Peptide Sequence Number=SeqID_81081
atgtctgaggagaagaaggttgctgccgaaatgaagctgagcctttctgaagagatgcatctgggttttcttgagtcaatagcaaagacgaatacggagaagattacaattatgacgcagatctgtggctctgatccgagtccgaagatacatgttaattgttgctgccgctgcttttcccctgccctctcacccctgaagatgcaccggggcggtctcgccatcagtggcagtggcggagatatctag

SEQ ID NO: 37707 - DNA, 267 bp, Zea mays
  Peptide Sequence Number=SeqID_81082
atgacgcaagatgggagcggtgcaccacaagcggttcctggaaccacctgtgtagtggcgaaccagaccgcctgtacagagactttgttcgtggtttgtaatagtaatatagtcgtatcttttcttccctcagaacctgctgaggcatctccgggcccccacccgaagggggacgatgaatttagaaaaatggccgaagccattatggacaaggttgtcaaccaactattggatgaagctgcagagatagtgcttaaagaggattga

SEQ ID NO: 37708 - DNA, 300 bp, Zea mays
  Peptide Sequence Number=SeqID_81083
atggcgcagtggcttacccggtctacgctcgccggcggtcggagggagtccggcgtccgtggactggcctctctggcgaagcagacttcgattcctcgctcggggagcttcaccgaggcgcgggtcatgggcgtcggctggcctttggcgcgacgcggggcgcgcgcgggcgtgctctggcgtgcacagagcgcgtcgaacacgtgtaggttttcttctgcccgtgttccacagctcgcccaagtcgcaaacgtgcgaatcttggcaaaaatccggcgcgagtcttttcctggcacctag

SEQ ID NO: 37709 - DNA, 177 bp, Zea mays
  Peptide Sequence Number=SeqID_81084
atgaggcatccctgtgagtttgttggtcttgaactcttgatgctgaaaatggagattaaagagcattattttgaggtctgtgacattatagatgacttgtccgtatcaatattaaaccacttgactgaaaactgcaagaaagaactcgagacaataaacgggcagtatccattttga

SEQ ID NO: 37710 - DNA, 237 bp, Zea mays
  Peptide Sequence Number=SeqID_81085
atgagggctgaaaagaggagcaggaaggcttggcttgctgcaattcctgtgctgtttggcgccacaaaaggagcagaggtgtggcatgatgatgaagaagaaaaggttgaagtgggaagagctgccaaagagaatgtatcagttggtgttaaacaggttgctgaattgaacaaaccagttgttggatctgaaatttctgatgcaaaccatgattttgaagagttcatattggtaaaa

SEQ ID NO: 37711 - DNA, 738 bp, Zea mays
  Peptide Sequence Number=SeqID_81086
atggcggcaccgagagcgaggagcctagatccaggagtgggcgggagggggccaatcgtggattctttcctctcagaggaggatgaggtgggcggtgcggcgcgcgtgatggctaggctacaacgcgagttgacggagctagaggaaaagaaggtcgcgcaggagcagcgggccgcggagtccctggcgcgcgtcaaggcgatccgggatgggtcgaggatgggcaagcttattgtctgcagcaaggtagacgatctctgcgctgacgagctccatgagctgctccatgggctttcgcgggtcgatcaggagattcgagccctacttcctcctcctgctcctgctcggacaactgaagccggcggtttgatgagaggtccgccgccgcctttgcattctcagggtcgaccgcggccaccacgacggctgccatgggtttcgtcgcaatcgcaaccgccatccctgcccattttgagagcaccgtgcactcttccacatcccttctcttttacgagcccacctgtgcagcagccatcgtctctacgagccatgtccaggatgctgctccgacatacccagttgtcgcaccgctcttcttcgatggtgcctcgtctacctaatgaagcccaccagtacagctatcagagccagggggtggccgccatcgctggcaacaacatctcaggacaaacttctctgctacattcatcacccccactacccacatcagcactatga

SEQ ID NO: 37712 - DNA, 594 bp, Zea mays
  Peptide Sequence Number=SeqID_81087
atggacaaaaaccagaacttagcctatgccccttacattatggctctcattaaagccaagaccagatttgaggggccctgtgagatagttcatacaccctttagacccttcaagaatgaaattgggttcctcaccaggccactcactcccttcccagatgatgagaaagatgttagttatgatgcaggagaagctcctgaagctgaggcagagcagatgcctcctcctccacctcctcctcagcctcagcagtactggcagcctggtccaggctattttgacctgtactttcaaaacatgcagcaagggcttcagacccacatggatagccgcttccagggaatgatgacccatatggaccagcacatggatgccatgcaatctcgctttaatgataattgggatgcgctaaacactgagtactctgaatttggcagtcacatccaagaccatgtcactgatcccatcatgaacagactcaacaacatgcagcagagttttcaagacaacatgggagctctgtctagtcagtttgacaatctctctaccaatgaaagcatgcaagagataagtcagaggcagcagcagctctag

SEQ ID NO: 37713 - DNA, 474 bp, Zea mays
  Peptide Sequence Number=SeqID_81088
atggataccaactttcacaaacatcaagtgattgattggacttttatgctgggacaatcagttatggaggacctgattccaaaatttgagacatgtgatctgtatcactttatgggtcagaggactgatttcagtgagatagcagtaaagcaattcctggccactgctgagattgatatagatgagggatccatcacatggaagactggtttcaagagatattctacaacatttgctgaatttgcagctgccaacagtctgaattatggtaccatttcagctaggattgatttatacactgaagataactttgaagactttgtgcaattttatgagccagcaaggctgggaatacctaggaggtttggagagacaacaggactgaggcatcatcctgttgtgattaacaaaattgcaagagtcacaattcttcccaagagtggggacaagagcaaaattagagacaagttctag

SEQ ID NO: 37714 - DNA, 216 bp, Zea mays
  Peptide Sequence Number=SeqID_81089
atggggaagaaggaggagctccctgctcagccaaaacagagaagggaagggagtggtgtgtgggagaagggagagggtgggctgccatttatagagccaagctctggacatgtcagactgcaccagcagatggcaggtgatggcagagcgactttgggtgcccattttcgtcgttttccccttggaatcggatcaaggttctacaacgtttattaa

SEQ ID NO: 37715 - DNA, 888 bp, Zea mays
  Peptide Sequence Number=SeqID_81090
atgtcttacgcattgcattcattagattgtaatctcgccgacggagagtacgtgctcatccccgagcaaggaactatccaagaggaggaccaggagcaagcttccgaggcagctatcgaggatctccctgcagccccagctattgaaggcaagccctgctatggtgggtacaagtgcggtcactgcacagcggcagccggtgtcagtggagcattgtatgccaaggcggtaccatttaggaaatggttgatgatgaattcacccacccccgccagtggaggagacactcgtttcagttccgacttcctttctcgcgatggctttccttccatcttgtgggaagtgcttaactccgccggttaccctacgcctcccttgtacacggtgcagttgtatgaggaacatcgggtacctcattgtcgggtctggctgactttggaagctcatccccttcagccgggttggcgttctcttgattccgagataattggactcaggacggacgacactgttgaagcagcagccaggaagactctgacgactttctgtggctaccatcccctggagatggtgatgcaccccttgggactcttccctgctgagaagaaggacaatcccatgtggtgtaaccgtgtgagccatgtgaaggatgtgtgggcgatgtatcctgacttggttgggagggtcaccgttcagtgcatgagtgcgctgtactgccttcaggcccttcagagcgacgctatggcacaccttgctaacatcactcaaaccgccaagctcactctcgatagtcgggaagattttgtggtcgatttatccaccgagttggtagagaaggatctgcaggtggaaaggctgagccagcgcattaccaccttggagcagtag

SEQ ID NO: 37716 - DNA, 987 bp, Zea mays
  Peptide Sequence Number=SeqID_81091
atgtctctcatgcttcagcataccggtgttccgattcccccagttcaatcagcaccacctccagctcttcaggcagcagttgtgccagccattcaggcagaaccccctcttcattcagttggtccttcttcctctccgctccggccggtcaccctggttttcacgttaccggtcatcagctccattagcactcagccgccagtgccaccagctcctgctattaccactactgctgtggcggtgtctgtgacctcttcagctccggtagctcctgcagcgcagcctccgtccgagtcagtaccagctccagcttctacgacagatcctggatccgagactgactctgaccctcagctggcgtttgctcttctgccacgacctcgaccgaatgcgcccccgccacctccttcctcttctggtctccacgacaccaacttgcgcgacacacatccgaggcgctacggcttcccaaacccggtctttgaccacggcgcgacgcggcgaacttcttccccacatccgcacttcaccggcttccgtgagagactccgggagggcgactgggtaacgagggcgggattcagccggccagtgattcatgcgacacaggttgatcgagtgggcccgccagccaatgcgcgagtaaggccgcacagatctgagtacaaggggtcaagcagtctcattacctgcgagaagcagacgattcaaatcgagttttatccttgcaaggcgggggagctcggcggcggcaaggagtccagcctatccagggtgaaattgaccaatcaaatgggtcagagagcttcaccagggatcaaggaaggcgggcgaccgaagtccggtgaggtcgatcttcgccttccggtaaagttctgccgggtccgagggcttggaaagcttcacgggccactgtcggggctcaccgaagcgctggcgcgacttggggagactggagtgggctggccacggtggccgatgctctag

SEQ ID NO: 37717 - DNA, 399 bp, Zea mays
  Peptide Sequence Number=SeqID_81092
atggctgtagttcaaagcaccccttctgccctaaaatttgattgtaatctcgccgacggagagtacgtgttcatccccgagcaaggaactatccaagaggaggaccaggagcaagcttccgaggctgctatcgaggatctccctgcagccccagctattgaaggcaagccccgctatggtgggtacaagtgcggtcactacacggcggcagccggggtcagtggagcattgtatgccaaggcggtttaccttgcaaggataaaactcgatttgaatcgtctgcttctcgcaggtaccattcatgaaatggttgatggtgtgacttggcctaccaccctgccaccgggttggacggtcgagtgggatgttgctccggcaggagaggagcacgaggagtag

SEQ ID NO: 37718 - DNA, 810 bp, Zea mays
  Peptide Sequence Number=SeqID_81093
atggctggggagcaccgggaggataaggagggggaacgttttgtctggtttggacatggcggtggcctgactcctttcggtataactgttaagatggaaggctccttggtcattaggacatcctactgctcagaggtggaaggattccctcatcttttgtggagttgcgcgcttcgcatggggatccacaagaagccggagtttacctgggagaaagccgaaactacccaaaccaccctcctttccaagtcaccttcaccggacaccgcttcccagacacttgccaaaatgttgcccgaaaagccctccgacagctatgccaaaactacagcaggaagagatcctactgaagatgaccccaccatagtctacatggccggatatctccacacactcgataaccactatgacgacctttcttcccactgcacccacctaaactcccaggtggaaagcttagagcaacaggtcaaggaacttaaaaaggagaaggcgtctctccaagaaagtctcgagatagcagaaggtgaagaggccaacactcgtgaagcctaccgaaccctgaagatggattacgataagaagttaaagaagctcgtccccactaagaagatccagaagcggaccaagagccaaggatgccggactgaacggaagaaggaagccccaccagcactgcctcccttcaggatagaaaacttgtcagacattgaggatatgtccctagctagccttgatgaccttctcaaagaatttggggacaccttagaaagggagttcggaagcaccttagaaagcactcgcgtgtag

SEQ ID NO: 37719 - DNA, 339 bp, Zea mays
  Peptide Sequence Number=SeqID_81094
atggtggagtccacggggctggccgatacatatatctgcacaggggtggagttcctctcgggcggagtccgcacgaacggcgagatccccggcggttcgcgagctatgcgcgcggccggtgagcgagtcgcggcgaaagaagcggactcagctcaacaaccagagaggtcggctgatctgactcgtggggcccaggcgacagcgagtaactggccagtggccggcttatcgcgcgcgcccgcggaggctgcaatccgggtccacccgtcggcgcgcgaacgcgagggagatggcaggtctggcgaaacgggtccacgtgccagcggcaagattatttag

SEQ ID NO: 37720 - DNA, 438 bp, Zea mays
  Peptide Sequence Number=SeqID_81095
atggccgctgctcccgtgggcgctcagaatcgctgcgtcttcggggattttaggactgacaggttgtatttatcaatctcaattacagttggcaacataccatacgatgcgacagaggagcagctcgtgcagatttgcgaagaggttggcccagtcgtatccttcaggttggtgattgacaaagagactggcaagccaaaaggttatggcttttgcgagtacaaggacgaggaaactgctctaagtgcacggcggaaccttcagggttacgagatcaatggtcgtcagttacgggttgattttgctgaaaatgggaggaacactgacagaaatagagaaaaggtcgacgatcctcaaatttttactgtagaagagcctttcctaccacctttggagttctctgttaatctgagaagttgtattgtcttcgttctgtga

SEQ ID NO: 37721 - DNA, 165 bp, Zea mays
  Peptide Sequence Number=SeqID_81096
atggcgcacagtggtggtgacgggatggctcaggcgggcagggtgaagggacagctcgggcacagtgcgcggtggcacaaggcgccaaaccgagctggacggaccacgttagggaggagagttccggagatgctccggggtcgacaggccaccagggtgtcctag

SEQ ID NO: 37722 - DNA, 873 bp, Zea mays
  Peptide Sequence Number=SeqID_81097
atggcgccggggaggcggcggcggcggggcggggcgcgcaagttccggggcttcgccgactgcgtcgcgcgcaccgttcgggacgagggggtgctctcgctctggcgcggcaacggcaccgccgtcatccgttactacccctccgtcgccctcaacttctcgctcaaggttcgtggttcagctccttgtttcgtatatgcgcttggttcagtttatgatatcagcctgtggggaagggtttggaaggatctgtacaggagcatactgaaagatgctggaacctcatcagacaataagttcacttctattgctcttagcaacttctttgctggtgctgctgccggatgtacaaccctggtcctcatctatccgctcgacattgctcacactcgtcttgcagctgatatcgggcgtacagacacccgccagttcagaggcatccgccacttcatccagaccatctacaagaaaaacggcatcagagacatatacaggggattaccagcatcgctccacgggatggtcgttcaccggggcctgtactttggcggcttcgacactgccaaggatgtcctggtccctttggagtcccccctgtggcagcgctgggttgcagcccaggcagtgacatccatggcagggctcatctcgtacccactggacaccgtgcgccggaggatgatgatgcagtcagggatggaggtgcagatgtacagcagcacactcgactgctggaggaagatatacaggctggaggggatccggtcattctaccgtggtgcattgtctaacatgtttaggagcactggtgcagccgccatacttgttttgtatgacgaggtcaagaagttcatggacaggggtaggttgtaa

SEQ ID NO: 37723 - DNA, 541 bp, Zea mays
  Peptide Sequence Number=SeqID_81098
atgccgttggaatttgaccgttggagttctgacttctgggcccgcctggatgtccggtgcacaccggacatgtactgttcaatgtccgagtcggcgcgctataattcaccggactgtccggtgtacaccggacagtgtccggtgctccaagaggacgcggctctggaacttggcagcctcgggaattcgcaacggctgctccgctataattcaccggacatgtccggtgtacaccggactgtccggtgtaactccggggcaacgactacttcgcgccaacggtcacctgcaacagcaattaatgcgcgccagagcgcgcagaagtcaggcacgcgcgtagtggcgcaccggacactctacagtacatgtccggtgcgccaccggacatccaggcaggcccagaagacagagctccaacggtcgaatcccaacggctttggtgacgtagctggcgcaccggacatgtccggtgaccgttggcgcgaagtagtcgttgctccggagttacaccggacagtccggtgtacaccggacatgtccg

SEQ ID NO: 37724 - DNA, 1194 bp, Zea mays
  Peptide Sequence Number=SeqID_81099
atggccggcatcgcctacaggcgtgcgaaggcaaagatccagcccccaagttctctacgcgtgattcaaatgatgcgtccagattcaccaccaaatccttgggagcgttctggagctgaaggagcatatggtcctgcacctttcaagcccccatctggtggaagcaccggtgatattgttgaagcttctggagtttacgacctttttaagagttctcggaagctaatcctacagatgcagcggagttttccaccatttggctccaagcgcgacgacagcctatcgtgcccaggcttctatagatgtctcaactcagtagattggatgaatggacctatcaggccaaactttctagacttccaaggggtggactttgaggcaacgtttggggtgaggagagcttacagtgtaagagacattcaggattactcaaacccgtttgatctctttgagtccctgtttgaagggtttggtgaaatgggtggaatggggggtggccgtgctgctcggaacataccaatgcaaggtgatgatgagagctacaatctggtactcaatttcaaggaagctgtgtttggtgtggagaaggagattgagataaccatattggaaggctgtaacacctgcgatggaagtggtgccaagccaggtacaaaggcaacgacaagtaaaacttgtggagctcatggccaggtagtctcctccacaagaacactgcttggaatattccagcaagtctccacctgcaatacttgtggtggcaccggcgaattctccactccttgcaacacctgtgggggtgatggccgggtgcgaaggacaaagaggatcagcctaaaggttcctgctggagtggattctggaagcaggctgagggtctggtttgaggcgagatgggcaaacattctctacacatgcaaggtttcttacattgatgcaatccttgggacaaccgtcaaaatccccactgttgatggaacagttgaccttaagataccctcagggacccagccaggcacagctctggtgatgtccaagaaaggtgtcccgcttctcaggaaatcaattgcccatggagaccagctggtgcgtgtccaggttgagattccgaagcgtctgagcagcgacgagaagaagctatttgaggagcttgcaaacctgaacaaggctcaaacaaccaatagcaggagatga

SEQ ID NO: 37725 - DNA, 303 bp, Zea mays
  Peptide Sequence Number=SeqID_81100
atgtcgagccggttctggaggtggtacgcggaccggcagttccacaggtgcgagaagacggtactgtggggtatggtggagccccaccgcccggcgcgctccgtcgcgccactcgtcggcacctacgtcgccgccttctacaccggcgtcctcggggccgccgtcaccgagcagctctacaaggatcaccctggcgaggcggtgccgatcatgccgcccaagttctactggggcccatggagggtgatgaacggagaagtttcccgcttcatccagccgcccgacgaggccaagacagcgtag

SEQ ID NO: 37726 - DNA, 537 bp, Zea mays
  Peptide Sequence Number=SeqID_81101
atggctatatttgtgaacataaaaattagtaatctagagaggcctcttgacaacttatgtctcagcaggatggctcttgtaaaaattcatgtaacatgtgcattagtttatgggccttcaccaacaggaaggatccaccaaggagtttgttcaacatggatgaaggaaaggttagcattgaaacaatctggggcagaattgggcacttccatccttttctttggatgcaggaaccataatatggactacatatatgaagatgagttgcaaactttccttgaggagggggcgctttctgagctaattgttgcattctctcgggaagggccaacgaaagaatatgtgcagcataagatggtggaaaaggccatagaaatttggaacatcatctcaaatggtggttacttatatgtttgcggtgatgccaagggaatggctacatatgtacaaaaaatgcttcatacaatagtccaagagcagctgacactggtcacccaggagcacgagatgagcgcgttgatgtacttagtactgtga

SEQ ID NO: 37727 - DNA, 264 bp, Zea mays
  Peptide Sequence Number=SeqID_81102
atgacccccttcagtgatccggtcactgccgccacatcccttccgccacatccacccctccgtgatcccgctgtcagtttcattgatatcgttgcgcccgcaaaaagtggcaagaagcgcgcgtcaaatacgacttgcgttgtgggccttgcagcaggagaggcgttctacattgtggtagtgggcattgttttgtcatggtctcgtctgtcaacaaggcaagcgttcctccgtatgatcacatctagttgtcttactgactaa

SEQ ID NO: 37728 - DNA, 198 bp, Zea mays
  Peptide Sequence Number=SeqID_81103
atgtcgtacacggggatgtgcgactacttccactacgtcgactactttcactgcacgaggatgtacgactacttccactatgacagagcatcatatcatgtcctccgctcccctcctcgcttgattctggtgaatcttgttcttacatgtggggcgattcccctagtgtgtgagtctgagtccctcgaccgattctaa

SEQ ID NO: 37729 - DNA, 720 bp, Zea mays
  Peptide Sequence Number=SeqID_81104
atgacgctgagccaccttttcctccatgagcagctatggaagcaacatgggctcgagcagcagccgagcacacacatacttgtgctgcgtttgatagctagtggagtgagcgagaaggatatttcagggagcgagccgtccaaatcggtagtttcagttccttcacttgtctgcatcccccttcccctaactccgccgccactgccgtccgcgctcgccgtcgccccgaacctatcgcccactgcatttttccggcggaggtatgcgatgaggctgctgcaagcggaggagctatttcggaaggttctggaggtcgggtcgaagaataaggcggctcggctgctggggctcgacgtcggcagcaagtacgtcggggtggccatctccgatgagaagaacagggtcgctatgcctctgagtgttttgtgtcggacaaaaacaaacatcaacttgatggcagatgatttcaaaacattggcaatccaagtaagtcttgctggggaactttgtaaaacagggaaacttgatgatctgccctacgcatattgggatgaaaatttcacctcaaagtgtgtagaagccctcttgcatcccctgaatctaaaagacttggacgatgccaaaacaatgacagacaaatttgctgcagtctgtatactccagggttatcttgacaacatgaacagaaaactgagatccacagataagtctgaagcataa

SEQ ID NO: 37730 - DNA, 147 bp, Zea mays
  Peptide Sequence Number=SeqID_81105
atgggattcgtcggggacatcgccatcgaggaatccgctgctggagatagaagcccggttctcgaccaagaacatgatgcaggctatgaagtgctataccatggagagatcaggggcattttgagtggatgccctttgaaattctga

SEQ ID NO: 37731 - DNA, 309 bp, Zea mays
  Peptide Sequence Number=SeqID_81106
atggggccttacaatatctttattgattttctggagctgcacttcctattttgttttttcataattgttaccaaacatcatgtgaccattatgacccatcttcacgtccttcctgccaaatctatggaggagccttcttcctctctggtgactattacttcatacaaggttgaccccaataggcattgtgatatcgacactactgatcacattaccagtgatctagatcgtttggttgtgtatgagcgctatcatgatgctaagcaagttcaagttggcaatggagcaggaccgaaggtacatttgtaa

SEQ ID NO: 37732 - DNA, 960 bp, Zea mays
  Peptide Sequence Number=SeqID_81107
atggccttcaagctggccaccaaggccgcggcggcgtcgcccgctgctgctcaccgcgggggtctcgcccgggggccggagggtacgagccgcgttgccttcggaccagcgcctagaaacaaggggctccgcgcggccaacaactccgcgacgcccgtggctaagtacgaacgctccttctcctgggaagagagggttgatcgaagtgaaatattgacattggatagcattagacaagttttgattagactagaagacagcatcatatttggccttttggagagagcacagttttgttacaatgctgatacatatgatagcaatgctttccacatggatggttttggcggctctttggttgaatatatggttagagaaactgaaaagctccatgcacaggttgggagatacaagagcccagatgagcaccctttctttcctgaggatctgcctgagccccggttgccacctatgcagtacccaagggttttgcatcccattgctgattctatcaatatcaacaaagagatttggaaaatgtattttgatgaacttcttccaagattggtgaaaaaaggaagtgatggtaatgctggatccagtgctctttgtgacacgacctgcttgcaggcgctctccaaaaggatccactatgggaagtttgtggcagaggctaagtttcaggagtccccggaagcttacatgccagccataatagctcaggaccgtgatcaactcatgcaccttctcacatatgaaacggtggagcgtgctatcgaacatagggtggaagccaaagccaagatcttcgggcaagaggtgaacatcggtgtggaggacaacggcagcccaccggtgtacaagatcgttccgagcttggtcgccgagctgtacagctacagaatcatgccgctaaccaaagaggttcaaatcgcgtatttgcttaggaggctggattga

SEQ ID NO: 37733 - DNA, 375 bp, Zea mays
  Peptide Sequence Number=SeqID_81108
atgtgtgatgatgtccaattatgtaatcgctgtgtacatgagcttctgatcctggcacgtacatggttcgcattcagtttgccttccaaaaccgggtgtgacataagtggtatcaaagcccttgctgactgtagatggctcgtcttaggtgcactgcacgagcaggagcagcaggactcttccccctcgcctcagcgggaggtggagtctaagaggccgccttcccctgcacctcagccagagatgcccccttcaccaccacagggcatcccagctgctggaggagaccctgatggagatggagatgacaacgacgccggtggcagttcaagccacgacacggagcgttcagaggagccagagccggagggatga

SEQ ID NO: 37734 - DNA, 210 bp, Zea mays
  Peptide Sequence Number=SeqID_81109
atggctagtgtgctagacgctattctagaatccgtaaaaacgttagctcatgcctctgccgaagctcctagcgaacaaactaatgatgcaagcgaagctgccgctatgagcacgaccaacgctccttctgaagctggacctttggaaattgcgccgatagtgttggtggaggagagtgctcctgagaaatctaaatctcctgctctcgaa

SEQ ID NO: 37735 - DNA, 1407 bp, Zea mays
  Peptide Sequence Number=SeqID_81110
atggccgatcattcatatatatgcatgttcatcaggtacgtgcctgggctggacaagggcaagggcctctacttcctgttcatcaagtcggagacgaagacgcccggggggctcccggcgcgccccgtgctgaccagctactacaagagcgaccacttcaagcaccgcccctacgacccctacaacgtgtacaccagccccaccgccgccatcctctgcaccgactccttccagtccatgtactcgcagatgctgtgcggcctggtggcccgcgccgaggtgctccgcgtcggcgccgtcttcgcgtcgggcctgctccgcgccatccgcttcctgcagctccactggcaggagctcgcgcacgacctccggacgggcaccctgagcgccaaggtcacggagccgtccatccgggaggccgtggccgaggtgctgaggcccgacgccggcctcgcggacttggtggaggccgagtgcggcaaggagagctgggagggcatcatcacccgggtgtggcccaacaccaagtacctggacgtgatcgtgacgggcgccatggcgcagtacatcccgacgctcaagtactacagcggcgggctgcccatggcgtgcaccatgtacgcgtcctccgagtgctacttcggcctcaacctccgccccatgtgcgacccgtcggaggtgtcctacaccatcatgcccaacatgggctacttcgagctgctgccgcacgacccggacgctgtgccgccgtccagggacgacccgccgccgcggctgctggacctggcggacgccgaggtgggcagggactacgagctggtgatcaccacctacgcggggctctgccgctaccgcgtcggcgacatcctgcacgtcaccggcttccacaacgcggcgccgcagttccgcttcgtgcgccgcaagaacgtgctcctcagcgtcgattccgacaagacggacgaggcggagctgcaggccgccgtggagcgcgcggcgcgcctgctggcgccctacgacgcggccatcgccgagtacacgagccaggcggacgccaccaccatcccgggccactacgtcgtgtactgggagctcatggtgcgggagggcggggcgtcgcccgacgcagccgtcttcgagcgctgctgcctggagatggaggaggccctgaacgcggtgtacaggcagggccgcaacggggacgccatcgggccgctggagatccgggtggtgcgcggcggcacgttcgaggaggtgatggactacgccatctcgcgcggcgcctctatcaaccagtacaaggcgccgaggtgcgtgtcgttcggacccatcatcgagctgctcaactccagggtggtgtccagccacttcagcccggcgtgccccacgtacagcccgcacaagaagtga

SEQ ID NO: 37736 - DNA, 63 bp, Zea mays
  Peptide Sequence Number=SeqID_81111
atgtccggggccacgggacagtcgggtgtccctttctatcattggcttggtcacgtggctcgg

SEQ ID NO: 37737 - DNA, 690 bp, Zea mays
  Peptide Sequence Number=SeqID_81112
atggcgatgcccaccacgcccaaagccaccaccagcagccccgccgcgtactacgtcgccaagcctcctcctcctcctcctctgggctacgcggttcacaacaaggcggcggcggcggcctacgattcctacgacggccgacacggcggcatggtcgccaccaccaccaccacccggtcgtcctcctcggcggcgcgccaccaccaccaccaccaccaccaccagcagccggcgggagcgcgggcgctggacggggtcctgctgctgctgcgcgcggccgcgtcggtcatggcgttcgtggccgtcgcgctcgtcgcgtcctgccgccacggcgactggatggagttcgcgcgctacccggagtaccggggcctcctgggggcctccgcgctcgcctgcgcctactccgccgcgcaggccacccgtggcttccgccggatgcgcgcctccgggagagcgggtggcggcctcgcggatttcgccggcgaccaggtggtggcgtacctgctcatcacggcgtcggcggcggctctccccatcaccctccgcatgagatccgccgtactcaacgtcttcacggacgccatgacggccgccatcagcctggcaatcatagcctttgcggcgctcgccttgtccgccgcgttttttttttctccgcgcaaccatactagtagcagttcgcagtaa

SEQ ID NO: 37738 - DNA, 273 bp, Zea mays
  Peptide Sequence Number=SeqID_81113
atggcaaaggaggtctatgagccaaaatatgattcgaggaccgagggcatcaacggagaagtcctcatgagggttggaggaggcaagaggcatctagaagaagagaggaggcaacgtgtggagttggaggtgaggatgatgaccgagcagatgtttcagtacatgcagactcttggcgctgtagcgggtgtagctccgccacctctgttgttcactccaaatgcacctcattggttttatagtcatgtggaatcaatcggcgtccttaaatga

SEQ ID NO: 37739 - DNA, 1299 bp, Zea mays
  Peptide Sequence Number=SeqID_81114
tatgtgaagtgtggctttgctggtgagaacttccctacatctgtgttcccttgtgttgtcggacgaccgctacttcgctatgaggagtcacttcaggaacaagaattgacggatattgttgttggagcagcttgtgctgacttgagacatcaacttgatgtatcatatcctgttaccaatggcattgttcaaaattgggatgacatgggccatatctgggatcatgccttctacagtgagctcaaggttgatccatctgagtgtaaaatcctactgacagatccaccactcaatcccgtgaaaaaccgagaaaaaatgatcgagacaatgttcgagaaatataactttgctggggtcttcatccagatccaagcagttctttcactgtatgctcaaggcttgctaactggacttgtgatagattctggtgatggtgttactcatgtggtgcctgtagttgatggatactcttatccacatctgacaaagagaatgaatgtagctggaaggcatataacatcttatcttgttgacctactctcaaggagagggtatgctatgaataaatctgctgactttgagactgtcagagaaataaaagagaagctatgttatataagttatgattacaaacgagaataccagctaggacttgagaccacaatccttgtgaaaagttacactcttccagatggaagagttattaaagtaggcactgaacgatttcaagctcctgaagctcttttcactcctgaactgatagatgttgaaggtgatgggatggcggatatggcattccgttgcattcaggaaatggatattgacaacaggatgacgctctatcaacatattgtcttaagtggaggaagtaccatgtaccctggtctgccaagtcgaagtgtagacaacatagagaagtacaatttagcaaagaagatcacaaaacgacctttgcatattcttaaacaagttactactttttttacaaggttggagaaagaaattcttgaccgttatcttgatgtagttttgaagggaaacaaagatggcctaaagaaattacggctgaggatagaggatcctcctcggagaaagcacatggtgtatctgggaggtgcagtgcttgctgggatcatgaaggatgcacctgagttctggataaccaggcaggagtaccaggaagaaggtttagattgctccgacaggtttctttatcatggtatgcaccgcataaaaaaagaagtcagaaaattcatttgtggtaatatggccctctttaagaatcttgagcaacagtag

SEQ ID NO: 37740 - DNA, 201 bp, Zea mays
  Peptide Sequence Number=SeqID_81115
atggctttggtgccgcctccaatgttgcctctcgccgccgagcgaggcgtggctgtccgtccaccgcacgagcgacggtcgcgccgtgcgcaggaggacaggggcgaggacctcttcacacgcgctgaggtggtcgccgtcgccggcaagcccaaggtgcagaggtggccgcctccgctggccctactggtgtggaggtag

SEQ ID NO: 37741 - DNA, 285 bp, Zea mays
  Peptide Sequence Number=SeqID_81116
atggcactcggccccacagaccggggctgcccagtcgggtggctcgggtgccgtcccctgggacgcgccgcggagtgtcgcgagatcattgacctcgcgaaacgcgtcagcgagcggcgcgagcagtcttctaaggacggctccccaccttgtcgccgacctggcaaggaaagggtcgacgacgacgaggtggccgcggttgaacgggacctcgggtatcagtcacccgagggggacctgaaggatgtcttcgtcagagactcctactccggtggcgacaactag

SEQ ID NO: 37742 - DNA, 144 bp, Zea mays
  Peptide Sequence Number=SeqID_81117
atgggcatccggtcccaagcgggtgtccccttggccggcgtaggctgcgccgctctcgtggatcatctccatgcggcgtcatggccatccaagtttcggccacacctgctgaaaaagtacgacggtgatcctgtaaaaacttga

SEQ ID NO: 37743 - DNA, 633 bp, Zea mays
  Peptide Sequence Number=SeqID_81118
atggtgcacggaggtgtggacgcctacaatggtgtcttaaagaatagtagatgtcggtaccctaaatcaggggatgtatcagttggaccggacctctgcgaggaagcaccggacccctgtactcacaacccggacccccgattacggtccgggactaccaagccttatcctgtgcgcttgcgctccccgctcaggcggagacccgatgctgccacgtggcttgttgcccgtgacataagccagcggacggagcctgaccatgatggtgcaaatcgtggagcaccgcgccgagacttcaacggatttcctggtggaggaagaagttgtttcttctacaccgcaggttcccaactgcccaaagccgggcactgctgctgcgcacgccgcacggcagcatacaactgcgcagacatcccggactccgttgagagcggctttgggagcattgtcagcagccaaggagttgctgcgtcaccctccaagctccacgacctcaccgggggccatgaagcagtggcgggacgacgtcgaccggctgctcggcatggcacattctacctcgaccaggtcgagaccacagtcatcccgcgcgccagcatgagtcatcgacgtctgtgcgctcaccctcagtga

SEQ ID NO: 37744 - DNA, 357 bp, Zea mays
  Peptide Sequence Number=SeqID_81119
atggaggctacaagggcaaatgtgcagacaactaacggatatagacatctgaataacaggaagctaagtgttttcaatgagttttctatgcaaataaagggtgaggccaagaggtatgtggtgaaggaagatctcaaggtaagaactaagaagacgactgattcaatatacaagagagttgatgaagtttggagtgaagctgaggagacatctaaaaagatccgaggtcacccggtctataaaagagtggatgagtacaccaagcctgttgtaaccaaggggcaagaggtagctgacgatgtcagagaaagatgggagacaagtgacaatccagtggttcagaaaattcaagagtaa

SEQ ID NO: 37745 - DNA, 417 bp, Zea mays
  Peptide Sequence Number=SeqID_81120
atggttcaggcgcaggcgttctggatgcaacaaagccgtgccattccatggaccagccgcacatatctgccggagcgttgttccttggaggaggagcccccgtggtccgtgcaatccgccctcgcggcgccgttcgccgaggaagccctcgtcgcgccgtccgcggggccggaggagatgctttttgaagccacgcagtccgccaaggccgcgtcttacgccaagtccgcgcagtccgccagggtcgccctcgcggcgctgttcgccgaggacgcccttgtcgcgccgtccgccgggccggaggagatgctagccgaagccgcgcagtccgccagggatgccctcgtcgcgccgttcacttgtgctcatggagacatatgcaaagcagggtataaacgaagaagtatttctctttaa

SEQ ID NO: 37746 - DNA, 345 bp, Zea mays
  Peptide Sequence Number=SeqID_81121
atggcccaggacgatatgggatgtatggatcaggcatgggcttgtattggctttgtgttacaaattactcactctccctctgtccaaaatttaaatggcccaggacgatatcaggcatggtcaagcatgcagaccaatggcccaggacgatatgggctgtatggatccaggggcagcagttcattcccaagaaattttatacccccagatttaggtggttacataaatggggtaatcaatcggtttgatgaattttgcatccaaaagccattggaccttggccttggccgcatcttgtttttcatccgatatcttgtgaattctttgcttcttaggacgtactga

SEQ ID NO: 37747 - DNA, 3789 bp, Zea mays
  Peptide Sequence Number=SeqID_81122
atgcccccgcacggccccgaagaagacgccgccgacgcgcacctcttcgctggcgtccgcttcgcgctccacggcttcgaccagatctccgcgtcccagatagagcggtgcggcggcgtccacgcgggaggttgggacgcagactgcacccacgttatagtttccaacaccttatatgatgatccagtgtgtgtggcggcgaggaaggccgggaagaaggtcgtcgttgatcagtgggtggaagacagctttgatctcggagaattggcagatgcagatcgggtgctatatgctccagtcagagattttaaaggcattccaggttgcgataaacttcacatttgtttgacaggtggttgggaagtagagataatgggagctcaagctaaggactctgaagatgaaacagaatatgctggtacatgctcattaagtagcagacgtattgacagaaggacccctattagagagatcagcacaaaatctcatgttgactctgctctacatgcacccagtggaggtcctactgtctctgctagcaatgtagtgggtgctactggaaaacacttgagcactccagagcagtttatgaaagcacacgatgcgagcacaaaatcatctgacattagaactgactcaggaactgcccctgacacaaagtgtgctgcaatgtctgttgataatgatactcttaaacctacccgctctcacatttaccacaatgagaatgatgaggttcctgcagataaggccagtagggatgaagctaaagatgatcacagaagggaacttgacaccagggatagtacccttcgtactcccagtgtacataaaagcattgcacccactattccaggagacaatatagagaacactaacaggaattgtttccatggtttcagtcagatcaatgtcaacagtgatcttcagttaaactcttctgaagaaaatttctccaagaaaatattacactcaacaaacttgagcagaaaggtagaccagaaggatgacgggcatgtacctgatcccaaacccaacatttctcagtcatcagttgaagaaaacctaaacatgtgtgagtttaatccaagatcagaaggcaattcagcatcaagaaatgatcaacccttaggctattcaagaaggcgatcttcaaagtcaggatcacttaatgttcataggaagaaaagcattctttcttcagtcagttcaaaggcaccaaatgaagccccagactcgggaagtggaatatcaagcgcaactgcttctgatgtgggtagaagccccaccgaacctaccaaagttgatggtcatgtaaacagtggtccaactatgaattcaacagagaaccagatgtccggttgtaaaagcaacctgttaagttataggagaacatctttgaagcttgtaagctctgctgaagtagaaaagcttcctgaaaattctgttaatgataagaacatggtggagccagatgtagtaaagacaccagcactgcacgaggcaacaactgaggagccttccccttccgtctgttctgaagttagaaaagaaagtttaggtgttcatcagaatagggacgctgaaatgactgatgctcagctgctaagcaaaactgaagatgcagctccttgctcaaaacctgataaagtggtttcttgtcagaactcgggactagaaggttgtaaagatgtcccagttaacaagatcactgatgaacatggaatatttccctcgaaaatatcaacttctagagtgaagaaggttggtgccaagcggtctcgcaatgccggcagtaaagctgctagtgaatttacaaatagtagaagtgaggttgcagctttgaagcctaagcatgataaagttgcttctcatgaaaacgtggaggcacaacagggagaaggatgttgtagtccaaatgctgctgaatgtacaccaccatctcctgcagaagccctgaacaacaaatcaacgaatgaagttctaaccagctcccagggccccaatcataagacaaacgaatcactagtggcttccaaggcggagtctgttaatatgactctgcaaagaaacaagaaggggaaccgcagaaagcttccaaacacttcaaatgcagatgaaaatcaaagaagttcatctcggacagtaccaaattccaaatcaggtaatttggttgcaaaggggtctcggactgctgatttcaatatatctgactcaccaactgtcgatgaaactgagacagtgccatcaaattcgagttttaatgaggcagttcctccaggaaatggtgaagaaaaacataaaaggctttcaagcagtgcaaacgcagatgaccctgaagcatgtacagcaaataaagtaccaaacaatagagtccgtaaggtcgtagccaagaggaagctatctgatgtccaaagccacaaatctggtagtgagccttgcaagactgcgaaggtattggtatctgaagttaaagttgtgtcaccagccagagttgcgcagagttctagaaatgctaacaaggtaacagtggttcaagacctgcagaacaccaatactggtaggacgaacgatacagttggatcattttgcaaagatgtcacggaagactgctcaaaagacatgcagagctctaaaactagaagcagcaggagacaaaagattgcagatctagtggatggttcaacggaccatgacaaggagaacatactagtcgatagtaattttacttccaatacaaaacgtggaaataacagcatgagttccaaatccaacacaaagacattacaaagtagcaaagctgtgcttgatgagagtagtgtgatcaaaaggaatggttatggaaccttggatgtgccagaaccaacatggtttattctaagtggacatcgcctgctgagaaaagagtatagggctatacttagacgtttgagaggtagagtttgcagggattcacatcactggtctttccaagcaacacaccttgtcaccactgagatgcgcagaactgaaaaattcttcgcagctgctgcggctggcaggtggatactgaagcctgattacttgactgctagcaatgaggctggcaagttcttagaggaagagccatttgagtggcacggtgaaggccttaatatcggtgatacgatcagcttggatgctccaaggaagtggcgccagctgcggcagcgtactggctatggcgctttctatgggatgcaggtcatcatatatggggaatgcattgctccaacactggacacgttaaaacgcgcgatcaggtgtggtgatggcaccatcttagcaacctccccaccttacacccggttctttaagtccagtgttgacttcgctgttgtatccgcgggcatgccaagcgcggacgcgtgggtgcaggaattcatgcggcatagcatcccctgcatcagcgcagattacctggtggagtacgtgtgcaagcccgggcaccccttgggcaagcacgtcctcttcaacatgcacgatctggccgagaggtccctgcagaagctcatgaagaaccaagaagatgctcccgggagctgttccgcttgtgggtcagacaaccgggaagtgccgatgctggtgtgcggcggcgacgggaggagccagtcttccggctgtggggtccggacgcatgccgattgctgcaaccctcccgtggaaggctgcgatggtggcgagtggctgtgcggtaggtgcgaccagcagaaatctgcaaagaaggctaagaagaccgctgcgaaaccgagggtgctgaaacagagatga

SEQ ID NO: 37748 - DNA, 1311 bp, Zea mays
  Peptide Sequence Number=SeqID_81123
atgacgaccgccgcgagggagaggcgcctgccgccgacgctgcccctggccacgcttatcggtcgcgagctccgtgcggggggctccgagcgcccggccctgcgctacggccacgccggcttcgccaagcgcggcgaggactacttcctcgtcaagcccgactgcgtccgcgtccccggggaccccgcatcggcgttctcagttttcgccgtgttcgacggccacaacggcgtgtcggcggcggtctatagcaaagagcatctgctcgagcacgtcatgagcgcgctgccgccggacatcgggcgcgacgactggctgcaggcgctgccgcgcgctctcgtcgccggctttgtcaaggccgacattgatttccagcgcaagggggaggtgtcaggaaccacggcgacactggtggtcatcgatgggttcacggtcacagtggcgtcggtgggagactcgcgctgcatcctggacacgcagggcggcgagttgcagctgctaaccgtggaccaccgcctggaggagaatgcagaggagcgggagcgcgtcacggccagcggtggggaagtaggccggctcaatctcttcggtggtcaggaggttggtcctctccggtgctggcctggtggcttgtgcctttcaagatccattggggacatggatgttggggagtacattgtgcccattccacatgtcaagcaagtcaagctatcaaacgctggaggaaggctgataatagcatccgatggcatatgggatgcattatccaatgaagcagctgcaaaagcatgcagaggattgcctgcagaactggcagcgaagcttgtcgttaaggtatggttggctcagtttctattttcaatgtccatgcagcaagctctgaaaacaagcgggctaaaggatgacaccacctgtgttgtagttgacattatcccatccgatcatttgacatcaccacaattgtctccaaagaaaaatcataacaagttgaagtcactttttcgtagaaggtcgcatagttctgttggaaagctcgggggcaagtctgcctccattggttctgtggaggagttatttgaagaaggctctgcaatgttagaagaaaggttgggcaggaatttgtctttgaaagcagtttcagcaccttttcgctgtgcaatctgccaagtggaccaagagcccttcgaagatttgatgagagataatggaggtggttactgctcttccccatgcgctccatggggtggtccatatctctgtttggactgtcggaaaaagaaagatgcaatggaagctatcgagggtgattaa

SEQ ID NO: 37749 - DNA, 279 bp, Zea mays
  Peptide Sequence Number=SeqID_81124
atggagggagagaggaggagagagagtgggaatttgggagggagggaaaacactgctgctagaaactggccgggatttggaattttggatttcgcggcgcgcgtcttctctctccagtcgccagctactgtgctggattggatgacgagactatgggcaccaccacgcaacaagcctgaaatgtgggactttgggacaatggtgtggagcacagagacacctgaggtgaaggtcagggctcgtgctgatgaaccgggagcggtgaagagcgagtgctag

SEQ ID NO: 37750 - DNA, 1410 bp, Zea mays
  Peptide Sequence Number=SeqID_81125
atggccgcgtccgcgcgagggcgacgactggccgcgagagccaggaagctgctggcggccgacctcgacctcgtcctcgacctcgacctgccgccgccgtccacccaagaacaccgctgcctcagctctgccgccgctgctactgctctcgccacctccggtggtgcaggccgtctgggctgccgctcctatctcggaggcgcgccgccgatgccgcgtgtcgtcgtccaacgtatcgagcgctgccgcgggcctcccaggctgtcactccttgacaagtatatatggccgctgatatacgatacgatgacgtgcagtgcagctgcctgtttgatttctgctcccaagtcccaactccaatgtccaatccatgctggtacggtggtgttgcgttgcaggtttgatgctgctggcgatggagcgtgcctcaagaggtacaccgacccctccttcttcttcagggcccactctgccaagattgatgagcaaggcacgctgaagcagcatcgtcggcaggcagaagcagcagcagcagcaggtgccgccgggtctatgttcctgctgatgcagcaaacagctgctcacagggtcgaacagcccaacatggaacagaagctgcaagaaggtagtacagcgcagcccagcccaagtgagctcgagagaacgagctctttcgaggcatggctctctccacaagctcgccgctttcctaccgctactgctgctactactcatcaccatcttcaggaaccacctgatgatgatgatggtggtggtggtggtggtgctactacctgtagtggatccatcagtagtcaggttgataccacatcgaatgctgcggctgttagcagcagttccacggtgaaggcggtcaggctgaactcagcatcattggtgaaaggtggtgagagtaatacgacgaggtcgaggtacaaaggcaagatcgcctcaagagtcagcagcttgccgaggaagctcttcatgaacaccaccaagcatcacaacgaccactcgcgctcttttcgtgcaggtagtagcagcctccgggtgacccaagccacagacatcggggattgcagccctgaacttgaagccatcgccgtcgccatccccaccccagcagctgactccaagaacctgctgctgctgctgccaggaagtggtcctgttctggagccacctgacaattcttctgctgctgctgctgaagacgccaaactacggaatggtccaagcccgatccatccttcaagaaacattttggacagcaggagtgcacagataaaagacattgcaatttcttccaagctgaaaccagcttctagagcgagctctcatgtgactgggactgggagtcctaccaacgccaccattctgaacagagcagatggcattcggcagatttag

SEQ ID NO: 37751 - DNA, 498 bp, Zea mays
  Peptide Sequence Number=SeqID_81126
atgcacacttcctctctctctctctctctctctctctctctctctctctctctctctctccttcctgggagccgtgttaattgctctcttgttgtggagcagcaggagccgaggaggacggcggcggcggcggcgagaagagatggccgacggcagcagcaactcatcggcgtcggtggccatgggacaggaggtgcaggatgcaatgtggatcatctaaggctggctttcgttgagaacaagtatggtggaatggtgcctaagaagcctctgatttcaaaggatcaggagcgcgcctattttgattctgcagactgggtccttggcaagcaagctgcaaacagcggcaccgcacgggctgcgactgctatcgaattcttgaagccaaagctaaagggccaggcttacaaaagctccctggctgggagagacgatgaagagcgttatcaagttttttttagttggttgcattggttaggaaggcaaattcaggattga

SEQ ID NO: 37752 - DNA, 3021 bp, Zea mays
  Peptide Sequence Number=SeqID_81127
atgctgcgtgcggcggcggctgcagccgccatcttcccggcgcggttcgccgccgcgccggctgtggcggcggcggaggagctcaggtctccgctgctcagggtcattgggacgctgagggacggccgcggctcggtgctgctgggtaggagggtgcgtttctgctccaactcttccgcgagcgacaccgaggcggcggtggcagaggcggaggcgaaggccgaggatgcgtccgctgcggagggtgaggcggacagcaaggcgtcttccgccatcgtgccgaccagcaccaatatcgatgattgcctctcggttatagcgttacctcttccacatcggccactctttcctggattctacatgccgatcaatgtgaaggaccaaaagctgctgcaagccctaatagaaaatcgcaaaagatcagctccgtatgctggtgcctttcttgtgaaagatgaagaaggtactgaccctaacatcgtgactggttcagattcagcgaaaagcattgatgatctcaaagggaaagacttgctgaagcgtcttcatgaagttgggacgcttgctcagattacaagcattcaaggggatcatgtagttctacttggtcaccgacgtttacggataactgagatggtcgaagaggatccacttacagttaaagttgaccatctaaaggaaaagccctacaacaaggacgatgatgttatgaaagctacatcattcgaagttatatcaactttaagggaagttctaaggacaagttccctttggaaggatcatgtgcaaacctacacacagcacattggtgactttaactaccaacggttagcagactttggtgctgctatctctggtgccaacaagttgctttgccaggaagttcttgaggaattggatgtatacaagcgtttgaagttgacccttgagttagtaaaaaaggagatggagattagtaagctacagcaatccatagcaaaagcaattgaagaaaagattagtggagatcagcgacgttatttattgaacgagcaacttaaggcaatcaagaaggagttgggtttggagactgatgacaaaacagcattgtctgcaaaatttagagaacgtatagaatcaaagaaggacaaatgtcctcctcatgttttacaagtcattgaagaagagcttaccaagcttcagcttttagaagccagctctagtgagttcagtgtaactcgtaattatttggactggctgacagtgttgccatggggaaattatagtgatgaaaacttcgatgtccaccatgctcagaaaattctcgatgaagaccattatggtttgagtgatgtgaaagagaggatactggaattcatagcagttgggaagttaagagggacttcacaaggcaagatcatatgtctttctgggccaccgggagttggaaaaaccagtattggtcgttcaattgcacgtgcactgaaccgtcagttctacaggttttctgttggaggtttggctgatgtggctgaaatcaagggccatcgacgcacatatgttggtgcaatgccagggaagatggtgcagtgtcttaaatcagttggtacagcaaatcctctagtgttgatagatgagattgacaagcttgggaagggtcattctggcgatccagctagtgcattgttggaactccttgaccctgagcagaatgttaatttcttagatcactaccttgatgttcctattgacctatccaaggttctatttgtttgcacagcaaacgtaatagagatgataccaaatccattactggataggatggagatcattgctatagctgggtatataactgatgagaagatgcatattgctcgggactatctagagaagaatacaagacaggcttgtggcattaagcctgagcaggggttcgggggttttcttgacctgtgtgagaaggtcttcttcttaatacaatgcccgggggctgtcttacccccgcaggttgaagttacagatactgctcttcttgctctcattgaaaactactgtcgagaagctggagtgaggaaccttcaaaagcagattgagaaaatttaccgtaagatagctctgcagcttgttcgccaaggagtatcgaatgagccagaccatgagtctgtcagtgcctctgtaactgaggaatctggtaatggtgataacaccacaacaaaagatgagattttgaaggatcctgctgtagaagatgcttcagtcaccaacaatgttacaaatcctgcctccgaggaagctaatgaagaaaatttgacaagtgaagcagcaaaagaagacagcacatctaagggcaacaagggcactgatggagcagcggacaaggcaattgagaaggttgtggtcgattcatcaaaccttggtgattttgttgggaaacctgtgttccaggctgagcgtatatatgagcatactccagttggagtggtcatgggtttagcttggactgctatgggtggttctactttgtacatcgaaacaaaaaaagtggaggaaagggaagggaaaggtgcacttgtgcttacaggacagcttggagatgtcatgaaagagagtgctcagattgcgcacacagttggcagagctgtattactggagaaagagccagataaccatttttttgcaaactcgaaggtgcacttgcatgttcctgcagggtccacccctaaggatggccctagtgctggatgcaccatgataacatctatgctgtccttagctatgggaaagcctgtcaagaaggacctcgcaatgacgggtgaagtaacactaaccggaagaatcctcccaatcggcggggtaaaagagaaaacaattgcggcaaggagaagtgcgataaagacactcatatttccggcagcgaataaaagggatttcgatgagcttgcttctaatgtgaaggaaggcctcgaagttcattttgttgacacatacagtgaaatatatgatttagctttccagagtgacgccgggacagaaacaagctga

SEQ ID NO: 37753 - DNA, 639 bp, Zea mays
  Peptide Sequence Number=SeqID_81128
atgcttttcaaaggatggaaacgactgatccaggacatgattaggagagaagggccctttctggagactgcttgtgtgccatttgctggtcttgctattcttctttggccatttgttgtagtaggagtcgttctgacatccatactctccagtgtccctttaggtgcttatgctgcagttgtagcttatcagtcatggagcttgatcttgttcatgtcccatgaatcctcccttatcctgggaattgcatatgtgttctcatcgatgtctatatttaatgaatacacaaatgatgttcttgacatggcgcctggttcttgttttccaagatttaaatattggaagggtaaagatgagtcttcacacggacacaatgttccattattgagaccagcctcattcaacagggagaagcaagaagggaaaagacctccgtctcgtgttacttcatttaagaacaacattgacgatttcaatccattcaaggtaaccttcagggcaacttattggtgtcgcttctggtcacaacttcagcctagaagggagggccaaaagttaattaagtcttcatggcgtaatgtggaaaggtgctactacagttcttcagcaacttcagatgggggtcttcgttgcgtttaa

SEQ ID NO: 37754 - DNA, 732 bp, Zea mays
  Peptide Sequence Number=SeqID_81129
atgaacttgccagctgcgaacttaccagtgggaatgacctttgcgccgcacgctgaagaccccagtgtggaaaggcagagcgctaccaccatcgaacttgcaagctgcgacgctgaatcccccttcgcctcgccggctcccttgttcgccctagctgcgatggcgaatggggcggaagccgctgggggagagacagagaggatcgatctgctggcggcgtctaagctggagaaaggcggcgccaccgccgagggcgacgagataggcatcgacccagcggcggagactccggagcagcgcaacaagttcctggtcctccgcctgtacgaggcgctcaacgcccgggaccacgccgccgtgcagtcgctgctggcgcccgacctggagtggtggttccatggcccgcccaagcaccagcagcacatgatgcgcctcctgaccaccaccaccaccaccaccaccaccggcagcttccgcttcgtgccccgctccgtggacgccctcgccgcctcgtccggcaccgtgatcgccgagggccacgagaggggttgctactgggtgcacgcctggaccgtgggacccgatggggtgatcacccagctccgtgagtacttcaacaccgacctcaccgtcacccgcctcgccgccgccgtcgccgccaagtgcgtctggcagagccgccgccccgacagcgccaccaactccctgccgggactcctgctcgccctctga

SEQ ID NO: 37755 - DNA, 540 bp, Zea mays
  Peptide Sequence Number=SeqID_81130
atggaggaagatgctggggaggaggggacactgcaagagatttgtgatgagatacccattgcggtgtttcaccccacaaaaggattcttttcgcccggtctaaaaaaggctaaagatcaaacttctacggtgaacacagctgaagtcttgatgcttaataaagaaatagaacaaaaaatcatctctgatagtcaactctctgaagtgttggataatgaaggttcggtggatgatcgggccaaggtggctccggagaaatctcatattgaaatgatgaagcagagagtggaaggtcagacattctgctcaaacaaggagattaatgcaactacaaacagtcagctttcaaaccaggaggaagggaaacaggatttgaaacacatgctggatgacttcccaacagagggcaatgaggaagattggcatgggaacatagtggaggaggctgagctttaccacacagaagaagatggtgaacaggaatgggagaaggcattaagcaagaaagggaagaaaaaaatagaaggaactttccagtga

SEQ ID NO: 37756 - DNA, 369 bp, Zea mays
  Peptide Sequence Number=SeqID_81131
catgaggtagagtctgcgaggcgttgctctcctttgcccccgctagaggcgtcccctgcaccaccactaggcgtcccaaccgctgaagtacctattggaggagaccctgacgatgaagacggcgacgacaacaacttgagcctcagcaccgacctctcagaggagcaggagccggagggatgggtcgcccgacccatcactcatgacgccgctcacatgatggtctccagggtgcaggggtatgatcggagcattattctatctctgagcgggactcagctgaggcagccatgcaggatgccacacggccgtggacaccatgtctacgacaaccccgactacaggacccagataaatttagaaccgtag

SEQ ID NO: 37757 - DNA, 516 bp, Zea mays
  Peptide Sequence Number=SeqID_81132
atggagcgtgtgcaatactgcatctttgtcgatgctaatgatgtcgtcatgttcgtatggccaaacactaatgatctcctcatcaaggagttgttggattttcttggtctggttacaccagtagccccctggaggacagggctaagtggccctattcagaaggccttcatatcaggaatccagaatcctaaatccaaattgtacattttagcagtagcagacatacagatttctccagtggccacgcaatcacctgacctgctggttccgtttctcgaagcttttaggtaccagaagctagggagtggagtcatactcgaagatgtcgttgagggggagggggccgaggcgcgggagggcgacctggtgcagttcaactacgtgtgccgctgcgcgaatggctacttcgtgcacaggtgcatggttgagttcccagacgccatagcgttgcttctcggcacgtgcactaaagatgtgtgctgcacagctccagactttgagtcagatcgagcctag

SEQ ID NO: 37758 - DNA, 375 bp, Zea mays
  Peptide Sequence Number=SeqID_81133
atgcctctgtgctttacttccgcgagacggcctgcctcggcaccccacctctcctaccttgctccggtgcccctgctcgtcgtgcggtctccacccccgacaagcaccgggcgttgctccacccagcccccgccccgaaccctaaaactcctcccaactgccgcctaccgtgctctcgatggtcaccaaatctgcctcacgcacgagggagaagaccagatctgcagcatgatggcgacgggtgacaggttgcgtgccatgtatctgtacgagatcctcctcctcgcgacacggtcggctcgtagggcatcgaattcctcagtatatcgctgtggatccctgtggctcatctctctgcagcgccacacggagtag

SEQ ID NO: 37759 - DNA, 228 bp, Zea mays
  Peptide Sequence Number=SeqID_81134
atgtcgacgaatcccaaagacctgacgggcgtggcggattcggcggtggaggtgccgccggggagcaccgcgggggagtgcctcgcccgggtcctggcccagttccccaatctggaggagatccggggctccgtcgtgctcgcgctcaacgaggagtacgcggccgactccaccgcggtcgccgacggcgacgagctcgctgtcataccgcccatcagtggcggctga

SEQ ID NO: 37760 - DNA, 636 bp, Zea mays
  Peptide Sequence Number=SeqID_81135
atggggtcatccttcttctcagcagggaagagtcccaaggggtgcatcaccatctccacggggatggtagccacagaaagttgtcagagccttcatggctgccgcttcagtggtgtcgtccgtcctgaatccaactgtctcggagtcaagagaacgccaacccggctgaaggggatgagcctccaaagtcagccagactcggcaacgaggtacccgatgctcctcatacaactgcaccgtctacaaagggggcgtagggtaaccggcggagttaagcacttcccacaagatggaaggaaagccatcgtgagaaagaaagtcagagctgaaacgagtgtctcctccctggcgggggtgggtgaattcatccgcgaaagggtatcaaagtacaagaggtcaagcagtctcattagctgcgagaagcagacgattcgaatcgagtttttatccttgcaaggcgggcggccgaattccggcgagaacgatcttggttttctggtgaagttctgccgggttcgagagcttgggaagcttcacaagctattggcaaagctaaccgagcggctggcgcggcttggaagtgaccggagtgggctggccacggtggacgaggctcaggtggcaatggcgggctga

SEQ ID NO: 37761 - DNA, 479 bp, Zea mays
  Peptide Sequence Number=SeqID_81136
ttcccgcagcggaggaaagggcagaggggcttaccggcggcgatactgctccggctagggagctcgtcggcggcgaggagtccggcctaaccagggcacaattgatcaatcaaatgggtcagagagcttcaccagggatcaaggaaggcgggcggccgaagtccgacgaggacgatcttggttttccggtgaagttctgtcgggtccgagagcttgggaagcgtcacaagctattgacgaaggtaaccgagtggctggcgcggcttggaaatgaccggagtgggctggccacggtggccgaggctcgggtggcaatggcgggcggaagagagctcgccggagctaaggaggggcgtctggccggcgaagggcgtgcgcgggcgaacgccagtgcgcgctctggcgcctggcacggcgtcgtgcacgaggcagcgcagagagaggtcgagttcaagcgcggattggctccaaatctttga

SEQ ID NO: 37762 - DNA, 969 bp, Zea mays
  Peptide Sequence Number=SeqID_81137
atgtccttcgcctccctcatcacctgcgagggggccgtgaatgccttgtcccatgaggggtgcaggcacttcgaggccttcgaccagtctgacgaaggcttcgagcacgaaatcttccaggtcgaggacccggtgatgaagcggtcggctggggctctttttgataggatgtggggccctcacggccgagagactgcccgggagaggtatgactgggcgatggatcagatggcacatgacgaagaggttgaggaccttggtgatctggacagcacgctgcccgaggcatcgggggtggagttggcgccaccatccgatgtaggcgagggcccctcggcaaccctcgcaccgactggagctggcgaagaccccacgccagctaccgcactgacgggtgcggacgccctaaaggtggtggccgaaccagctgccgaagacccagggccttcgcaggttctgacgtttgggcctgcgcaagcaaccgctgctgacaatactgattttatggcgacctcaaccgtagtgcctgccgatgattatttgtttggctctgtgactgagtgttttgagtctaatgatgaatctgggagttccttttcttggacggaggagtcctcggatgaaggcttggattattttgttgcattagatgtggctgcagcggagacttcgccacgtgtggagggtttcggggatcttcctagtgcgagtactgggtataggcggcgaagggtggtggcgaaacacagtgtgggtgaattttcgcgaagtggtaggcgccgtcgtatggggatggagcatggtcgtcttcgagtggaccggattggtaaacaagaattgttgtcctcgctgattggggcgagcataggtgaaggggatctgcgaaatctttttgagggtgaggaattgaggataatgctgtttaattacagggagatgggtatcatcccgaaggttgagccgatgtaa

SEQ ID NO: 37763 - DNA, 738 bp, Zea mays
  Peptide Sequence Number=SeqID_81138
atggtgaggtcgccggagttgaggcaggcacgggctagggtggctccggggtcgccagagttgggaagagaggaagaggacgccacgacaaacgcaatggcagggaagaggccacgaatccacgggcagagaggggataacggcggtgagaaggtctcagacgggcaggagaaactccgggacgagtgtcttacctcagggcggagctcggggaggcttggagcggtctctggtgagctggatggccgggaacacgacagcgggtctccggcggtggctggcgacgtgtgcagagcgcgagagagggtgaagctgcgcaaaatgaggcgagagatggtgcacactctccagactacccgtgtgaacaccacccgtgtccctccacctcagcaggatccttcgtacccggttgtgacggaagaagtccctgtggagttgcactaccttactgtaaggaatggtgtgatcttggaggacagttctgaagagattctagcgacacctactccatacccagcacctcatgcatttcctgctgaagcttcttcttcagcactacctatgctagtaactcaagcctctacttttggaggtgatgatcctgatgattctggtgatgatggaggtgacgatgatgatgaagaggataacaacgacaacaatggtgatgccaacaacgaacatgatcaagatgatgattttgttggaatgtggctattgtggagcactacactttga

SEQ ID NO: 37764 - DNA, 1020 bp, Zea mays
  Peptide Sequence Number=SeqID_81139
atggctcgtatcaggtgcactgcacgtaagtctgtgatcccctttttgccttcccgcctggtggagcgtcccctgcgtcgcacggtgtcaggtcactccagtcagctggagaggctgcatcgtctcctgcacgagaagcaggagcgtcgacgccaggagcaggagcaacaagactcttcccccttgcctcagcaggaggtggagtatgagagaccaccttcccctgcacctcagccagagatgccccctgcaccacttcaaggcatcccgactgctggaggagaccctgacggagacggagacgacgacgacgccagtggcagttcgagccatgacacagagctttcagaggagccagagccggagggatggatcgctcgacccatcactcgtgacgccgctcgcgggtgtcacttccacggcgctctcgatacccagctgcgtcgggccttcgaccgtaacacttggtccatcgagtaccgttgtgtagtctaccagcatcatcgcgggttatacccggaccagtgggaggctacttgcttggtgcgccgtccagacgatgatctccggggtgcagaagccttctcagagtactattctatcactgagagggatactgctgaggcagccatgcaagatgcagcacgaaaggcactttctcagtattgctcgttgttcagcggggtagctgatggccttgacgtgaagtactaccctcgtcgttcgaccggcagggctggaggtgtgattgtctcgcctgttggtgagggcaatcccaggctgagcaacatggtcaacttggtcgccgtgctcaacacagagttggaccacgcccttgacgagttgggcaaggttcgggcggaggttgcgaaattgtgtgctgagtgtgtagcacgccactatcttgatggtggttctcctgcccttgtcaggattcagcacccttactgttcaccgccccgtggtcgctttgactatggtaccccagactgcaggacccggatagatttggatccctag

SEQ ID NO: 37765 - DNA, 174 bp, Zea mays
  Peptide Sequence Number=SeqID_81140
atggagagtcatgatctccgggcagaatgggaatcacggcttgtgggtggctatgagatcgatggttttggttatgactatggtgctggttgtcagcattgcaaccactgctcaggcgaagatgaagctgtggaaggagatttccaggagttccaagactacgacgagttctag

SEQ ID NO: 37766 - DNA, 363 bp, Zea mays
  Peptide Sequence Number=SeqID_81141
atggtcaggagcacctccagctcctcctgtagccatccaaggaagcgggaggcccacctcctgaccgggcacttcgaagggcgcggtccgcgcacccagctcccagtacgcgtccacaagcggagtatgcgtctgctcgacctccgcacgcgtcgaggcctccgtcttgtccaggcggtcgcgcaggctgcctcgcctcgcctgcagctcctcggcgcgttggcaggcaagactggcctccgcccgcgcaagcttggcctcgacttgcgtggactgcgcctcagcgcaagctttgtttgcgtccctcctctcctccgcctaccgatgcctgaggtcctccttctcagcctccgcagccgctag

SEQ ID NO: 37767 - DNA, 1056 bp, Zea mays
  Peptide Sequence Number=SeqID_81142
atgtgctcccactgttatgtggcatttccacaatttgaggtggcggaggatgatgaggacgaaggggccctccggtgcgctgcccgcatgagtagtggacgtgatttggttgagttcattggttatggagtgtggcccctggcgcatggctgggtgctgggcgaagtatgccctcgccagatgcctactttgggccagcagttggtgcgaagtccggccttctctttggatttgcacggtcgagaccctgcaacattcgttcgtgaggtggaggacggggcggtgaggattgtggggcggtatgcgccaaggacggagagtctgcgtagttgggatatccgagggtccaacgttcgcttgaatctggtcttcgaattaaactgtttgccatatggtggctaccctggagatgacgctgctgcggctgctgaccgccgcgggaaaaaactagtggtcgtggctaaggaaggcccttcgcgggaggctgccccagccgctaagaagagaaaaatagcagtgatggataaggatcgtcaagatgcggcacagaagcgccgggcattcactagggttggggaccctatgcgcgaggtgaagcgagcgcggggaggcgcgaagtccattgcccctggcggcagcaaaccaccgccggcagcgaagcctgccgtccccgggcccagcaagtcttcggcgggttcgagggctgccgcttctggcgcgggcaagccgccctcgactgaacccgcgaaggagcgaaggcctccgtccccggtgcgcaccgacaaggcggcggcgggtggtgctaattttgatacggacatctgcgtggatgattacctcgttgggttggatgcggagcagctggctattgtcccatctccggtggtggccccttcgcctgtggcggcggttggagcgaagggcacttcgcaggacccatggtccaaattctgcgctagcggcaagatctcgttggccgccgccgctagggacgtggcaggcattgtgtcccagcagctgaagcatgcggccgccttcgccgaccatgttgcgtag

SEQ ID NO: 37768 - DNA, 189 bp, Zea mays
  Peptide Sequence Number=SeqID_81143
atgtcaacacagtacgctcagtataacttggggctacatgagtttctggaccagatgttgagaatacagaagctagcaacctatgagcagtaccacccggagctatatgaagataaattccatgacaagttcaagcgccacatgggcatggttgggaccgaggaagctgaggacaatgcagatgaataa

SEQ ID NO: 37769 - DNA, 363 bp, Zea mays
  Peptide Sequence Number=SeqID_81144
atggctcaccggagtttctccggcacgcccgaggctttctcaccgtcgttctcccctctctgtccgtggattcgtggcctcttccccgcctttgagttcatcgtggcgccctcttcctctctgcccaactccagcgaccccagagccaccctagcccgcgcctgcctcaactccggcgacttcaccgccgcagagaggagaggcgccgcccacagccgtctgtttcccaagtctgatctcctccgtccgattcagatcgaacggctcggaccacgggtaccgcttcgcgcacgtctatttgcccgatctgatctcctccttccgattcagatcaaacggctcggaccgcgggtaccgctttga

SEQ ID NO: 37770 - DNA, 153 bp, Zea mays
  Peptide Sequence Number=SeqID_81145
atgaccatatttgataaccatttagataagcttttggaagtcaccgggtgccggaagctgcgggacacggagttcttcacccgccaggacccctacgtcgtcgtcgagtacgccaccaccaagctccgcactcgcacctgcaccggttcgtaa

SEQ ID NO: 37771 - DNA, 453 bp, Zea mays
  Peptide Sequence Number=SeqID_81146
atgactaaggttgtccacattgtaaccactgctcaggagaaggtgaagccgtggaaggagacttccaagagttccaagactacgacgaattctagatggctcgtcttagacacactgcacgaggtggagtccgtgaggcgccgttcctcttttgcccagctggaggcgccccctacaccactgcgggacgccccggctgttggaggagctactggaggaggtcctggaggagaccccaacgacgacgactcagaccacagcacggagtcctctgagccacaggaggcggaaggatgggtcgcccgacccatcacccgtgacgccgcccgcggttgtcacttccacgacgcgctcgacaccttgctgcgccaggctttcgaccggcacacctggtcgatcgagtatcgttgtgtagtctaccagcacagtcgcgggaggtacccggaccgctag

SEQ ID NO: 37772 - DNA, 147 bp, Zea mays
  Peptide Sequence Number=SeqID_81147
atggcccatggtcagtcagatacgacgccagctatccgattaggagaggattgtgcaaaactgctggtgctggttaatagtaccgatgacctggaaattgttattgtcaaagctctgaaacttgatgatgttgaagaaggctgctag

SEQ ID NO: 37773 - DNA, 660 bp, Zea mays
  Peptide Sequence Number=SeqID_81148
atgggcccgggtgtggctgacccagacggtccgcgctcgcgagcggacggtccggacatgtgtagatcggctggtttactgccgatttgcgtttgctcagggagctgttattcagccggcaaggcttcccatgtcggcgtgatgatattgctggtggaaacctcagagctatcctttgaaccagccattgagggccgatttgataggtctatatgtgttgtccccagcggagtcgccaaaaagtatgttgacgcctttttggagcgccaaatactcaagaagaaccggcggcggtgctctctggtcaggggcggacgaggaggggggctggaccatttacaaactaatttccgaacttatcccatgattttagctaacaaccgtagcacaaaactcggaaccctaatctgttctgcgcacgcgcggaccgtccggcccaccggcgcggaccgtccggactgcggaccgtccggcctcagggccggaccgtccgcgcactcaaattggtgctcaacagttatcgagagtgacagaaaacgctacgttaacgacttcggaaacaaaataccattgaatagatcagtgcgtcagagcctaaactgttatcagctcaaagaactttacactgcagagttctccgtgcatcgaaagattcagtga

SEQ ID NO: 37774 - DNA, 360 bp, Zea mays
  Peptide Sequence Number=SeqID_81149
atgccagtaaccatgcatgtagctagctttgggagcacaaaggccgcgcgggcgggcggacgacgcggttgggaggccaaaggctgggccttttttgctgtaccctttgtccgttgcgcttggattggatgctcgccgagatggatggcccaggcccagcggataggccacacatcagccatgcaggtgaaggtggagcagcatgctggttgctggatatgcactagagctagaggagggagaagatggaacttttggatacaagaagatgaccgagaagggggggaaaagagaagaagatgtggacttttggataaaagtagaaatgcagtagtaaaagaagaagaagaagaagaatga

SEQ ID NO: 37775 - DNA, 189 bp, Zea mays
  Peptide Sequence Number=SeqID_81150
atgagggtgaaatgggatgcccttagccaattaattagaggaactagaggtgtagttgcttcgccgtcgtgccgtcaatggggtccaggcacagtgcttgctctgccgaggctgagtgctgagctacgtagtgatcccctgccggaccacctaggtagtggtcaatggggattagctctccccgggtag

SEQ ID NO: 37776 - DNA, 876 bp, Zea mays
  Peptide Sequence Number=SeqID_81151
atgcaggcggcatgcaaccgcgccaagtgggtgcacctctccgacatccagcgcgcccagcatggaggcccaggcccacgcgtcatgcaaccagcgcaccggatgctacgtgcgagcaactgcaccgccactcgcgccactgccacgcctcctcgactgcgaaaccagtaccgcgactcgaggcaaccctacgcacgacccagcagcgccaacctggcgcggcggagaagcaagcgatgcttcaccttcaccataatgaccgcgtcaaaagaggctccgagcctccctactgatcagaggttcgaaggctggcccctcgaagggttcaacaaccgcctcagagcgcgtgggctccacacccactactggttagaggttcgaaggccgaccccttggaagggttcaacgaccgcctcaggctactcgggctccgcgcccactactgatcaggggttcgaaggctggccctcgaaaggggaccgggtccggcagatcacccgcaggtacttttgggcgcgcctctgggcccctagccgacccctagcgaatggggcacggacgtccactcggattacccaccagcagctcaccgaagacaccatgttcggcgccctccgagggcaacatggcgctttccccctcctccttgcggaaaggcgacgcaggggcgtatgtaaaaaagtcgagtctgtccttgaccgtcctctcgccctgtgcagaggctcgggggctgctctcgcaaacccggctctggccaaacagttgacagcgtcaacataccagcccgagaacttgggacccgaccgtgcacccgggctacgaccagctcgcatgagggaacgaccagaccagccaaagcattgcgcgaggcattaa

SEQ ID NO: 37777 - DNA, 2898 bp, Zea mays
  Peptide Sequence Number=SeqID_81152
atggaggagcagccggtggctaaaattttggctggctccgcgggcgcacgtcgtttagcgtttccgctcgccttgggaccttgcccctggccctccgagatgccgggaccggccgtggaggcagcggccaggggcggcggctgctgcgggaagacggccggcaagtgggagaagacgtacctggatgtcctgggcatctgctgcaccgctgaggtggcgctcgttgagcggctcctggcgcccatcaacggcgtgagggcggtcaccgtcgtcgtcccctcccggaccgtcatcgtcgaccacgacacggccgccgtctcccagttccacatcgtgaaggttctgaacaaggcgggcctcgaggcctccgtccgagcctatggcagcagcgccggcgcccccgggcggtggcccagcccgttcatcgtggcctgcggcgtgctgctcgcggcgtccctgttcgcgccgctcctccctccgctgcggtggctggcggtggcggcggcctgcgtggggtcccagcccatgctgctgagggcgttcgcggcggccggcaagctcaccctggacatcaacatcctgatgctcatcgcggtggccggggccgtggcgctcgggagctacacggaggcgggcgccatcgtgttcctcttcaccgtggccgagtggctggagacgctggcgtgcaccaaggccagcgccgggatgctgtccctgatgtcctcggtgcccaagaccgtggtgctcgccgagacggggcaggtcgtcggcatgggtgacgtggcggtcggcacggtcgtcgcggtcagggccggggacgtggtccccgtggacggtgttgtggtcggcgggcagagcgaggtcgacgagagcagcctcaccggcgagtccttccccgtgccgaagcaggcgcagtccgaggtctgggccggcaccatcaacttggatggttacatctccgtgcggacgacggccctcgccgagaactcgacggtggcgaagatggagaggctggtggaggaggcccagaacagccggtccaggacgcagcggctcatcgactcgtgcgccaagcactacacccctggttggtacgacgaccgcgccgtggtcgtcctcgccgccggggtggtcctcgtgcccgtcctgctgggagctcccgacctggagcactggttccggctgtccctggtgctgctggtgagcgcgtgcccgtgcgcgctggtgctgtccacgcccgtcgccaccttctgcgcgctcctgcgggcggccaggatggggctcctcgtcaagggaggcaacgttcttgagtcgctgggcgaggtcagggtcgccgcgttcgacaagaccgggaccatcaccagaggcgagttcagcatcaaggacttccttgtggtgagggacaaggttcaaatgagccagctactttactgggtatctagcatcgagagcaaatcaagccacccaatggctgctgcacttgtcgagtatgcccagtccaaatctatacagccgaagccggaggacgtgactgagacttgcatctaccatggcgagggcatctatggggccatcaatggaaaacacatctacatcggaaacgaaaggatcatggcaaggaccggggcggccgaggcgatcttgcagctgcgatcaatggggatcaagtcagtgatgctcaccggggacagcgaagcggcggccaagcacgcgcaggagcagctcggcggcgtcctggaggagctccactcggggctcctcccggaggacaaggtccggctcatccgggggctccaggcgcggcacggggcgacgctgatggtcggcgacggcatgaacgacgcgccggcgctcgccgcggcggacgtgggcgtgtccatgggcctgtccgggtcggcggccgccatcgagacgagccacgccacgctcatgtccggcgacgtcctgcgggtgcccaaggccgtcaggctcgggcgccgcacccgccggaccatcgccgtcaacgtggcctcctccgtcggcgccaaggccgccgtcctggcgctcgccgtcgcgtggcgccccgtgctgtgggtggccgtgctcgccgacgtcggcacgtgcctgctcgtcgtgctgcacagcatgctgctgctgagggacgcggcccgcgcgcggcggaggtgcggcggggcgtccaaggcgtgctgtgctacggcgtgcaaggcgcccaagacagcgtgctgcgctacggcgtccaaggcgtgtggcgcgacgacggtgaagcctgtggccacgaggccccagcccgcgggcgcagggaagaaggccgataggccaggaggtgacaagcatggtaatggtaaagacgactgccatcgttgctgccacaagcagagcaagctgcccgaggacgccgtcgtgatcgccataccggtacgagccgtggagcaccggaaggacgcggccgctcacgagaaggcggaaggcaacgccgccgggggatgctgcggtggcgctcccgcttcggccgcgtgctgcgcggaagcacacggtggcgaggacgaggtgtgcattgtcatcagcgcgaggtcgccctgctgcagcacggcgaggagtcggtctgcttctcccaaggacgccatgtgctgcggctccggtggtaaagacggcggcgccatctcagcccttgagcacgcgggtctgcgccccacgctcgcggggcttgagcacaccaacaagagcaccacatggaactggagcacgcccaacacctcgtggctcgactccttgccaaagaatactgcgacatggggctttactgcaagcgcgagggctggaggggtgggcgcgcgagaggccatgggttttggtgctagtagtggcaagtggggaaggagcaggcatgctgacgagtag

SEQ ID NO: 37778 - DNA, 378 bp, Zea mays
  Peptide Sequence Number=SeqID_81153
atgaacaaaagatcggcactcaaggtgccattacaaacggaactccggttccacctccgcaggtacgaacaaccccactcgatcggggggcctgcggagcgacagaagaccgacgaacggcacgccgtcgcccgctccagcagcggcgacgacgacaacttctgctccggggggctgaacagcagcagcgatgacctcagggcggatgctgctgccaggaggcccccgcccgtgcccaaactcgtgaggcaaggacgggcagaaggccgtagagttggagcgctggtgatgaaaatccttgaggctgagggaggggcagaggccgcagcccggtttgctttccgccgccgtcgaactggaggtcaccgtcttgggtga

SEQ ID NO: 37779 - DNA, 213 bp, Zea mays
  Peptide Sequence Number=SeqID_81154
atgggtcggcgcgaggccgagcgtgaaggggggagaaaggtggctggagacgggcgtgagagtggtggaaatcccacggccttcgtgttcgtcccgcgcccaggtcgggttgggcgatgtggaggctcctccgaggtcgaggtcgagtctgtcttccgtggccgtggtcgagtccgagcccctgggtcgggcgaggcgaagaccgtcggctaa

SEQ ID NO: 37780 - DNA, 777 bp, Zea mays
  Peptide Sequence Number=SeqID_81155
atgtcttcatttcggcgaaatgggagttcaaagtcgcccttgccgggcctcggaccatccgccaggctgggcaagcttaaaaagttggctacacgtttcaagattggggtatccaagcgccacagatctgatcaagatgttgattatgatcctataaattctgaggcacaatcctctgtagatcgaagtttctctacggatactaaggatactcttctcttgcacctggatatggagattgatatcactaggtggacctttcccaaacagagattctcggctattgagtatgcatctagaaggacagtgaatcagtattttgtccaccaatgcactaacatccaattctttcatactcaactgcaatttgaggggctgattcctaaatttcagacttgtggcttatatgaatttatggggcagaacacccactacaatgagatggtggttagacagttcttggccacatttgatattgacatagaagaaggggctatcatctggatgatatgtcacataaggcactctgctacctttgctgagtttggggcatcaaatagcctggactataacttgatctcaacaggcattgatctatgcactgaagacatctttgaacactatgagcagtattgtgagcctgtgaggcttggtattccaaggacgattggagagactacaggactcaagcaccaccctgctgtcatcaataagattgcaagggtcactattctcccaaagcgtggagataagagcaggaccatagacaagttttag

SEQ ID NO: 37781 - DNA, 204 bp, Zea mays
  Peptide Sequence Number=SeqID_81156
atggcgcggccatggcggcccgccatgatccacggcgtcctcgctcgcccgccccgacgtggcaatgagattgatggttcttggtttttgactctggtaatgccaaacaggacgcttgctgagtatgttgatgtgtactcacccttgctctacacaccaaccccccttccccaggttgtccgcattgcaaccactgctcagtag

SEQ ID NO: 37782 - DNA, 270 bp, Zea mays
  Peptide Sequence Number=SeqID_81157
atggcgcggccatggcggcccgccgtgatccgcggcgtcctcgctcacccgtgctcgcccgccccgagaacgatccggttgaagaacccgaagagctcgcaggagaagaccctgagcagcagtcggttggtggaggcaagtggcaatgagattgatggttcttggtttttgactctggtaatggtttgtccgcattgcaaccactgctcaggagaagacgaagccgtggaaggagacttccaggagttccaagattacgacgagttctag

SEQ ID NO: 37783 - DNA, 312 bp, Zea mays
  Peptide Sequence Number=SeqID_81158
atgacttcgctcggcgatgccgctagcttgggcggttccgagctgcagccttggagaggatcgaagacccggcgccctagagcgaagagtcccacgcacaggcgaggaccgcgatgtccattggtgaggcccatgctgcgtcctgctgaccatttaggcccatttgtgatgagggacgaagagatcgaggacctcgttgtcttggagagcttaatggctacgcaggatgctggtgcggaggcagatacgaaagagcagtcgtcgcacgcgagggtcgatggtaccgaccttggagtgacggggatctcgtag

SEQ ID NO: 37784 - DNA, 471 bp, Zea mays
  Peptide Sequence Number=SeqID_81159
atgccaagctctacaaggaacataccaaaagatggcatgataagtgtattaagatcaagacattcaaaccaggagacaagcaagtaccctaggattacgacttgccgctggccaaccgactggctgtcatggctgctcgactaccatggtggccacccagatacgcctcggctgactagccttcctcaagggcgcacaaatacctcacgtctttctgacagtgtggccgtaaatgcatcagttgatgaatccatcaaattgacaccacctagaaggatggtgaagagggtgttgcaatcaccctctatcaagggatcttcaagagagtttgaagattctaacaaggaggaagtcacaatggagtccctgaaggcagagctcataatgcttagagcaaaatttaatactgttttagagcgttgcgtagaaggagagctttggtgcatggatcttgaagatagagacccttaa

SEQ ID NO: 37785 - DNA, 831 bp, Zea mays
  Peptide Sequence Number=SeqID_81160
atggccggccccgtctcctcagcgccccggaccgtcgaggacatctacaaggactacgccgcccgccgcgccggcctcgtccgcgctctcacatctgatgtcgacgggttctacagcatgtgcgacccaggtaataccggatccgatctgagccgcagcgctttggttgcgctccttcgctcctgcctctgtttggggtttggtagtttgactggtttcctcggggttcgtgcagagaaggagaacctgtgcctgtacggtctcccgaacggcggctgggaggtatcgctgccggtggaggaggtgccgccggagatgcccgaaccagcgctcgggatcaacttcgccagggacggcatgaggcgtcgcgactggctctcgctcgtcgccgtacactctgacgcttggctcgtctccgtcgcattcttcttcgccgccaaactcaacggcaacgacaggaagcgattattcaacatgattaatgatcatccatctgtgtatgaaataatggctgaccggaagggaagggagaataatcctggtgttgataacagcagcaaatccaggcactcaacgaagcgatcaaatgatggaaagataaagaactcaagagtggcagttggtgaatgtaggtatgagaatgatgaagaccacagcgaaaccctttgtggttcttgcagtggtctctacaactcaagtgagttctggattggatgcgacatttgtgagcggtggttccacggcaaatgtgtgaggataaccccagcaaaagcagaacagataaagcactacaagtgccctgattgcagctacaaaaagagcaggcaataa
